United States Patent Application Publication US 2026/0092266 A1 - sequence listing, part 14

SEQ ID NO: 2247 - DNA, 24140 bp, synthetic construct
  misc_feature 1..24140: note = Synthetic
  variation 16322..16458: note = n is a, c, g, or t
  variation 16719..16842: note = n is a, c, g, or t
  variation 15993..16104: note = n is a, c, g, or t
  variation 17613..17735: note = n is a, c, g, or t
  variation 17410..17544: note = n is a, c, g, or t
  variation 17804..17911: note = n is a, c, g, or t
  variation 16523..16651: note = n is a, c, g, or t
  variation 16910..17038: note = n is a, c, g, or t
  variation 18131..18258: note = n is a, c, g, or t
  variation 18325..18379: note = n is a, c, g, or t
  source 1..24140: mol_type = other DNA
gactggtgtccgtggtgtttgtaatttgaaaaggactattaatacaagcattaccaaatgtaaacccaggttgtaggataggctcaacacaaattgttctcgaagttgaacctccagagccacaaggtgtttctgctgtgagcgttatagtgtaatttcctggtgttgaataaacatggttgggattcacctgtctagaaacgggagaaccatctccaaaatcccaagtgtaaacattttgtgtgctacagtcattagtgaatcctgcaatggttgtattgttaaaagaaactgaggaatttgcacaagctatattaggtgctgtaaaccctaccgttggaacgtctaaaataactacaggtccagccgttaatattgtatccccacaagaagtgctaatggttaaggtaacaatgcttctgcccggacaattaaatcttgtataggtgtgtggtattgggaaatctagtgaagcaggtgggttggctgcgttgtaataaatggagctctctaattgtccctgagtataagaggcagtactaccatctccataatttacaaagtaattcgtatctgaaggattaagtgcccatgagccgatcgcaaaattcatttgctgaggaggaacacaaaaattagtggtattccctggtgcaattagagctcctatgggattattagaatttttaacaacgtaagttattgaattattacaaccgctagatccaatacctgttatcgtcatgttaaaagatcctagttgcatataggtatgcatcaacggaaatgtaacgttggtttcgctattgccatctccccaatcaatattataggacgttatacatgagctagatgcagaattgtttcctacattaatggtatattctgtatccgtattattgtctccgcatttttcaaacggagcgttagagttagatggagcgtttaagttgataaaatctaaactaggtttttcttgaaccgttacaaatttgttaattacggaagaaatattatttgcatctgtaacggtaagggtaacattgttgttttgaataccacaacctagattaatgaaagtatgtgttgggttgctctctgtggaggtattaccatttccaaaatcccaattataagaaaacggcccatcgccagttacagttggagtaaacgttattggtgtaccagaacaggtgttatcattagtaaaggtaaaatcaattgatggcgcataattttcttgtttaaagaaatctattaaattagtgtttttaagatgaaaatgattgcttaagccgaagagtgctataccaagaaaagtggaaaatagacacgtaagaaaaaagatcttcctcatatagtaggattacgataaaaaacattaaatataacattttattaacgtaagtttaatcttaaaagataaaaagtaataaatttcgactatgagcattcatttatttatatttaataaaaattttaaatgagagcattagtaatttctggaggaggtagtaagggcgcctatgctggaggtgttgctcagtacttaattgaagaagatggtagaaattacgatatctttttaggaacgtctactgggagtttattagtaccgcatttagctgcaggaaaaattgataaacttcatgacgtttatactaatgtgaatcaacacaacattttcagtgtaaacccttttgtaattagaaaaaaaggtaaacgtgaattcgtttctatagcatttattaacacgctttggcaatttatacgtcaaaaaagaacttttggagagagtaaaaaccttaagagacttataaagagaaagttcactcaagaggattataatatcataaaagctacaaaagatgacgttgttgttacggtttctaatttatccaaaaatagggtagagtataaatctatcaacgatttcacatatgaagagttttgtgaatggatttggatttcttgtaattatgtgccctttatgtctcttgttactaaaaacggacatgaatatggcgatggtggtttaggttgtgtagtgcccatacgagaagccattcttagaggagcaacagaaatagatgcaattgttttagaagccgagtctttagattataataaagtgcttggtaagaatcctttttctttaatgataagtctatttggttttgctttagacagaatggagcgtaacgatattaccattggaaaattagcagcaaaagctaacgatgtaaaactcaatctgtattacacctcttcaaaacttaccgaaaatgctttgatttttgataaaaaattaatgacctcttggtggaaacaggggtttgactatgctaaactaaagtgcgaagaagcaagttctaatgaattacgattagatgaagactaaaacaactcagagacttcttgtttaaccaaggctaaagcggcatcactaggagattcacgttccatcatttcggttaaaatcacctctctaagcttgtcaggagtatcggttttctccaataaactggcttttctaataaggtgcattgtcgcatttttcgcagcaattataatactccaacatttatcagttacataaatttgctgagataaattgtgttcaaattcttgttctatactttgaagcaataaggcttcataagcatttttatcttcagacataggttttaccctaattaataatttagcaggggtaatacgctcaagaaacaaagccattctttcataggcttgtaaacgtcttggtaatgcacttacttgtaagtctttttttagtagaaaaattcgcctattatcttcatttttaacatgagttttaaaaaaataataagcaatcatacctgtaatcaatgtaggtatggcatatagaaataggtctagaattctatctatatccatagttgttaagacttagtggttttgtttcctcccaaatatacacaatcttttaaagcctgcattccagaaaaaggaatgggatctttctcatacatgtaagttctgcttagttctttggataagttatgatcatcaacattcatctcaatatcactcatggaaaattggcaagggtgttcatgaccagcggcatgggtaatttcaacaagttcctttttaaatgttttgaaatactgagctaagcgctcagattttaatggcacattaataccgttttgtaaccatttcttttgtgttgcaacaccagcaggacaacggttagtatggcaaatctgagcttgtatacacccaatgctcatcatggcttctctggcaacgttaatacaatctacacccatagcaaatgccatggcggctttagcaggaaatcctaatttaccactacctataaatacaatacgttctgttaagcctttatgcttaaacagcttatataaatcactaaacccatatacccaaggtagggaaacatggtctgcaaaacttggtggagcagcgcctgtaccgccttcaccaccatctacagcaataaagtctggacctttaccagttttaagcattaaatcagctaattcttcccattgctcaagttttccaatggctgcttttataccaaccggtagtccagtggcctcggcgatagcttcaataaaatcaaccatttctggcaccgttgaaaatgcagaatggttaggaggtgataatacatcctttccaatttcaacaccgcgaatactcgctatttctttggttattttttttcctggtaatacacctcctttaccaggtttagctccttgagacaatttaacttcaatggccttaataaatggattttcttcaaccaactttttcattttttccatagaaaagtttccattttcatctctaacaccaaaatatccagttccaaaatgaaatacaacgtcaccgccgttactatgataaggagaaagaccgccttctcctgtattatgataggcatcggcaattgctacccctttatttaaagattctatggcttttgcagataaggaaccaaaactcatggcagaaacgttaataatagaggcgggtctgtatggttttttacgtttgttataagcaccaatgactttggcgcatggtaaaaaggttttatcaatagcatgtggatgccctttttccaccttgtacggcatcatagcattatttataaaaatatgctggtgctcaaaaatatctctgtctgtaccaaaaccttcataattgttttcttttttcgcagaggcataaatccacccacgttcaatcctgttaaaaggtagctcctccctgttgtttgcaacaaaatactgtcgcatttccggaccaatgctttctaaccaatagcgcaggtgcccaacaatagggaagttatgactaatagtatgctttttctgaataatatctcttaaagctacaagagccaaaacaattaaaatataagcccaccaagggatatttgataatattgaagttaaagtatccattatatctttttcaaattttgaagctaaatatatttaaaattttgttcataattatttataaatccgcttaaattagaacgaaacaatagttaatttcaccaattaaattacttgtagattttggagaaatatttaagtcagttaaatgatgcgcaattagcaccaactattcaaatagatggtccaatgattgtaatagcgggtgcggggtctggtaaaacacgtgtgcttacttatagaattgcctatatgatgagtaaagatattgatgcctttaatattcttgcattaacctttaccaataaagcagcgcgtgaaatgaaagaacgtattgcaagtattgttggtagcagtgaagcaaaaaacctgtggatgggaacttttcactcggtatttgcgaaaattttgcgtattgaagcagatcgccttggttacccaagtaacttcaccatttatgacacccaagattctgatagattgataagagatattatcaaagaaatgaatctagataaagatatttacaagtacaagcaggtgcggtctagaatttcatcttataaaaacagtttaattactgtaagagcgtattttcaaaatccagaacttattgaggctgataccatggcacgcagaccccgaatgggagatatttacaaagcctatgtagaacgatgttttaaggcaggtgcaatggatttcgatgatttactattgaaaacaaacgaactattaacacgttttccagaggtattggcaaaatatcaaaatagatttaaatacattttggtagatgagtatcaagataccaaccattcgcagtatttaatagttagagcattgtctgataaatttcaaaatatatgcgttgttggtgatgatgctcagagtatttatgccttccgtggagcgaatattaataatattttaaatttccagaaggattatgatgatgtaaaggtgtttcgattagaacaaaactaccgttctactaaaaacattgtaaatgccgctaattctgtgattgataaaaaccaaaccaaactagataaggttgtgtggacagctaatgatgatggtggtaaaattattgtacatagatctttaacagatgctgatgaaggccgttatgtggcaagtaccatttttgataataaaatgaatcatcagttgccaaatagtgattttgctattttgtataggactaatgctcaatcacgatctatagaagatgctttacgtaaacgtgatatcccttacaggatttatggcggtttatccttttatcagcgaaaagaaattaaggatgtactatcgtatttaagattggttattaatcctaaggatgaggaagctttaaaacgtgttattaattacccgccaaggggtatcggacaaaccacagtggataagcttattgtggctgctaacggttataacaggtctatttttgaagttatgaaaaacatcgataaaaccgatgttaaagttagttctggtacaaaggctaagcttcaaaattttgtaacgctcattgagagttatcaggttatgaaccagtcggcagatgtatttcagttagccgaacatgtaactaaaagtagtggtttaataaaagagttaaataaagatggtacgcctgaaggtgttactagaatggaaaatattgaggagctcttaaatggtatgcaagattttgttgaaggacaaaaagaaattgctgatgctacaggttctttagccgagtttttagaagatgtagcacttgctacagatttagataatgataaagatgatggcgataaggtgtcattaatgacgattcacttagcaaaaggtttagagtttccttatgtctatattgttggattagaggaggatttattcccaagtgccatgagtatgaatacacgttctgagctcgaagaagaacgaagactattttatgttgcgttaacaagagcagaaaagcaagcgtatttaacttatgccttgtcgcgttaccgttggggtaaattggtagattctgaaccaagtaggtttattgaagagattgatgaggaatatctagatattcaaacaccaattgaagaacgccgaataaaccccatgttgagtgctgatatttttggtgatgtggatacaaacggacacaaaacagaatataacaaagtacgttttaaacctgcaaaacagcctactttgaaaaaaggaggtgctaaaaaagaacctgccaaataccaagcgccaactccagccaaaaatttaaaaccagtatctaaaacaggaggcaacacaaacttgtttgatgggaaacttgctgttggaaatatggtaaaacatgatcgttttggtaccggagaagttctaaaaatagaaggtgctggtgccgatacaaaagcagaaataaagtttgcgggagtaggtgtaaaaaaattgcttttaagatttgctaaattggaggttgtaggttaacagaccttatttcaccatacatacggaattgatattaccatgtccgtcgtattcctttacgctattattgggatcgacaatccattggccatcaacaataaatttataatgatgttttccgccagacaatggtaggacatacttccaaccatattccattttacgcattttaaatttacgcgtgctccaatcattaaatgacccagaaagaattacggttttggcatcagtatacccttttagtttaaatgcggtatatgcctttatatcaataaccgaattaaactctccaaactcattgcgtgttttgtacggattgtctggatcttccatccaatgaccatcaacaataaatctatactggtaaacatcaggtttcatttgcagaactaattcccaacccgtatctgttttattcattttaaaaagggattcatgccacttattaaatgatccagcaagaatgactcttttcgcgtctttgaagccatttaatttaaaaatagcattcccgttttcactagggtgagctgtgtatagtttaagattatatacaccttttaatctcttatccttttttatagcttttgaaatattaggatcagatcttgaaggttctgcccaatagttgttgttaattacaaatttaaattcgtaaataaactcatcagaaaaatctaaaatgctttttttaagttgatagatatgctcgcttactttatgcattttccataggtctctagaccataggttaaagtttccggaaactacaacattatgaatatcaaaatcattaaattctaagatttgtccggtgttttcttgtgtaaatttagagtattcacgagcgtcaaaagtaaatacaacgctgtcgccctcaattttgtaaccttttactatgttattattttgagcaaaggaatttaagttaattaagagtgtaaaaacgaaacttatatatgctataaatgttttcaattgacttttattgggtaatctataaagtacaatttaccctttttgtaattaataatggttcttttttgagcaaaaaattcataccccaaaataccatctaagtcagttccaaaaacttcattcattctaacaagattggtaagcactgtatacataggaccaaaataaattgtttcactcaatttaacccgatgcaatttccctgccaaaacttctgtttttctattaccagcgtctcttaatatgagtcttttcttaggaataaagtactttaaagcatctttatgaatgcgtttattaatttgattaaactcagcagccgtgtcaatacctagtcttacctttttgttattaattgtaccgtttacaacaatagtatggttttttaaatcaaaattaaggctatcaactatcttttctaaatacactttatcatctagtttattcccaaaagcatcaacttttgttaatgttatttgattaaggtgcatatcaacaaaaacctcgtaatcttttagaatgctataaccaataatgcctaatatcttaaccttttttgttttttcaatatgagaaagattaataacatctgaagctttattttccagtttaaaattttgtataacgaactcatttatgcgtctttggtgaatgtcttcaatagcatttagaaccccagatgtgttagaccgttttctttggtattcatataattttggaaagtgatttttgtttaaaatcatactttctgcacctgtatctataataaaattgccttttttgtttagcaattcaacttcaacaaccattaaatgatccacaagcttaaatggtattctggtggtgtatttgtttatgttttcgccattagaaaataaaatagggtttaggttaccattatttccttgaatgaaattggtgtttagaatgagtagtaatatgaaaagtgatttcttaagcatatatatttaagactaatttaattttacattgttacagtttatccttataatttgttaattaagaaaactttaataatttttagttattgtttctaaaacataaccgctatcagtgtttacataaaaaatattggttattttgcatatagattttagattatggcagagtacataaaaatatatgaagagaatccgaaccctaaagagatagataaagtggttgctgttctaaaaagtggaggacttatcatttacccaacagacacggtttatgggttagggtgcgatataaccaatttaaaagctttagagcgtgtggctcaaataaaaggtgttaaattggaaaaatctaatttctcttttgtatgtcatgatttaagtaatttaagtgactacgtaaaacaaatagacacctcggtgtttaagatacttaaacgtgctttaccaggagcatatacatttatacttcctggtgcaaaatctttacctaatccgtttaaaaaacgtaaaacagtggggattagagtgccagaaaataatatagctttagatattgttaaagcacttggaaatccaattatttcgacttcaatctatgatgaagatgagattatagaatacactacagatccagagctaattcttgaaaaatgggacaaccttgtagatgttgtaattgatggtggttacggaggaaatgaaccttctacagtcatagatctttctaacgatgagcctttaattgttagggaaggtaagggaagtttggagattttttaaaaacgtgattaaagtcatctttatttaagtaaataattcttacatttaaacccctttgaattaatagcgatttttataatcgctttttttgttggtaatttttgaaaagcaaaatttctaaaagaaaaaagcccccgtagaaaggcgagggcgtccttaaatgttttcacaacggaataatccttattgtgaattgctttcagtaatgtaaagatataaaaagaaaataagaaaacaactacggtattccgtaaaaaaagtatttgaatttagaataatttacggtgtatacggaaataaagagattaactttcaatgaaaaaaatattaggactagatttaggaactaactctatagggtgggctttggtaaatgaagccgaagataaaaacgagcaatcaaaaattataaagttaggagttcgagtaaaccccttaacaacagatgagaaaacagactttgaaaaaggtagaccgctttctgtcaatgcagatagaacattaaaacgtggggcaagaagaaatctacaacgttttaaacttcgtagaaagtatttaatcaacatacttaaagaacataatattattgatggtgccactttttttactgaagtaggtaagggaaccacccatcaaactttaaaattaagagcgaaatctgccaaagagagaatagaactagaagattttgccaaagtcttgttagctattaacaaaaaaagaggctacaagagtagtagaaaagctgttaatgaagaagacggtgtagctattgatggtatggcagtagccaaggaaatgtttgaaagcaacttaactcctgggcagtacgtactacaattattaaaaaccgataaaaagaatatacctgatttttaccgttctgatttatctgcagaattcaacaccgtatggcagaagcagcaaaccttttaccctgatattttaaatgacgaattatataaggctttagcaggaaagaataaatctcaaacttgggcaatatgtcagaagccgtttaatattgttggtataaagcttgaaggtaaagctaaggaacaaaaacttaagcgttatgagttacgaagtttaggtataacggcacaattagatttagaacatcttgcaattgttctacaagaaataaacaatgatttaaacaaatctagtggttatttaggtggtataagcgatagaagcaaagaactttactttaataaaattacagttgggcaatatttgtatggtcaaataaataaagacccacacagttcattaagaaatcaggttttttatcgtcaggactatttagatgagtttgagcaaatttggaatacacaggcaaaatatcattcaattttaactaatacactgaaagaagaaataagagatgttattattttctatcagcgccgattgaaatctcaaaaacatttaatttctaattgtccgtttgagaaatatcataaggctgtaccaaagtcttcacctttgtttcaagaatttaaaatatggcaaagtcttaataatcttgaatttaaaaacgataacacaaaagaaattattaaggtttctttattagaagaagaaataagacaaaatctatttaatgaattgaatataaggggagagttaaaacctaaagagatacttaccaacttgaaaagatatttagagttgggcacactgactgcttggaaatgtaatttcgaaaaaattgaaggtaatagaacgaatcaagttttatatgatgtgtatcgagacataattgaggccgaaggctacggttttgattggtcaaaaaaatcatcacctgaaataaaggaagaattgaaagccgtcttctctgaaattgggattaaaccagacatattagattttgatcctaataaagaaggagtggtgtttgacaaacaggaaagttatcaattgtggcatttattatattctgccgaagacgatcataaaattagtgaagaagacaaattagtttatggtaattctaatgttgctttaaaaaagaaaataaaagcaaaatatggctttaaaccagattatgctaaatggttggcaaatgttaagttgcaacaggaatatggaagtttatcgtctagagcgattagaaaaattttgccttttctacaaagtggtaatacatattctgaggcttgtgcaatggccgggtataatcattcaaactttttaactagagaagaattaaataatagagccttaaaagccaaacttgagttactgccaaaaaatagtttaagaaaccctgtggtagaaaagattttaaatcaaatggtgaatttggttaatcaggttattacaacttatggcaaacctgatgaggttagaattgaattagctagagagttaaaaaagtcggctacagagcgcaaagatgaattcttgtttatttcaaaacgaactagagagaataatgacattaaaaaattaattgtcaatgaatttggaatacctaaccctactaaaacagatgttaccagatatcgtttatacgaagaacttaaagatttgggatataaaaccgtatttacaaacacctatattccaaaagaaaagcttttttcaaaagaaatagatatagagcatattattccaaaggctatgttgtttgatgattcattttctaacaaaactttggcgtttaaaaaaataaaccttcagaagcgagataggactgctatcgattttatagaaagtgattttaataaggatttagagaactatcaaaatagagtagaatcactttataataaagggaaaggattaattggtaaaggcaagtataaaaagctgttaatgagtcaacaaaatttaacagaaggatttatagaacgtgatttacgaaactctcaatatatagctaaaaaagcaaagttaatgttgcaagaattggtcagagaaccaattgtttcaacctctggaaagataactgataagctaagagaagattgggatttaataaatgttatgaaagagcttaacctatcaaagtatagagcgctaggtttaactgaaattgaagaaagaaaagataataagaagatagaggttattaaggattggacaaagcgaaatgaccataggcaccatgctatggacgccttaacggtggcttttacaacccacaatcatattcagtatttaaataatttgaatgctaggaaagatcaaagtcatgataaatattctaatattgtggctattgaaaagttaataacttatagaaataaagaaggtaagaaacgatttgtgtccccaatgtcaaactttagaatggaagcaaaagaacatattgaatctattttaatttctttcaagactaaaaataaagtagtcactaaaaatgtgaataagacaaaacttagaggaaaagataattatacagtaaaaactcagttaactccaagagggcagttacacaaggaaactgtttacggcaggtctaaacaaccaatggataagcctattaagttaaataaacgtaccactatagaacaagttaatactattattaaccctaaaatcaaacaatatattaaagatcatcttaataagtttgataacaatgtagacattgcatttgatacaaagacattaaaaaaaacaccgttattatttaataatgaaccactaaaagaaatctggtgttttgaagatgtttatactataagaaaagaaatagggccagatttgaaggtagataaagttattgataaaggcattaaagatacacttaaaaatcgattagaggcatttggaaataacgctaaagaagcgttttcaaatttggataaaaacccaatttggctaaataaagaaaagggtatatctattaaacgtgtaactatctcgggagttagtaatgttgaagccttacatgaaaagagagaccattttggaaatctaattttagataagaaaggtgctcctattcaaaatgattttgtaagtacaggcaataatcatcatgtggctatttatatagattatgaaggcaaaattcaagacagggttgtttcttttttcgaggctgttcaacgtgtaaattctggtttaactgtaattgataaagattataatagtcatctaggatggcggtttttgttttcaatgaaacagaacgaattattcgtttttccatccaaagaatttaatccctttgaaatagatttaatggaaaaaaacaatgctaagttgattagtcctcacttgtttagagttcaaaaattctcaaaggttgaatatggtaactccgctgttagagattatgtttttagacatcatttggagactatgattaatgataacaaagaattaagagataccagttataaagtatttaagagtatctcagagtttgagtttattgtaaaagtaagaaccaatcatttgggacaaattgttcaggtaggtgaatattaattgttggttatgataaaacgaacgcttttttttagtaatcctgcctatttaagtacccgcaatcaacaattggtggttaacttccctgatgacgagaaagtggagaaaacgctgcctattgaagatttaggctatgtggtattagagcatccacaaataacagttagtaatggtttgcttatgaagttggtgcaaaataaaactgctgtgattacttgtgataaacaacatttgccatgtggctttttgcaacccttggtggggcatacagagcaaacggaacgtatacggtatcaacttaatgctagtattcctttaaaaaagaacctttggcagcagacagtcactgccaaaatagataaccaagccaatcattttttgtcaagaggtaaaaatgccttacgcctaaaacgttatgttaaggaggtgaaaagtggagatttaggtaaccaagaagccatagctgctgcctattattttcaaaatttatttgatttagagggctttagccgaaaccaaaaaggtgttcctccaaacaatttacttaattatggctatgccattttacgagctattacggcacgagctttagttggtagcggcttgttgccttcagttgggatatttcatcataataagtacaacgctttttgtttggcagatgatataatggaaccctataggccttatgttgatgctgtggtgtatgatattatagaaagcggttgccaaatagaagacctaaatacaagaattaagtcagatttgttattaattcctgctatagatgtggtaatagatggtaaacaaagcccattaatgaatgctatgagccgcactacggccagtttatatgaatgttttgaaggctcgagaagaaaaatattgtacccagagttttagaagtaaccgtttccctcctaaaaaggagggagtaagggaggtgttatatgaataacagattaaatagattaaatcaatacagatgtatgtgggttttagtattttttgatttgccaaccgaaacagtaacagagcgaaaagtagcttctagatttaggaaaaacttgcttaatgatggttttaccatgtttcagtttagtatttatatgcggcactgtccgagcagagaaaatgcagcagtacacattaagcgctctaaaaatgccttacctaaaaagggaaaagtgtgtatcatgcaaataactgataaacaatttggtatgatggagctattccatggacagaaagaggttgaaaaagaaatcccaaaccaacaattagaactcttttaaggcttattatcatgctgaacttggttcagcatcttaattaatgagagtttgatatgttaaaaattgataatcagttatttataaatatagggcaatgtaactatatcattctaaatacttctgaaatctaattgcactttaatttaacgtgagttcgatatattaaaatctgataaccccaactttgcatataataatcaaattgatattgtcattccgaacgaggaacgaggaggaatctcgcttgaatgagatatctcgtcgctcatgcttcgctctgtcgatatgacaaaaccctattttttaatgtttaaatcgaatagctattaattagggatgacaaaacagtaggaggtagtggtactaagtgtaaatatggttcattttaataaattctaaccactcttgtaaaaaacaggataccagctagttatagcaagtatcctgtgaatcatctataaaattacagaactgaaagcaattcacaactaatttataaaaggtcggcaacttaccattcctgtgaatcatctataaaattacagaactgaaagcaannnnnnnnnnnnnnnnnnnnnnnnnnnnnnnnnnnnnnnnnnnnnnnnnnnnnnnnnnnnnnnnnnnnnnnnnnnnnnnnnnnnnnnnnnnnnnnnnnnnnnnnnnnnnnnnttaacgcttaacttattaaaaagaaccctgtgaatcatctataaaattacagaactgaaagcaattcacaacagagaaccttgatacatcttttgttaaatacctgtgaatcatctataaaattacagaactgaaagcaattcacaacagagaaccttgatacatcttttgttaaatacctgtgaatcatctataaaattacagaactgaaagcaatnnnnnnnnnnnnnnnnnnnnnnnnnnnnnnnnnnnnnnnnnnnnnnnnnnnnnnnnnnnnnnnnnnnnnnnnnnnnnnnnnnnnnnnnnnnnnnnnnnnnnnnnnnnnnnnnnnnnnnnnnnnnnnnnnnnnnnnnnagcagtggtacagatacagatacatcaacctgtgaatcatctataaaattacagaactgaaagcnnnnnnnnnnnnnnnnnnnnnnnnnnnnnnnnnnnnnnnnnnnnnnnnnnnnnnnnnnnnnnnnnnnnnnnnnnnnnnnnnnnnnnnnnnnnnnnnnnnnnnnnnnnnnnnnnnnnnnnnnnnnnnnnncagactggagattcaaaaacacagatattcctgtgaatcatctataaaattacagaactgaaagcaannnnnnnnnnnnnnnnnnnnnnnnnnnnnnnnnnnnnnnnnnnnnnnnnnnnnnnnnnnnnnnnnnnnnnnnnnnnnnnnnnnnnnnnnnnnnnnnnnnnnnnnnnnnnnnnnnnnnnnnnnnngcatcagaaagaactcttatatttcctccacctgtgaatcatctataaaattacagaactgaaagcannnnnnnnnnnnnnnnnnnnnnnnnnnnnnnnnnnnnnnnnnnnnnnnnnnnnnnnnnnnnnnnnnnnnnnnnnnnnnnnnnnnnnnnnnnnnnnnnnnnnnnnnnnnnnnnnnnnnnnnnnnnnnnnntattaactacttgcaaaagtttcatgaaacctgtgaatcatctataaaattacagaactgaaagcaattcacaactgcaatgcaagatatacgttttacaagaacctgtgaatcatctataaaattacagaactgaaagcaattcacaacacttcttcattagttcttactggatatccacctgtgaatcatctataaaattacagaactgaaagcaattcacaactgcaatgcaagatatacgttttacaagaacctgtgaatcatctataaaattacagaactgaaagcaattcacaacacgagaacagaagcaccgttaacatcaactcctgtgaatcatctataaaattacagaactgaaagcaattnnnnnnnnnnnnnnnnnnnnnnnnnnnnnnnnnnnnnnnnnnnnnnnnnnnnnnnnnnnnnnnnnnnnnnnnnnnnnnnnnnnnnnnnnnnnnnnnnnnnnnnnnnnnnnnnnnnnnnnnnnnnnnnnnnnnnnnctcttctttaagggtttgaaactttatccctgtgaatcatctataaaattacagaactgaaagcaattnnnnnnnnnnnnnnnnnnnnnnnnnnnnnnnnnnnnnnnnnnnnnnnnnnnnnnnnnnnnnnnnnnnnnnnnnnnnnnnnnnnnnnnnnnnnnnnnnnnnnnnnnnnnnnnnnnnnnnnnnnngagttgaaaccgaaccaattatattacccctgtgaatcatctataaaattacagaactgaaagcaattnnnnnnnnnnnnnnnnnnnnnnnnnnnnnnnnnnnnnnnnnnnnnnnnnnnnnnnnnnnnnnnnnnnnnnnnnnnnnnnnnnnnnnnnnnnnnnnnnnnnnnnnnnnnaacgtgaatattttataaacttaaatcaacctgtgaatcatctataaaattacagaactgaaagcaattcacagcatacccttttgtgttttactaaaccaagccctgtgaatcatctataaaattacagaactgaaagcaattcacaactaaccgttattatctgctacgtttggattacctgtgaatcatctataaaattacagaactgaaagcaatnnnnnnnnnnnnnnnnnnnnnnnnnnnnnnnnnnnnnnnnnnnnnnnnnnnnnnnnnnnnnnnnnnnnnnnnnnnnnnnnnnnnnnnnnnnnnnnnnnnnnnnnnnnnnnnnnnnnnnnnnnnnnnnnggtgatgctctttataaaacactttttcctgtgaatcatctataaaattacagaactgaaagcaatnnnnnnnnnnnnnnnnnnnnnnnnnnnnnnnnnnnnnnnnnnnnnnnnnnnnnnnatcaaacatgataacaaactaattttatgtaaattcatccatagaactaaaaaactaaattaaaaaatttattacttttatgtaatcttttaagagccttgacttcatagtttcccatttaattttttaaaataatcacaaccttttttcagaaactacatcccaaaaatactttacacaagtatgcgtaatatgaatattgtttctatatttgaaaattattaatgcaacagagttgcaataataaaaataggtatgaagcgcagagaagcaataaagcaattaggtttagcaaccgcggcaatggtttctaccttattatgtattcaactgaaacaacgtaaaattaacctaagtatgacaaattttgatgtaattataataggaggtagttattctggactttccgcggccatggcgcttggacgttctttacgtaaagtccttatattggatagtggtttgccatgtaacagacaaacaccacactcacataattttattacccaagacggtaaaactcccaaagaaatatctgaagcggcaaaacgtcaggttttggaatatgaaacagttcattttttagaagagttagcaattgcaggagaaaaagatgcatcggggtttaaaattcaaacgcaatctggaaaggaatttttagcaaaaaaagtagtctttgctactggtattaaggatttaatgccaaatattaaagggttctcagattgttggggtatttctgtagtacattgtccgtactgtcacggttatgaaataagacataaaaagactggtattttggccaatggagagcatgcctaccacttggctccaatggtaaaaaacttaacttctgatgttaccattttaacatcgggaaaggccaactttaacagtgagcaaataaaaaagatgagagacaataatattaagattatagaaaaagagattgtagaaatagaacatcttaatggttacattaaaaacgtagtttttgctgataattctaaggaacattttgaggccacctatgcagcaattccttttaaacaacattctagtattcctgaatcgcttggatgtgcaattaatgatatgggctatttagaagtagatatgatgcaaaaaactactattgaaggtgtatttgcctgtggtgataactgttcaagattacgttctgtagctaatgctgtagccgcaggaaataaggtaggggcagtggttaatatggagttgtcttttgagaatttttagaaattttaatacatgcttatgaatcaatttaaaaaatatattgcaatgtcattccaaatgaccagttgtattttacattttataagaacgtttaatgttttgaattatagcaaacagatacttcgctttacattatgtaggttcacttgcagatgttagctttaaactattaagttttcaattggttatgttagttgtgttctaaacacaaaacataatagctaccataaattaaaaagcccaacgtaatacgttgggctttttaatgttttatttagagaaaactactagttctcagtagaaagtgttttcatttctttttcaatcatgtcatagaactgatcgattttaggtaatacaacaactcttgtacgtctgtttttacctctgttttctgcagtatcattatctactaatggcacaaattctgctctaccagcggcaataagttgtttagggttaacacctaattctaataatactctaatgatagatgtagaacgcttaacacttaagtcccagttatctaataaaggctcttttctataagatacgttatctgtatgtccttcaatcatagcttcaaattctggcttgctattaattaccttagcaaccttagctaaaacatctttagctttagaagttacgttgtagcttccgcttttaaataataatttatcagcaatagaaatgaacaccacacccttttctacattaacttcaatgtctgggtcgttaattccaacttcacgctttaagctagtaactagtgctaaagtaacactgtcctttttagtaagcgcgtcttgtagtctgtttatttttaattctttttctttaatactctcaagtgttttttctacactacttgcactagacgcagataaaacctgtaagttctcattacttttacgtaaatcagctatttgctcttctaaagctttagccctagcagaagcagaagctttatcagctaaacaagagtttaatttcactgtagctgagtttagtaaatcttgagtttctttttgtttttcttgtaacgcggtaaattcttttttagaaacacaggagcttaaaactaataaagaagataagcttaataataaaagttttttcatgataaggttaatgaaatttatataaggattaatatatttagttgatacacaaaaatagttaaaatgatacttattttaagatagttaacaaaacttttgcttactatttacaaactgttataattagtctttttatttacgaaataatcaactacaatggacgtcctttggtaataattcactctttttttatttaagtttcttatttgtaataatttgcttaaatttttataaaaactgaaatgcgcctttataattgcaagcgtgtgcttgggtttaaattcaaacaaaaactttacaccagcgataccatctaataacaatctgacgaaaatcttatcaaatatagtgccagaagcgttttttgtgagtgtaaataaactatttctgaaatttaaataggtttttctcggatttgtattgtttaaggtagctccgccaacatgataaacagtagaatcacctacatatttgatgttatgtcctaagttttttgcacgccagcataaatctatttcctccatatgcgcaaagaaactagcatcaaacccttttaactctttaaaaatacctgttctaataaagaaacaggcgcccgaggcccaaaagatatctgcggtatcgttgtattgtccgttatctttttcaatagtattaaatatacggcctctacagtaagggtacccatatttatcaataaaaccaccagcagctccagcgtattcaaaatacgtcttttgtttgtagtctaatagtttgggttgaattatgcccgtgttaggctcttgttcaaaagtttgtacgataggctttaaccaaccttctgtgacttcaatatcactatttaaaagacacaaaatatcttcctctacaaaaggaatagcatcattatagcccttagcatagccaccattgtctttgttttggataattttgacttctggaaagttagattcaataaaatcaactgaagcatcagtagacgcgttatccgctacataaatagtggcttcagatgaatgtttagtaaccgagggtaaaaactgctctaacaattgttgcccattccaatttaatataacaacggcaattttcattttgtgtaatgcggaatatcctttaaaaaattataacgttcgttttcaaagtccatttgacaataataatgatttaatccgttggttaccattaaaaaactagcttttaaagttaagttgtactgtgcaatttgatcaaaagtattttggctaattgtaatcgccggagctttacattctacaataagatgaatactgccgtccggattaaaaataacgatatcatatcttttttttaaaccatttacaaacaactctttttcaacattaattaatgattttggatagcctttctccgaaattaaataatgtatacagtgttgtctaacccattcttcgggctgtaacactataaactttttgcgaatacaatcgaaaatagaaattttattttcgttacttttgaaacgaaacgaatatgtagggaaattaagtttttgcactacacaaatttagaactattaatgtcacttcgagtgattttcggtagaaattattatcgagaagttctcgatacttgcggtaaaagcctcaactcgaactgacatcactgaataaacaattgcgcttttggacgaagtcaagctactagtaacagacattaaaaacaaaaaactaaaacccatttacttcttaatgggtgaagaaccttattatatagataagatttccgactatatagagagttcggtgttgagtgaggaggaacgcggatttaaccaaatggtactttatggaagggacgttagtattgaggatattgtagggaacgctaaacgatttcctatgatggccgagtatcaggttgtaattgtaaaagaggctcaggatttatccagaactattgaaaaattggctgcttatgccgaaaatccccagcctacaactgttcttgttgtaaactataaatataaaaaaatagacaagcggaaagcgctttacaagacgcttaaaaaaacgggtgtagtatatgaaagcaagaagctttacgaaaatcaggtagccgattggattaggcgcgtactatctcctaaagggtatcaaatttcccctaaagcggctcaaatgcttgtagagtttttaggaaccgacttgagtaaaattaataatgaactagaaaaacttcaaatcattttacctcaaggcactcagatttcaccagaacatattgaagaaaatataggaataagtaaagattttaacaattttgaattacgcaaagctataggagaacgcaatgcaattaaagcctatagaatagtaaactattttgcggagaacccaaaggacaatcctatggtggttaccgtttcattattgtttaatttcttttcccaattgctacatttccatgggttaagcgataaatcccctagaaacgtggcatcggctttaaaaatcaacccttattttgttaatgaatacgtaaccgcagcaagaaattatcctatgcgaaaagtaagtacagtagtggcttcattacgaacttttgatgttaaaagtaaaggcgttggagcaaatgctgttccgcaaggagatttgttaaaggagttggttgcaggtatcttaaattaagtataatgaacgtagatattcacgaaagttggaagccctatttaaatgaggaattcaataaaccctattttactgaattggtaaacttcgtaaaaaacgaatacaaaacacaaacatgttatcctcccggtaaagaaatattcaatgcttttaaccattgccattttaacgatgtaaaagtagttattattggacaagatccttatcacggtccaggacaagctaacggactatgtttttcggtggcagagggtgtacaacatccaccatcactgattaatatttttaaagaaattgaatcggatttaaatatagcgtaccccaagagtggcgatttaacaaaatggtctaaacaaggtgttttactactaaatgcaacattaaccgtaagagcacataatgcaggaagtcatcaaaagaaaggatgggaaacgtttacagatgcagttattaaaactgtaagttcaaatacatctgatgttatatttttattatggggtggttttgctaagcaaaaggcaaagttaattgataaatcaaagcatcacatattaacttctggtcatccgtctcctttaagcgctaacagagggtattggtttggcaacaagcattttagcaaagccaatactattcttggaaatctggacgcatctccaatacgttggtaaaacagtaataacttagcttcctgttggagctaagtta

SEQ ID NO: 2248 - DNA, 24137 bp, synthetic construct
  misc_feature 1..24137: note = Synthetic
  source 1..24137: mol_type = other DNA
taaaactcaacttgctattcacttcccataactccatgatctgatgagattgtattgggtaaggtaaatattcaggattcaaggagaccaaggtaagcgtacttgcatcagggcttttacgaatcttttttaccaacacactatcctctaaaacaatgacatacatgttattatccgtcacttcagataaattggaaatggcttttcctatgacccactctttaggctctaaaacgggcagcatactatccccttcaacctgaaaacctcggtatgtagcattgcgatattcagacaagggtatgttaaacgccggcaattgttgataccactccacatcctgcacattttgtggataccccgcggcagccttcacattcaccaatacaatattctcattatcctctgcatcaacagtcaccacttttggtgctacatccacagcagataatttgatatttttttgttcactctcaccaaacaaccataaaggatttaaactaaattcacgtaataaattagccaccactctaccagaaattttcgtttttccacgttctatatctgccgtagaatttttaattcccagcaccttggcgaattcagactgcgtataatgtttctcctcgcgtatctgtttgaaacgcttaatggtttggttggttgaatgttccataataaaatatatgtttttggaaatgctcgtaacaaatatatcaatttttggaatatttccaattttaacagttataaatttttattttaatggaatatttccataaatttggaatctttacaaaatagaacaaaatgaacgtagtatcaactcatattcccgtcaaagagcaagtagtaaaatattccttgaataatacaatgggtgctcttgatcaactagcccttgcatttactcaaaaagggttttcatttaaaagaaattataaaataggcaattatacttttgacttttaccatccgtcgttgcgtctggctatcgaaattgatgggtacgctcatgaattcccagaaattgtgaatcaagatcgtcctaaaaaacttctaattccttctttaaatcttcatgtgctgcgttttactgatcaccaaatcttggtagatagtgaagaaatttttagagctataaaaacgcataacccattggataaggaaattaattatgtcgtttgatcgtattgaagaaaagttgtctatcctggcggacgcagcaaaatatgacgtttcctgttccagtagtggtgcaaaacgtacaaacgctaccaaaggattaggaaatgctacgaatagtggaatatgccatagctacacagaggatggtcgctgtgtatctttgttaaaaattctgcttactaatcactgtatttttgattgtgcatattgcgtaacaagaaaaagtaatgatattaaacgagcagcttttaaaattcaggaagttgtagatctcacgattaatttttaccgtcgcaactatattgaagggctttttctaagttccggaattttcaaaagtgctgattacacgatggaacggttggttcaagtggctaaaaaattacgcttggaggaaaactttaatggctacattcacctgaaatcaattccgggtgccagcgatgagttaatgagagaggccgggttatacgcggatcgcctaagtgttaatatagaaatacctacgatatccggtttaaaattattagctcctgataaagaccataaggactttatcaagcccatgctgaaagtaaaaaatgaaattattcaatataatacagagagaaaaatcataaaaaaaacaccgaggtatgcccctgccggtcaaagtactcaaatgattattggcgcaacaggagaaagtgatagggatattatgtactcagcttcacattattacaaaaattataatatgagacgggtatattactcaggttatattcctattagtaccgataacaggcttccctctataggttccgaagttccaattttgagagaaaacaggttatatcaaaccgattggttgcttcgtttttacggttttaacgtgtctgagctacttaatgaagaccataagaatttagagttagatattgatcccaaattgagttgggcgcttcgtaatttacatttgtttcctatcgatattaataaggccgacaaacgtctgattgctagagttccaggaattggtatgcagtctgttaataaaataattcaagccagacgttttagaaatctggattggtctcatttaaaagcaattggtatcgcttttaatcgtgctcaatattttataatctgtaattcgcgtgagtttaatagaaaagaatatactgctgatcacttaaaacaattaattcttctaaactctaaaagcaagtatcaaaaacactttgaccaacaattgagtttgttttaatgttcatttactattaatatgctaataaaattattatatgacggaagttttgaaggtctcctaacatgtatatttataatctttgaagaacgattaaacgatttctctattgaaagaaatggagaagctacttctgacctctttggaaattcacaggaggtttttacggatgcaataaaagctgatcgcgtatggaccggttttaaaaaaaatagtacaaagaatcagcagcaacagattttaaaagtatttcttagtgagatcaaagggatggaaaatactttggcgacctactttatccatagttttaaaagtaagaaaggtaagggaaatgattatagtaatccaaccattttaaaaattagtcaagtagccaaaatggttcacagagaaaaacaccgaatggaggctttcgttcgttttcagcatactatagacgatgaatatgtggcgtatgtagaaccggatttcaatgtactacccttgatttcggcacacttcaaagatcgatacgcagatcaaaaatggttaatttatgatgtcaaaagactgtatggaattcattatgatttaagagaagtcaagctagtgaccatcgacatgcttacaaaacctcagcctaagattcatacaaatttattaagttctaaagaatttaagtatcaaaaattatggaatacctactttgaaaaggtaaatatagcttcgagaaaaaacataaagttacatgtgcaacatattcctctaaggtactggaaataccttactgaaaagaccatgattccttaattcaacagtcatgcttcttatattcatagatgctattgtattcctaaataaagtagctgaagctcaattttttaattaattttattatgtatgcgtaataaaattttaaataaataaaataatacactagatttggcgttaaataacccattaactatatctatcaattatgaaaaatttatttttaggagcagtagctgtattattattatcagttacttcatgtaaagaaactgcaaacaaagccgaagaagctggtgaagcaatcgaaaacgcagctgatgaggcaactcaagcagctactgatgctgttcaagaagcagataaagctttagaagaagctggtgatgctttagaagaagcaggtgaaaacgctagtgatgctgcaaaagaagcagtagaagaagctgacaaagctatcgaagaagctggtgatgctttagaaaaagctaaagaagacactaaagatgctatgaatcaatagtcatagtatttcaatagattacaatgaaccatccttgttaccaaggatggtttttttattatacatcaaaactgcacccattctgttttattgagaatacttcctcttttagattctcctttttcatcctttttataataccccatatagaaaaagcctaaacatcgttccccctcctctaaggtaagcagatctgacaggtaatcttttagcgccggactactccaataacaacctacatcattcacctcacaagttaaccacatattctgcactgccatagcaactgctgagacctcttcccattcgggaactctttcctttgggtcgcgctgcatacatatcgcaacaattgtatctgttgctttacatttatctactatttttttatatttaaagggagagaatttatcatcaggagtaatatctaagtaagtattagctaaaaattctcctaatctatccttagcttcctctctaaaaattttaaatcgccaaggttctgtttttttatgggttggtgcccagtttgcattttccaatatttgatcaatcaatgctttgtcgattggcttctcaatatattgggcgggaaaaacagaacgtctttccctaataatatcgttaatatctcgtgtcatctttctgcattattttaatataggcaaactacagttttgaattatcttttgcactcttgaaattaatcttatgaaaaatttaatatatcttaagcttcttccaaatcaaaatagattgatcgatcattaattcgcatccaaataaattcttaaaaaaatctaccaggtaattgttaagctaaaacttatttacgttgaagcaaatattgttgcttaccctgcttaaccagtttataggtatcccttatgtgcgaagcacctcgaacatttaaggagtccgaaagtatgctgagccagtcgcttcggtgtacgattgcattatctaaaattacatcttccaaattggcattgataatatttgtaccccatagctttgcttcagaaagatctgcaccttttaaattggcctgtgtaagattagtattggttaagtctgcacttaacaattcagccctttctagatttgcacggcgcattttagcatttttaagggttgcatccgacaaatttatgccgcttaaaatggcattattcaactctgcccgctcaagatttgctgccggcatttgggcgttgctgaaatcagaaaaatccaatctagcatactttaatcgcgcatctcgccccagattgaccaattttaaatctgtgtagtgaaaatcagcggaatttagaatatcttgagaagattcagcactcaaatcgcttttcaataagctaaacagcaattgtccacgctcaggactaatagggtcctttatcagcgcaccatcatcaatataacgatagggcttcatagccatacataagctgactatacgagcttctaaggttttactaatattacgggcaccggatcctttatactttagctcttcatttaggtcccccaatacatcacccatcaaaaatactaaggatgaccttcggtctgcttcgatcaaactggtttgattattaatgtacttgttctgattatacaataacgaggtctgaaaaatcaggatcaaagagggaactaccgtcataaaaaatgcaaagataccgatacgtgtaaaccgataaatgatatttgatgatacatctgctacggtgtccacagacaacgatttagaatgtttatattcaactattgcgttttgtatacttttttttaatcggattcctaaaagtggaatacttgattttttaagtaaccagaagcccatcttttttttgcgctttttttcagcttcaatttgattaagtctattctggagaatctctttttcattctctaattgtttaatatatgtttcttgggacacagatagtaattttgaaggttaagaataagggttaaaatagttcaacgctttaaagataaactatatttcaaaaccaatttataaactcaatccatatcgatattaaaatcttgtttaatacgtatggaatagtgtttctttaattgtctcttattttactaactgctttatatagttttatataaaaatcttcttttgatcggctccgtcaaaattgttgctttctaagataacaaaggttatcaagtctcgaatttttcttcgaagttcatgaatatctaaaattgtatactgttctttcattcaggttttattagtatccaaaaagtactaacaaaaaacgcttccgattactttatagaataactatcagatcgatttccgaccagtgacagaaaccttcgtttctccgcattttaattagtataaatagtaagctgcctacttcaaaatcaataacctatttagtacgaatttaatcagacagggttaaactttgttaaagcaacactcagagctgaacccctttcttaattttaaaaaaatagattaatgaaaaagtatacaggattacacttgcaatatatcaatggttcgtgggaagaaagtaagaagtcatcatccgatatagaaaacagaaatccctaatcgggcgataaaatcgacaccataaaaggagccactcaagcagcagtggacaaagcttacgcagccgcagaccaagctgctaaaacatggagtcaaacgctacctcaagaacgatcagaagttctccataagcttacccatgtgatgcaagatcgaaaagaagaaattatcgaatggttgataaaagaatcaggtagtacctttacaaaagcatccatagagttccaaacatgtattagcatttagagaagcttcctcttttccgttacgatctcacggatttatctttaattcgggaatcccgggaaaagaaagtcgtgtatatcgtaaacctctaggtgttatcggtattattcgtccgtggaacttccccttgcatctatccatgcgttctgttggctctgctatcgcattgggtaatactatagttattaagccggcatcgcaaactcccgttacaggagcaaccctactcgccaaactttttgaagaagcaggactaccaaaagatgtgcttaatgtagttataggcagaggatctcatattggtgattactttgtcaaacatccaacgccaaaattgatatcttttaccggttctactcctgttggaaaaaatattggtaagcttgccggggaagcattaaagcgcgtgtcactagaattaggtggaaataatgtttttattgttatgaaagatgcgggcattgaaaaagcggtcgatgcagcgatttttggaaaatttatacatcaaggacaaatatgcatgtccattaatcggcttgttatccatgaggaagttgcggatgaatttgtttctaaatttgtcaaaaaagccaaagctttaaaatcaggcaaccccatggatcaagaggttattattggacctttaattaatagggatcaggtagcacgaattcaaaaagatattgaggccagtaagaaagccggcgcaaaaattattttgggtggaaatgcaaaagacgccttattagaagttaccgttttagatcctgtaacagatgatatgccaattgcagaaaatgaaatttttggaccggttgcacctattattcgcttcaaaactgaagaagaggcgctaagtatagccaactccaaggattttggcttaagcggagccttgcacaccaaggacatagaaaaaggaacagcctttgccagaagtgtagaaaccggtatgatccacatcaatgatcaaacagtaaatgatgaagcaaacgctccttttggtggtgaaaaaggatcaggattggtcgttttagtggcgactttgtgctagaagagtttaccagattacaatgggtaacagtacagcatgaacgaagagattatgcgccttttgcttaaaataaatagcaaaagagacatttaacatttcgttattaattctaatggaaattacttaaaataagatcaagccttaaaacgctttcgttcaaaaaaaagtatttttgcaacacacacacacatcttttaattttttgtaccccctgtatgatttctcctttaaagtctgaaaacgagaacagccgtcttattgcattaaaaaatcttcaaatactggatacacttccagaaaatgaatatgataacattacggaactagctgcttttatttgtaatacaaatacctctttagtatctctcatagatgaagaacgacaatggtttaagtccagaaaaaacatgcctctgtccgaaacccacagagatcattcattttgtgcgcatgctatcaacaaccctcgagaaacttttatcattccgcatgcaaccaaggacgagcgttttcatgacaatcccttaacactctcagacacacctgtcatattttacgcaggtgttcccttgttggataaagaaggtcatgctttaggaaccttatgtgtcattgacgataagcctaataccctttcgcctgagcaagaaaaagcgctcaagaatttagcgttacaggtggaaaagttatttgaattaagaaaggcaaataatgaactgaaagaaaccaaagaaaatctggaaaaacacaataatttactgaaggattttgcgggtgtagcatctcatgatatgaagatgccattgtctaatatgatcattacttccgatctattacagcaaaaatatggagctaatctggatgagtccggatctagatatctatcatacattaagaagtccgcgttatcgttaagtaattatattacaaatatattggagcactatgagagcactgcatataacagaagtaatgttgaatcttttgacgtaaacacccttttagaaaatattgttgagctgttacatataaaatatgactgcgaagtacacttaccagaccttaatatagaagctacttgtaatcgaattgccctagaacagatttttttaaacctcattgctaatagtcttaaatacaacgacaaggaccctattcaaatcttcatcgatgcctccgtgttccctgagttctatgaattcagcgttcgtgataatggtattggtatagaacctaatcaaatagattctatttttgaattatttacgaccgttggtcacttagacagagatggaaacaaagggcatgggattggactctcaacagtacagaaactggtggaaacattaaaaggaaccattactgttgattcccaaattggtagtgggacgacttttacctttacagtagcaaaataaaaatattcttttgttcttttattacctcagaattattgagcgactttcaggggctgattttcctgttatcgattatttgatacgttaatccgaatctcttagtttttctttctctataatcagttcaactaattgattattatgagctttgaaatagataaaagcacaaaatgaagacaccgattggacatacttttttaattgatgataataaaacgaccaattttttgaatcattatttattgctaaaacatggaacgtttggaaaaatccataagttcaattgcagcaaagaagctatttcttatttcaaagagtattatgatttttttcgtcgagatatcaacttaatttttctggatattcacatgcctcatatggatggatgggagttattgcactgtttgcaacaacttatcaaagaatattcactcagccttaaagttgtcatattaagcacagctaacgaaacttggtttcagaaaagacgtctacaatttgactttgtggttgcgtggatcaaaaagcctttgtccattgagaaattggatggtgttatggcgcaacatttcgctttgcggatttctaataaaaacatttcaagaagttaacctatatatgaagaactgtttgggatggttttagcctctccaaaaaaatctatcagataagtatatctcgttttaagcaggctttttagccagtcatattacaatatcacactaataaatttatttcttaaaccttacataggtggcattagagagccaacgaagcaattttagatgctcaaaaataatcttaaaaaagtgatccggtaagaaccggaccactttgaatgttttcacaacggaataatccttattgtgaattgctttcagtatttcaaagataatataatctctgataataacaatatgattttccgtaacataagaaaaaaataaattcttaaattagggaaaatttacttttcatgagaagaattctaggattagacctggggacaacatccattggctgggcatttgttcaggaagcagaaaacaatcaagaagaatctaagattatccagacaggggttagggttgtacctcttaatacagatgaacaaactagctttgaaaaaggacagagtattaccataaatgcagatcgaacccttaaaagaggtgcaagacgaaacttgcatcgttataaaatgcgccgcgaggcggttatcaacctctttaaaaaaataaattttataaatgatagctcaactttctctgaagaaggaaagcaaactcatagtacctacgccttgagagctaaagctaccggtgagaagctagaaaaggaagatctgacaagagtttttttaatgctcaataaaaaaagaggctataaaagtagcagaaaggccaataatcaagaagaaggtcaacttattgatggcatggctattgcaaaacgcttgcacaaggagcatttaactcctggagagctttcctataagttacttctagagggaaagaaaaacatacctgattattatcgttctgatttacaaacagaatttgataaaatttggcaattacaaaaaacatttcatcctgagatattcacggatgaccattacgaagcgattgaaacacttaacaaaactaaaactggtcaatattttgaaaaatccataggtactcctcgagcagaatgtaagggtaaacggaatgaaaaaaagttacagttctaccggtggcgaaatgatgctgtacataaagaacttgagctatcaaaaattgcttttgtcctgaccgagattaaaggtgaaattaacagctctagcgggtatttgggagctatcagtgatcgaagcaaagaactctatttcaacgatgaaactgtcggtcaaaacctttacaagcaacttcaaaaagaccccaatgcctctctaaaaaaccaagtcttttatcgtcaagattatatggatgaatttgatgcaatttggcaagagcaatcaaaacattacaaagaacttacagaacaggttcgtaaagaattacgggatattactattttttatcagcgtagacttaaatctcaaaaaggtcttataaatatatgtgaattagaaagtagagaactcgaaattcttgaaaacggaatcaaaaaaaggaagttaattggtccaaaggtagctccaaaatcttcacctgtttttcaacaagcaaaagtatggcaaagtataaacaatatagtcctaacaaacgaaattactaaagagataaaatatctagatgacgaactaagacaactcctctttgaagaacttaattggttattttattttagtaaagcacaattacttaattttctgaaaaaacattcagacataaagggcaagaattggaaagtgaatcttgaaaaaattgagggtaataaaaccaatgccacgctgcttgcaatttacaatcaaatcttacaaattgagggatatgaagccttagactccaaaatatccatttcacaaaatatggagcaattaaaatactgttttgaaacaattggcattaatagcaaaatcctctcaattgactatagtttaaaaggagacgagttcgtacaacaaccttcctataagctttggcacttattgtattcttatgaggatgattcatcctctacaggtattgaaagtctaataaaaagattgcaagaacatttcaattttaaagaagaacatgcaaacctcttatgcggcgtggcctttacacaagattatggtagcttgagtgttcgtgcacttcgtaaattaatgccttatctagaagaaggaaagatttataatgaagcttctgaacttgctggatataagcattctaattatatgacagcagaggaaaacaaagatcgtcagttacttgataaattggaagttctgaagaagaattctttacgtaatcccgtagtagagaaaatcttgaaccaaatgatcaatgtgataaatgcaatcatagaaaatcctgaattaggaaaacctgatgaaatacggattgagatggcaagagagctaaaaaaaacagccaaacaacgaaaagaaatgaccgctgctatagtaaaagctacagatcaacataaaaaatatcgagaaagaattcaaaaagagtttggactttcttatgtaagtagaaaggatttaataaagtataaattatatctcgaactcaaagcaaccggttttaaaactctttattctggaacatatgttaagccggaagaactcttcacaaataagtttgatgtagagcatatcattccacaatccatattatttgatgactctttttctaataaaactatagagctgcgaagtgtaaatcttgaaaaaggaaaagagacagcatttgatttttgcgagagaaaaggatgtttaaacgatttcaaaaatcgattggaagaatgttatagcgacggaaaaggagaattaagatatgggaaaagaagtaaactcttaatgtctttcaagaacataccagaaaactttcttaaccgtgacttaggaaatacagcttatatagctcgtaaagcaattcaaatactacaacccttagtgagacaaaaaatagtgtcaacttctggtaatattacaagtaagttaagaagcgattgggagttaattaatgtacttcaagaactaaattggaaaaaatatgaggttctaggctatacatattatgattataataaagatggtaaagcattaccaagaataaaagattggagtaaacggaatgatcataggcatcatgcaatggatgctatcgctgtggcatttacacgtcctgcttttatacaatacctgaataccatgcatgccaaaagcggtaaatcgggagaagtaattgggatagagaaaaaatatacatatcgagacgcaataggcggacgcaagttcaaaaaaccttacgacactatcagagaggatgcaaaagaacacatggataaaattttaatatctcataaagctaaaaacaaggtagtaacctccaataaaaacaagataaaaattagtggtaaaaataattataagactaaaatagaactgactcccagaggccaattacataaagaaactatttatgggcagtcccttgtttaccttgtcaaagaagaaaagattagtgcgtcctttgatgaggaaaaaataatgacagttaccaaagctaaatacagagatgctcttttaaagcgcttaaacgacaatgaaaatgatcctaaaaaagcttttacaggtaaaaattcaataactagaaaccccgtttttatatcaataaatcaaaatgtccccgataaagttaaaacgcaatctttggtaccgagattcactatcagaaaaaacataacaccggatataaaattggataaagttgttgatttaggtgttaagcgtatcttggaaacaagactgaaacaatataatggcaaaccaaaagtggcatttgctgatctagataataatcctatttggttaaacaaagaaaagggaattactattaaaaatgtaaccattactggtgttagcaatgcagaaccacttcatactgccaaagatcataatggaaaacaaattatagatccctctggcaaacctatacccatagattatgtaagcactggaaataatcatcatgtagctgtttatagagatagaaatggaaatttacaagaggaagtggtctcgttctatgaagcggtcatcagaaagaatttagagcaatcgataattaaaaagaatcatgaaaaaggatggaaatttctcttcacactaaagcaaaatgagatatttgttttcccttcactagattttgagccttcagaggttgatttgtttgatacaaataataagaaaattataagcgaaaatctatttagagttcaaaaaatatcctctaaaaactatgttttcaatcatcacttagaaactaaagccgcaggatctgatacctttaaaaataaaaaagaactttcagaattaacctataaattctatcaaagtgaaaagtatttagaaggaataataaaagttcgactaaatcaccttggagatatagtgcatattggagaatattaagaatcatacctataaaatgatcaaacgcacccttttttttgctaatccagcttatctaagcacaaagaatgatcaattgttggtacagtttcctgaagaagaaaaacaaaaagcaaaagtagctattgaggacatagggtatattgttcttgagcatccacaaatcaccatcaccaacggcttattgatgaaacttatacaaaataaaacggctgttattacttgtgaccaacagcatatgccttgctcttttttacaacctctagtgggtcatagtgaacaaagcgagcgtatacgctatcaattgagtgccagtctcccgcttaaaaagaatctatggcaacaaacggttcaagtcaaaattgaaaatcaggcacggcatttattggaacgagggagaaatgcctaaaagctaaaacgctgggcaaaacaggtaaaaagtggagatagtgaatttcacgaagctattgccgcagcgtattattttcaaaaaatattcgatatcccgggatttagtcgcaatcaaaaaggaatcgcccccaataatttacttaattatggatatgcaattttacgtacggttacggcaagagccttaatcagtagtggtatgttacctagcgttgggatctttcatcataataagtacaatgcctattgtctggccgacgatattatggagccgtatcgaccctttgtggacacactagtttttgacattacaaaaaacaaagaaaattttgaaaaactaaccagtgaattaaaaagtattcttctaaaaataccggcaatggatgtaatgatcgatggcaaacaaagtccgctaatgatcgcgatgagtcgtactacacactcactttttgaatgttttgaggggagcagtcgcaaaattttatatccgcagtatggagaataatcatttttcacgccttaatcaataccgtagtatgtgggtacttgtattttttgacctcccgacagaaactcggactgaacgcaaagtagcttctggatttcgtaaaagattactgaatgatggctttgctatgtttcagtatagtatttatttgagattttgtgccagtcgagaaaatgcagtagtgcatataaaacgaaccaaaaacatcttgcctaaaaagggaaaagtctgtattctacaaatcactgataaacaatttggacagattgaactgtatcatggacaacaggaagtagcccctgaaaaaccctcccaacagctggaactcttctagaaaaagcgcttatttttttattctacatatagatttaaataacagaataccagtatcttacaacaggtatcctgtgaattctcctctaaaataaagaactgaaagcaattcacaactttgatcaagttcaaatacatctgtacgggcctgtgaattctcctctaaaataaagaactgaaagcaattcacaacctagcgtgctttactgcttcttcttttgtgcctgtgaattctcctctaaaataaagaactgaaagcaattcacaactgtaaagaattataagaagcgtttctgttcctgtgaattctcctctaaaataaagaactgaaagcaattcacaacttcatcagttgtaactactaattcccttttcctgtgaattctcctctaaaataaagaactgaaagcaattcacaacggaatatgtcggttaatattgatcaaagaacctgtgaattctcctctaaaataaagaactgaaagcaattcacaacaagccaagctgtatatcctaatccctttagcctgtgaattctcctctaaaataaagaactgaaagcaattcacaaccccccccttgcatataaaccccaatataatcctgtgaattctcctctaaaataaagaactgaaagcaattcacaactccattactattttaatgatgagtgtaatacctgtgaattctcctctaaaataaagaactgaaagcaattcacaactaagcaagatcaaagcattaagagacaatacctgtgaattctcctctaaaataaagaactgaaagcaattcacaactaataaatcctgcttctgtcggaatattagcctgtgaattctcctctaaaataaagaactgaaagcaattcacaactagggtaggtaaaaaagatgacgataaatacctgtgaattctcctctaaaataaagaactgaaagcaattcacaactcagagattatacaaaaatcaacctcacgtcctgtgaattctcctctaaaataaagaactgaaagcaattcacaacactttccgcagcttcctcttcgatgtctttcctgtgaattctcctctaaaataaagaactgaaatcgaccttttgggagattcagcgactcctaaaacaataataacaggagctaaagcaattcacaacattccttctgcgcccattgccaatgctatccctgtgaattctcctctaaaataaagaactgaaagcaattcacaaccagaaatcattttcatgtatttcttcatctcctgtgaattctcctctaaaataaagaactgaaagcaattcacaactaattggtcaccaaaaataattaattcgatcctgtgaattctcctctaaaataaagaactgaaatcgaccttttgggagattcagcgactcctaaaacaataataacaggagctaaagcaattcacaaaatttactcaatagaattacctaactaacaagaacgtagatcatcctctcattgcgtttcatgccactcgtaggtgatcacaaattctcctctaaaataaagaactgaaagcaattcacaactcaaattatgcgtatcacctcccgtgtctgcctgtgaattctcctctaaaataaagaactgacatcgaccttttgggagattcagcgactcctaaaacaataacaacaggagctaaagcaattcacgaaatttactccatagaataatcaaactaacaagaacgtagatcatcctctccttgcgttccactgcactcgtcggtgatcacgaattctcctctaaaataaagaactgacatcgacctcttttgggagattcagcgactcctaaaacaataacaacaggagctaaagcaattcagaataaagttactccatagaataacctaactaacaagaacgtagatcatcctctccttgcgtttcactccactcgtcggtgatcacgaattctcctctaaaataaagaattaatatgcaaacactaaaatttcagtcacttcaaaattaataccgtatcaaatactttatcaccattggctatttagaaaaatagatctagagaattgctaagtaaagatagcttgacaagttgaacactacgatcattcacaaatacactcttaaacttgcttcgaatggcactggtggcattagaaagccaacgaagctgttttttattagaaaaattataagtcaatcgatacttataaaacaaaaaaccctcctgatcaatgatcaagagggttaagtactgaaggcgggacttgaacccgcacgggccttacagcccattggattttaagtccaacgtgtctaccaattccaccacttcagcatggtatattttctcagagcgaaagacgggatttgaacccgcgaccctcaccttggcaaggtgatgctctacccctgagctactttcgcagtttatttaagaacgttgcaatacctgattgcggatgcaaatttaaaacatttctataaacgacaaagctttttgatgaaaaagaataaaaaaaattacacctgtgaagctttcttactggttaacatacgtttaatttcatttaatttcatcaaagcttctacgggagttaaggtatcaatgtcaatatgcaggatttcttctttgatttgttctaataacgggtcgtccagattgaaaaaacttaactgtactttttcttcttcctgtaaatttttgatcttaccggttagctcctcactactatgtgatttttctagttttttcaacattttattagctcgatgtaatacttgttgtggcataccggccatctttgctacatggataccaaaactgtgctcactgccgccgggaaccaactttcgcaaaaacaacacagtatctttcagctcttttacagagacattataattttttattcgcccaaaggtttcgctcatctcattgagctcatgataatgtgtcgcaaacagggttttgggtcgtgcaggatgctcgtgtagaaattcactaattgcccaagcaatagaaattccgtcataggtacttgttcctcgtccgatttcatcaagtaacactaaactgcgatcagagatgttattcaaaatactggcggtttcattcatttcaaccataaacgttgactcgcccatcgagatgttatcactcgcccctactcttgtaaatatcttatcaactacgccaagatgcgcggcttctgccggcacaaagcttcccatttgtgcgagcaatactataagtgctgtttgtcgcaaaattgcagacttaccactcatattcggtcctgtaatcataatcatttgctgattttgattatcaagctgaacgtcattagcaatatagggttctccaaccggtaattgtttttctatcacagggtgacgaccgtttttgatatccaaagcataagaatcatccaaaacaggtcggcaatagtcgttttcttcagctaactgtgcaaaagatgccaaacaatccaattctccaatcaacgcagcattacgctgtatcggctgtatataatctgccaaccaaagtaccaattcactaaacagttgctgctcaagtatgagaattttttcttctgcacctaaaattttttcttcatattctttcaactcctcagtaatatatcgctctgcattcaccagggtctgtttgcgaatccaggtatccggaactttatcacggtgtgtattacgtacttcaatataatatccaaacacattattagatgctattttaagagagcttatccccgtagcttccgtttcacgggctagcatcttatccaaataatctttaccggagaatgcaatggctctcaattcatctaattcacctaccaccccattagcaatggtatttccttttaaaatatttacaggtgcttcttcgtttagggtactttttatttttgttcgtaagagttcacagtcatgcaactgttctcccatttttttgagtgactcatttttactctttgttgccagtattttaatcggtgcgatggcttccagagagtttttgagctgtaccacctctctcggacatactttaccggtggcgacctttgatatcaatcgttcgatatcaccaatacgcttgagttgtacagttaatttttgtttttcatcggctgttgattttaggtatgctaccacctcctgtcttcggtatattgcatcactatcctttaatggaagtgctaaccaacgttttaaaacacgacctcccataggagaaatagttttatcaattacatccagtaaggtaactgcattcaccgctgtcgaatgatataattccaggttacgaatcgtaaagcgatccatccagatataacgctcttcggcaatacgctgtagtgaggtaatatgctgaatattgtgatgctgcgtttcgcctaaataatgtaaaattacgccggacgctatgctaccttcggttaaatgatccactccaaatccttttaacgaagtggttttaaaatgtgcatttaaagtttcataggtataatctgtcttaaacacccagtcttctaaaaagaatacgtgatgatcttctccaaaatcctccacaaagtttttcttattagctttagaaactaacacttcgctaggattaaagttctgtatcaacttatcaatatacgctacatccccctgagcagttagaaattctcccgtagagacatccaagaacgcaatacccaacgattttttaccataatgcacagcacacaaaaaattgttggttttactgtttaaaacctcatcatttaaagctacaccaggcgttaccaattccgtaacgcctcgcttaacaatcgttttagtttgtttaggatcttctaattgatcacaaatagcaacacgctctcccgccttaactaatttgggtaaataggtattaagcgagtgatgtggaaaccctgccaaggcagtttcggtctcacttccatttcctctttttgttaatactatattgaggattcttgcagagcgtatagcgtcctcgccaaatgtctcgtagaaatctcccactctaaaaagcaataatgcatcaggatacttagccttaatggcattgtactgcttcattaaaggtgtcacttttttattcttacttgctgccaaaagttgtatctttatttgaatcctgctaaagtaagtattccgtattcttttaaaaaattcactcttgctgagttatactttttttattcacaataaaagcagtttaccaaagggcttggaacgtgagaaatccattttcctattccgacatttctatacccgtattttaaattgcttcccttatttttgtagcatgcatgcaaaaagaaaattaaaaaatagcgagttagatcgcaagactgtcgaagaatttaaatccgcatccaaaacacctattattgttattttggataacattcgaagtctaaacaatattggatctgtttttagaacaggtgacgcttttatcattgaaaaaatatatctgtgtggcattacagctactccgccgcataaagacattcagaaaaccgcacttggtgctactgacaccgtttcctgggaatataaagaggataccgtagccttggtagaagcattgaaagaagacaacatcaaaatcctcgcaatagaacaggcagaacaagcgattatgttgaatgattttgctccagaagtcaatcagaaatatgccgttgtttttggtaacgaagttaagggggtacaacaaaccgtagttaaccagagtgacgcagtcatcgaaattccgcaatatggcagtaagcattccttaaatatttcagtaagtgccggagttgttttatgggatttgttttgtaagtttaaagcgttgtaacaaccacttaacatctctatttatgaaaaatcttgtgctttttgctacaattatcctgttctttctttcgtgtaaacaagagaaaaacaacacaggagaacagaaagatcccttgtactcaaaagcaaaagctattcatgaaaaagtaatcacattggatacacactgtgacatcaatgtggataattttacaacgctaaaaaactatactcaaaatctggatactcaggttaccttgcccaaaatgaaatccggaggattagacgtggcatggtttatcgtgtatactggacaagacagcttgactacccaaggctatgagaaagcgtataaaaatgcaatttcaaaatttgaagctatccatagactagtggaagatattgctcctaatgaaattgagttagccgtaacctctgctcaggttcgtgagattcatagcaaaggcaaaaaagtcgctatgataggaatcgaaaatggatatcccgtgggtaccgagatcgaaaatgtacaacggttttatgacttaggcgggcgctatatgtcattatcgcatcaaggacacagtcagttatcagattcgaacaccggtgagaatgatagcatctggttgcacaatggtttgagtgaactaggtaaagaagttattgtcgagatgaatcgtgtcggaatgatgattgatatctctcatccatccaaagaggctatgagacaaatgattgaactcaccaaagctccaatcatcgcctcacactcctcggctagagcactttgtgatcatagtcgaaatcttgatgatgagcaattgcaatggatgaaagaaaatggtggcgtggttcaaaccgtagcatttcgcacctatttgaatactgaaaaatctgatctgcgaatagccaaagaaaaagaaattgcaaaagaaatcgctgattcgatgggcggtacttggttagagcgtaaagaggtagcagccctaaaacaggaagaaaaagatgcttacctgaaattcatagaaaaactacgccctatacatctgaaaaagatgaattctatgaaaaatcttcctcccaaagtggatgttgtcgattatgtaaatcacattgactacctgattgagaaaatggggattgatcatgtaggtatcagctcagattttgatggtggcggtggtattgagggttggagcgacgcatcagaaacgtttaatgttacactcgaacttgtcaaaagaggctataccgaagcgcaaattgaaaagttatggagtggcaatttgttaagagtgctggacgaagtacaacaagtcgctaaagaaatacaatccaaaaaatcagtttaggctaatattttctctagaatccaaatataatcggatcggttgctcacaaaatcacgatcagagatatcgataatttttacattgcgatctttttgagattttatgaattcaaaataacctttgtttatcttttcaaggtactccggagcgatgtctttttcgtaaacacgccctcttttcttgatgttctcaagtaatcgctcagtgttttgatataagtaaacgtataagccgggtttagggaggtttgaatacataatatcaaacacctttttatacagaccatactcttctggttgcagcgttactttggcaaaaatcaaggatttgtaaatatcataatcactcaccacaaaatctttaaacaaatctaattgcccaatatcatcctgaagtcgttggtatcgatctgctaagaaggacatttctaacggaaatgcatagcgctccatatcctcataaaactttggcaaaaatggattatctgcaaagcgctcaagtacgagtttggcattaaactcttcggcaatctgattcgacaagctcgttttacctgcaccaatatttccttcaatagtaagatattgaaaagaagatagtgcaaatttagatttgggtgcaagcagcgtatcctctacctttttaatgatggatgtgtccgaagtgctttttaagagttcacctatttctttgttaaaaattgggtgtaaagcggatgaggcaatttcatttaaaggtaccaacacaaatttgcgatcctgcattctggggtgtggtacaatcaaatcgtttgtagctacattcccttcggtcgacaaaataatatctaaatcgatagttcttgcctcgtaatctcctcccacactacgatgacgtcctaattgtttctcaatacttaaaagtttgtccagcgtttcttgagtagtcaaatacgtagtcacttcgatacagctattgtaaaagtcatcgctcttaaaacctaaggcaggtgtctggtatactcccgatatagtaatgacagcgcccacacgagtaaatatttcatctaccgctttttgtaaaaaacttagcctatcgcccttattgctcccgagggagatataaattgtgtttggtttactcaaaatgaatgttcgaaataatttaagaatgcaaaagtaatgaaacctttatcatttccacgactgaatgtacatccgttgtcgatcatttttcagtatatataagatttatttataaaacgatttcaagatgattattgttttgaataaaaactataaagcatctcattatatttgtcttaattttaaacgagtattattggaactgtccgtattatcacaaaaaaaagcatttgatgcctaccgcatctaccttatcttcagcgcgctatttattgcctctctggtagtttctaatttaatttttcaaaaattcttctattgggatttttttggcctgtacacttttgagatttctgtgggcatacttccttatcctataacttttttaataaccgatttgataag

SEQ ID NO: 2249 - DNA, 24131 bp, synthetic construct
  misc_feature 1..24131: note = Synthetic
  source 1..24131: mol_type = other DNA
gtcagttgcaagattggcacgacctttgttctgctgttttttagattacgccgaaacattagaaagaaaggacaacacgatatgatgataagcaaacgattctcgcctgaagtgaccgaagtactcacactcagccgccaagaggcagtgcgcctgcataatgacaaagtgacacctacccacattatgctgggtatgattcgtcacaagcgaaaccctgctatcgatgtactgacgaatctcaatgtcgatttcaccatactccgtcatcaattggaaaacgccgcacagcaatacagcacagaccagccgttcgatgccgacgatatgccgatggatgattctgcaagccgcatcatgcgcctgtcggtgcttgaatcaatggtcacacgtagcgaaaccatcgatgtcatacatctgctgatggctctgctgcgcgaagacaacaacccggcatcggaatcgcttggccagcaacacgttacatacaaccgtctgacacaagcactcaacatcgatacagcttcccactccgccccaatggaaaacggataccattatgaagaaggggaagatgacgacgatgatgacgacgatatgtcattcgcaggtgctgaaacggcacagcaggaaaagtcggaaacagacacccctgtgcttgataagtttggtacagacctgacacaagctgctgccaagaacctcttagaccctgttgtgggacgtgaggttgaaattgagcgtgttgcacagattctgtcgcgccgcaagaagaacaatcccatacttattggtgaacccggtgttggaaagagtgccatagtggaaggcttggcacagcgcatcgtaagtcgccgcataagtcgtgctctctgggacaagcgggtaattgtgctcgaccttggagccgtagtggcaggaacgaagtatcgcggacagttcgaagagcgcatgcgtgcaatagaaaaggaattgaagaaacatcctgaagtaatcatcttcatcgatgaaattcataccctcatcggagcaggttccgcagcaggaacgatggacgctgcaaatatgctgaagccagcattgtcgcgaggcgagatacaatgtatcggagccaccaccatcgacgaataccgcaagtcgattgaaaaggacggagctcttgagcgtcgtttccagaaggtaatggttaagcccactaccatagatgagacaatacagatactgcagaacctcaaggaccgttacgaggagcatcacaatgtgaaatacacacaagaagcattggaggcttgcgtacgactgacagaacgctacatgagcgaaaggtccttccccgacaaagccatagacgcaatggatgaggccggaagccgtgcacacatcatgaacatacctgtttccgacgagatattatcgttggagatgcaagtgcaggaactggaaactaagaagcaggaagctgtcaaaaacgagaactatcagcaggcaagcgaatatcgcgaccagcagaaggttgcagccagagcactcgaacagaagcgacaggaatgggaacagcagctcaaggaagaccctgtgaccatcgatgaagagcagattgccaacgtggtatcgatgatgacgggaatacccgttcaacgcatcggaggcgaagaaagtcagcgcctgcgcacaatggcagaaacgctgcagcaagaagtcgttggacaggacgaagccatacagaaagtggtgagagccattcagcgcagtcgtcttggtcttaaagacccacagaagcccatcggcacattcatgttcgtaggtccaacaggtgtaggcaagacctacctgacgaagaaacttgccgaagaacttttcggcagcgagaagaatctcatacgcatcgatatgtctgagtacggcgagaaacataccgtaagccgtatggtgggagcacctccgggctatgtgggttatgaggaaggcggacaactgacagagcgcgtacgccgtcagccctactccatcgtattgctagacgagatagagaaagcccatcaggacgtattcaacatcctgctgcaggtgatggacgaaggacgactgacagacggcaacggagccaccatcgacttccgcaataccgtcatcatcatgacctcgaatgctggaacccgtcagctcaaggacttcggtcagggcatcggtttcaacaaatcaacggatatcagtcgcgataaggaacaatcacgcagtgtcatcaagaagagcatcacaaaactgtttgcacctgagttcctcaaccgtctggacaacatcatctattttgaccagctcacagaggaaagcatcaaacagatagtggatatcgaagccaagcctttggtaaaacgaatcgcagagatgggctacacgctggaaatcacagacgaggcaaaggctctgctggcaaagaagggttacgatgtgcaatatggagcacgccccttgaagcgcgctttgcagacattgctcgaagaccccatttgcgagcttctgataagcctacccccgtcccctcccgaagggaagggtgaaagtcctaagatgaacctacgggcggaggtagatgcagagaacaaagaaaatataaagattgtaaaactatgaaaaaaggaaacatcggggttaccacagagaacatcttccccgtcatcaaaaagtttctctacagcgaccacgagatattcatccgcgagatagtaagtaatgccgttgatgccacacagaagctgaagactctagcaggcaaaggcgacttcaagggtgaacttggcgagctgaaggtaactgtctctatcgacaaagaggcaggaacaattacagttagcgaccgcggtatcggtatgaccgctgaggaaatcgacaagtacatcaaccagattgcattctcaggtgccaacgacttcctcgacaagtacaaggacgatgccaacgccatcatcggacacttcggtcttggtttctactcatcgttcatggtcagcaagcgtgttgacatcatcacgaagagctatcaggaaggtgctgcagcacagaaatggagctgcgacggcagtcctgagttcacgctcgaagaaacagagaaagccgaccgcggaacggacatcgtgatgcacatcgacgacgactgcaaggatttcctcgaaaaggaaaagatgcagggcttgctctccaagtactgccacttcctgcccattcccgtagtgttcggcaagaagaccgagtggaaggacggcaaacagcaggacaccgacgaggacaatgtcatcaacgacaccgagccattgtggacaaagaagcccgccgacctgaaggacgaggactataaggagttctaccgcaagctctatcccatgagcgacgaacccctgttctggattcacctgaatgtagattatccattcaacctcacaggtatcctctacttcccgaagattaagaacaacctcgacctgcagcgcaacaagattcagctctattgcaaccaagtattcgtgacggacaacgtagagggcatcgtgccagagttccttatgctgctgcatggtgtcatcgattcacccgacattcctttgaacgtcagccgctcgtatttgcagagcgaccagaacgtgaagaagatttccggttacatcacgaagaaggtcagcgaccgtctggctagtatcttcaagaccgaccgccccgacttcgaaaagaagtgggacgacatcaagattttcatccactacggaatgctttcgcaggacgatttctacgacaaggcaaaggcatacgccctcttaaaggatgtagataacaaatactacacactcgatgagtatcagacacttataaaagacaatcaaaccaacaaagacggtcagcttgtatatctctatgcacaagatccagagagtcagtacacctacattcaggcggcaaaggacaagggttacaacgtgctcttgatggacggtcagctcgacactccgctggtttctatgctcgagcgcaaactggagaaatctacgttcactcgtgtggatgcagatgttattgaccgtctgattcagaaggaagacacgaagcgcgaagtgctggaagcagaacgtggcgaccgtctcagcgaggtattccgcagccagatgcctcgcaccgacaagctcgatttccacgtggagacacaggctcttggcgaggatgcactgccagtgatgctgacacaaagcgaatacatgcgccgcatgaaggagatggctcgcatacagcccggcatgaacttctacggcgaaatgcccgacatgtacactctggtgctcaacaccgatgcgccgctcatcaagcaagttcttgaggacagcgaggcagagacactggagaagattcgtcccatcgaggctgaaatcaagggccttaccgcacgtcagagcgtgatgcgtcaggaacaggacaagaagaagtacgacgaactgacacaagaggagaaggacgagatgaagaaggtgggcgacgacatccaagcccagcgcgaccagaagaacgagattctggcagcctatggcaaggacagcgagcgcgtgcaccagctcatcgacctcgccctcctgcagaacggtatgcttcgtggtgaagccctcaccaagttcgtacgtcgcagcgtggatttcatcaagtaaccatccacatctatcatataaaaaagcggaagtccttgcaggggtttccgcttttttgtatctttgtccccgataataagaagaatcatgcgcatagacatcatcaccgtactgccagaactcattgagggattcctcaacgagagcattcttggccgtgcacaacgaaagggactggtggaaattcacctccacaaccttcgcgactactccaccaacaaatggaagcgtgtggacgactatccattcggaggctttgcgggaatggtgatgcaatgcgaacccatcgaccgttgcatctcaaaactgatgagcgagcgtcactacgacgaaattatcttcaccacacccgacggcgagcagttctcgcagcctatggcaaacgaactgagcctcaaggagaacctcatcatcctttgtggacactataagggcatcgattaccgaatccgtgaacatctgataacgaaggaggtatccatcggcgactatgtgctcacaggaggagaactggcggcagcagtgatggcagacgccatagtgcgcatcctgccaggtgccatcggcgacgagcagagtgccctcagcgactcgttccaggacaatctgcttgcagctcccgtctatacccgtcctgctgaatacaagggctggaaggtgccagaggtgctgctcagcggtcacgaagcaaacatcaaggaatgggaactggcgcaaagcctcgaacgcaccaagcgcctaagaccagacctgcttaagaattgataatttataatggataattgataatttataaatatgccggacaagaaactgaatctctacatcatcgcaggatgcaacggagcaggcaagacaacggcttcgttcacagtgcttcctgagatgctcgattgtcgcgagtttgtgaacgccgacgagatagcccgaggcctttcgccattccatcccgaaggcgtagccatacaggcaggccgactgatgatagaccgcgtgatatacctgttgaaggagggcgagactttcgctttcgaaacgactctctccacgcgttcctatgtcaacctcatcaagaaagcgcagaagcgcggttactttgtgactctgctcttcttctcgctctctacgcccgaacaggccgtacagcgagtggcaaagcgcgtgagtcagggcggtcacaacatccccaccgatgttgtctatcgtcgattcgagagcggactttccaatctcttcaacctctacatgccgatagtcgattactgggcactctacgataattccaacatccccactcagcacatcgccagcggcgaactgggtaaggagcccgtcattctggaggcagagaaattcaatgcattacaaactaaataccaggcgcaagatgagcagcaagaaggataacagacctgatgtacggctcatgcagcagcgcatcaacgagggcatactcacggctcagcgccgactgttgaaccgcggtctccacgacgacctttccttcatcgtatggcaaggcggtcgagtttgtgatgttccagccacaaagatttcgcccttttgacggaaagaaataatagataataaatgataaacaacagataataaatgaagataagcgataagattctttacatcggggttgatgatttggacatcgacctcttcgaaagccaatacaacgtgcctgagggcatgagttacaactcgtgggtcatcctcgacgagaaggtggcagtcatggacactgccgaccagcgtaagtcccaggagtggatgcagaacctcactgaagcccttcaaggtcgcaaggttgactacctcatcgtacaccacatggaacccgaccacgctgccaacatcgcagctcttgccgaggcctatcccgaagcaaaaatcatcctctcggctgcagccctgaagatggttcccaacttcttccccgaagccgacatcacaggtcgctgtcaggtggtgaaggaaggcgaaacgctgtcgctgggcagccacaccctgcagttcatcgctgcccccatggtgcactggccagaggtgctgatgagctacgagcagagcaccaaaacactgttcgcagccgacggattcggtaagttcggagccatctgcaaggaagagcgcaatgccgacggcactcctgccgactgggcttgcgaggcacgccgctactacttcaacatcgtgggcaaatacggtatgcaggtgcagaacgtgctgaagaaagctgctgctctcgacattcagacgatagccccgctgcacggtcctgtgctcagaggtaatgcccttgccgatgccgttcgtctctacgacacgtggagcaaatacgaagcagagaccgaaggcgtattcgttgcctatgccagcattcacggcggcactcgcaaggttgccgagaaggtggtggagatgctcaaggcagcaggatgtccgaaggttgccgtgtcggatttgactcgcgacgacttggcagaggccgttgaggatgccttccgctaccccactctggtactgctggcagcctcttacgatgccggtgtcttccctcccatgcacgatttcctctaccacctccagataaagggtttccagcgccgccgcttcgccctcgtggagaatggttcgtgggcaccctctgctggtaaggtcatgaaggagatgattgcccagatgaaggactgcgaggttcttgagcctatggtcaccatccgcagccgtatgaagcagagcgacctgcccgccctcgaagccctcgtaaaggccgtgattaacaattgataattgacaattgataattgataattatgaaacgaatctattcatttattgctgctatgctgttcgtcctcgccgctatggctgagggacaggctaagtacgtgttctacttcatcggcgacggcatgggcgtcaaccaaatcaacgtcaccgagacctatctggcagccctcaagggtcgcatcggcatcgagccaatacttatgtccgagttccccgtggtgggcttggtaaacacatattcagccaccaatggtgtgacagactccgcagctggcggtacggcacttgccagcggtcataagaccaagaacggtgccatcggcgtgctcgaagacctgcagacacccgtcaccagcattgcccagtgggcaaagaatgccggaaaggcagtaggtgttgcaaccaccgttgccatcactcacgccacaccagcatcgttctatggtcatcagcccaagcgtcagatgtactacgaactgggacaggacctctgcaagagcggcttcgacttcttcgcaggcagcgacttccaccgtcccaacaccaaggaaggagagcctacactgcgccagcaggcacaggcagccggctacaccatcctcacaggcggttataaggaataccagaagaagggactcaaagccgagaaactcatcatgctgcagagcgacgagcagaacgagaagctggaaagcgaccacctgccctattcactcgatcagacgaagaacgacctgacactggagcaaatcgttcgtgcaggcatcaactacctcacatcgaagaacaccgacggtttcttcttccaaatcgagggcggcatgattgactacgcctgccaccgcaacgacatcggcaacgccatcaacgaagtcctcgacctcgacaaagccgtgaaggtagcctatgagttctaccagcagcaccccgacgaaaccatcatcgtcatcaccgccgaccacgagacaggcggactcgtcatgggcacaggtccctacgagctccacaccgacctcctgcgcttccagcacaagagcatcgacgagctgaagtggatgctgcgcgaacagtacaagcgcgctcccaagaagttcacatggacagccgtagagaaagtactgaaggagcagatgggcttcggcgcaggcatcaccctcaacgacaagcagcgcgaacgcctgcagaaccgctggaatgccatcgaaaaagccatcagcgagaacggaaaggtcaacgaccgcatcaacgacctctgcgagaccaccaagcacatcctcagcgaagtagcccatatcagttgggcaagcggcggacacagcaacggctacgtacccgtctatgccatcggtcccggcaccgaagtcttccaaggccgcatcgacaacatcgagatagcccccgcaatggctcgcatcgccggctaccccgccgaatagccccttattttctacatcatagcaagagccgccgtcccctcaggattgcggctctttatccataggcgtcgcgggttgtccttcacatagtcaatcatccatcgcctgtgccatatattcttatcttttcattcccataattgtttgcaaagataattaattcatatcattcagaatacatttaagtcatacaaatttaatccgttcatccttaaatccgtagttccacgcgttactatcgccgtaaggcctagctcttgttgcgataggtactagaccttatcgttacaggttaatattatctgtgcctataggttaatataacttatcggcataggttaatattatctccgtccataggttaatataacctacagccaaaggttctagaacctgtgacgataagacctaggtcttgttgcgataaggtctaggtcttatgacgacaagtatagtaatgttaagcacgaagcattactatcgcttcacgcctaggaatactattcctccgtcggaaggcgactggggtctttagagtagtgactgaatgtcactgcggccccacaaaggggagcgaatccccattcgcgacggaggacctagcccttattgtcaaaggtactagtccaatgtcgtagaaatttcacctgcacgcaaaaccgcgctttagggatgtcaatccaaaattggattcacatctttcaaccaatccaaatctgaatacgataaaaaccacagagcacaaatctgagccctgtgatatacatgagggaaaaatttccctgttgttgatttttagctgaatccaaatttggactcagctatttcactacgccagattactaagtgtacgtcttgttgtatcttattctgttcctatatcaaaccacaaaaaaagaaaggcccccgttaaaggacgagggtcaaacctaatgttttcacaacggaataatccttattgtgatttgcttaaaattagtacggcaaagttaaggacattctcaaaataatccaagaaaactttgggaaaattgtatcatttccttaattttgtcatgcagtacacttaagattagtatcatgaaacgaatattaggactcgatttaggagttagcagcattggttgggctttggtaaacgaagctgaaagcgagaatgagaaatcttcgattgtcaagttaggtgtaagggtaaatccactaactgttgacgagcaaacaaatttcgagaaaggtaaatcaataaccaccaatgcagaacgtacactcaagcgcggaatgcgtcgcagccttcaacgctataaactacgccgcaacgaactcatccgcatcctaaaggagcatgctttgatttccaatgacacccttctctacgagaacggcaatcggaccaccttcgaaacttatcgtcttcgcgccaaagctgccactgaggaaatctccttggaagaacttgcgcgcgtacttattatgataaataagaaacgtggttacaaaagcaaccgcaaagctaagggcgacgatgagggtaatctcattgatggaatggaggttgccaagaaactctacgatgaaggactgacgcctggccaatactcgctttctttagtgaaacagggtaaaaagttccttcccgaatactatcagtctgacttgcaatccgagttaaaacgaatatgggaaacacaaaagcgtttcaaccctgaaatacttactgatgatttctggaagatattgcagggcaagagcaaaactaataccaacaagattttcattgctcgctatcaggtattttctccaactttaaaacgcgatgaatctcgaaagcaacttcttcagtggcgcgttgaaggactttcccagaaattgccaatcgaagttgtttcggctgtcatctccgaactcaacgggcaaatcaacggcacaagtggttatttaggaaaaataagcgaccgcagcaaggaactctatttccgccatcaaaccgtgggacagtatatgatggcagttctcgaagccaatcccaatgccagccttcgtaatatggttttctatcgtcaggactatctcgacgaattcgaacgaatatgggaaacacaggcgaagttccacccagaacttacgccccagttgaagcacgatattggtaacatcacaattttctaccagcgtccgctgcgtagccaaaagggattgattgccatttgcgaattggaacagaagaaaatagaaatcattgttgacggaaagacaaaaaatattaccattggtccaaaggtctgccccaaatcttcccctttgttccaagacttccgtatttggcaacgcttgaatgatcttcggttaaaaagcgataatctcttcgacaatcgcaatctcgaattagaagagaaacaggcgttggcatttgagttgagcactcacgccaaactcaccaaggcgcaagcgctcaaagtattgtttggcaaagctccaaaaggtgttgacctaaatttcaaggaaatagacggtgacaccactcaaacagctctattcggagcttatcagaagattattgaaatgtctggacatggtgagtatgactttagtaatagtaattgttctgcaggcgaagccctcgacattgtagaaaatgtgttcaaggctctgggttataacaccgctcccctacattttgatgccaccttggaaggtaaggctcttgaacaacaaccttactaccaactttggcacctgctctattcctacgaaggcgacaactctaagacaggcgatgagaaactggtgcaaaagattcgccagattttcaactttgataacgatgactacgccaaagtcattgcccaaatctccttcaaacccgactacgccagtctatctgctaaagccattcgcaatctgttgcctttcatgcaccaagggttcgactatagtgaggcttgtgaaaaggctggatatcgccattccgctcgttccctcactaagaaggaacttgcaaacaaagaactgaaaacgagccttgaactccttcctcataacagcctccgcaatcctgtagtggaaaagattctcaaccagatgataaatgtcgtcaatggtgttgtgtctacttatggcacccttgatgaaattcgcatcgaattggcacgtgacttgaaaatgagtgcaaaagaccgcgaggaaaaaaccaagggcatcaacgaggcacaaaagaaacatgagaaattcatcaaggaattgcaagaggatttccacattccgcatcccagccgaaacgacatcattcgctataaactatacctcgaattgaaaaacaatgggttcaagaccctatactctaacacctttattgagaagcaacgcctgtttaccaatgatttcgatatcgagcacatcataccacaagcaagtgctttcgacgattccttctccaacaaaacattggaactgaaaacaatcaatttaaagaaaggaaacaagaccgcttttgacttcatccgcgacgagtatggcgaagaaactctaagtgagtacaaagcccgtgttgaagatttagcaaaatcagctgacggcataagccagaccaaacgcaacaacctattgaaaaccgctgccgatatcaaaggaggctttataaatcgtgaccttggtgaaacccaatacatttctcgcaaggctcgtgagatattggaacagatggttcgtgtagttaccccaacgacaggtaagattaccgaccaactacgcgaggattggggtctcatcgatattatgaaacaacttaacttcgacaagtattccgctgccggactcatagagacaaaaattgtcaacggcaaggaaaagcttgttccaaaggattggacaaagcgcaacgaccatcgccatcatgcaatggatgcgcttaccatagcctttaccaagcattcgattgtgcaatactacaataatatgaatgcgcgtacggacaagaccagcgacatttatggcatcgaacaaaaagacatggagcgccacaatggtcacttgcgtttcaaggtgcctgtagaggggatgcgagaagaggcaaaacggcaactcgagcagattctggtttccataaagtcgaaaaacaaggtcgccacgcaacacactaaccgcagcagaacgaagaaaacagcaagcggagaaaatcgaaggattcagcttactccacgcgccggtcttcacaatgaaaccatctatggctaccgccagcagtatgtgacatccatggagaaggttggttcctcgttcgatgaagccaagatacagactgttgccagtaaggaattgcgcgaggcactctaccgtcggttggcagaatgtggcaatgaccccaagaaagccttcacaggtaagaattctctagagaagaatccaatctggctcaatgccgatcatagccgagccgttcccctacgtgttaagtgcgtggtatttggagacatctacaccgttcgaaagcctatcagcaaagaccttgtgttagacaaggtgctcgatccaagaatcagggccattctgcaaaagcgtcttgaagagtttggcggcgatgcgaacaaggcattctccaaccttgaagaaaatcccatatggctcaacgagagaaaaggaatatccataaagcgcgtcacaatcaatgctggactatcagcgccagagcctattcatgagaaacgcgaccgtcatggtaatgtcattctcgatagcgaagggcatccgattcctaccgacttcgtgcaaactggtaataaccaccatgtggccatcttcgaggatgccgacggcaagttgcaggagcacatcgtttcctactacgaagccatggctcgattgactcaagggctacctgtcatcaaccacaactacaatgcagaactgggctggcgtttccgcttcacgatgaagcaaaacgaatatttcgtgttccctagcgaggacttcaatcccgccgaggtagatttaataaaccccgacaattatgcgttaattagcccccacctgttccgagtacagaagttgacatcgaaagactatttcttccgccatcatctggaaacaaaggttgaagacaagaacgagcttcgcgatataacttggattagaatacgtaattgtgaaggcttacgcaacattgtaaaagttcgtgtaaaccacattggtcaaattgtagcagtaggagaatactgaaatgataaagaaaacactttattttggtaatccttattacttaagcttgcgcaataatcaattgttactgcgaataccagatgttgaaaaagatgatagaatatcggaagaagataaaagggtgacagaacgcaccatccccatagaggacattggtgttgtaatactcgacaatcgacgcataaccattactactggggctattgaagctttgctcgacaataattgttccataatcacctgtgatgagcgcagcatgcctgttggactaatgctccccctttgtggcaacacgttacaaagtgaacggtttcgtaatcaaatagatgcgtctttaccattaaagaaacaactttggcaacaaaccgttcggcaaaagattcttaaccaagctgcagtcctcgcctacagcacaggcaaaccagccaagaatatgcaagtgtgggcaaacgatataaagagtggtgactcagagaatatggaggctcgcgctgcagcattctattggaagaatatctttcccacacatcccgattttattcgcgggcgtgagggtgagccaccaaataacctattgaactatggctatgccatcttgcgtgcatgtgttgctcgcggactggtgggcagcggtttactcccaactttaggtattcatcatcgtaatcgctacaatgcctattgccttgccgatgacattatggaaccatatcggccctttgttgaccaattgattgtggacatcattcgtcaaaactacaatattattgagctctcgcgcgaactgaaagcaaaactgcttgctataccctcgcttgatgtcgttgtagatggcaaacgtagccctctaatgattgctgtaggacaaacaacggccagtttagccaaatgtttcaatggtgaagcgcgaaagatttcttatccagaattggaatagcctatggctgccgaccaactacgaatcagtcaataccgtgttatgtggattcttgtattcttcgacctacccaccgaaaccaagaaggaccgcaaacgctatgctgaatttcgcaaaaggttgcaaggcgatggttttataatgtttcaattttccatctatatccgtcattgtgccagtgttgaaaatatggaggtacatattaaaagagttaagtcttttattcctgaatttggaaaggtaggaattcttactattacagataaacaatttggcaacatccaactttttcatggaaagaaagtggaacagcccaaagctccaggcattcaattggagttgttttgaatgaaagaatcccatccttacttagatgggattcttcatacagtagctattttcttttttctaatcaggctcgtatcttcctgattttctttgcatttctcaatatcagttgtttatgctactgcaaagatactaattttaaagcaaatcacaaccgttggtggtaaaccacctattcagtgaccgttgtttatgctactgcaaagatactaattttaaagcaaatcacaacaacattcgtgttgtggactaagtgtttaacgttgtttatgctactgcaaagatactaattttaaagcaaatcacaacgcgtttattgcctttgtctaagcctacattgttgtttatgctactgcaaagatactaattttaaagcaaatcacaacatctcttgtgcgtgtatggaaaaggacagtgttgtttatgctactgcaaagatactaattttaaagcaaatcacaacgagcggacaaggggcgagcaagggacgggcgttgtttatgctactgcaaagatactaattttaaagcaaatcacaactgcactgccattcggtactatcaacacggcgttgtttatgctactgcaaagatactaattttaaagcaaatcacaacccctttgcgctcagtatgagaaccttttgggttgtttatgctactgcaaagatactaattttaaagcaaattaattttaaagcaaatcacaactcatttcgcggtagtcctttgcgatacttggttgtttatgctactgcaaagatactaattttaaagcaaatcacaacgctcgcgttcctcgtcccactcttctcgttgttgtttatgctactgcaaagatactaattttaaagcaaatcacaacggtacgtgggccgacatcgtactggagcaagttgtttatgctactgcaaagatactaattttaaagcaaatcacaacacgccgtcgataacttcgccgccggtggtgttgtttatgctactgcaaagatactaattttaaagcaaatcacaacacgcaaggacgttagtctcgactctgccgagttgtttatgctactgcaaagatactaattttaaagcaaatcacaacgcccttcgctcggttaataaataattttaaagcaaatcacaactcatttcgcggtagtcctttgcgatacttggttgtttatgctactgcaaagatactaattttaaagcaaatcacaaccttcgtggtcttgtagttggtgtcgctcaggttgtttatgctactgcaaagatactaattttaaagcaaatcacaacacgaaccgcaagctgggctcggacatgggcgttgtttatgctactgcaaagatactaattttaaagcaaatcacaacgtcatcatcgtgccgtccttgagcaccacggttgtttatgctactgcaaagatactaaaaaataaggataggacacgaactgttttaggaaaaaatgtttctgataagaggaaatgaaaaagcctctctgctttgtgctacggaaaggctatatcaaagtcaattattgctggttaattttttgaaccgatgttctgcattctgttcgtcgagaactcgcaactgctcttttgcaatacgttgaagtatatcaaagcgtaagtcgcgaggcatagcttgtttaattagttcggcattgatggattccaaatttgagagtacaaccaattcattgatggatgcagtgtcgcgcatgttcaacttctttgccaatccaggattagcttcttcccaatccttagcggtgtaaccgaataaagcgaggttaagcaaatcggcttctgtggcataaataatgccttcctttttcttagcaatagatatctttgggatgatgatattcttgatggcatcggtatgcaacgtataattggcttttgcaagaatgcgcttcacgtcccagtgttggagtagagggttgttttgttcttccttgagttgctgatattccttaacaacatagagttggaaggtgggactgagccacattccgaaattaaaggcaatgtctttatgggcataggtgccaccatagcgcccagcttttgaatagatgccaatggcattggtcttttctgcccattcctttggggttagggaaaaggcattcagacctgcctgttgtctaaacgcatcgaattcgatgcttttaaactcagggttatgtaattgttcccatacaccaaggtattcgattgtgctgcgtgaacgcatccagttctggatgatataattggttcgctgttggtctctaaaacgagccatatctgtcaggcagatatagtcattctcgttgccttgaagtaacacggaaatctccgtaccattcgcattaattttctttgttgcagtcattatggttttaaggttgtttctttggctacgaaattacgaattaaattttaatggtcaaagcaaaagccccaaaatgttactatagtaaatagtcgaagtctctatattgaatagccgaacttactatagatgtttcacaaagtctctatattaaacaaaaaaagcgtccaagcggacgcatttcaacaggggggacaatttgtaccccacttcaaacataaattttagatgtaaatctgggaaaaagacataaaagcaatgattttctgccgaatgtttgtaatattaaacatttttattcatctttgcaccatgtatccttcgtaaggcagattataaaataaacgagttaacaggttcttatttagtaatatttaaaggacaagactatgaaaagaatggttttactactggtaatgataactggttgtgtaatgggcaatgctcaaagtaaacaggaggacacgtcgtctgcgggcacagttcttttagtaacagcaaagggtaaaactgccaatgtccgcgaacgtcctgatataaaagcaccgctattagctcactggtttgatgaggaggaaaaagaaattcttcgactgaatgcaggaaccatatgtttggttttgggagaagagaacggatggtataaagtaagattcccaatatacatctacgacttagagccaggcatggaggaaggttatgtaagcaagactgtagtccaagagtctccaatcacgacgttgggcgatgtgagtgatagttttatgaaatacgatggcgaagtgtttgagtatattacaacaactggttcaaaggattacccctatctttatgttacaggaagactggatgatgaagcttataactatgccgacaaagagactaatcatcctgttaatctgtggttaggacatcaagatggcgatgttcttgttttttcttatccagcattcactaccattacaatgaagcctaactatgaagggcgtgacaaaatcagcgcaggttccattacttttggttccactgttaaaggtggactggattggtatccgtatcataaagagtctggcatgctccacttctgtttcgagaattacggagatgaggaactgagaatactatttagcgatgccgtcaagaaccaaaactacatgaaaagcatagataacaaccacgttttacccatgatcatcattaatgcagatagattggaaaagggctgtcaatagttcctgttctttgtgtgctttagctacgaaattacgaatttatttttaattaggaaaacaaaagcaagatgaagtgtttgctactgggggcggaagaggtgggggatgaactcgtggaggctgcgacgccaagtgagccactcatggtgagtgccgggcgacacatagtattcggtcttgatgcctaccgagcgaagcttttcgacaagggctccggtgccgaagttctcttccgagccacaactgaggaagaggcaatgtatctggctgttgaacttgtcggcattgttgaagatgccgtcgtaggctttctcgatgtcgagaccgaagatggctccactgaagcctcccatccatgcaaagcggtcgagatgctgaagaacgatgtcgaaggtctgatgaccgccccacgagagacctgccatagcacggtgctcgcggtcggtgagggtgcggaagttgctgtcgatgtagggaatgaggtcgttgagcaagacgggatagaacgtggctccgtactgactgcgtccctgacgattgtcgcctccacggaacggggcttccacatcgccgctttccataacgactatcataggtacggcacgaccttgggcaatggcattatccatgatgtgctgcatgtgaccctgacggctccagcaggtctcgttctcccccattccatgttgcaggtataggacggggaagcggcggttctgctccttgtcgtagatggcaggagtgtaaaccattgcatgtcgccatctattagccgatgccgaccagtagtagatgctgctcacagtgccatgagccacacccgactggggacggtagtaatcgccttcgggaccttcaggaatctctatgcctcccgactgacgacagcatccgaagaatgtctgcgtggaggggtcaactaccgacactccgtcaatcttcaggaaatagtagtggaacccaaccaccaaaggttctgtacgtcccatccagaagcctttctcgtcgcgctgcatatcatagaccttgccgcagatgtccacctgcaccttctgtgcctctggagcatggatgcggaaataggcgcggcgctcagagtcgactttaggaaactcattgccggcaatggtggtttctgcaatgtgtgcatcggagggcacaactattgggtcagcctgctccattacgggcaaagccaaagccttcgacattgacaagaatgcgaatgacactgtaaggactaaggaaagggatattcgtttcatggcattagatttttacattcactccagagcaccgataatgtcgcggacggagttgaatttgtgacgttggagatagtcctcgatgccggctacgaccttcatggtgacggaggggtcgaggaagttggcagtgccaatctctatggcagaggctcctgccaagaggaactcgatggcatcggtggctgtggtgatgcctccaagtcccacgacgggaatcttgacagcatgtgccacctgatagaccatgcgcagggctacaggcttgacggcaggacctgagagtccgcctgtgccgatggagaggaccttgcggcggcgctcagcatcgattgccattcccataagagtattgatgagcgacacagaatcggctccctctgcctcgactgcacgggctatctcggcgatgtccgtaacattgggcgatagcttcacgatgagtgtcttgggatatgccttacgaacggccttcaccacactggcagcaccttcacaagtaacaccgaaagccattccgccctgacgcacattgggacaggagatgttgagctcgatggcagggatgcgctccagttcgccaatgcgacgtgcacattcggcatagtcatcgatgctggaaccgctgacattgacgatgacgttggtgtcgaggtcgcggatgcgaggataaatctcgctgcagaagtggtcaacgcccttgttctgcaaacccacgcagttgagcataccgctggctgtctctgccatacgcggataggggttgccctcacgaggattgagagtggtgcccttgacgatgatgcctcccagacgcgagaggtcaacaaagtcctcgaactcgagaccgtagccaaacgtgccgctggccgtcatcactggattgcgcagttccaatgcgcctatgtttgttgataaatccatgatttatggtaaagggttaagggtgaaggattaagggtgaaagattaccatttaaggtcattgatattaaagacgggaccatcggtgcagacgcaatggttgtgaccgtcggcgagttgctcgacacagcacagacatgctcctacaccgcaagccatatggttctcgagcgatgcctcgcaggggatgccacgctcgcgtgccaagcgtgccacagccttcatcatgggcgtgggaccgcaggtgtagagacagttgagagtggagagtttagagtttagagatgagtgctgggtgacgaagccgcgctcgccaagagaaccgtcctcagtggtgatgagcacctcgcccacctcgcgataagcatcgaggcacatcagattgccggcagagcgacctccaagcaggaaagttggcttaatgcccttcgcctttagccttctaccaagcaacagcaaaggagccactcctactccaccgcccacaagcagggcgctgtgttcatcgccaatcgtaaacccatgtccaagaggaagaacagcattcacgatgtcgccctcctgacgggaggcaagccagcgtgaaccctcgccgacttcctgcacgaggaacgaaatacggtcgccctcaatgtcgtggatgctgatgggacgacgaaggaaagcaccaggaacatcggctcgcagttgtgcaaactgaccagccttgcactctggcaaaggtccctcaacaggcgctgccaccaacttgacacagttggcagcaacgcgctccgagagtattattcgcaggtctaaaaccttcttcatacagttccgatgtggttcttggcaatatcctcgtcggtaacctgatagttcatgaggtcgccgttgatatactggtcgtaggcagtcatatcgatgagtccgtgaccggagaggttgaacaggatgaccttctcctcgcccgtctgcttgcacttcagagcctcacgaatggtggctgcgatggcgtgagaggattcgggagcagggatgatgccctcggtacgggcaaagaggatacctgcctcgaaggtctcgagctgaggaatgtcaacaccatgcatatagccgtccttgatgagctggctgacaatcatgccggcaccgtgatagcgcagaccgcctgcgtggatgttggcaggacggaagtcgtgaccaagtgtgtacatgggcagcagcggagtaagtccagcctcatcgccgaagtcgtagtcgaacttaccgcgagtgagcttgggacagctctctggctcggcagcgatgaactctgtgttcttgccgtcgaggatgttgtgacgcatgaatgggaaggcaatgccgccgaaattagaaccgccgccgaagcatgcgataacggtatcgggatattcaccagccttctccatctgcttctcggcttccaagccgatgatgctctgatggatggctacgtgattgagcacagaacccaaagtgtacttacatccgggagtggtcatagccagttctacagcctctgatattgctgttccgagcgaacccatgtgcatgggattcttggtgatgatgtccttaccggcacgggtggacatagagggagaaccctcgactgtggcaccgaaagtgcgcatgatgcttgagcgataaggcttctgctgcatggaaatcttcacctgatagacagcagcctcaagaccgaatacgctggcagcgtaggaaagggcagcaccccactgtccggcacccgtctcagtagtgacgttggtggtgccttcctgcttggcatagtagcactgaggcagggcggagtttatcttgtgggaaccaagggggttcaccgactcgttcttgaaataaatgtgggcaggtgtgccaagtgctttctccagttcgtaggcacggacaaggggggtagaacgatagaacttgtacttctcgagcacctcctcagggatgtcgatgaaactgtctgtggtgttcagttcctgtttgcagcactccagtgggaaaatgtgagccaaatcctcaacgcccaatggctgacgcgttgcaggatgaaggggcggcagaggcttgttgggcatgtcagcctgaatgttataccactgtgttggcagttcgctctctgtgagcatgaatctcttctgtttcgtcataatagcttatatattttgattaaatcctgtttaatcggcacaaaattaacaagaaatcagcaagtttgcaataaattgcaccttattttatcatatagcctcgcgcgaacacgtgcgtatatatataaaaggtattatgccaactcgctgagttccagccatcgcatctccttttcgtctagttctacctcgagctgtggcaggcgcttggagagctcggtaatgcgttctacaggcaatgttgcacccgatagggcttccactatgctggacttttcctgctccaaagcctcaatctcgcgccccaattgctcgtattcctgccgttcgcggaaggaaagcttgcggcgttcgtcgttgagacggggtttctgattattcgaagcgttctgactactcgatgtattctgaggacgcggctgcaggcgttcccattcgcgatactgcgtgtagttgcctggaaagtccttaatatcgccatcgccgttaaacacaagcaagtggtcaacaaccttgtccatgaagtagcggtcgtgactgaccacgatgacacatcctcggaagtcggcaaggtattcctcgagaatctgaagtgtgaggatgtcgaggtcgttggtgggctcgtcgagcacaaggaagttgggattctgcatcagcacctgacagagatagagccgccgctgctcgcctcctgaaagtttgtagatgtagttctgctgctgttcgggcgtgaacataaagtgctgcagga

SEQ ID NO: 2250 - DNA, 24131 bp, synthetic construct
  source 1..24131: mol_type = other DNA
  misc_feature 1..24131: note = Synthetic
cgccaacaatagcgaaagccagatagcggcgccccttgatggcacccaccaccttccgctttcgtccacgcacccattcctccttttctgtctgcgtcttggcaagtaccatcgctgcagtcatcaggagggctgcttttgcaatctctgaaggctggaaacggataccaaagaagtccacccagcgattggtggcattcaccatactaccaccaccaaacaccgccgtatagagcaacagaatcacagcaacgggcagcaaaacaaatgggagaagcatgaaccacttgcaagggatgcgatgcaccaaaagaatgatgacaaagcctaacaacaggaatcctgcctggctcaccatcggtgcccagtgatgacctccttcgaacgtcagacggctcgaagcactatatacttccaccagcgaaatcatacacaggaagaagtagatcatccacactcctttgtcacctttgaaaaggttccctccgaacaaggcgttcacaaattttcccatatatcatccatgcttttacagattcttcacacactccttgaattgctcgccacgatcttccatattcttgaacaaatcaaagcttgcacaacaagggctcaacagcacagtgctaccaggttttgccatcttatagcactcatccacacagtctttcatgctcttcacatcagcaatcggaataccaaatccatcgaatgctgcatgtagtttcgaattgtcaacaccaaggaagacaagtccgatacacttctccttcaccaagtcaaatatctccgaatagtcatttcccttgtccttaccgcccaggatgagaacgactggggtgcgcatactatccaacgcataccaacaagcattgacgttcgtggctttcgagtcattgatgaaatccacgccacgcaccctacctgctttctccaggcgatgttccacgccctcaaaggtcttcaaaccctcacgaatctgttccttgctcacacccgccaaatcagctgtgataccagcagcaagagagttgtagagattatgtttgccacgaagtgccagttcttcttgctccatgttgaatggtgtaggaccttcgatcacatattcatccttatccacataaccaatcacgctgttgctcttgaactcgctgaaggggcaaagtcttgctttgatgttatatttcttcagttcctccgtcacgatggggtcatcattccagaagacgaatgcatcatcaggggtctgattctggatgatgcgcatctttgaatcgacataattctgcatcttgaagtcgtaacggtcaaggtggtcaggcgtgatgttcatcaacacagcaatatctgccttgaagtcatacatattgtccagttggaaactgctcaactcaatcacatagtaatcatgctgttcttcagccacttgcaaagcaagactactaccgatattaccagccaatcccacgttgtagcccgcattcttcaggatgtggtagatgagcgatgtggtggtcgtcttaccattactacctgtgatacaaatcatcttcgcttgggtgtatctgcccgcaaattctatctcggagatgatgggaatattcttctccttgatcttcagaatcattggcgcattctctggaatgccaggactcttgatcacctcatcggcattgagaatcagctcctccgtatgatgtccttcctcccagacaatctcatgactgttcagaagttccttatacttgtctttgatggttgacatatcgctgacaaacacatcaaaaccttttttctttgccaacactgcagctccagcaccgctttcagctgcacccaatacaacaattcttttcatctgattttcaaagttataattgtaatagcggcaagcaggattgtgacaatccagaatcttgtcgtaatcatcgattcaaacaacaatccatgtggacgcttgatgaggtatttcacgccgtcctccatacgatgacgatagtgatcatggaaaggagcccgtttgaacactctccatttctcacccctcgcattacccttcttggcgtatgccacctgaagcatcacggaaacgctctccatcaggaaaataccacacatgatgggcagcagcagctccttgtgaatgataatcgccgtcacagcaatcacgccaccaatggcaagactacccgtatcacccatgaacaccttagctggataggcattgtaccaaaggaaaccaaccaaggcgcccacaaaggcactcaggaacaccatcacctcttccgtacccggtatatacatgacattcaaatagctggcgaattggatatgaccactcacatacgccaaaatacccaacgtcacaccgataatggcagagttgccagcacacattccgtccataccgtcattcagattcgcaccattgctgactgcagcaatcacgaaagtggtgaccaacacaaacaaaatccagccacacgcacgcttggtcttaccatcctgaataaaactgaacacctcgtaatagtcaatgttgttactcttcacaaacggcaccgtcgtcaccgtgctctttctggattcactcatgtggtacacttccaccttatctccaatctcacgttccacattctcgcgcaccaccgcgtcaggactcagccaaagcgtcaaacccacacagataccgaacatcaattgcgccagcatcttccatcggggtgcaagaccatccttgttgccccccaacttgatcttatcgtccaagaagccaatcacgccgaaaaaggcaatggtggcaatcagcagcaccatatagacattgctcagcttacccaacagtaaggctggcaccaacaccgctgccaagatgaccacaccacccatcgaaggaacgcccttcttctgcaccccataagggtcaatagaagcatcgcgcgcctcttctatatgcttcttcttacgcatatacttgatgaagtactcacctgccaccatcgaaataaccagtgaaaggatcaatgatgtcaaagccctgaaagacacataactgaacatacctgcaccaggaatgtcaagtccgtccaaatatttgaagaattcgtataacatattttatctgtcaaataaatctcaaccttcagctcggcggagccaaacctcaaatctcaaacctcaaatctcaaacctcaaatctcaaacctcaaatctcaaatctcaaatctcaaaagcaagctctcacctcttccttatcatcgaaatgatgcttcacacccttcacgtcttgataatcctcatgtcccttgccagcaatgagaatcacatcaccactcttcgccatcatgcaagcagtcttgatggcctgacgacgatccacgatggcaatcaccttcttcatctgctcctcatccaaccctgccagcatatcattgatgatatcctgaggctcctcaaatcggggattatcactggtgatgatgacgcggtcactctgcttcactgcctcacgcgccatcaatggacgcttgcccttgtcacgattgccaccagcaccacagacggtgatgacttcaccctttccttccaacacgccatgaatggcattcagcacattctccaacgcatcaggagtatgggcataatccacaatcgccgtgtagccagaaggagagcggagcgcctcaaaacggccgttcacaggcttcatcgcactcaatgccaccagcacatcctgttcatccttacccaacatgatggcagcaccatacaccgccagcaggttgctcacattgaacttgccgatgaactgcacgcccacctctttcccgttgatattgagatacatgccctcaaagtggcattcaacaatctttgccttgaagtcggcaggactttgtacagaataggtcttcacttgcgccttcgtgttctgcaccatcaccataccattcttgtcatcagcattggtgatggcaaaagcttctttgggcagattgtcaaagaaaagtttcttagccttgatatagttctcaaacgtcttgtgataatcaaggtggtcacgcgtaatgttggtgaacaagccaccagcaaacgtcaaaccaccgatacgattctgtacgatactatggctgctcacctccatgaaggcatattcacatcctgcctccaccatccgagccaagagggcattgagcgtgatagggtcaggcgttgtatgttctgtcggaatggcttcaccatccacatagttgcacactgtggagagcaatccagctttatgtcccatgtgacggaacatttcgtaaagcacagtggcaatggtagtctttccattggttcccgtcacacccaccagtttcagcttcttggttgggtcaccatagaaagtggttgccacctgtccgacgctctgttctgtgtttgccactcgcacataagtcacgtttgcatccgcatccgctggaatcgtctcacacaacacagcgcaggctcccagttcctgtgccttaccaatgtagttgtgtccgtcagctgctgtgcctctaacagccataaagagatgacctgcagccacctgacgggaatcaatctgcacaccacagatttctcgctccagatcgcccttgacttcaaggacatcgagcttacttacgagtgtctttaatttcatatcttaaaccattttcttatccaagctctaaactctaaaccctaaactctccactaattcaacaccaacgtcaccgtctgtcccttcaccaccttgctgccactcgacagactctgactcgtcacttttcctcgtccactcatcctcaccttcaaacccctgctgctcaaggcgcaaacggcatccttcgcacccatacctaacacattgggaacaatgttgtcgctcactttgaccggttggaactccacgcctgaatggcctgacgaagccacgccccattcatagccctttccgccttctgatttcaaacccagctcatgcaacacatattgtgccgacaccacattgccattcttcacgtcgggtacatacaccgctgtggaatcctttgccaagttgatgtcagtcgtcacattcttcgaatagattctttgtgcaatcttcgagaacacaggaccggcctgaccaccaccacttgctacatagtaagcatggcgaatcgccacgatgcaagtatatttcgggtcttccgaaggatagtatccacagaagctcaccaagtgttcattgtgtccagccttatagccgccacctgttgccacctgtgccgtacccgtctttccgctcacatggaaataaggatttcctgctcgctttccaagaccatccttgtcattcaccactcgatagaggatggcacgaatatcatccaacgcctgctggcggcagatgcgtggtttgatgacttctacagggaactcttccaccatctcgccattctttgagatacccttcacgaagcgtgggcgcaccatctttccgttgttggcaattgcattgtagaagctcaccgtgctgataggaggaatctgtgtttcatatccaatggacatccaagccaacgctgttgccgaccagttgtccgacattctgtaaccacctgtatggtctttgtgaggcatacggatattcggattggctgcaccatcgaatggcaatcccagcggagtgccaatacccactcggcgcaggccctccacaaacttctcgggctggttgtgatagtatttgtcaatgagtttgctcacacccacgttactggacaccatcaatacgtgcggcacatcaatggttccgtagccacctctatgccagttgtggtctttcatcatcgctccatacatattgcagataccgccacccgtctccacataatccgttggcttgatgtatccgtcatcgagcgccaccagaatggaagccgtcttgaacgtggaacctggctccatcaaggctgccagcgcatagtttcgtgcctcataatattcgccatcgtcgtagcgcatcagattcacgattgccttcacatcacccgtcttcacttccatcagcaccaccacacccatctcggcattcagttcatgcagtttctcacgaagcgcactctcacagatatcctgcatgctcacgtcgatggtgctcaccaagtcataaccatccacaggctccttgtccacgatagacagatatttcgacagcaccttcttgttgtgcaccttacccggcacacctctcagcaacgagtcgtatgccagttccagacccgaacgggcagagtccttggcaccaaacatttctcctaatgtgcgtcgagccagagagccgaaaggcttgttgcggttgttgcgctcctctgccaccataccgctcctgttcttgttcttcaggttgaagataggcaacttcgcaatctcatgatactgaatgaagttcagcacagtatgcggacacacctcccaatagcgtttgcgcttctccaaaccttctgtcaggtgcgatttatattcttcaaaagtgaattttggacagatttccaccaacccacgacagatcgtgtccatattcaccatccacatcgaatccttctctgccaactgctcagggtcatagattttctgcttcggtcctgtccctatcgaatcataccaccactcgatgcctgaaaggaaatccacatagaccttatagtcaggaaggctgctcgccatcagctggccgtcagcactcaggatgttgcctctgttgggcttcaggagcatcgtgtcactcacactcacggcgcccactttcttccactccctgttctccaccgtggcggtcaggatggccttcacgatgatggcgatcatcaccaaagctgcaatcaccacaatgcccgtgatacgagtgttgatatatttcttgtcaaacttcattgtccttctgttttcttagagttttcattcgcctccttcttctctccttcttcctcttttttcttgtcactcacttcttctttcttcacctcctcggttggttcttcgggtgccaccagatcttgcgaatccaccagcacctcctcaggcgcctcctcttctgccgcactacgtccgttttgcttcctgatcaagaagggaggcgtgatggaattgtgcaacaggctgtcgggagtgcctcgaagactcttctccacattcgactgcctcgtcaggttcatcaattcactcgactgggtgagcacgttgtacttcacctcctgcaagcgaccacgcaaactgtctatgaggattgtgtcctgctgactgtcataacggttgcccgtgtagataatcatcagcagtacacagaacatcacaaacatgatttgcttcaccatgaatttgctcatcaggaaatcgccaccgaggatcgatttaatcgatatttcacctaagtcgtcttgattctcatcggtgaattttcgaatcgcctcaattgcttcctgttcctctgttttcagttcatcgtcagccccaaaatcatctggaggggtcatcttcgactcttccaaatccattttctgtttttcttcttttttcgacatacaaatctgttgggcttcttcttaaaaaacttttctttaaataaataatgtgtaactcactttatcgccttacgttggcgtggataacctctgtgtttataaaaattattttcagattctttctgctattctcagtttcgcactcctgcttcgagggtttcttgtcatttcctcgtcgctcggaacgatgatttgtcggttcaccagacggtatggggtgttcaccctgccaaaaaagtccttgtcttcctctccttccacattgcccgtcttcatcaggttcttcacgatgcggtcttccagcgagtggtatgtgatcaccaccaatcttcctcctggcttcagcatctgcgtcgcacctttcagcatgtcgcgcagggcctccatctcatgattcacctcgatcctcagcgcctgaaacaccttcgccatctctttcttctccctctcattgcggaagaaaggcttcacgatgtccaagaaatcacctatcgtctccactttcttcgtctgtcttgccttcacaatcgctgaggctatctttctgctttgcttcagttctccatacaaatagaaaacatccgccaaccgcttttcttcatacgtgttcaccacatccgctgccgtcttgcctgcccgctgattcatccgcatgtcaagtttcccttcgaaacggaacgaaaaacctcgttcgctgtcgtcgaaatgatgggaactcacgcccaagtctgccagcaacccgtcaatctgctccactccatgatatttgaggaaattcttcaggaatcgaaaattgctcctcacaaacgtgaacttctccgcatcaaacccctccgcattcttctccgcatcggcatcttggtcaaagctgtacagatgcccaccagcacccaatctcgacaagatttctcggctatgaccgccaccaccgaatgttacatccacatagacaccaccctcaccgatattcaacccatccacactctccttcagcagcaccggcacgtgatatgtcatctcctgttcacccattacatctctaaactctaaactctcaactctacactatcacccattcccaaacgcctcttccaactcactgcccaggtcagcgctgtcgttgatgacttcctcaagtgcctgcttgctccatatctctattctgtccaccatcgccaggaaacgcacatcaccctcaatccccgcatattgcaacttcctcttcgagatgagcaacctgccgttactgtccaactccacaggctccgcatcagcttcaaactttctcaacatcatctgctgcttgctgttaaactggttcacctgagcacgcaaactgtccagttgagcattccacaccgattctggatacagcaccagacatttctggaacacatcgttgcgcagcacgagactcgtctcgccctccgcctcgaggatcttcctgaactgcgccggcaggaaaaccctacccttcgcgtcagtctttgctccgtaatcacctatgaatcgcattgtcattttctcgttatcgtttgaacttgtttttcagccgatttttgatgtcagccaataaataatgtgcaaatatacataaattccccacaattccccacttttttattattttttttcaaaaaagttatcaacacccttgttaataactatataactcactgattttctataatttagtaaaattacccatttggtgggggaacctcattttgtaagcccgactttacaatcgccttccgtttttgcgcttccatccctcccccaccttccaactccgttctcatccattcccattttttgttcccccacgagagaaaatttgcgcccccccgtgaggaaaatatttttctctaactagccagcaaaaattgtccttcatggagtccgcttggcactctctggtagtccgcttggctcgggctccccttccgcttggcttggactcccaataacctgcctctgctgaataataagcgttccttattgaacaataacctgccattattcaggaataagtgccacttattgagaaatggtcggcatatgtttgaaaaagatttgggaaactgttagcgtatctgtaggttagagagaactataggttaagcttggtttttcaaacgcaaggtaaccttgaggtaatcttgaggtaatcttgaggtaaccttgaggtaatcttgaggcacacaacgagctgatcatacatcaaaaatgcccccgttaaggacgagggcaaaacctgaatgttttcacaacggaataatccttattgtgatttgcttcaaattaggatggcaaatttactacgttttttgaatttctccaaatttttcttgacaaaatcattgcttttccgtaattttggcgtcaaataacttcaaattagaaaaaccaaaaccgttatgaaaaagattttaggcctcgatttaggaacaacaagcattggttgggctgtagtgaatgaagccacaaacaatgaagaaaaatcttctattgtcaagttgggcgttcgtgtgaatccgctaaccgttgatgaacagaccaactttgaaaaaggcagacccataacaaccaatgccgatagaactttgaaacgtagtatgcgtcgcaatttacaacgttataaactacgtagagagaacttgataaattgtttgaaagagcatggttttatcaataacgattccatcttatgcgagaatggtaatagaaccaccttcgagacctatcgtcttcgtgctaaagcagcaaccgaaaagattagtttacaagaactggcacgtgttctcctaatgattaacaagaaacgtggttacaaaagtagcagaaaggcaaaatccaccgatgaaggcgaacttgtggacgggatgaccgttgctaaaacactctatgaagaaaaccttactccaggacaatactcgctcctgcttcttcgtaacggaaagaaatatcttcctgattattaccaatcggatcttcatgccgagatgctaaaaatatggcacaagcaacagacattttatcctggcatcttgacaccagatttcatgaaagcacttgaaggcaaaagcaaaacgaacacttccaaaatattctatgcgcgttttggcattcacacggctgacaataaaagcaaggacaagaaactacaagcatacgaatggcgtgttgatgccttaaaccgacaattaactattgaagaagtcgcatacgttattagcgacctaaacggacttatcaatggttcaagtggctatttaggaagaatcagcgataggagtaagaatttgtacttcaacaagcaaaccgtcgggcagtatctgatgcaggaattagataagaatcctaactacagcttgaagaactctgtcttttatcggcaggactatcttgatgagtttgaagccatttggaacacacaatcccaatatcacccagaactcacgcctgaactaaagaaagagctgggcaacatcatcattttctatcaacgtcctttgaaaagtcaaaagggcttggtggcaatatgtgaattggagaacgaaaaacgggaagtagaagtggatggcgctaagaaacagattacaatcggatgcaaagtctgtccaaagtcctcacccctgtttcaagagttccgcatgtggcaacgcttgaatgatattgtaatctatgattccaatgcaatgcccgaccttttcggaaatggcagagccacaaaacggcgtttgacagaagaggagatgaacactcttgcttttgaactaagcattaaaggtaaaatgaccaaacagcaaatgttgaagtgtctgtttggaaagacggctgggcttgacatgaacttcaaggacattgacggcaacgaaacgcaagcaaaattattcgaagcctacctcaaaattgtagaaatgtctggacatgaaggatatgaccttgccaagttaaatgcttctcaaattttagatgttgttgaaaaagttttcacaggattaggttttaacacagcaccactctatttcgatgtatccattgaagggaaacaattcgacaaacagcccatgtaccagctgtggcatctactctattcgtatgaaagcgataattctaaaaccggtgatgccagccttgtgaagaaaatacgagatatcttcaatttcgacaacgatgactatgccaaagtcattgctgctgtttcttttaagcccgattatggaagtctcagcgcaaaggctattcgcaatcttctcccaatcatgaaaaaagggattgaatatagcgaagcctgcaaatcaaaatatggcacccactctaaacgttcgctgacaaaagaagaacttgatcaaaaagaactgaaaggttatctggatttgttgcccaagaatagccttcgaaacccagttgttgagaagatattgaatcagatgataaacgtggtgaatgaagtagtcacaacatatggtcctattgatgaaatccgtattgaaatggctcgtgacttaaagcaaagtgcaaaaaagcgtgaggataaaacaaacgacatcaatgcgatgaatgcctatcatgagcaaatcaaaaaaattctccaagccgctcctttcaatatagagcatgtaagtcgtaacgacattatacgttacaaattatatgaagagctgaaagagaatggatataaaaccctttattccaacaagtatattcccaaagaaaagttattcagccgcgagattgacatagagcatatcataccacaggcgcgtttgtttgatgattctttctcaaacaaaacgctggaatggcgtagcatcaatcaagagaaaagtaatgccacagccttcgactatgtaaaaggaaaatatggagaagctggggcgaaggaatacaaacaacgtgttgacgaattactcaagcagaaagttatcagcaaggcaaaacacgcctatttgctgatgtcagtggaaggtattccaagcaacattcttaatagagaactaaatgacacacaatatatcgcaagaaaagcacgcgaaatattagagcaggttgccaaagtcgttgtgccaactactggcaaaattacaaagcggttgcgagaagactggcagttagtgaatgtcatgcaagaactaaactaccctaagtatcagcaattaggattggctgaaactttcgaaaaagaatggacaaagcgtaatgaccaccgacatcatgcaatggacgcattgactatcgctttcacgaaactgagcattattcaatatttaaataatctgaacgcacgaagcgacaaatcaagtagcatctacggcattgaacagaatgaactgtatcgcgacaaacatggctctcttagatttttaccaccaatcccattggatgaattccgagcagaagccaaacagcacttggaacagattcttgtatccatcaaatccaaaacaaaagtggttacgcgcaacaccaacaaatcaaaatccaagaaagtagagaaaggctataacaaacgagtacaattgactccgcgtgggcaattacacaatgaaaccatctatggcagcagccaacgatatgtgactaaagaagaaaaagttggttcttcctttgatgtagcgaagatttccaccgtcgcgaacaaagcctatagagaggcattacaacgtcgtcttgatacatataatggtgacgtgaagaaagcatttacgggcaagaactctttggaaaagacacccatttggttggacgatttgcacacacgcgccgttcctattaaggtaaagtgtgtaactatggaaaccatctataccatacgcaaactaatctctaaagatttgagaatcgacaaagtgattgataagcatattcaagatatcctccgtacacgtctcgaagaatatgaaggtgatgctaataaagcgttctctaacttggacgaaaatcccatctggttgaatgaggagaaaggtatttgcattaagagtgttgccatcaatgccggattgagtaaacctgaggccattcacgagaagcgagaccatcgtggacaactgatatttaacaaaaaagggaacaaacaagctgcagactttgttcaaacagccaacaaccatcatgttgccattttccgcgatgcagaagggaaactacaagagcacatcgtatcattctacgaggcggccatgcgcgccaaccagggattacccatcattgacaaagaatacaacaaggcggaagggtgggaatttctttttacaatgaaacagaatgaatactttgtattccctgataaaaacttctgtccttcagaatatgacttgatgaatccagaaaataacgccatcattagcccacatttgttccgagtacagaaactcaccaccaaagattatttctttagacaccatcttgaaacaacagttgaagacaaaaatgaactcagagaaatgacatggaagcggattcgaaactgtgatggactaaaaggtattataaaagttagagtcaaccacattggtcaaatcgtagctgtaggagaatattaacatgatcaagaagaccctctatttcggaaatcccatctacctcagtctccgcaattcacagctggtactgaagacgccagatgcggataaattggaagagtcgttcaaacgggaagcagaacggacgattccaattgaggatatcggtgtggtggtgctcgacaacagacgcatcaccatcacaacaggagcaatggaagcattacttgacaacaattgtgccatcatcacatgtaacagcacaaatctgccggtggggctgatgctgcctctgagtggaaacaccacacagagcgaacgtttccgcaaccagatagatgcgtcgttgccacttaagaaacaactttggcaacaaaccgtccgacaaaaaatcttgaaccaggctacagtattgaacaagaacacaggagcaatcgtcaagaatatgcaggtatgggcaaacgaggtgaaaagtggcgacccagacaacttcgaagcccgtgctgccacttattattggcgcaacctcttccccacgctgcctaacttcgtgcgtggacgtgaaggtgagcctcccaacaatcttcttaattatggttatgccatcctacgggcttgtgtggctcgtggtttagtgggaagtggactcttgccaaccttgggcatccatcaccacaatcgctacaatgcctattgtctggctgatgacatcatggaaccatatcgtccttttgtagacgatctggtcatcaacatcatgcaacaatatcccgattacagtgaactgacacttagcatcaaggcagccctactcaccattccttcacttgacgtgatgctagatggtaaacgcagcccgttaatgattgctgtaggtcaaacgaccgcaagcctcgccaaatgctttaacggcgagttgcggaaaatctcataccctgaattataaataaagaatatgagtagtctgtcacgtcttactgaataccgagttatgtggattttagtattcttcgacttgcccactgaaaccaagaaggacaaaaaacgatacacggattttcgcaagaaactccaatgtgacggattcaccatgttccagttctccatctacattcggcactgtgccagcagcgagaatgcagaggtacatttaaaaagagttaaatctttccttcctgagttcggaaaggtcggattgctaactataactgacaaacagttcggaaatatgcaacttttttatggacagaaaccaaccgaaccgaaagcaccaggtgtacagttagaattattctaaaaatagaaaaaccagccgtcaagctggtttttccatgccatattcccttcttttttattttctaatttcacctacaacatcttgttaatctgcaatttacaaagattgtggtgtatatgactctgcaaagatactaatttgaaagcaaatcacaaccagagtggctctccatcgcatcacggatgcggtgtatatgactctgcaaagatactaatttgaaagcaaatcacaacgtcagagccatacggctcaccagttagtggggtgtatatgactctgcaaagatactaatttgaaagcaaatcacaactcccaacattcagctgagcgtgaaggacacggtgtatatgactctgcaaagatactaatttgaaagcaaatcacaactgaccgaggtggatatggagcgcacctattggtgtatatgactctgcaaagatactaatttgaaagcaaatcacaactggtgtcttgttgcccttgctgtcggtcatggtgtatatgactctgcaaagatactaatttgaaagcaaatcacaacggcataatgctaatcttttaactgttaaaggtgtatatgactctgcaaagatactaatttgaaagcaaatcacaacacgtttcattttgttatctcgattgtttatggtgtatatgactctgcaaagatactaatttgaaagcaaatcacaacaagacagttcttgacattcgctacgaaattggtgtatatgactctgcaaagatactaatttgaaagcaaatcacaacggctgcttgtgccacacgcagccttacatcggtgtatatgactctgcaaagatactaatttgaaagcaaatcacaacttcgttcaggacaatctcttgtgaggatacggtgtatatgactctgcaaagatactaatttgaaagcaaatcacaacttgcggctaaaaccaaagcggaggcacggcggtgtatatgactctgcaaagatactaatttgaaagcaaatcacaactctccttacactcctgtttggcaacagtcaggtgtatatgactctgcaaagatactaatttgaaagcaaatcacaacggttattaaatgtcgctgctggatggtgttggtgtatatgactctgcaaagatactaatttgaaagcaaatcacaacggaatccgttcatcgccaccagttcaaagggtgtatatgactctgcaaagatactaatttgaaagcaaatcacaacagggtagcctctgttcagattaaaacattcggtgtatatgactctgcaaagatactaatttgaaagcaaatcacaacctgcttgccatcgctatgctcattgcggtggtgtatatgactctgcaaagatactaatttgaaagcaaatcacaacacccagtccgcagtcctcgaagagtgcgaaggtgtatatgactctgcaaagatactaatttgaaagcaaatcacaacgatgatgccgatacattaaacggacggttgggtgtatatgactctgcaaagatactaatttgaaagcaaatcacaacagcagccgccaacaggtcttgcgtttcctggtgtatatgactctgcaaagatactaatttgaaagcaaatcacaacgcatcgacgtggattgtggctgcaccaaccggtgtatatgactctgcaaagatactaatttgaaagcaaatcacaacaaatgttaaaaagtaccaaatattacacttggtgtatatgactctgcaaagatactaatttgaaagcaaatcacaacggcccgttcaccgtccccttgttttccatgggtgtatatgactctgcaaagatactaatttgaaagcaaatcacaacgcatcgtttttgatgaacgaaagtgataagggtgtatatgactctgcaaagatactaatttgaaagcaaatcacaacgagatgcctcggctatacaacctaagcttggtgtatatgactctgcaaagatactaatttgaaagcaaatcacaacgttaagattaaatcagctccatatttcacggtgtatatgactctgcaaagatactaatttgaaagcaaatcacaacagaagccaccccacttgttggtcaagccgtggtgtatatgactctgcaaagatactaatttgaaagcaaatcacaactccgtgctcgaacaccgtcacccaccggtcggtgtatatgactctgcaaagatactaatttgaaagcaaatcacaacatgtttggcatacaacttatccacatcataggtgtatatgactctgcaaagatactaatttgaaagcaaatcacaactacgtatgctacgatgaagatgcaacagggggtgtatatgactctgcaaagatactaatttgaaagcaaatcacaacagtggcgactctgctaaaatcggttcaagggtgtatatgactctgcaaagatactaatttgaaagcaaatcacaacacggttctttgtgcacttaatcgtaacgttgaattacgctcgttatcgcttgcgctttcgtaacaacgtggagaaagaacgtaggatgcgcctcaacaattaaaataaaagtgtttttattttgtattgtcttcagctttcactacctttgcattgtaaatcaagaaatcatgagcaatacagattgtttaagcaagttttccaaaaatctgttttgggatgtcgatacatctcaactacagatgaatgctcatgctgcctatatcatccaaagagtgatggaatatggacagatggatgattggcgactcattaatcgcttttatggtcttgacaagattgtgaatgtgtgtcaacaattacgaacgctggatcccgtttgtctctcttttctttgcaccatatcacacactaaaccagaacaatatcgatgctatcacttcagacagtctaccccaacaccttggaactcctgaaaaccctcatgcagttacccatattgagcgacatgagattagtgggtggaacatcacttgccttacaatatgggcacagaaggtctgtcgatttggatttcttcggaacgacaaccagtgacgttgatgaactgactgaaacgctgcgggaaaacgttggggaattaactatgctttcagcatcaaaaacgataagagtttataatatctccaatgtcaaagttgatattgtcaactatatctacccttggatagatgaacccatcaaggagaatggactcattctggcttctccaatagatattgcagccatgaaggttaatgcggtcatcggtaggggtacaaaaaaggattttgttgacatttattacttgttgcagcatttctcgtttgacgatctgatgcatttttacttgaagaagtattctgacggctctgagtatagagccttgttgagcatgacctattttgatgacgctgaccctcaccccatgccttatatgttcgaagatattagttgggaaagaatgaaggagtgcatctgtatggaagtggaaaaatacaatcagcaacacggctagataccgaacggtcacctaaagttttccccaaaagtctcgatgtaatgacactaacttgaaaacaaatcataacgccaccaatgtctttccatcggtggcgttatagatgattgtatttgaggggagggtcaaaaagtcaatggttcaatggaaggctcacgacgaaacgagtgccgctggtgtattgggtgtcgagcgtgagggtgccgtccatcagcatgacgactcggcggcaaaggaacagaccgagacccaacccttctgtgaacatatcgactttggtaaatttatcaaagatgaattcggctttgtcggatgggatgccaggtcctgtgtcttcaacggtgaagttcacaacatcgtcagtcgtttcgatgcgcagggtgatgctgccttcgctggtgaagtggagggcgttgacgagcaactctgtgaggacgatgagcagatggtgacggttcgtctgaagggtcagttcatcatctacatggctgtcgaggtgcatctctacggtatgaggtatcaaactgctggcggtttcgacggcttcgtgtgccaacatattgcagcccaccgtttcgttggtgatgatggtctgacggctctcgacaagcgatgctgtgagcagtttgttcaccatatagtcgagggcattggtctgcacatacatggtctctgccatctcctttttctcgtcatcagacatcgcgtcactttcgcacaatatctgcgagaatccatgaacgatgttgagtggtgtatgtatctgatgcgtaatgtcttgcatgaactgcgtcttctgctcacttgcccgtcgtgccagcagggtggcttgctcgagttccttggtgcgttgctcggtctccaacttcgtcttctctgcgtcgttgatgtgctgactgatactctgtcgcatctggcagaaactgttctgcaactgtcctatcaagtcggtgcgctggctgtgtggcagaatcttctcatagtcgccatgacctatctgtctcagttcggctgccagcagtcccaaaggctgtgtgaagtgcttcacaatgcggtggcaacccatcgccagcagcaacaatccgataatgagcagaggcaacagaatatagttcagcctgttgtatccacgcagcagttcgttggaggggcagacgagtgctatgctccactgggtgccttcgagcggtcggtagagcacgatgtgtgaggtaccatttattttgacatccatgtgtcctgttcgtccgttggtcatctcatatcccaatgccacaatatcggtgtgatctctggggtccacgcctgtgaagatggtctgcttgagcagtttcgtggtgtcggggtgcacaaaatagtgtccgtcggcacccagcaacataaagtaggagttttggtatggatgctctgctgtgatggtctctgtcagcctcttcagcgacaagtcagtggagatgacgcccacgaactttccctttcggtcgttgagtggcatgcagtaggatgctatcatctctgggcttgagagcgttcctgcattgtagtcatcgaagggatccacccagcaagcggtctttttttggcgtggcgtcttataccacaccttatcataatagtcgtaatcggcttcacggacggtggccacagagtcttttcctggttttgaattttcaaggcgaacggaataggcagagaaaccatattcttcatcagggaagaaatcgggttccatcgtgatggagcagccgtttgtgttgggatggttggcaacgattcggtgggtgtacttcagcagggagtccttctcgttgtgaaggttgacgagccaaatgatgttgcgcgtggcagtttccaactccaccatatatcccttgacacgcaatgccgtattgtcgaggacgtgcgacgcctcatcgatggactcttcacggatgatgttgcgtgactgccaatagaggaatccgagtgacagcgagaatatcagtagcacgacaaacaagatgtcgagacagagcctggtggagagcgactggcgaatatttttcctcatctctatcataggcgtcctcctctcttcttgtcagcgatgtcgagcagattgtccaacagagccgtggttatttcggtatgttcctgtatcttgtcagccatctggcggaattcgtcggctttcatgtcggttgcacgctgacggaaatcggcgatggtattgtggatgaccttgacggattgctccatccggtcgctcatgttcagaatgacggcatctttcatgcgatctgcctcacgcgcctgctcataagctatttcaaggtctttattacgctggctgagcacgtcggtcagatgggtgatatgagcgatgtgttgactgatactctgctgcatctggcggaatgtattctgcacgtaacccacctcgtcaggacgattacttttcttcaccaattcatccatctgaccctcggccatacgatgagcttcatctaccaacttctgcaacggcttcaactggcgatgggtgatgaagaaacagaacagcgccagcagcaacaggccgatgaaactgatgatgattgtatagcgcaaaagtgagttgtaggaactgaaaatgtcactctcaggacatacaatcgccacgctccatcctgcattctcaaaggggtggtaaaagatgaagtcctgcttgccgtccatgtgaatctcgctatgtccgatatggccagtcttcatggatatggctgccagatgtccttcgttggtcggttcgttgaaagcctccgtaaagaaggcttcatgctcttcgagcgtgctgtcagggtggataatcaggtgtccgtcagtacccatcactgaggcatgcgagttggggaatggtcgaagcgagagcaccaagtcggcaaaccacttcatcgagatgtgtaccgacaaaacgcccaccagttcaccctctttgttgtgcagcggcataccataggacgtgatgatggaggtctctccatgttcaacatcgacataagggtctatccagatgggctggccgtggtgcaggggtatgaagtaccatttctcacgagtatagagtttctttccaccattcaccattacttgtatctgtgtcgaatcagtagggtcgcggtgggcatacacctcgtaatagatgccgtattgcggatagacacctggttcgaaagcgatggtacaactctggatgtgagggttctctctcaacaactgctgacaaagactgtccatgatttcaggcttgttcaaacgcttctcaatggtccagtgccagctgcgcgtggcagtctccacctcgttcagggtgttgtcaatgcgcaattctgtcgtgcgcagcgtctgacgagctttctccatggcctcctgatagatagaattacgggcatggtggaacatgatgaagagggcagcgacgaagagaattgacacgaatccgaccacccacagcacaacttgcgtggtcaacgaatgacgggattgtttttcagttactctcttcatcagatatagatttggtcttcatcgattgcaaatttagataattatttatatatcacaaacaaatcgagataaaaatataaacaatttgcctcgaaaaagtgagaaagtacaatatcaacaccgccctatatgacatcgttacaagaatttgccccatttctatacttccatcatactacgcccttcttacgatagcagaaaaaataaaaataaaagcgattttattttgtattgtcttcagctttcactaactttgactatgtcgaaattactcacgctcgaaaaaactcaaataaatatttggttctttcctcacttaatcgtaactttgtccccgaaaatctatttacatttattttatctaaaactacaaacgtatgaaaaagaacattttgagtcttgctgttctcgttgcagcgctctgttttgctctgccttctcaggcacaagttaagtttggtgttaaggctggtttgaatgttgacaacatcaacctgaaagattcttacggcactctcaaagccaaaaaccgcacaggtttctttgctggtgtaacagctgacgtaacgattccactcgcaggtctgggtgcagacatcgctgtgctctacgataacaaggtggtgggcatttcagacggagtcaatgaagccaacaagacattgcactacatcgacatgcctatcaacgcaaaatacaccgttggtctcagcagcttggcaagcgtgtatgtcgcaacgggacctcagttctcttggaacattggcgaccgtcactggactcctcagtatatcacacaggattgggagatcaagaagtctgagttttcttggaacatcggttgtggtgtgactgctctcagccatcttcgcgtaggctacaactacaacattgctatcggcaagacagccgagttcgacctccttgctgttggcgtagcaggtgctaagggtaaactgaagaacaacacgcaccagatctctctgacttatctcttctaattgatgttcgcagacatcatacttcctataccattcgacagcttcacatacctcgttcctccctcgatggaggcaagagtgatgcgaggctgtcgagttgttgtgccccttggcaagaacaaaatctacacaggcgtggtggctcgcacacacgacaatgccccacagggcgtggagatgaaatcggtgatggaagtacttgatgaacagcctgttgtcaacgagcagcagttcactttctggcaatggattgcaaactattatctctgccctatcggcgatgtgatgaaagctgccctgcctggtgcaatgaaaccaaaggatgaagctgccctgaaggaatccactcgcaaacgaagaggttccaataccctctttcaaacctcaaaccttccatctcaaatctcaaacctttctcctgcccagcagaaggcatacgaggagattgagcactctttcttgacgaaaaacgtcactttgctgcatggggtcacctcctctggcaagaccgaactttatatccacctcatcagtaaatatcttgctgaaggcaagcaagtgctttatctcttgcctgaaattgcgctgaccacgcaaatcacagaaaggcttcgtcgtttctttggggaaaagatgggggtgtatcactccaaattcactgatatacaacgtctggagg

SEQ ID NO: 2251 - DNA, 24128 bp, synthetic construct
  source 1..24128: mol_type = other DNA
  misc_feature 1..24128: note = Synthetic
gccagttgttgggcattgagtggcaggacaacggcaatacacacaaagagcatggaaaaaaacttcttcatagtcttcctattttacctttctcgtgcaaaaatactacattattattaattatcaattgtcaattatcaattattttgtatctttgccacgaaatgcgcatagacatcataaccgtcttgcccgaactcattgaaggttttctcaatgagagtatacttggacgggcacaacgcaagggattggtgcaaatacacctccacaacttgcgcgactactccaccaacaagtggcgcagagtggacgattaccctttcggcggctttgccggtatggtgatgcagtgcgaacctatagacagatgcatctcggaactgactgccgaaaggcactacgacgagattattttcaccacacccgacggagaacagttcacacagccgatggccaacaccctgagcctgtgcgaaaacattatcatcctgtgtggacactacaagggcatagactaccgcatcagggaacacctgataacgaaggaagtgtcgattggcgactatgtgctgacgggtggtgaactggccgcagcagttatggccgacgccatcgtgcgcatactgcctggagccatcggagacgaacagagcgccctgagtgactcgtttcaggacaacctgctggcagcgcccgtatatactcgtcctgccgaatacaaaggctggcgcgtgcctgaagtcctgctcagtggacatgaggcaaaaattaaggagtgggaactggctcaaagtctagaaagaacaaaacgactgaggccagacctgttgaaaaattaagaatgaagaatgaagaatgaacttttggagcagcgagagcagtacaaagcttgctataggaatgccgagtcgcgacaaaagtcatggaacgaagttacataagaatgaggacctctccccgaaagccttgcttcccttaagggaaaggtttggaaaggctcaacaattgataagatatcatgtcaaacaacaaaaagttaaacctctacatcatagccgggtgcaacggtgcgggaaagacgacagcctcgttcaccgtattgcctgagatgctcgactgccacgagttcgtcaatgccgacgagatcgcgcgtggcctctcgcccttccatcccgagggggttgctatacaggcaggccgactgatgattgaccgcgtgatacacctgctgaaagaaggtgagaccttcgccttcgaaacaacgttgtcgacacgctcgtatgtaaaactcatacagcaagcacagaaacgcggatacttcgtgactctgctctttttcgcactggccacacccgaacaggctgtgcagcgcgtagcaaagcgtgtaagtcagggaggacacaacattccgacggacgtcgtctaccgccgattcgaggggggactgtcgaacctcttcaacctgtatatgcccatcgtcgactactgggcactctacgacaactcgaacatccccacacagcacatcgcaagcggagaactaggcaaagaacccgtggtgctacagaaagataagtttgaggaattacgaaccaaatataagaccgaagatgagcaaaaagaagaatgatttcgacgtgttgctcatgcagcaacgcatcgacgagggtatcctcttggcgcagcgccgcttgctcaacaaaggtctgcacgacggactttcgttcatcgtatgtcagggaggcagagtgcgtgaagtgccggcaagcgaaataaaatggtgattatagcgcaaagcgcgagtgaagagttaagaattaagagttaagaattaagaattaagagttaagagttagaatgaaataatcggacggctcgtccaagaataaaaatatgatgaatatttctgaaaagattaaatacattggcgttgatgatttggacatcgacctctttgaaagtcagtatcacgtgcctgaaggcatgagttataattcctacctcgttctcgacgagaaggtggctgtgctcgacaccgccgaccagcgcaagagcgaagcatggtggaataatcttaccgagggcctgcaaggacgcaaagtcgactatcttgttgtgcatcacatggaacctgaccatgcggccaacataggacgaatggcagagaccttccccgagatgaagattgtgctcagtgccgccgccacgaagatggtgccaaacttcttccccaaacaagacctaagcacaaaactgcttgttgtgaaggaaggcgataccttggaactgggagagcacactctgcagttcattgccgccccaatggtgcactggcccgaagtgctcatgagttacgaacagaaggagaaagtgctgtttgcagccgacggatttggaaagtttggcgcactctgccacgagcagtataatgccgacggaactcttgccgactgggcgtgtgaggccagacgatactacttcaacatcgtgggcaaatatggaatgcaagtgcagaacgtgatgaagaaagcatctgcactcgacatcaagactattgctcctttgcacggtcctgcgctcaagggcgaagatttggcaaaggctgtaagcctctacgacacttggagcaagtatgaacccgaaaccgaaggcgtgtttgtagcctatgccagcatacacggaggaacgaaggaggccgcactgaagattgcagaaatgctgaaagagaaaggttgccccaaggttgctaccagcgacctcacccgcgacgatatgggcgaagccatagaagacgccttccgctaccccacccttgtactatgtgccgcttcctatgacgcaggactcttcccgccgatgcacgacttcctgtggcacttgcaaatcaagaactaccagaatcgcaagttcgccttgctcgaaaatgggtcgtgggctccttcagcaggtaaggtgatgaaagaaatggtagagagcatgaagaactgtgaaatcattgctccgctggttaccatcagaagccgtatgaaagagagtgacctgcctcagatggaagcgctggtggatgcagtactaaattgagcattgaacattgaacattgaacattgaacattgggcattgaacattgaacattgataactgaaacctttctcgggaaaggatttaaaagggtatataaactcgtaattaatatatcactatgaagaaacgtctcttttcgctattcgtagcaaccctgatggttatcgccgctatggccgacggacaggcaaagtatgtcttctacttcatcggcgacggtatgggtgttaaccaaatcaatgttaccgaaacctatctggctgccctgaaaggccgtatcggtatcgaacgcatcctcatgtccgaatttcccgttgtgggactcgtcaacacctactccgccaccaacggcgtaacggactctgctgcaggtggtacagcactcgcgacaggcaagaaaaccaagaacggagccatcggtatgctcgaagacttagagactccctgcacaagcatcgccgcatgggcaaagcaatctggaaaggccgtaggcgtagccaccaacgtagccatcacccacgccacacccgcctctttctatggtcatcaacccagccgtaacatgtattacgagattggacaggacctctgcaagagcggatatgacttcttcgctggtgctgacttccataagccttacacgaaggaaggcgagccctccctgcgcgaacaagccaaagcggcggggtacaccattctgacaggtggctataaagagtatatgaagcgcggacgcaaagccgagaaactcatcatgctgcaaagcgacgagaagaacgagaaatggggaagcgaccatctcccatacgctttggatcaggataagaatgacctaacgcttgagcaaatcgtgcgtgccggcatcaacttcctctcgagtaagggcacagacggcttcttctttcaaatcgaaggtggaatgattgactacgcttgtcaccgtaacgacataggcaactgcatcaacgaagtcctcgaccttgacaaagctgtacgcgtggcttacgaattctatcagcaacatcccgacgaaacaataattgttatcagtgccgaccacgagacaggtggattggttatgggtacaggttcttacgaactgcataccgacctgctaaagtatcagacacgaagcatcgacgaggcgaaattggttctccgagagatgtataagaagaatcccaagaagttcactcgcacggaagtcgacaagcaactgcaggctatgctgggcataggcggtggcatctcgctgaccgacaggcagaaagagcgcatcgaccgccgttgggaggccatcgagaaagctattgccgagggtgataaggtgaacgaccgcatcaacgacctctgcgacacttgcaagaacattttgagcgaggtggcacacatcagttgggcaagcggtggacacagcaacggatatgttcccgtttatgcaatcggtcctggcacagaagtcttccaaggacgcatcgacaacatcgagattgctccagcaatggctaagattgctggatacaacgcagaataacagataaacagacagaaaggaataggggttcccacatgcatgggaaccccttattttttgccgataaaggagagagcctcctattcctctatcgcaccaatgatatcgctaacagctgggaatccgtgtcgctcgagatatgcctctattccctccaccaccttcatggtcacgctgggatcgatgaagttagccgttcctacctctatggccgtagcacctgccaatagaaactctattgcatcagttgccgtcattatgcctcccaagcctatgacggggatctttacggcacgagccacctgatacaccattcgcaaagccactggtttcacagcaggtccactcaaaccaccagtgccgatgctgagaattcgcttccgcttttctgcgtcaatggccattcccataagggtattgatgagcgaaacactatctgcaccctctgcctctacggcacgagcaatttcggcaatgtccgtcacattgggtgagagctttacgatgagcgtcttcggataagccttcctaacagctcgtaccacactgcttgcaccctcgcaagtaacaccgaaagccattccaccctgacgcacattaggacaagaaatattgagttcgatagcgggaatagactccaattcgcctatgcgacgagctgtttccacataatcgtcgatggtgctcccacttacgttcacaataacgttcgtcggcaggtccttcaccttcggatagatatccttgtaaaagtaatccacacccttattctgtaaacctacgcaattgagcattccactggccgtctccgccatacgaggatagggattgccctcacgcggatgtagggttgtaccttttacaacgatgcctcccaaacgactcaggtcgacaaagtcctgaaactccaatccgtaaccaaacgttccgctggctgtcatcactgggttgcgcagctccaatgctcctattttaacacttagactcgccatttcaatcttaattatcaattatcaatcttcaattctgctgtgctgaacacgggaccatcggtgcatacacaatgattgtgaccatcggccaattcttctacgcaacacagacaagcaccaacgccacaagccattcgattctccaatgaagcctcgcactcgatacctttctcgcgtgccatcttggccacagccttcatcatgggcataggaccacaggtgtagactattgaacattgacgaccattgaacattgataattgtgagtgctgtgtcacgaatccgcgttcgccctcgcttccgtcttcggtggtaatgagaacctcaccgacctcacggaaagcatcgagacgaaccaactgatcctttgttcgggcaccaagcaggaaagtgggtttcacaccttgttcccttagtcgcttgcccaagaacaagaggggagcaacgcccacgcctccacctatgagcaggggtgtgccttgagttttgatcgtgaacccgtttccgagaggcaaaacgacattgaggatgttgccttccttgagcgagcaaagccaatgtgtgcctttgccaacctcctgaacgaggaaagatatttcgtctccttccacatcgtgtatgctgatgggacgccgaaggaatgttcctgaatcgtcaactctgagttgggcaaattgcccaggtttgcactcaggcaaatgcccttcgacaggctttgctttcaacaatgcgcattgagcccccaccctttccgacagggccacacgcaagtccataatctgtttcttcatcgtatgttagtcagtcaatgttttctttatcttgtgcttaccgcttccgtatgtctttgcctgcgtttcgccaggcagagtcacgcttgccgttgcgccctgaggaatctcgaactcccacgtccactggtcgccatcgaaacgccaataactcttgatgacgccagacgccgatggatattcggctttgacaaatcccaatcgtttgtcaggaatgggttgcataatgatgtgacggaaacctggcgaagctgggtcggaggcaatacctgccgcagactcccacaaccactgacaaacacaaccgtaagcataatgattgaagctgttcatgccttgtggccccatacctttgtcggccatataactattccagcgttcccacatcgtggtggctccgttgtcgatggaataaagccaactgggattcttgcgctggaagagcagttcgtaggccacatcttgcatattgttattcgtgagtgtggacatgaggatggaagttcccaagaatcctgtctgcagacaaccaccgtgctcgttgaagttctgacgaaggcgagcaatcatgtcctcacgcgcttttccacttaccaaaccacaacgcaaagcaaacagggcaggcgtctgcatcgtgttcaaaatgggagttgtgaaagttccctctggcgtaaggaaatgttcgcgcagatagacacgagcgtcctccaccatccgcctgtaacgctgagcatcacgccctgtggcctttgccatatcgcacatagattgggcgtcgatgagccaatagcaggcactcaggtaactccaatagacaatagcctcaggacgaggtcctccatcgaacgctcctccgccacaactctccagcggttcgtaactaagccagtcggcccattggtaattgccattctccccactaagcgccgtatgatcgtaatgggtttcattgatgtgattaacgaagcgctccatcgcatcccagttctcgttcacaatctcgcggtcgtcaaactgtttccagatagtccaaggaacaatgatgcctgcatcggcccaccccagtcgcatcatacctgcatcgccgtactgtccaataggcgctacacccgggaaaccgccctgaggactttgagtatcgcgcatatcgcgcatccacttatggaagaactgacgcgtgtcggcaaagaaggttcccgtaccggagaacacttgcgtgtcggccgtccatccctgtcgttcgtttcgttgtgggcaatcggtaggaacggacagatagttgcttcgcataccccatatcgtgttcgaaacaagttgattgatatccttgttgcctgtaacataagtaccagtctccatcgtttgggagatgctgctcacaggcacagaactgaggctgcggatgctcacgtcgcctgttgctgtaagggagatgtaacgataaccgaagaacgtgcttctgggcgtatattcgacgtagtttccgccaggtccaaaggtatattcgagacgcatgtgcttgtcagcagttcgcaggttgagtctgtggacagttccttccggaccatccatgcccctactcttggcaccattgccatcgttcaacaattcgccaggcaagcaggtcaggactgtcccctcatcggctttgaatacgaaggatggaactgctgcggcattctgtccgaagtccacaaccaacgtctcgcccttatgcaacgtcataatcgcctttgcatcgtactcgcgatccacaaccactttgccgtaagcgtcattagtggtgccttcaacacgattccagacataggcatgaaccacgggaagagcaagatcgtgacgatgataaatctctgcaccttgcgaaggcaacagttcgcccttgaactcgcggtttatctctggaacagacagtgcttcaggcgtatcgaatcccatcggttgacgagcatcgaagcgctcaccctcgaagatgcctgcgtgcttcaccggtcctgcaattcccgacttccaatcggccggattcgtaccaaagcgacgaacggaaccatccgaataggtaacttccaagaccgcacgaaaagcacacttggtgccccacatgccgttactgcccgagggggtaataatcttgtcgccccaccagccaggagtaacctgagcagatagaacattcgtctctcccttgccgcgcttcagcaagcgagtgatgtcgtaagtgaatgtgcgacgagtcttcagcggatgagtaaagccgggacgcagtacttcctcgcccacaggctgaccgttgacatagagttcgaagacgcccaacgacgttgtcatccagcaggctttcgtcacacgcttttcattatcgagtgacgtcatgaaccaactggcaccaggcgcagaacaattgttttcgccgtctgtgacacgtcctgtcacaacaggtgcatcggccaccgacaaccactcggcaatgccccacgcttcgtcgggcaacgcgtgcgtgcgtgcgtttcctttctctacgtcacgcgcgcaagaaactgtcaggagcagcattgctgccaaaccaattacgcttttcttcatatccgtttcttttttttgatggttactctatccccttcaatgtcacgccctccatatcctccacaaagcggaacacatggtcggcatagccacttcgcacaggcttcagttccatccttaccaccaatcctccctcagcatccttggtcaacgagtaagtgacgatacccgtcccgtccgcctttagtctgtcagtaagcctcattacggcctcctcgctgtcagcagccacggtcagtgtcaggttatggtgcccgatggtcgggaacagcacgttcagcacctccagtccgataagcaccagcaaggtcgtgaatcccgcaatgaaatacatccccgctcctgcggccatacctatcgatgccgtcacccacagtcccgcagccgttgtcagtccgtgaactgcctgccgctggaagatgatggtaccagccccaatgaaaccgatgcccgacaccacctgcgctgctatgcgcgacacgtccagtcgctggctttccgatagctggacatcgccaaatccgtgcgccgagagaatcatgaacacggccgaacccagagccaccaagaagtgcgtgcggaagcctgcttccttggcacggaatccgcgttccagcccgatggcgccacccagcagggccgccaccagtatgcgaagtataaaatccataataatcatatcttcggcaaaaatacggaataaaaccgaaaatagcaaactttactcacccataattgtcaccgtcatcagatggaatccctgagtccaaagacgaagtataatttctatttgttggagcatagatataccttattatataattagaataaaaaaagcccccgttgggaggacgagggcagaacctaatgttttcacaacggaataatccttattgtgatttgcttaaaattagtacgacaaagttatgcactttcccgaaataatgcaagaaaactttgcaaaagttgtgcttttcgcttaattttgttcgtcaaatgtaataaatagatatcatgaaacgtattttgggactcgatttaggagttagtagcataggttgggcattagttaacgaagcagaaaacgataacgagaaatcttccatcgttaaacttggagtaagggtcaaccctttgactgttgacgagcaaacaaactttgaaaagggtaaatccattaccaccaatgctgagcgtacgttgaagcgtgggatgcgtcgcagtcttcagcgttacaaacttcgtcgggatgaacttatccgtatcctaaaggaacacgatattattaacgacgataccattctttacgagaacggcaatcacacaacatttgagacctatcgcttgcgagcaaaggctgctacagagcaaattacgctcggggaacttgcgcgcgtacttattatgattaataagaaacgtggttataagagcatgcgcaaatccaagggagaagacgagggcaacctcgtggatggaatggaggtagcaaagaaactctacgacgaagggttgacgcctggccagtattctctcgcacttgtcgagcaaggcaagaagtatctcccagaatactaccagtccgatctgcaaaacgaactgcaacggatatgggatacccaaaagccgttctatcccgaagtccttactgacgaattttggaaaacacttcaaggaaagagtaagacaaataccaacaaaatattcattgcacgttaccagatattctcgccaaccctgaagcgcgacgaagcccgcaaacagttgctccagtggcgtgtggaaggtcttaccgagcaattgcctgtggaggttgtttccgccgttgtttctgaactaaacggacaagtcaacggcacaagcggttatttgggtaagataagcgaccgaagcaaggaactgtacttccgtcatcagaccgtggggcaatacatgatggcggtgttagacaagaaccccaatgcaagccttcgcaacatggtgttctatcgtcaggactatctcgacgagtttgagcgaatatgggaaacacaagccaagttccacccggaactcacacaggaacttaagcacgacatcggtaacgtcaccatcttctatcagcgtccactacgcagtcaaaagggtcttatttccgtctgtgaactcgaacaaaagcgggtagaagccttagtagatggaaaaaagaaaaccataaccatcggtcccaaggtgtgtccgaaatcctctcctttgttccaggagttccgcatttggcaacgactaaatgaccttcgcattgtcagcgacgacctttttagcaatcgcagtcttgatttagacgagaaacaagcccttgcccacgaactgagcattcacgagaaactcaccaagccgcaagcccttaaactcctctttggaaaagctcccaagggcatcgacctgaatttcaaggaattcgaaggcaacactacacaagccgctctgttcaaggcatatcaaaccattattgagatgtcggggcatggggaatatgacttttccaagatgaagacggacgaagcgatggatatcgttcagagcgtcttcaaggcattggaattcaacaccgaacccttatatttcgatgccaccctgaagggtaaggatttggagaagcagccccactaccagctctggcatttgctctattcctacgaaggtgacaactcagtcacaggcgacgcaaagttgattggcaagattcgcgaactcttccatttcgataatgacgactatgccaaagtcattgcacaaatttcgttcaaacccgattatggaagtctcagtgccaaggccattcgcaacctgctcccctacatgtaccaaggccttaactacagcgatgcctgcgaggctgttggttatcgccattcggcacgctcgctgaccaaagaggaaattgagaataaggaactgaagcctagtctcgacctcttgcctcgcaacagccttcgcaatccggtcgtggagaagattctcaaccagatgataaatgtcgtaaatgctgttattgagacatacggtccgcttgatgaagtccgcatagaactggcacgcgaactgaagaagagcgcaaaagagcgtgagaacgatactagcgccatcaataaggcaacgaaagatcacgaggaatatcgcaagacccttcagggcgcaccattcttcatcgcacatcccagccgtaatgacatcattcgctacaaactctatctggaactggagaaaaacggctaccacaccctttattctaacacatacatcccaaaggagatcctcttcaccaacgacttcgacattgagcacatcattccgcaagcaaccgctttcgatgactcgttcagtaacaagacgctggaactgaagagcgtgaacctaaagaaaggcgacaagacagcatacgacttcattaaggatgaatatggcgacgaagccgccgaagaatacaaggcgcgcgttgacgacctccttaaacaaggtaaaatcagcaaaacgaaacacgacaacctgctaaagacagccagcgacgttgtgggtggattcatcaatcgcgacttgcgcgacacccaatatatctctcgcaaggctcgtgagattcttgaggaacttgttcgcgtagtaactcccaccactggcaccattactgaccagttgcgtgaggattggggactcgttgatgtgatgcaacaactcaactgggacaaatacgacgccgctggtcagaccgaaacctggcaaaatcgtgagggtaaaacgatacgccgcatcaaggactggacaaagcgaaacgaccaccgccaccacgctatggacgctcttacgattgccttcacgaagcacaacattgtgcagtattataataatatgaacgcgcgtgcagacaaaaccagcgatatctatggcatagaatgtaaggatatggagcgccataatggtcacctgcgtttcaaactccccgtggagaacatgcgtgaggaagccaaacgccaactcgaagccatactggtttccattaagtcaaagacaaaggttgcaacgcaaaacatcaaccgcaccaagtcgaagaatgccgaaggtggagtgaaacgcaaggtgcaacttacgccccgtgcacaattgcataaagaaaccgtatatggtcgcaaccaacgttatcgcacttgggaggagaaagtgggttcgtcgttcgacgaacagcgtatagccagcgttgccagcaaggaaatcagggaagccctgcaacagaggcttgccgagtttggaggcgatgcaaacaaggctttcacgggtaagaattcccttgagaagaaccccatctggctcaataccgaccatagtcgtgctgtaccactcaaggtgaaatgtgtcgcctttgaagacattttcaccatccgtaaagcggttgacaaggacctcgttcttgacaaggtggtcgaccccaaggtaaaagcaatccttaaaaagcgtcttgaagagttcggaggtgatgccaacaaggcattctccaatcttgacgagaatcccatctggctcaacgaagaacggggtattgccataaagcgcgtgaccatcaatgctggactttctgagcccgaacctattcatgagaaacgcaaccgccaaggcaatgtcattctcgacgaagacgggaaccccatcgcttccgactatgtacagacaggcaacaaccaccatgtggccatctttgaagatgccaacggcaagctgcaagaacacatcgtttcatactatgaggctatggcacgcctcaatcaagggcttcccatcatagactataactacaatgccgaattagggtggaagttccgctttaccatgaagcaaaatgagtattttgtattccccagtaaggacttcaaccccagtgaggtcaatctcatggaccctgaaaactatgcgtttattagcccacacctgttccgtgtacagaaattgtcaactaagaactatatgtttcgccatcacttggaaacaacagtggaagacaagaaggaattacgagacatgacttggataaatatacgaaattgcgaaggtttacgcaacattattaaagtccgtgtcaatcacatcggtcaaatcgtagctgttggagaatactaaggattaaagaaaacgctctatttgggcaaccccatgtacctaagccttcgcaacggccagttagtgttgcgtatgccctggcggatgaggttcttcgtgcagtagtcgtttttttatttctaatcaggctcgtatcttcctgattttcctcgcattacatgatatctgttgtttatgctactgcaaagatactaattttaaagcaaatcacaacggcgtcctgaaggatgccttcctgcagtctgttgtttatgctactgcaaagatagtgcaagccgaacggaaaagcaaatttatttgaactttcctgaggcgaaacctatctaagacggagtcagagatactaatttcaaagcaaatcacaaccttcgagctctgcatggagttcctggcacagttgtttatgctactgcaaagatactaatttcaaagcaaatcacaactagatagtagtctagaaatctgcccttgtagttgtttatgctactgcaaagatactaattttaaagcaaatcacaacccgaagggaatcgaacccttatctgaagaagttatttatgctactgcaaagatactaattttaaagcaaatcacaactgaagaagagtgtggaagcgcgaaccggagttgtttatgctactgcaaagatactaattttaaagcaaatcacaacacaaagtatgtgcagataagcccgttcaatgttgtttatgctactgcaaagatactaattttaaagcaaatcacaacaggtgaccacgcatcctcgactcgtcttcagttgtttatgctactgcaaagatactaattttaaagcaaatcacaactgataaggcgtttgatagttgaagttgttgtttatgctactgcaaagatactaattttaaagcaaatcacaacttaaaagtttcttcgtgctgaaggccgacagttgtttatgctactgcaaagatactaattttaaagcaaatcacaacaatcgcaccattggtcaatgaatacgtaggttgtttatgctactgcaaagatactaattttgaagcaaatcacaacaactgcttttcagcaatctcatcagatgacgttaattacactcctgcaaagatagtgcaagccgaacggaaaagcaaatttatttgaactttcctgaggcgaaacctatctaagacggagttaaagatacgaataagagtttaaaggtttaaaggtttaaaagtttaaaagtttaatttaggcacataggaaaaacttgcgaataagacctgcttcaaagatctggaaaaggcgtgattcaagcgatatttcgatgtcttttgctttctcgcgcgtgcgcgcttaattttttttgagcaaaaatctactgaatctactgcaaaggtggtttaatatattggttatcagtctggtgcaatgcagtagattgggttttaaaatctactgaaatcagctgattattggtgagaaagtgggtgaaagacttgcatatcactggaaaaatgcttacctttgtggtagtcttttaggagactgtgagagttggcatttattcattaatcattaaaggaaatgaacatgaaaactttatcttattccgacgtgcccaagaagtgggccgtgtgtttccaaaacgattgtccaatgaaggaggagtgcctgcgctggaaggcggcacaggtagtgccagagaaggtgcaaacgctgatgtgcgtgacgcctaatacgcgcaagggcaacgagtgtccgtgctttgcttccgccgaaccggtaaggctggcgtggggcatgactaagttgttcgccaacgtgccctggtatatggtgaaggtcctgcgcgaggagatgttcccgatatttggcagtcgccggcagttctaccgctatcgccttgggcgatgggttatctcgcccgagcagcaacgacgggtggcccaggtgttccgcaactatgggttcgaggatgagcccgagttcgacgtgacaaaggagggtttcgactttgtctgagttatgggcggattccaacaactatgttttaggatttgtgccattggtggcacggggtcgtgccattagtggcacagattcgtgtcatgggtggcacaggtttgtgccattggtggcacaacggcagcataaataatgccccacccggaagtagggatagggcactcggggacaagggagagaaaattatggggaaatgctttttagtttgcatattttccactatttttgttgcgacatgacaatatctgatgctatgaaatcgccgaagacttgggtaccgacgctgtacttcgcaatggggctgccctttgtgatgctgaatatggtgacgactctgatgtacaagggcatgggtgtgagcgacgcgcagattgctttctggacatcactcatcatgatgccctggacactgaaaccgctttggagccccctgctggagatgtacaggacgaagaagttctttgtcatcgccacacaactgctcacgggcgtgctgttcggaatgattgccctagccctgcatcttcctcagttcttcgctgtcaccatagccctgctggccgtagttgccctaagtggagccacgcacgacattgcggccgacggcgtctacatgcaggttctctcgagcgagaaacaggccgaatacatcggttggcaaggggctttctacaatattgcgaagattgtgggcacgggattgctggtttcgatggctggcgtactcatcgaccacgttggtgtagcgcaggcctggacaatcgtgatgctggcggtggctgcactgatggcgagctttggcatctatcacatcttcatgcttcctgcaacgcctcgcacggaacagcggacgtcgatggtggagttttgggctgtcttccgtgattttttccgcaagcgacatattgtctattacatctgtttcatcattctctaccgctttgccgaaggctttgtcatgaagatagttccgcttttcctgaaagcagagcgcgcagaacagggattgggactgacagaacagcagataggcctttgctatgggacatttggtgctgcggccttcgtgctgggaagcattttagcaggatactacatcgcccgacgcggactcaagcgttcgcttttccgtttggcattggtgttcaacctgccgttcgtcgcctatacgctgttggctctctatcagcctgaaagcctgtggattatcggcagtgggatcgtgctggaatacttcggttacggattcggatttgtgggtctgacgctgttcatgatgcagcaggtggcaccaggacggcatcagatggcacactacgcctttgcatcgggcatcatgaacctcggtgtcatgcttcccggaatgatgagtggtttcgtgagcgactggctgggatacaggctcttcttcgtctttgtgcttctgtgcaccatccctgccctgctcatcacctggttcgtgccttgggggaatgaaggggaggtatcggagtaatcagaattatcggaaaatcaaaataatcagaaaagatatgagccaaaacttgaaaattgtggggaatgcactccccaacatgccttgggaagaacgcccggaaggttgtcataatgtgatgtggcgttcaaagaagaaccccattatcccacgcgatttgttgcctacaagcaacagcatattcaacagcgctgtagtacccttccgagacgggtatgcaggcgtgttccgatgcgacgacaccaaccgtcgtatgactctgcacgtgggctttagtgacgatggcatcaaatggaacatcgatccccaacccctgcaaatcgtgggagactacggctacgacccacgtgtgtgctggattgatgatcgttactatgttacttggtgcaacggctatcatgggccaaccattggtgtggcttggacagaggacttccaagacttccacgtgttggaaaatgccttcctgccttacaaccgcaatggtgtgctcttcccacgtaagattaacggacgatacgcgatgcttagtcgtccaagcgacactggacatacgccctttggcgacatattctacagcgaatcgcctgatatggaattttggggcaggcatcgccatgtgatggctcctgcgcccttcgaagtgagtgcctggcaatgcatgaagattggtgcaggaccagtacccatagagacaagcgaaggttggcttctcctgtatcacggcgttctgcgctcttgcaacggctatgtttattctttcggttctgccctactcgacttagacgaaccttggcgtgtgcttgcacgaagtggcccatacctcatctcaccacaaatgccttacgaactgatgggcgacgtgcccaacgtgtgcttcccttgtgcttcgctacacgacccagaaacgggccggctggccgtatattacggttgtgccgacaccgtcacagggctttgcttcggatatattcccgaaatcatagacttcacgaagcgcacgagcatcgtataagttcttgcctattcaagcaggcttatttatcgtcaagcgggtcggtgtcttcctcaaacaaattaaataattcacccattgggatgctacaatccgaagctacataggcattataacgattgcgtgcacgacgttctttgcagaacatctccttagtgcctgccacatcctgactgaaggaaatgtgcgaatcgatattcatagagaaggccatcgactctacatcgaggttgtcggttccaatgagcgagaaggtccatccgcgtttcttcagtgaatcgatgcgctgacgaatcatcgacaaggtccactcacgggaactgttctcctcaccatctgtgatgatggtaaccagcacgttggctccctcttccgcttgtttctcaaccttagagatagcgttgccaatggcatcatagagaggagtgccaccaccaggattgtactcgtcccactgaagcttgcgtacctgatccgtcagagcatcatctaagtgccatgtggtgtgctctgtgtcgaaggtgacaagggtggtgtgctgctcggtgtcggggaacttctcctgcatgattttaatggtggagagggtttcattgatgcctgtgaaagcttgttcgcgaatacaccacatgctgccgctctcgtcaacaattaccagattgaatactttcttcatagttctgtgattttaattggttaataaacgattttcgaatctcatacatttagtttaaagaagtttcgaacgaaaaattaaggcagaaggaaaacttttttctatatttgccaatgaaatgctaaaaagccatacaaaatgccacgaaaccacccatactcggaacaacaaatactggaaggatttcgccaaggagaggctttcttcttccagcaatacttctacgcatactgccgtatggcctacagcatatacgacaagcgctataaactgaagaataaggcgaacctcgactttatgtcgctggctcaccaatatgcgctgtacctgatagaacacgactggaaaccactggaggaccattctccacaggtgactttgcgcacgtggatggttaatggattccgatacatcgttttggatgccctgaagtggtaccataaggaatacggaagcatcacgtttgacgaatatgtacgcaccttcgacctatcgggtgacctgagacttcaattcaaccgcattatcagcgacatgtgcgacaaatgcctcgaagaaaaggaggccgaactcgtgcgtctgctactcatcgaagggtatgcgaccaaagaagtggcagaaatgaagggcgtgacaccatcggctatttcgcaacaataccataacattcgcgaacgagtgattgtgccttacctgcgccagcacttcgacatggaactggatatgcccgaaattatgatggcagaggaagacattcacgtggaaaaagaattaagaagttgttcttgccacatctctcgggaatatttgccaaaaagtcacatctcaaatatggattatattatggaaaaaagaattttcaatgccgaaaaggcacgcaaagcaaaaaggactacgccagattacatcacagaacttgcaccgaatgaggtgtttgtattcggaagcaacctgcgtggaatgcacggaggtggtgctgccttgattgcctacaagaagtttggtgctatcatggggcagggcgtaggcctgcaaggacaaagttacggcatcccaacaatgcagggtggagtggaaacaattaagccttatgttgatgacttcatcgaatttgccaagacaagacccgacctaacgtttcttgtcacacgtattggatgtggcattgcaggattccaagagagggagatatcccctttattcaaatcggctcatgatgtagagaacatcatcctacccaaaggctggtaaaacaaaagaaataaacacaaaacaaatagagacctcctaagcaagatagcttggaaggtctctttgttattattataagaagatattagcgtccaggaaaagtttcgaaagtaccgtcgtcaaagaatattcgaatctcagtaatcttacgttgaggtttgtcaataaattttaccacctcacgaacaaccgggattcgaggggtgcctccattaacatcaaaaggtaatccaggagaagcactctgagcatcatctccaccaacgacttccgggtgtaaagaagcaaacgcatcgtcttcttgattcataccaccctgggcagttgactcctgaggcttgacgtacatatcaccttcgccaaacaagagccacgacatgttaagtttagggaaacgacgatgaagagcttcagcatgatttagtgtaggacttgtacgtccattgaaaatacttgacaaagtggcagggctgattcctgtcgttgcagcgaactctttttgattgagtccttcctgcttcatgatctggaagattctatctttcatctggcgaagtgggggtggggtcacccctctgtttcgagtttgtaattcgatacaaagttataaaataaaatttatctaaccaaatttatgtatagaaaattaaatccgtgagttttgatttagtatttacattttaggattaaagatgccaaagcgtctaaaagaaagaattaagggaactaaaaggcggataaagaactgtaaatacttagacttgcagaaactactttaataaaaccttgtaaaatactggtaatcaggttggtttaaatgattaaacaaacacgatttcaagtatgtgaatacaaacggcaaaactccggcttttatttaaaaggaataatatagatataatatgatattaaactgaaacccaataagttatcgttttagcaattttaagcatgaatattcattcacattcaaaaagacaataatatacaataggcaattctaaattgtaaaatgtatacaggtgggaggctggcagaaatttggattttaaaacttaaaacatggatgtatgctcacaacaacaccgaattgcaaatattgaattgcaaacttttgaatcctaaagtctaaatcgaggaatgaggaaaatcgcgagattttgaaatactcgcccatttgcgaacaaagggacgaaaagaaaattctacgcgattctcagcgcaccagaataggggctaatccctttgtttatagggagatgacgaaaatatttgactctacaagagaagagtaaatagatgaaaaattaatgaagaatgaagaaaataagttcctttaggaggtctccaggcgtacttctattgccccctacccccttggatttggcatcagttttgcgtatttcacttattatactcataacctttgctccagagtaggatcggcgtgctggaatgatagcttgcctacaaacccatgtacttttccctaagaacttagcaatatcctcatcagacgacgagggagcaaaataagccatcaacacatcggaaaagaaattaaagagagcagccagtgtgggctgaagagcaaatgagcgaggattgctgtcaaaatattttactatctgattcgcttttaaagtatcacggttaccaagtgcattctgtaattcaaaattattgaagtccttgctcatccctgtaagttcttccacgagtgaagcccctaccctaatctcattttgtggcaaagccatcagcagtttatccatctcagccaccaatcgactcaaatcacttcctacatggtcgcacaacatttgattggcagcaggctcaatttccttcttcttgcgattcatgtatgcattgacgaagccgggcaattcgttatcgtagagtcgtttcgagtcgaacacgataccatttttcttaatctcagcacacaaagtacgtcgcgcgtccatcctaccgttcttgtaacagagtatgagaatagtagaaggattgagattcttcacgtaatccgtcagcgtatccttatcttgcaaagactgaaactctctgaccaacacgacacgtcgctctgccatcataggatactggcgcgcaatattgataatatcgtttccacgagcctctgctccgtaaatgatatcaaggttaaagtcgcgttcctcgggtttaagggctttgtcggcaatatactgactcaccttatcgatgtagtacccctcctcgcccatcaaaagatagacggggaggaacttacccgcatcgacatccttcagaatgtctgtgtactttggtcctgagtcttttgctgccattatgcaagaatagcgggcataagttggcagaacgcctctcagcgctcttgtcacccgcgattagctctatatatcaatagtcgaatttcagatgtttcacagtcttcttttcctgcttaatcatctcgagcgcctcgatgcctatgattacgtgatcctgcacgtagttggccgtcacctgattgtcgctctcggtggttttcacaccttcgggcgtcataggattatcagagacaagaagcaaagcgccagtgggaatgtgattggcaaaaccgcaagtaaagagggttgcagtctccatatccacagccatcgcgcgtgtcttacgaagataggccttaaactcatcgtcgtgttcccacacgcggcggttggtggtataaacagttcctgtccaataatcatgacccaagtcacgaatggcactagagacagcacgctgcatcatgaaagcaggcaaagccggcacttcgggaggataatagtcattactggttccttcgcctcgaatacctgcgataggtaggatgaggtcgcctttctgcgtcttagaactaatgcctccacacttgcccaggaacaggcaagccttgggcttaattgctgcaaggagatccatgatgatggctgcgttgggcgaacccatgccaaagttgatgatagtgatgtcctcagctgttgccgaacgcatgtttgaagtgtagtcgggacgaggcacaccaaagtggtcgcagaagatgtcgacgtaattgttgaagttagtcaacaggatgtattccccaaactcattcaaagggcgattggtgtaacgaggcaaccaattctgaacgatttcttcctttgttttcatagattaccagtttaatacgagtacaaagataggaaatattttttaaattttaatttttaattaattaatttgtatctttgtcatcatgatgacattaaacctgcctcctgccgacttgcgacttagccaacgcgaaggaaacacaatggtgttcgactttctgcgtcggcgctatgtgaaattgacacccgaggagtgggttcgccagcattttgtgcactttctcgtccaccacaaaggctatcctcaagaattgcttgccaacgaggtttcgcttacgctaaacagcacctcgaaacgttgcgacacagtgctctacggcacgaatgcaagcccattagcaatcgtggaatacaaagcgcccaacatacag

SEQ ID NO: 2252 - DNA, 24128 bp, synthetic construct
  misc_feature 1..24128: note = Synthetic
  source 1..24128: mol_type = other DNA
gcacgatagccgtcaggtcgccctcccacttgtatccgtcgtagaatgccacttggctcttgctcttgacgatatcgccattcgacggcactaagtcggcaaacgcctcattaagactcaggttgtagattgagagcgggccaatccagttccattcagggtagatggtttgttcggttgtccgcgtgtcaatcattgtgccggtgaagatgacgttgacgtcgttcttattcttaatcttatagagtttgcccacctccattttttcgaggccgcttgtggtccacttagtgccactgttcatggcaaaaccttccttgctcttgacggtgttgaacaccttggaaacaccgaagacgttctccaggtcgtcgtgtcccggctcgggttgcacgtagagcgaaatccagttccatccggcggagaggaaactctgctgctcaatcacgtcgctggggtgccaagccaccggggtgttatagtcgccgaagattccgttaggctgatagttaatctgtaacggctcgcccttgtacgtagtcgtgatattacccagaatcacgcccttctcggcatcgtagatgcggaaggtgatgggcttaatctgtgtgatgtcctggagtccgtataccgtgaggttgacgaagtaagcgtcgcgactggaaaccaacttgggcgatgccaagccacagcaggtgccatcgataaaggcagcaatcttcgtattggtattggtgcaaatcttgtcgtcgaaatagatttgtccgatgatgttcatcgaactttcaaattgcgttgggtcgacagtccacaatgggtcgttgccggagacagtgacatggaacagcaatggcgaactgatgtcgtcctcgttgatggcatatgcataaaccatgtgagttcccaccggagcgtcggcaccgacggtaaacgctatcgattcccattcgttggttcccagcacgcccgtggtggttgacggagtaatccaagtgggcagacccgagatgttgtaacgtccactctcgcgccccttgttgcgcaagtcggcatgcagaaccacctcgctcaagcggtccttctcaactgttatcacttcttgatcccactccagcgtgccgtagtcaaccacggcgctccatgtgatggcctccgagagattgtcctgcaagtcgcgcacattcttgacgatgaacgtgagcaagttgccttgcatgcgcgacggcagcgtgttcaggttgatgtagatctcgttgttcgatgctgtgaaatcgaactcaagattttgcttgagcggtgcggtgcgcagagccggtgctgtggccgcttgtgtgactcctgtggcgatagcctgtgccaggccgtagcggtcgacctgcggcgccatattgttgacgctgaactcggtgatgatgttgccgttagcgtcgagcacgtggcgctccatggggtaatatgccaccagtccggccacctgtgcggtgtcgacctggttgtagcggttggctactaccgaagtgccgtcgcaggcggcattccagatgcgcagctcgtcgatgtcgccggtgaagtggtgtgtttcttcgagcagttgctcattgtcggcgttacgcttgacgatggcacccacatagaggtagtcgccggccgccgcgggaacttgttgctcggcgatggtcttcaccgccttgccgtcgatgtagagcacagcgctcacgccgcgatgtacatttagtgccacgtggtgccagttgccgtcgcagtagtccacattggtgagcacgatgggcaggccgttgctggtgtaggacgacagcgtgtcgttgtacaggtgcagaatcatagagttgtcgtagtcaaagcctatcgacatgcaatcggtgattgagagcagtgttgcgcgtgcgttcttgttcttttcgccgcggaaccaggtctcaaccacatagctgtcggtcgagcgtggcgagatggtgccggtgggaatcttgatgacatgcttgccgtcgaggtgtgccgccagattggtgttctcgacgttccagctctcggtgtccatgtgcatgtttcgagcgcgggcatagtcggtcactgtggtgccgttgccctcgttcattttccaataacctgccagcccgggcatgtaaggtgccaccacctcgtcctttgcggcaagcatggcgcgagttgggttattcttgttccaaagcaccaactcgtgcatcattccggtgaagccgcgtcccagcgtcagacgcccgttggcgttgtagtccggaacgatgacttcgtcgaagagcattgtctcattggcgtcctcggcaaggatcatgctcaggttgttgtcgtagccgccggcagccttcacatagttcatggcgaggaacacccacttgtcggcgggaatcgtttctgtcgaggtgattgttgtgttgtcgatgctcacactcacatggccgtcgttgtcgaccgccacgttgagcgagttaccctcggtgccgtgttcgataatcgtgccggcgcccttacgcttgagccacagcgaggcggcgaagctggtattgctgatgggcagataagcgtcggtggcaacggggttgccgttgaattgcaacgacacgtcgtgcgacacttgcgcatcgttgagcgaaccggtgatgaagaagttctcatccttggtcaggtagctttcgcgaatgtcctcgttgaacttgatgcggatgtcgtcggtgggagtcaagattccggtgttggggtaggcttgtcccagcagtttcggtccgcgagtgtcgcgaatcacggtttgctcgggcgttgtcgccacatactctttgttgccgtattcacaaatgctctcggccaccaccacatagtttccgtcgatgtttggcaactcaaggttgtaggtgatatttggcttgtcgtttttcaagattgattgagtctcggtctcgcgcccctcggttaaatacttctcgtcggtgacccactcgtgggcggtaacccaacgcgagtcgccggcaaagcggtatttcagtctcatacccttcagcccggtgaacattcggttgatgtcgctgatggtggccaccagttggtcgccactaaccaccgaagccaggttcaggatattcttgtcgagcttgagagtaacatcgggggccgcgggcacaaagtgtgcgctgaacgacgccgtctcgtaaatccacttctcgggcttgcacgagttggcaagcatgaacttgatgtcgttgtagtcgaggatggagttgtcgctctgcctgattgtcagcgtcttggtgattggagcgccatactcaatccacatctcggtgccattaaccaggggctcgccgtccatgaagatttgcaagccatcgggattgcttaacgcgtcaacatagaccactgccgaggtaagccactcgtgggtctcgctgtcgttggagaacaccacctgcaactgtgcgtcttgtccggcggggatgtcgaccaagttgcgcacaggaatgtagatgtgcgggttgtcgctcttcatcgttgcgtagtcgagcagagtgccctcgttgaaatacttggtgcgtgtctcaccctcataggggcatcgagtctgacctccgcgggtacggaagatggttgaccatcctctgggcgactcgaacacatcgaccgtgtgggcattgccacgctgagtgtcgttgagggtataggagaaacgttcgcttttcgtcgtctcgtcaacatcgtatttcgtctggtgatacccgatatcggtgttcgagatgatgattgctcccattttgtcgagcaggaagccgtttttgccacgataagccagtccggtcgagaacacctcggtggagttgtgaacctccttggaacttgtgccggagctgttggtcacggtcacgccgcgttcaaacgattcgttgccaatcttgtatttggcatcgttgaaggctttgagcttatcttcctcgttgtcggcgagggtctgcttccacttgtcgattatctcgttgcaccacagcacgctgtcgcagccctcatagcctacggggaagcgagcgtagtagctgggaccctcaaaaccgttctttgcctcggcaccccaagctttcttgtcgttgttgctcgtgccgtaattggggtcgtcggcggtgaggaaggtgtaataggtgggtacagccgggttctcctcaatctcgctcatcgagttgatgtgcttgagcatggtgttgcgtgtgcgcgtaacattataaaacagggtggtctcgatgtagttctgcgagtactcgaagtgagtgttgaatttctcgtccattgccatagtctcttgcatgccgactgcccatgagccgtcgtcctgcttgaagatgcccaccttgtcggccgcgccgatgatatagttggtggaatagccgataaacacgtctccgtcgcgtcctacgtagtcaatcgtcgaacttgtggatgtcgactggctattggtgtaggtaaccgatgtgtgattatcccaggttttgttaacatcatacttccatgacacttgattctctccgatgacggtgttgtaggtcattttgccgaagaatgccgttccggtaaggatgtcaaactctaatgaagtgcggatgtcgacacccagctcggtgttgttgtgcacgccgcgcacggtgtaggtgtagtcgctggtgaccgagtcggtggcccatgttgctgaagagccgtcgccgggcgggtcgcggagcaccatctgcacatggctgggaccggcggtgatgaagttgttgccggtaggcacgacacctgagatgatggcggtcaagccttcgctgctccagagcttggtctgtccctcaattaccatcgaggcgttcatgttgcgtgtgtacggagcgttgaggctgggtatgccggcaatccacttgtaggtgccctcgccaaccgagtcgagctgcacttgctcggggtcgaggcgggccatgtcgccacgtttcacctcgtggccgtcgataatttggtcctcggcgacaatgagtgccgcctcgccaagctcgttgccgaaggtgattaccgagtcgcgaagcatgtcggtgtataatgctcttgtcgcgcccgggtcgttgttgtggtacggctcgtaggcccgcaccttgaagttatatgacctgccaagctggaagatggggtagcggtaattgtaggtcaccttgccggtcgtctcattgtagtcgtagatgggaagcttgatgtcctcgccggcatcgcgcacagtgatggtgtcggtaccgaaaacaccggcgggcattcccgcttgcgtgatgtcaatcactgggttgctgcgataggtcagcatcagcttcttgttgcacttgaacagaggaagcgggtcgttggtcgccgtgtagattgtgtcggggataatggtgtcgttggcgttggtgaggttgatggcgggaatgttcatgaacttctcatcgttgtccaactcactattattcgggaatttcacgctctccaccatgtagcggatgggcggcaccttggcgctaaactcaccggttttggcatcggtggtgattatgatgtacttcacgtcgtcgctgttaccgccggcgcgataagcgttgctgttgatgtcgttcgacgctccttcgacttccatgttctcggggttggcgacccactcgatggtggtgccattgacctgttgcatggcattgagcatgcgttgcgggtggtcgagcggcgtcagagtaatcactgcttggccgatggtgttctcgctcacgccgtagcccagtggcttctcgccctcggtctgtccgccggtaatgcggccggcaagaataacgagggtgttgtcgtagaagtcaagatgggtgtcgctcaagaactcataggtctcgtcggtaccggcaggataacgtccggcaccctcaaaggtgtgaccctggcggcgcgcctcaatataatggcttccgatgggtactgaaatctcgtaattaccgtcggcatcgctgtagatgagcttgtcgttcttgttgcacggtgtgccgtcgacgtagaagctcacgctgtcgaccggaatggtagtgccgctgtagcggatggtgccactcaccttgaagctcgacacgtcggtaaagtcgcagttgttgatggtcagtgatgtgccaccgatgaatgccgagcggctcgtgggcgagaacgagtgaatacccttggtgggatacacactgtaacgcgtgccgctgccggtgaacggaatgccgcgaatctcatattcgccgctctcgttggtgatgccgtaggacgacaactgtttctcggtgggaatcacatcactcggacgggtgttggcgcccacggtagcgtgatgaccgttaggcacgccgttagtcagcgagctgtcgaaggcatactcttccagaccttcgtcaaaggtgatgtaagccttcaacccctcggtctcgccactgatgtagcggtctgcgtctttgtcgatctgctcctcggtgagcgcgcggttccacaaccgcatttcgtcaacgttgccgcggaagtcgggcataagcacccagttgccgttaaatacgggcgaaacatcgactgccagggtcatgtccttgaagcaaggaccatagtaaccgcgccaggatggcccgtctttggctataatcctatatctgatgttttttgtgccctcaggaattgtaaactcggtggtatatgtcttccagtcgccatgctgcgacagatcgttacagatggtatatgtgtcgatggtgttgttgtcggcgtcaagacatagtgccgcgacattcatggtttttgcaccccatggcgaagactttgtgaccgaagccacaacggcagaccctaccatcggatccgttatcgggaaatccttgtaggcggtgagctctatataactcgtctggaaagcattgtcgccattaataatccatccggtgtcgcctccttgttgcgacagtgtccagccgtcgaacgagttgccgctctcatagaattccacctgttggtcaaatatataaggcatttgctgcggcgcggctgtggtgtcgttggcggcacgtgagttccctgtgatgtaggtggtgagattagtagcgtcactgatgagtgatacttgtgagaactcattggcggggatggtacccatgaccatatcgcccagcttcacatcgaacaatccattgctgctattataatccaactgcaactttttggggaagtcggatagtgtcattgttccggtgccctcgggacgcacaaagaactgcagggtgaaaggcttaccctgagccaccacgttgccgatattggtaagggtgatggcattaccggcgtcgagcacgctgcggctgtgacttgaccggtcactcgtcgggtcactctcgcgcgacagagtcacgcgcacatcgttgactgccgtgccggtatcgaactgcacgcgaccgctcaccacacccgaagctcggcagaagcccacgtcgcgcatggtgttgctcaccgcgtggccgccaccgtcgcagtcgctgatgtaggctatgacgcgatattcatagtagcgaccgggctcaacggtattgtcggtgtaagaatacatcgagttggtgccctcggtttgataaaccgacaaccagtcatcgctgcctatgaagcgtcgctgcacgtcgtagagtgtggcggttgtgccgacttgatgtgctttccacttgataatcacatcgttgccggcggtgcctttagtgacgtcaatgctggtaatagtagttgtgcccgtcacatgagcatagacggtgtcgctgtagaggtgcaccttgttgtcagcaaggtcgagttgcaggtaataaccatagtttgagcaaatcgatgccggcttctcgtcgctgaacgatgcttttccggcagtgcgtggaacggtgacatccagatagttgcgggtgatggtgccgcctggctcgatgcggtgtaccttgaaggttatgtcgttctcgttcttgggtacgttgccgaactcccattccatcttcaccgcatcggtcacggcggtgtcttgcacaagatgcagggggattaccggaactgtgctggtgcgcacctcggcagcgctaaccacggttaacggctcggggttggagggtatgttgacgttgccccacgagttcttcttctggaacacctcgtagcggtagtatttgcccagcgcgagacccttcgaggcattgtcggtgaaaggactgctcttggttgttcccacctgtgtgcggttgccctcgtaacctccactctcgttgagctcagtgcgatacacttgatactcaccgtcgtcgctcttctggtcgctcgtccattgcagcacaacattgccttcgacctgattcggatgcgctgtgagactgctaatcgtgccggtgaaactcattgattgtgtggcgttttcattcaggttttgacttacgtcgcctcccacctcaaacgtgaacgacgtctgcgtgttgcgggtgacgttgacggtgaagtcttgaccgagtggtactttcagctcggccgagcctgtgccgcggttcttggcgctgaacgttgcggtgctgtaggtcttgccggtgctcggcacgtacaccgacgcgttgtaggcggcgttgaaggtgaagttgaacactccgttgccaatcgatgagggaagccaactgttgtcggcgctgactttcactttgtcgggtgccgtccattcaatctttgcctcacgggcgcgtgacatgtcgccgaagtcgatgcctttgaggtagcgcgcgtggatataaaaccagtagtcgctatgccagaagttgctctggtagtaatagctcgaactttcgacctgcatggcgccaacctcgcgtatgccgcgttcgttgggggcaaagcgtacgtagaaccactcgccatcccacgagcagttgaccagaccccaactcttgtcggtttgcgaccaactcgaccctgcagaaaggattttgtgcagtgtcccgtcgtgcaacatcacatagatgtcctgcgtcgaactcttgtagttgtaatctttgctctgttttttgttgtaacggaatttgaagaaaaaccacgggttttgagtggtcacttttccgttgttggaacactcgaatcccctgaactcattcatcttggcatcctcgctgtcgccggtgcaccaaccgtagctcttgccgctgctgatgctggagacatacacgttgccccaataagtgccgcctcccgggtcagaaaaagtgccagagatggcccatcccgatagcggcaccagcagcataatcgccgtcaatgctgacaggataaaaaaatgatttcttctcatgattgaaatattttttgtgtttattatttcaattttgttacaatactaaggtgcaaagatacaaatatttctcaattaatcacctataaatccacaatttaactaaaaaaatccccatttcaccctatttccgcccaaaaaccaccccaccaacccccctccaaccccaataatcattcaacaaatattccccccctcacgcaccctaccatatccctgctctcaacatgaattctgcctctttcaacacgaatttcgcgaatattcaaaccactgattacacgaattatactaattatttatcaactacggattatacggattatgctgattgatgaatgattgacggataattgccgtgtgggacagaaaaaagcgagacaagcctaaaccgtcccgcttttgatgttttcacaacggaataatccttattgtgaattgcttcaaatttgtacctgcaaaattactgcaaaattttgaaatagcaaaaattttcttctttttttgaacaaaaccatgcatttttcattatttattagtaattttgtgactcaatgcgcaaatagcgcattacatattaatgttggattattaattccctaaaaatttaactatatgaaacgagttttgggacttgacttaggcacaaatagtattggctgggctgtcgtcaatcaggctgagaataacaatgaagaatcatcgattgtgaagattggagttagaatcactccgctttcggccgatgagaaagataattttgagaaaggcaaagccataacaaccactgccgaccgcactttaaagcgtggtatgcgtcgcaacttgcaacgctataaactgcgtcgcgagcatctgttgcacgtgttgaagcgtgagaattggattgatgacgagacactgcttggcgaagaaggcaatgccacaactttcgagacttatcgccttcgtgccaaggcggcgcaagagcaaatcacgctgccggagttggctcgcgtgctgctgatgataaacaaaaagcgcggctataaaagtaatcgccgagcccgcaatcaagaagagggtacattaatcgacggaatggaaatcgcacgtcgcctctatgatgacaacctcactcccgggcaattgtcatatcaactgatacaacaaggcaagaaacacttgcccgatttttatgcatcagacttgcgtcacgagttgcaatgcatttggcaagaacagcaaaagcattatagtgacattctcaccgatgaactttttgagcaactacatggcaagaaccagcgcggcaccgaggccacatttgccaccatgggatggaaatctgccgaactgaaagaccgaaaaacacgcactgccacacttttgcgttggcgtgccgaagcattaaacacgcgccttgagccagagcaaattgtttcgataattgccaacgtcaattctgcaataggcaactcaagtggctatctgggagcaatcagcgaccgtagcaaggagttatatttcaaaaagcagaccgtaggccaacacttaatgtcgctgctcgacgacaaccccaatactcggttgaaaaacagggtgttctatcgtcaagactaccttaatgagtttgaaaccatttgggaatgccagcgacagttctatcccagccaactgaccgatgaacttaaacacgaacttcgcgatgtggtgatattctaccagcgacgtctcaaatcgatgaaaggcctggtgtcgttctgcgagtttgagtcgcgcgaaatcacggttaacgttaatggccaagagcgcaaggtgatgactggatgccgagtgtgccccaagagttcaccgcttttccaacaattcaagatatggtccacggtcaacaatctaatgattgaagaccgcacccgccgtggccgaaaggccgacaatcaaaccgcccttacgctggagcaaaaacaactcgttgtcgacgaactgaacggcagggagaagatgaccgatagcgaaatcttgaaacttctcggctataacgacaatgattacaaactgaatttcaagcaactgcagggcaacaccacactcgtcgccatccttgaggcttgcaagaaagtggtggagtggagcggacatgatgtcgaaaaattcgacaagttggattcgcgcagcaagtttatgatggtcgaccaagtgctcaagggagcccttggggccgacacaagtttcttgactttcgattgcgtggatgccgacactatgcaggctgaaaagttgtttaaactgtggcatttgctgtactcctacgagggcgatgacagcgccacaggcaatgataggttaatagcacacatctcggcgctcacaggcctttcgcttgagtatgccgctgcattcacgaccgtcaacctggtcgacgactatgggtcgctgagcacaaaagcaatactgaagattatgccgttcctcaagcagggctacatttacagtgaggcgtgcgagatggctggttatcgccactcaaaagcctcgctgaccaaagaagaaaatgagacccgtgagttggtcgacacgctgccactgctgcaaaaaggcgctttgcgcaatcctgtggttgagaagattcttaaccagatgattcatgtggtgaacggctgcaatagcgagtatgggcctttcaatgagattcacgtggaaatggcgcgaacgcttaagcagactcaagagcagcgcgaaaaagccactactcgcttgcgtgcacgcaccgacgaaaccgagaaaatcaagaagattctccaagagtcgccgttcaacattccacgccctacgcgcaaggatgtgattcgataccgactctatcaagaactcgcgcctaacggctacaagacactttattcacagacttacattcccaaagatcggttgttctcgcgtgactttgatatcgagcacattattccacaagcattgttgttcgacgattcattgaacaacaaaaccatcgagtcgcgtgccgtgaatatcgagaaatcgaaaatgacggcaatggactatgtgcgaagtaaggagggcgaggcaggtgtgaaagagtacgagaagcgcattgcattcctctacgacaagaacaatcgtaatggcacaaatcgcaaacacgcttatctgctgatgactgaaaaggacatccccagcgacttcctcaaccgcgacctgagcgactcgcaatacattgcccgcaaggccaaagaactattgcagcaactgtgccgcgtggtggttccgacaacaggtgccatcaccgctcgcttgcgcgaggactggcaactcgtggacgtgatgaaagaactcaattgggataaatacaacagcctcggcctcaccaccatcgagcaaaacaaggaaggccaccaagtgcgcattatcaatggttggaccaagcgcaacgaccatcgccaccatgctatggatgcacttaccattgcttttacccgacttcagcacattcagttgcttaataacctgaacgcggcaagtggcgacgaacccagcgacaacgctttggcgcttatcaagaacgaaatcactgaaaagggcaaattcttgccaccgatgcccctcgacgagttgcgacgcgaagcgttgcggcaactcgatgccgtgctcgtctcaatcaaggctaaaaacaaggtggtgacacgcggagtcaacaagatgaaaggaggcccagttcaagccacactcacaccacgcgggcaattgcataatgagacaatttatggctcaaagcgattctaccaaaccaaggaagagacggtcaacgcgacattcgatgcggcgaaaatcgccacagtggcccgcaaagactatcgtgaggcgcttatgcggcgattgaatgaaaacggcggcgacccgaaaaaggcatttaccggcaagaactcgctaaaaaagaatccgctgttcaccaccgacagtcatgccacacaagtgcccgaaaaggttaaaaccgtgcaactgtgccagcaattcaccattcgaaaacccatcagcaaggacataaaaatcgaaaaggtgatcgacaagggcgtgcagcgcattttatggcaacggctcagcgaatttggcaacgactatgccaaggcgttctccaaccttgacgaaaaccccatttggattaacaaggagcagggcatagccatcaagcgagttacaattacgggcgtaagagaagcagtggcgctgcatgagaagcgtgacaatcaaggccgtgttatactcgatgagaatgcacaacacatccccaccgactatgtgagcacaagcaacaatcatcatgttgcaatctttgaagatgccgacggtaatttgcaagagcacatcgtgtcgatgatggaggccaccgcagcagcaaactgtggcttgccgattgttgataagaattaccgccacgaccaaggctggaaattccttttcaccatgaaacaaaatgaatattttgtattccctggcgatggctttaatcctgaggaagttgaccttaccgacccgtcgttagcaagtgagataagcaagcatctgtttagggttcaaaaactaacgtctaaagattattttttccgtcaccatcttgaaactactgtcagcgacgacaaaactttgaaaggtattacttggaaacgaataaccgctctcaacaatcttaaaggtgtcgtcaaggtgcgcgtcaatcacttggggcaaattcagcaagtcggtgaatactaataaagaatactaataaagatgattaaacggactctatattttggtaaccccgcttacctgagtctaaggaatgcccagatggtgctccggcttccagatgactccgatgcggaatatagcgacctcactcactggggcgctgagccagcacgtacattccccatcgaagacttagggcttgtaattcttgacaataaacgcatcacagtcactcaaggccttcttgagcgattgatggagaacaattgtgccgtcgttacttgcgactctactaatatgccggcaggcttgctgctgccacttgatgcccacaacattcagcatgagcggtttatggaacaactgtccagcagcaagcccttgcgcaaacaattgtggcagcagactgttcaagcgaaaattgcaaatcaggcaagagtgctttatcggcttacaggtgccgaagtaggtaatatgcttacttgggccgaaaatgttagaagcgacgatgcgatgaatcttgaggcacgagccgcggcttattattggaggaatctgtttcctgaatttcctcagtttaagcgcgaacgcgagggtgacccacccaacaatttgctcaactatggctacgccatcttgagggccattgtggctcgtagtttggtgggtaaagggttattgccgactttgggaatccaccaccataaccgctacaacgcctactgccttgccgacgacataatggagccttaccgccctgtggttgatgaattggtaaaagacatcgtgggtaacaacagcaggatttcagaattgacagtaaagttgaaacaacagttgctgtcgttgcccaccaccgaggtgaaaatcgcggggcatcgcagcccattgatggttgcggtggagacaacaacggcctcactgcaaaaatgctttgctggcgagattagaaaaatcgtctatccagagttatagtcaaaaattataatgagtaacgaccgctttagcgagtatcgggttatgtgggtacttgtactttatgacttgccaactgagacaaaaaagcagcgaaaaattgcggcacagtttcgtaagcaaattatgcgtgacggcttcacaatgtttcagttctccatttacatgcgtcattgtcacagtcgagaaaacgccgaaacacatattaaacgagtcaaagccattttgcccgaagcaggtttagtcggcattttgtgtattaccgataaacagttaagtatgatggaactattctatggcaaaagggaagaagaaaagataataggtccacagcaacttgaactcttttaagcggtgtcttgttaagaattattgagacactttggcattaattaacaacacttgatgggcgtttgcgctaatattaaatgcaaaaaagggaaacgaagaaagagtcagccattggcgaaatctttcttcgtttcttttaattttttaatcctattgtgctgtgtaaaccaatgattcttaattaattacaagaaatcagttgtgtaacttagcacaaagatacaaatttgaaagcaattcacaactggtgattttcgtgagtctatgctcgattgttgtgtaacttagcacaaagatacaaatttgaaagcaattcacaaccgtatttatcggatgagtcgtggtggtatagttgtgtaacttagcacaaagatacaaatttgaaagcaattcacaacaggctcaaaatctggaagatcagtttatttgttgtgtaacttagcacaaagatacaaatttgaaagcaattcacaacgcaggggcatcggcaaagctgataacaaaggttgtgtaacttagcacaaagatacaaatttgaaagcaattcacaacggcattgttttccatttgctccctgccttggttgtgtaacttagcacaaagatacaaatttgaaagcaattcacaaccatctgctcgtcttcctctcggtgcaagaggttgtgtaacttagcacaaagatacaaatttgaaagcaattcacaaccaatgtcataattttgtagttttaaatgtgttgtgtaacttagcacaaagatacaaatttgaaagcaattcacaacttacaggcggtgaagatggtgaaggcacgggttgtgtaacttagcacaaagatacaaatttgaaagcaattcacaacatcactgttcgccaaaagattagaaagcaagttgtgtaacttagcacaaagatacaaatttgaaagcaattcacaacagtgttgcccgactttaagtcaaagtgtgcgttgtgtaacttagcacaaagatacaaatttgaaagcaattcacaactgcgagaactcttgttgttccaaagcactggttgtgtaacttagcacaaagatacaaatttgaaagcaattcacaacccagcgcgaggactacttgcataaggtttcgagttgtgtaacttagcacaaagatacaaatttgaaagcaattcacaacaaagtcacgcatcgctccacgcttgagaagttgtgtaacttagcacaaagatacaaatttgaaagcaattcacaacaccgttctttcttgctatttctatatagcgttgtgtaacttagcacaaagatacaaatttgaaagcaattcacaacagccagtgtggttttatttctcgctaggcgttgtgtaacttagcacaaagatacaaatttgaaagcaattcacaacaagttagagcaggaaatattttatccttctgttgtgtaacttagcacaaagatacaaatttgaaagcaattcacaacaattcttctttcgtataaaccataataaggttgtgtaacttagcacaaagatacaaatttgaaagcaattcacaaccacttgtagccgatgaaggcactactttccgttgtgtaacttagcacaaagatacaaatttgaaagcaattcacaacgccgtgccgtgattggctcataggcaccggagttgtgtaacttagcacaaagatacaaatttgaaagcaattcacaacgcaacgctcgttgcaactttatggccagcagttgtgtaacttagcacaaagatacaaatttgaaagcaattcacaacagaaatcgcaggagcgtcaggctcggattcgttgtgtaacttagcacaaagatacaaatttgaaagcaattcacaacagatgtttgcaaaacttcaccaaatataatgttgtgtaacttagcacaaagatacaaatttgaaagcaattcacaacataacaagcatattttttaaatttgtaaatgttgtgtaacttagcacaaagatacaaatttgaaagcaattcacaacatcgctggaataaattcgattactatttagttgtgtaacttagcacaaagatacaaatttgaaagcaattcacaactatagtgctaggtgacacctagcagtaaatgttgtgtaacttagcacaaagatacaaatttgaaagcaattcacaacgatatgctgaatataagtacatgcccaatgttgtgtaacttagcacaaagatacaaatttgaaagcaattcacaacgcagggcaaggcaacacgcaacggcaaagtgttgtgtaacttagcacaaagatacaaatttgaaagcaattcacaacggcttgaacttgtcctcaaattcgttgtacgttgtgtaacttagcacaaagatacaaatttgaaagcaattcacaacgcggttttattgccccattttgaggctttgttgtgtaacttagcacaaagatacaaatttgaaagcaattcacaacacgagtgcgctgcggttaaactcggccacggttgtgtaacttagcacaaagatacaaatttgaaagcaattcacaacgcaagtccaagtgcaaaggtacaagttcacgttgtgtaacttagcacaaagatacaaatttgaaagcaattcacaactagtccgtgggcaactcgtccacgatgctgttgtgtaacttagcacaaagatacaaatttgaaagcaattcacaactcctcgtcattttcgaccgtcattgaaatagttgtgtaacttagcacaaagatacaaatttgaaagcaattcacaacaaggatgggcggcgcatctactactgggagttgtgtaacttagcacaaagatacaaatttgaaagcaattcacaacctgccgctatactttcgtctgcccaactgggttgtgtaacttagcacaaagatacaaatttgaaagcaattcacaacggtgcgccttgcgcaagtccttgcgggcaggttgtgtaacttagcacaaagatacaaatttgaaagcaattcacaacccgttatcgtctgtgatggctcgtcgatgggttgtgtaacttagcacaaagatacaaatttgaaagcaattcacaactcccgagccaagtatcgtgaagagcatcgtgttgtgtaacttagcacaaagatacaaatttgaaagcaattcacaactgcttacaacccattcatcgggtatgacttgttgtgtaacttagcacaaagatacaaatttgaaagcaattcacaactctttaccactgacgaatgggacgcattgagttgtgtaacttagcacaaagatacaaatttgaaagcaattcacaacaatatcgtttatataatgggttcgggttccgttgtgtaacttagcacaaagatacaaatttgaaagcaattcacaacaggtatgaaatagattcttactccaaccgagttgtgtaacttagcacaaagatacaaatttgaaagcaattcacaacagcatcgccccgatttcgtcatcgctgcggttgtgtaacttagcacaaagatacaaatttgaaagcaattcacaactgcaacgtagcgggcgttgcgatccatgctgttgtgtaactaagcacaaagatacaaatttgaaagcaattcaccaaatatgccccactaggctcatcaccaaaacgccataaataaccacaaattatagtgtaaaaaccgttgggtgaattaagtgcgcacacttgatttggctctctcagttatattcatttgcacttatgcgccagattaaaaaggtcgccattgggtggaatggcccgggggcaacgccaggggatgaaaaagtttttttttcaaaaatgggggtgaaaggtgggagatttgtgaatttttttgtatatttgcaaaatcctaaaaagtaatacattttttttattaacttaatacatttcatggcatgaaaagaatctacctaatggttttggccttggtggcatcgttcggcatgacgatgggcgcgcaaacgcttatcgacgagggctttgaggatgtccctgggaccgagaccacgacaaccctgcccccggggtgggagcgtgtcgacagttattcgggtaccaacgacctgtaccgctgggctgtgcattacagttctactggctcgacaatgagcggccacaagtacatgtgctgcgacgccccgacgtggcaagaccccaacaacaccaacgcgctgggtcctcgccaggaaattttgatgacgcccgctgttgaactcgacaacacctatcagttgagtctcgactgggaggctgctgcctacagcgtgctcgagaagggtgagtacaccttcaaggtcgctgttatcgaccaggctaccaacgagcaaaccatcgtgctcgacattaccgacgagcaaatggtgcgcgacagcggtgtgcctgccgacatctacggctcgtacctgtggaccaactgggctgtgcaaacctcgaagatcgacctgtcggcatggcagggcaagacggtgcgcatcgcctttatctacgacctgaagaagaagaccggtaacgtgctttatcttgacaacgtgagcatcaagcagttcacgccgtcgacaggtcccaggcccgaactctcgcagagcacctacactttcccgatgagttacatcggcgagaagttgtacagcgagattatgactatcaagaatgtgggtctgcgcggccttaggatcaccggctacgacgccaccaacgcgttcggcgctaacgtcgacaccagcgtggaactcggtgtgaacgaaacctcgcagttccagatttactacctctcgtcgctcaccagccccaccgagggcgacatcgtgattcacaccaatggtggcgatgtgacgctgcacgccgttgccagcaagcaggccatccccgacggctatgtgctcgaactctttgagggcgagcagttcccgccggcaggctggacactgggacaaggcatcaaccagtggagccgcacctactatgccctcgagggcgactggagtatgtacggctcgggatatatcgaggacagttacatcaacaccccgatgctcgatctcagcgatcccaacacgccgcatgagatgatgttcaccttctacagccagtactacggcgaagactatgagattccgggcaacgacctgattgtgcagatgtcgaccgacggtggcaagaccttcaacagtaacctgtggaccgccgatcccaccgtcatcaacgagttgcaagagattcacatcgacctgaccagcgtcaccagcgacagcgtggtgctgcgctttgtcaacactgcagtgtactacgacagcgagtacggcatggacgagagcgccaacttcatcatcgaccgcgtgctgctgcctggcgtcgccggacttgacggcgtgcccaaagcatcggacgtggttgctccggccgactcggcagtgaacatctacggcaaggatgtgctcttcaagtggaccgaggcacagtttgccgagggctaccgcctgtacatcggcaccagcgagaacacctggaacgtgcttaacggccaagacatgggcgacgcgctgacctacaccctcgctaccacgctgcccgagaccacctactactggaaggtggtgccctacaacgaggttggcgatgccgaggaagtgcccgtgtggtgcttcaccacgcagcccgacatgtcgattgccgacttcccctggttcgaaggcttcgacagcggcatcttcgcaccgctgggctggaacaacaagggtggccagtacaccaagtggagcgccagcgactactatccctacgacggcgcacgctcggcaatggcttacagcaacgagaccgaggttgaggctatcctcaccactcccgacgtgaaactgcccgccggctcgagttaccagttgagtttctggtggggcaacgaccgcccggtgagcctgaccaaggacgaaacgcaggtgcgtctcaaccacagcactcaggacgacggcatcgacgccgtgatgatggatatcaacgtcgacggacagtggacgcaactcaaactcatcagcgacaaccaggaaggtgtcgatgaggacgacgagcccatccgctactgggtgtatgagaacatcgacctcacgccgtatgccggcaagaccgtggcattccgctggcgttacatctcgcacaactacagccgctcgcgtggcgcgtcgctcgacaatgtgaaaattgagcccgccggagcacaggtggctttcagcaccgagtattgggacgcttacaaggtcaacgccaacaccgccgagacctcgcccgagatggctctcaccaaccttggcaacgaagaggtgaccgtgagcagcgtgagtttcgcaagcccgcagttcagcaccactctcaaggctggcgacaagattgccgcttccgagtctaaactgttcaccgtcacgtttgctccgggctcagtggccaacggaaaagaatttgtggagtttgacgacgagatgctcgtcaccctcagcgacggcaactccgtggccctgagcgtgagcgcaatcgctatgccgagcgacaccaagttcttcggcttcgagcacgacgacactggcgtaggccccgagggcttcaccaccatcgatgtggaccgcctgcccacctcgccgctgaccttctggaacttccccaacaacggtatggcactgtcgttcttcgtgcttaacgccgaccagtgctacaactcgatgaaggagccgcacggcaagcagtcgctgatgacacgctgcaacaccaacggcacattcgaggactggattgtgagcgcacccatggttgccacggcaaactcgaagttcaacttcgacatgcgcaactgggagagcatcaacagcgtgctgcccgcaagcacccccaccgttaccgtgctcgtgagcaccaccagcgccaccgaccgcaacagtttcacccaggtgggcgaggagttcaagcccgaactctacaacgaagaggaatgggatcacctgagttacgacctgagcgagtatgccggacaactcatctacgtcgcactgaaggccgaggccagcagttgtctgggtgccttctacgacaactttgagtttgcacacatcaccagcacattcgacgtcaacctcgacggcgcagtcgacggtaacgacctgaactgcctcatcaaccacgtgctgggtaagcagacgtggcctaacggtgatgtgaatggcgacggtgccatcgacggcaacgacatcaacgctatgatcaaccacctgctgggcaaatagccttcggctatagattagagattatagatatggcggtgcgtcaaagtggcgcaccgccattgttttgcccactcgcctgccacgtagaaaacgcgaatttcgcgaatggttatttgttttcaacgcgaatttcacgaattgtttattgactacggattaatctgataggctgattactaccttaacgcgaatttcacgaattatattaatttctctatttgtttaatttgttcaatttgtttaatttgttgactaacacgaatgaccatgaattggccattaattatttgattatgaaataattatcaaagataatttatggataattcatgtttaaaataaccacgatgggagtgcgcctaacggcgcagaaatctattcaaaatctaacaaaataatttttttctttcaatgtgagattttgtttcaattttgttcgatttcccgccgtaaggcggctcctttcagccacgaagggagtcgcgccaccgcacgagaactgcgaagcgactcctttcagacattaatcatcactcgactatcgccctgtttaatccgcttaatttgtggtttattattcgtgaaatacgcgtttaacccaaatcggtcattagaacggagttatgttttttttattcctaattatgccataacagttttgttttggcgtcttgccgccattgagatcttgccatagccggctatgccttcgatttcattaacagcaatacactcaaaacaaattctgttctggcataatttctaatgaccgatttgggtttaaaaaagcagaaaaatgggtttaggtcttgacaaaggctttttcatgttgtaattttgcaccctgcaaaaatatctgtaactacataatttatgtcgaaaaacaaccgcaaaaacagcgcatccgagatgccgctgacaaaactgaatttcatccttatgggcgtgtgcctgctacttatcatagtgggattctgcatgatggccggcagtgccaacgagggcagcgagttcaattatgccatctttgagagttcacgcaccgtggtaggccccaccatagcactgattggcttcgtgctgatggctccggctatcctctatcgcaagaaagaaaaaccagtagaataatggactggctgcaagcactcatcctgggcatcatccaaggccttacagaatatctgccggtgagtagcagtggccacttggccatcggcgcttacctcttcggcatcgacggcagtgacaacctcgcgttcaccgtaatggtacacgtggcgacggtgctgagcacctttgtggtgctctggagcgaaatcgcatggattttgaagggactcttcaaatttgagatgaacgatgccacgaaatattttctgaacatcctggtgtcgatg

SEQ ID NO: 2253 - DNA, 24128 bp, synthetic construct
  source 1..24128: mol_type = other DNA
  misc_feature 1..24128: note = Synthetic
cgtttttaattgatgaaaatggaaatattgtaaatgtaggagactttaaaaacgctacaacttggcaaggtgttcgtactttattaagaaattacagacatgccggagataattcaatagtatctagttcagataaaagtgagtctattaaagtaaacagaaaaggagagcaagaatatcatgcagggaatttagaaaatgctgtggcattataccaaaatgctattgaattaaatcatagaaatggacaagcatacagtaatttaggattggcatttcaaaagttaaataaagaagcagaagcattatgggcaaatagaaaggcaattgatttagcctacggaagtaaagcacatattgtaagagcaagttcgtactacaatattgctagaatttatgaaaagaaagggcagtgggcagatgcattacaaaactttaaaaatgctaaacgtaacagagaacacagggcttataatgaaggaatttcaagaatgtcagctaaattaagataatgaaagagaaggtatacatactattttgtttattcattttaacaccttttatttcttttgctaagaaagtagatgcaccagcaaacagttggcctttagaaatgaactcaagtaaaaattttgatattgcatctaaatgtgaaatgcttgtttttattgaggttttcaatcaatttgatgcattgtctatggcagaagtttctacaagaactaaggtgaaaaatgttaaagagaattctgttagtttttggaaaaagaaaactaaaaaaagaatactaactaatattaaaagtttgtctaatgaatcgttacaagaagttgtagcgattcagaagtcaaattcatgggaagagttatcaaaaatacatttacagcatgtattaccttctaaatttcagacttggtatcaacaaaccaaattattttatcaaagttatgtaaaagaacaaatacgtttagcagctttatatccaagaattacaagtgagattttacagttttcaaaaagtgaaattcaaggacataattttacagataaacattttctgttgacttttgatgatggaccaactaaggtaaacggtaataccgataaattaattaaggtattaaatacgtatgatttaacaggaatgttttttgtgttaggtcataatttgaaaaaaagattgcaaagcacttccaaagaagcattgattaatttatatggaaataacactgttttgtctcacggcgatattcataaatcacatcaaaagtataccgcttggaaaagctcaattgacggcacaaatacattaattcaagatatcttttatcctgaaaataaaaatgaattactgtatttccgtccgccatatgggcaacgaaacaagcagttagtcaattattttgatactaaaaattcaaaaataatttattggaatattgattcgagagattggagttctaaactaaatgcagagaaagtagccaatcgtcaaataaaattaatgttattatggcgaaaaggaattttgttgtttcatgatattcattcaaaatcacaacaatcagtacctatgatttataagtattttaaaaatacaggtgttaaatggatggattctaatgttgttttagagtgagaatatatttaacctttataatagttttgatgtttagtttttcttctgtagctcaattaggtcagcagaaaggtgaaatttatacaattaaaggtattattactgacaaaaaatcaaatagtgttttacctcaagtaatattagaacttattgataaagaaaaaaatgaaattaaggttgtacaatcagattttgatggagcttatattgcttctttttgttcaaaaaagttaatgaatgagaatctttttattaaagtgactaaagcattgtacaaccaagaagtttttagttttaaagtagtttcagatactattattaatattcagatgaactcaagtaacagtaaaaaaatatctgaaaaagagtttgaaaagtatagaagaactataactaaatgtggtttgattgttggcgatactgaatacgatttacttgaatatgaaactaactccaatacatatatgcattattgtacaggagaaataaaaacttacagagagttaatagacaacaaggaaatcttatcacattggataatgattgaaaaataaaacagtacttttgggtattcaaaaataattgtaaatcaataagtaatgcttttttttgtttgaagaagtaaactatttattgcatagaaaaatttaatccttaaaaaagaatatggaaaacaagcaagaagttttaataaataatgcgttgcagtattttaaacgaggagatttctctttaggatacagaaccatgctagatgctgcattaaatacgagttctaataaggtatttaaaaaggtgttagcttttgtagaggtatatgaaaaagaagtatcagaagataaatcatctttatatgaagctttagaagaatgtgcgaaagaaataagaaatgtagctgttgaagatcctaatttgttagggaaaacagtattgaaaggagaaaacattaccaaaaattacaaaaaaggacgttttgtacttggtcctgtgaatattgaattaaagaaaggagatatttttggtcttgtaggtgaaaatggaaatggtaaaactactttattaactgctttagggtatttaattcatacaagttcaggagatttaaatttttcttttaccaaagagatagaagatgactacgatttaaaatctaaattagtatacattccacaacgtacaggagtttggtacggaagtgtaatcgataatttgaagttttcattagtacatcatggaataaaaggtgaagacaacgatttattggtgtatatgatgattgctcgctttggtttatggaagtataaggatttaaagtggaaagaactttcttcaggatataaaatgcgttttgaattggctagaaccatgttgcgccgccctgaaattgttttgttagacgaacctttggcgaatttagatatactagcacaacaaatcattttagaagatttaaaaatgttggcaaagtcgtatgtcaatcctattgctatggtattttcatctcaacaattgtatgaggtagaaaaagtatcagatcatgttatttatttgcgtaacggaaagccttcagaaagtttacaacttgaagagaaagaggaaaaagccttaattgtagaaatagatactgatgctaacagaaatgatattgaagcattgttcaaagaaaacttattagaaaaaattgagtttaatgggggagtgtacattttgtattttaataaagaagttacttttaatacagtgttgttagctatagcacaatctgaagttgaaatacaatacattcgtaatatttcagaatctacacgtcgattttttgtctattaattaaaaagaaaaagtaatgagttatataaaaaagatcaataaatatttattagaaaattatccgttaatatggaatactcgattggtatggatgatgttaacagcactagtattacatttagctttctttatcgccggatttttgtttgtaaataatcagttagaagtttcttctgaataccgattggataagttttactttgacacttctgtcgtatttacagggatactcttttctattattattttgttagtttgggttatttattatctacaaaataatgcgtttaaaaacttgtatcatttaaaaaaaggaacactttttaagcagttttgctgcattgtagcaattatatttttaaatattacacagttttattcttttaatgtaggattaaaactaaaaataagaaccatgtatgattggtctgctattgatacagatatcaaagagtggaatagactttctatctttttattagagcattctacagattataacatagatcacaaacaatatcctaacccatttcctttaaatcatgctaaagatgaattgtataagttgggaattagtgtagataccacaaagcattattttacttatggagattatcattaccagttttataaactcgatcatgataaaatggaaaaagataatgagaacgtaaattcttatgctggtcatcatgctatgaaagaagtagattatgttgttggagaagagtatgaccgaaagcataattttaaatataggatagtacatgatatttcaggatttgaacatttgatagagcagtctttatttaattattcagataaattatataggtatggtcaagactcaacagatcataagaaaagattagcttattatgaagagttattaaataaaaaggatgaaaaagaaatagaaaaagcaatacttccgttttttgatttggctaaaaaatatcaagtagctcataatttaaatatgaaagattggctgtatttgttgaatacagaaaataattatcattttagagaaaatattagagatagagaccttactaatgaatatgaatatgaaaaaataagattagattattatagaaatgttactgtaacagatacaattttgttaaaaggaagaaatgaaaaggagttattatatcttaaaaggcatccgttaacaaaagacgggcagtatgctttagttgaaagaacagaaaaagagtattttaaagaggtgccgtattgtaatttggggcgtttagatgatttttttagtaatgtatacgaatcttacaaccaaaagtttgatgagtttactctatatgcttacatagtaatttctctggtaattggtcttttattatttttatttaaagttactgatataagaacattattgttaagttttgtggcaggtagtgtactattaataattctgattcttactatatctaacttacctaattctataaaagaactttttggaaggaaatatgtagaaatgataatttcattgttcataggtgtttgtgtaatagttttttctattatttcacttaagaaaagatggaataagttaataacagctatattattctctttgtcattgtttattataccgttaatatttgtagcgttatttgggttgtataccacttatttaagagttgagcataatttaagaactaatagttttatagaatggtttgaggtatacggatttgtaacagttatatcgctttggatacttggaattgcattgtatttattacctattcgaaagtggaaaggcttaccagaatagggaaattaattacgaataaataattataaattacgaattgtgcattttgttacggttcgtaattttttttgtttttagatgactttaaatggaagtatcgtaaataaagtctttgcttggagcgaagcaatctgtttattttttactgctgtaacgtttaaaagttctagcaactttgcattgtctgttcgagtacttttgaggcacgaaaaagtgtatcgagaactatttttcgaagttaaaattcttattctcgatacagttttctttcatttcattttgaaaaatcactcgaattgacagaattttacaccaaatgcacaacgagctatttttatgttatagttttaaactaataataaacagattgctttattttatcacgtttcgttcgtagtgaaagttatttgttagtgtacataattagcaaactcagaaataatatcagcatctttctttccgtttacaaaagcatcatatgcctcgcttgtttttttaaagtagactctttgtttggtttctcctttttgaacttcaaaagatattattgaaactaaatcgccttcatctacctgatgtctgccatgttcagaatatacttttccatcttttcttttgtggataaaatcacacaaataatcaacatttatatccttccaaaatccgtagttacctatttctaaaccttcaattttgtcacaattttcgcatatatacacaccattaggttttacaattaatttgcaattgggttcgtttatggtttcaattttactgttgtgtacaaatccgtaaggagtatacgtaccttcaatatcatccataactaaactgcaactgtaacctaaagttagtagtatgtacaagactagttttttcatagttttaaatgttagatgataaatttaattaaaaccttttaataggctatctaaaattagaactatgatctatgaaatgaatctactttaattaattttttttacgtgtagaaattttaaaaggatagtataacggacaaaaactaataaagcttgtggctaagaaaataagcgctaaaacacctaagataatagcggttaaaccattgataatattagtaaggtaaagagctgcaaccacaccagctattgctatacgtattattttgtctgtagtccccatgttttttatcatcttgaaatttgtttacagttatgtcacaaaattcaatagaattataaaactacacagtgacaaatatcacagaagctgaattttattatcgagacaatgctaatttgttgttgtttttagcataaagattacagttcatctgttgtcaataatatagaataactattaatatatcgtatactgcaattttgctttgtcaagtgcttctcgcatagattttatgggagataaagggcatagatatgaaggaaattcaccagtaatagttttttcttcaatatttacagatactttacttttttcggtaagattgctcaaagctttctctatacgttttttacagtttacagattttatttctttaattttaaaagtaaactcaattattctatttttttctttttctatttgttgatcaaataattgttgaattatttcagtgtttgttattttctttgaagcaatatcaagatataaagaaggttcacttttgaaataaaaatctttttgatcgtattttaaagcttcgtatagatacgttttggcattttcaacatctcttaagtgtaaataacttttagcacatatgatataagctttcactttaggaccataatcatgttttttactaaaaagaatccaacttaaaagtagatcgttagcctttttatattttttgttccttattaataagtaagataagttaatgtaaatgtgataggagtaatgatgtatgttcattttagggtctggtaataaatcccaagcattcaagtataatttttctgctttatcatattgtctcatatcataatagtccatgcctaaagcagttaaatcaccaatggtttcctctagttcttcattcaattttataactggatctaatttcatagtttaatagctgtttatatatgtgttaattgtaaatttaattaaaaacaagtatcgcttggtgtgtatttagaagtttaacaaaccttaaattgtaagtttgagtgctttttgaggtacgaaaaagtgtattgaaaatctttgctactataaaattcttattctcgatgtaatttctcttcatttcattcagagaaaccactcgaattgacagaattttatttcaaattcacaataaaaaatatcacaaaagctgaattttatttcgagatagtactagtatattgttgcgttccatttgtttaagaagtctggaaataacttctctggaagtatttaaatcgttagcaattttttgatgcgtgagttgaatggtataactatttgtaattttcgaataatcttttaaataattcagtaatcgagtatctagtttttgaaaagcaatagtatcaattgtattaattaattcttgaaaacgtgaattataacttttaaaaacaaattttttccattctttaaattcatccatccattttgttgagttttcaatggatatggctagtagtttggtttgtgtgattgctgtggcaaatatttgacttggttcaattattttgtacgactgtaatgtcatggcacaagtttgtgaaggttctatagtgtataaaaatacctctttaccattatcatcgtgtcggtaaacaccaatggctccagataatacaatgggtattactttgataaactgcccttgtcttaaaatttgatcgtctttattaatttctaaaaccgttccttcagctgccattagctgcttcaattcaatattgttaaaaggtagattttctattttcattattgctaacaggtttttaaacaatgttcttttataagacggtgattatattggtaatttacataattgtatttttactttgtacatgacaaaaaaacatcttttcaatatatttataactaaaaaccagtactttatttagagataggtttatcatgtcacctcgagcgcagtcgagaggtttttattaaaattactaacgataacaaggtctcgactgcgctcgacctgacaacgaaaaattatttttaagttttttgtcatgtacttaggtatttttattatgtgtattacaataaaaaagcctcagtaaataccaaggcttccagtataaaacgtacaataagtatgttttataagtacataatccaatgtttaatattattttaaaactctatgagcttcccacatttcaataagttcttttgtataaaaatcaacatcacttttatctaatatggatacaagttcctctatgctttcaattacttcattaataaaatcatcttttggggcttctaagcagttgtgataatagttacaatagtataaactatacttagtttctgcgattaaagcagttaaaaacgattttttattttctgttatatatgtttctaaaccattttctaagaaatcttcaaactgttcttttccgtgttgacctgcacaactcataagtctagctatggcaagttcacttgtttcagagctgtaaccatatgtatttataatatcgcttatatctccccattgagatacttcatgatctaaatcgcaagttctaagaaaatcgatgtaattttttatgtatttcttatcagtttccaccaaagcgatcatagctccatttcctagtggagtttcagaatcttcccaaattctttttccatattttccattagcagctgtatttacatacttattaatgaattctaacaactctttatgttttacaattttttcaaaaagagccatttctccatcaatagaatccatcaccatttcttcttggtagattacttttataatgtaattgaattcgtaaatctcacctttttcaataaaagaagttaatgtagccgttaatgattgtaaaatgttttgataatcggttaactcaagttctttattagtagtagttttagaaattactatttgttctgaaagagaattttctccagatgcgttacagtcaatttttatggtatagctcatggaagtatgtatgtaaatttttagaactactaaattaatacttgttgctattataacataccctgttttcagggattttgagttgtttgtgaggaagcgtcatctcgttttgaagaggcgtcatctcattttgaggaagtgttatcttgtttttagtgagtattatctcacttttaggaagcgttatctcgttttgaggaagcatcatctcattttgaggaagcgtcatctcgtttttaggaagcatcatcttgtttttaggaagtgttgtctcgtttttaagaagtattatctcgcttttaggaaaaggatattgttttttgaataaaaaaaggcgacttgcgccaccttaaatgttttcacaacggaataatccttattgtgaattgatttcaaaattgtatgattcaaatataattatttttttggtttataatgtacggtaaaccgtattttagaataaatgattttattacttttagctagtaattcatttttaaaaaattgttacacattctttatatcatatcagatgtaaagaattggctttttaagctatacacaacctcatattaaaatataaatgaaaaaaagaattttaggacttgacctaggtaccacttctataggttgggctttggtagaagaatcagaaaaggaaacatctaaaattataaaattaggtgttagagtgaatcctttaactacagatgaaaagaccgattttgaaaaaggtagacctttgtctacaaatgcagatagaaccttaaaacgaagtgccagaagaaatctacaacggtttaaattaagacgtgcaaatttaatagctattttaaaaaagcacaccattattactaatgatagtatactagctgaaacgggaaaaaatactacgcatgaaactttacagataagagcaaaagctgctaaacaacaaataaccttagaagagttagctagagttttattagctattaataaaaaaagaggttacaaaagtagcagaaaaacaaagggagaagaaaatgaaggtgtggctatagatggtatggcaatagcaaaaacactctacgaaaacaacctaacaccaggtaaatatgtatatgaacagctaaaaaaaggtaaaaagtatgtgcccgatttttacagatctgatttagaaaaagaatttgctaaagtgtggcaataccagcaacaattttatccatctgttttagatgatgaattgttaaatgccctaaaagatcaagggcaacaaaatagtaggaagcgttttttagcgattaaaggcatttacaccgcagaaaataaaggaaaaagagaagaaaaaaaattgcaacattatacttggcgatctaaagctattgaacaacaattagccattgaagaagtagcgtacgttttagtagaaattaataataacttacataaatcgagtggttatttaggtgccatttctgatagaagtaaagcgctttattttaataaaattactgttggagaatatttgtggcagcaaattattaagaattcgcatgtatcattaaaaaaacaagtattttacaggcaagattatttagatgagtttgaacaaatatgggaaacacaagccaaatattacagcgagttaactccagagcttaaaggggaaataagagatgtcgttattttttatcaaagaaagttaaagtctcaaaaaggacaaatcagtttttgccaatttgagagtagggaacaacgctatgttgataccaaaacaaacaaagaaaaaactagaattgtaggaagaaaagtagctgcaaaatcatctcctttatttcaagaatttaaagtttggcaatatgtaaataatgtaaaatgtattttaaaagaaactgaggaagcttttgtgttaaaagaagaagataaaacgttgttatttgaaaccttaaatattaaagggaaccttaaagaaagtgaggttttaaaagttttaggtttaaaggcaaaagattggaaaacaaattacccagaaggtttagaaggtaatacaactaataaagccttgtatgctgtatacgaacaaatagctattaacgaaggttatgggcatgattggaataaaaaaacagccaaacaaattaaagatgagctgcatgttgtgttttgtgaattacaaattgatactagtattttaaattttaatgctactaaagaaggtgaagattttgacaaacagcctgcttatgaattatggcatttattgcatgcaacagaagatgatgatactgtaagtaaagaagatgctgtactatatggtaacgcttcggttactttaaagaaaaaattagtagaaaagtttggtttttctgtattacatgcaaaattattagcaacggttactttgcctaatgattatggaaatttatcaaccaaagctattcgtaaaattataccttatttaaaaacaggaagtgttttttctgacgcttgtaaattggcaaaatacaatcattctaatagtgaaactaaagaagctaaagaattaaaaactttagccaaacagttaacattattgcctaaaaatagtttacgaaaccctgtggttgaaaagattttaaatcaaatgataaatcttgtaaatcaaattataaccacttatggtactattgatgaggttagaatagagcttgcaagagaattgaaaaagagtgccaaagaacgtgagctaatgactaagggaattaatgaggctacgagaagaaatgatagtataaaagcattgttaagtaaagattttaaaatacctaatcctacaaagaatgatgtaatacgatatcgtttatggcaagaattggctgcaaatggttacaaagatgtatttaccaataaaaaaatagcaaaagaagctttgtttagtaaagagatagaaatagaacacattatacctaaagcattggtgtttgacgattctttttctaataaaacattagcttttagtgcaataaacaaacaaaaatctaacagaactgctttagattttattactaatgattttaataatgagttgccattgtacaaagcaagagtagatggtttgtatgataaaggtaaaggagctttttctaaagctaaaagaaataaattactactagcgcagcaagagttgtctgatggttttattgaacgagacttacgaaatagccagtatattgcaaaaaaagcgaaagaaattttaggtaatgtagtaaaagatgtggtgagtactaccggaagtattacagatactttacgtttagattggggcttggtaaatatgatgaaagaattaaacttacctaaatataaagccttaggtttaactgtagaagaagagcgactgaatgtaggtacaggaaagttaaaaaaggtagaagttattaaagattggaccaagcgtaatgaccataggcaccatgcaatggatgcattaacggttgcttttactacccgaaagcatgtacagtattttaattttttaaatgctagaaaaaatgaacaacataggttttacgcagagattattggtatagaaaagaaaattaaaaaaggacaaaaatttatagcaccaatacctaattttagaagtgaggctcaaaaacacatacaaaatgtgttagtttcctttaaaaataaaaataaagtagttaccaaaaacagtaatatttacaaaacaagtaaagggctacaacaaaaagtacagttaacaccaagagggcaactacataacgaaactatttatggtaaagccaaacgtttaatgagtactcctactaaattagggaaaaactttacaattgcgaaagcaaatttaatagccaataagcatcaaaaagagttgattttggcacatttaaaacaatttaataacaatgctgtagaagcttttaatactaaaacgttaaaaaagcatcctattacttttaaaaatgaacctttaaaagaagtgtattgttatgaaataatttataccattagaaaacctgtttcaccagatttgaaaatagagaaagtgatagatggtaaagtgaaacaaattcttgaagaaaggttgaaggcgtataatggagataagaaaaaagctttttcaaatttagaaaccaatcctatttggttgcataaagaaaaaggtattgccattaaaagagttactattacaggagtatctaacgctgtatcattacataacaagaaaaatcacttaggtaaagaaatattgttaaatgaggtttcaatacctactagttatgtaagtacaagtaataaccatcatatagctatttacaaagatgataaaggagttttacaagagagcgtggtatcgttttttgaagcagtaactagggcaaaccaaggattaccaatagtagataggggctttaatgagcaattaggatgggagtttttgtttagtataaaacagaatgaaatgtttttaataccagatacagctattttattagaaaatattgatttattaaatgataaaaatgcaacattgttaagtaattatttgtttagggtacagaaaacatcttctaaagattattggtttagacatcatttagaaacaactgtaacaaataatatagattttacctatagaagaattacctccccaaaaaacttgaaaaatattataaaagtaagattaaatcatttaggaaatatagtaacagtaggagagtactaaaccttatttaaaagttcacattttatgtggacttttttattaatcaaactctaagtacttaaaaaactcaaaaaggcacctctaagtgttagtttgagtggagttgagatcatgttttatgtacgtttttataaaaagtaacttttagacgtattcagtaagttttttttgattaaaaagccagttcagcaacttgaattgttctaatttttaaattctataaaacttaaaacctccagtaaatatggaggttttataagatttaccttgtgaatgctcactaaagatacaatttgaaatcaattcacaacaaacttgtatattcatttatttttatagttcttgtgaatgctcactaaagatacaatttgaaatcaattcacaacgtgtggtcgatgtatgaaatgtaaagcaaacttgtgaatgctcactaaagatacaatttgaaatcaattcacaaccaagtttcaattcttttgaatttcttatctcttgtgaatgctcactaaagatacaattctgaaagcgcctttagcgcttcatgaacacttaaatgtaaaataacaaataagtgaataaatcaattcacaactagagtcaaacagattgtttgttcgttatcttgtgaatgctcactaaagatataatttgaaatcaattcacaacagcttcctactcaaatatcatgaagcatggcttgtgaatgctcactaaagatacaatttgaaatcaattcacaactcaattctaagtttactttctttagataaacttgtgaatgctcactaaagatacaatttgaaatcaattcacaacaccttacctgcaatactgtttgaatcattacttgtgaatgctcactaaagatacaatttgaaatcaattcacaacatctgtataaaatagcacataatggtcaggcttgtgaatgctcactaaagatacaatttgaaatcaattcacaactcaattctaagtttactttctttagataaacttgtgaatgctcactaaagatacaatttgaaatcaattcacaactcaattctaagtttactttctttagataaacttgtgaatgctcactaaagatacaatttgaaatcaattcacaactgctataagtattgataactttgttcgtgccttgtgaatgctcactaaagatacaattttgaaagcgtcttcagcgctaaatgaacatttacatgtaaaataacaaaaaaacaagtgattatacaataacaaacaatgattagtaacttaccactttttagaaactactattatgaattacttcaccattataggttggttaggcgtgttactttttgtggtatcgtatttattactgagtttaggtaaattaaaagcagaaaaacctacttaccattggttaaactttttaggcgctttgtgtttggttattaatgctgtggctataaaagacaatcctaccattgtagtaaataccatttggggattgatagccatttttacagtgtttaaaaatttaagagtataactaaaaggttaagaaaaatgaaacagacttaacacatgtttaatatatatacttgattgttgttggtaagaggtttcattacgcatttgagtacctaaataaaaataaccaccatcaatcatagcaaaaataatttcattaagctcttcaatattaggatttttgattatgttgtgctccttagcacttagtagtttagattttaaaacctttcttaaagaagcaccaaaacttctaaaactatcatttactttttcatttctataaattaaagcatacaaactataaaaaactccgtcatctatatagttattccattctctagaaaacaacttttcaataaactggtgtagggcttctttagaggtaatttcattaggagtattattgttcataaagttaatatactcttctaaaatataggtgtttaaagcttcaagtatatgctctttactgtcaaaataatgtagtactaagcccttactaatctccatatgattggctaaattggcaatagatacgttttctaaaccaatgtttttagatacttcgtaaaaggcaattacaatctctttttgtcgttgacctgtcaaattttttctacccatagtgcgcaaatatatgcttataatctaatcattttttagttaacatttagtttaaacaacaagctatttgcttaactctatcgtaactattttttaattgaacgatcgttcaatctatttttgggtttctataattttatcccatcaaataggaacataaaaaatgaaaacaattaataatttttaaaatgaggggacatttaacaattgtactactattttttgcatctatattatatgcacaagaaaatataaaaggtattgtaaccgatgctgcctctggtgaacctttgccaggagtaggagtaatggttaaaaatactacgaatggtacggctacagattttaacgggaattttatgatagctgtaactaaaggagatgtactaaacttttcttttataggttttaaaacgcaagagattacatacaccaatcaaacttttttaaaagtagtattaacagaagataatacacaattagatgaggtaattgtaacttctttaggtattaaaaaggaaaaaagagccttagggtatgcggctaccgatttaaaagccaatgagctaacacaagtaaaaactacaaatgtattaaactcgttagcgggtaaagtagcaggtttacaagtaactggggctagtaatggtgtggcaagttctgcacgtgtggttattaggggagaaaattcgttgaatttagatagtaacggacctctttttattttagatggtgtaccagtaaacaatcgaatttttggtgttggtggaggtactacagatcaggctgatttgccaactgattatggaaatggtatttctgaattaaattcagatgattttgaatcggtaactattttaaaaggagcagcggcttctgcactttacggatcgagagcttctaatggagtagtggtaatcactactaaaactgcaaaaaaagatcaggaaggtattggcgtagctatttcttcatcaacaatgtttagcagtgctttgcgtttaccagagttacaaactcagtatggtggaggctggggaggcgcttatgcttctgattttggaactaattttggacctgctttagatggtagtgttattccacatgaattggctttaggagaacctgtaactagaccttttattaatagatacgatttaaacgacttttttaaacaaggtgtaggtttaaacaatacagtaactctttctggagctaatgataaaggagattttctttttagttatggaaatacgtataacgaaggaattgtgccgaatacgaatttaaaaggaaatagttttcgatttaacggaggataccaattaacagataaattaaaagctactattagaacgaattatattaccagaggttctgataatttaacggtagcagggtatggtaaccaaggtgtaatgtatactttgttatggaattatattaatactgatttaaatgaattgaaggattattggaaggtagaaaaccaagagcaacgtaaattgttttcttggggagataatccttggtttattgtaaatgaaaacatcaatgcttttgataaaactagatttataggaaatgtaaatttaacgtatcagtttaacgatcaatggagtttattgggaagaattggtatggatcagtctaacgattttagatggtcaagaagatctataggagctacaagaaatccgaatggaatgtacagagagcaaaaaattgatttttcagaaattaatgctgatttcttattgagttataccaaagatttcaatgattttacaacaaaaacatctgtaggagctaacagatttgatcaggaaattacagaaggttttttacaaggaaacggattgtctattccaggattgtacaatgcacaaaatattaatgttacgccagtaattagaaataatgtatttaagaaaagaattaatagtgtgtacggatttacaaatattggttataaaaactatttgtatttagatgtgtctgtaagaaacgattggtctactactttacctagcaataataattcgtatttctatccggctgcttctgtatcttttataccgtcatcggcttttacattaccagaagcgattgattttatgaaagtacgttttaatattgccgctgtaggtggagatactgatccttataatttagtaacggcttatgattttggaactttaggaggaactttaaccaatccttcagaattattaaatgccaatttaaagccagagagaacaacttctacagaagttggtttagaggcaatgtttttaaacagacgcattacttttgatgctacttactatacatcaaccacagaagatcaaattttaaacgtaggtatttctggagctaatggatttggatctattgttacaaatgctggagaaattaaaaattctggtattgaattagctttaggagtaaagcctattaaaactgacgatattgattggagtattaatgcgaactttactaagaataaaagtgaagtagtttctttaatagacaatttagatacgtttatcatgggacaaggtccggatggtgttactttagaagcgagaccaggtggacaaatgggcgatatttatggagaaagctacattcgtaatgatgctggtgatattatttatgaaaatggattgccattaacaggaaatagaagaaaagttgggaattataatcctgattggatgctagggctgtcaactagttttagttataaagggtttaatctttctgcacagtttgatattagagaaggtggtgatatttattcatatacacatgcaattggtagagagagcggaattttagcaaacacgttatcttctagaaacggaattattggaaatggagtggtaagtgacggtgctggtggttttgttcctaatacgcaagaggtaactgcagaagattgggcatatgctgtaccaagaagtaatgcagaagctaatttatttgatgcttcttttgttaagttaagacagttaagtattgggtattcttttaatgattcggtgttagaaaaattacagttacaaggattgtcatttagcttagtaggttctaatttatttttatggacagatgttccaaatatcgatcctgaagctcaaggattatttggaggtactttattacctggttttgaggtaacacaattgccttctacaagaagttatggttttaaaattaatatgaaactttaatcaatcacaaacatgaaaaaaattatatacatagtagttgcacttatagtttttagtgcttgtacagaagattttacaaaaataaataccaatccgaataaccctgaagtagctagcgaaagtttattattaccaaccgtactttttgatttgtctaacttaatggtgaacgagtcttataattttggagatattatttctcagtacggagcaagatatgaatttaatgatttagatatttatagatggcaagcagatgatcgtttttggtcgccaatgtatacaattcttcaaaatattcaggatattaaaaagattgcagatgagaatggtgatgttaattacaaagcggtagggttaattttagagtcgtacatatacagtgtaattacagatgcttatggtgctgtaccaatgtcggaagcaaatagaactaaagaaggaattataactccggtatacgattcgcaagaggctatttacacaagtatttttgagaagttagaaaatgcgaaccaaataattaatgtatctggtactattaacggtgataatttgtacaatggtaatatgatgcaatggaaaaagtttgcaaactcattacgcttacgattgttattaagaattagtgatgttaaaaatgtaagtagtgaagttactgctatcgtaaatgattttgctacgtatccgatttttgagtcgaatgctgataatgccacttatgcttacagtggttctttaccagatatttcacctattgtattacctggtggaggtagagcttatgattattatttgttgattcctacaaagcattttgtagatcttttagctacaaataatgatcctcgtttagatgcatgggtaagtccgaaagaaggaaccaatgatagaacgttgggtgtgataccagggcaatcgttaagtgatattggtagacctgctgattttagtagaagagctaatagtttttatgaaagtgctactatggtagaaggtatttttatgacctacagtgagttaaattttattttagctgaggctactgaaaaaggattagtatcgtctagatctgcaaagagttattatgatactgcagtaattgcttcttttgaacaatggaatgttaacatgcctactgactttttatctgtaacggctccttatgataataccacggatcgtttatatgagcaaaagtggttggctttatatcacagtggtgtagagtcttggtttgattggaaacgtacaggaaagcctagttttattcaggctggttcaggaaatattaatggtgatatggtaccagtaaggttacgatatccgagtttagaacaatcggtaaacacagctaactacgaagcggcatcttctgctatgggcagtgatgatatcaatgcttcttcttggtggtggtaagtgtttttatataagtaagtttaaattttggctaaattcattttaaaaagtaatttttaatttgagtttagcttttttgtttcagtgatcagttatctgtgatcagttatcaatgtttttcagtgatcagttatctgtgatcaattatcaattcttttttcagttttgctgaataaaattagatgcgtctttccgaggaggtacgatgaaggaatcttttcatttagaattgctaatatcattttgttttttaactttcaaacctcaaacctcaaacctcaaacctcaaacctcaaacctcaaacctcaaacctcaaacctcaaacctcaaacctcaaacctcaaacctcaaacctttaactttcttgaatggcttttaaaatgttttgaagatcgtctttgtagtcaaaccaaagaatgtttttgtcttttttaaaccaagtaagttgtcttttcgcaaatcggcgtgtgttcttttttatttctgacaccgcaaaatctaaggtccaattctcatcgaaatactcaaataattcacgatagccaacggtttgtagtgcatttaaatgcttgtgagcgtgtaatgctttggcttcttcaagtaatccgtttttcatcattaaatctacacgtaaatttatacgctcataaattatttctctatcggcattcaaaccaattttaatcgatttaaaatttcttggtgctttttctttattaatgaatgatgaataaggcttttcggtaccaatacaaatttctaaagctctaattaatctgtgtggattttcaatagcaacagtattgtaagaagtaatatcgagctcttttaattgttgttgtagtacttcaataccttcgttttctaattgttgattaagattttctctaattttaggatcaacattcggaaaataatccaatccttttaaaacagcatctacatataaaccactaccacctaccataatttgagtagtatttttagtgaataatgtatttagtttctgaatagcatctttttcaaaatcacctacactgtaatcatcaaaaacacttctattttgaataaaatgatgtgtagctgcatttagttcatcttcatctggaacagcggtaccaatacacatttctttgtaaaactgtctagaatcgcaagaaataatatcgcatttgtactgttttgctaattgaatgctaagcgcagttttaccaatagcagtaggtccaacaatagtaataagcgtgttcatattaatcgtgtaaattatgaccgcaatgataacaaaaaactgcgtcatctttatgtccttcagcagcacaattaggacaagactgtgtatttagtccaacatctgagtgttttaccatttcagaagaaacaattccggtaggaatggcaataatagcataccctaaaatcatgataacactcgctataaattgaccaaatggtgtatgaggagctatatctccataaccaacagtggtaagtgtaacaatagcccaataaacacttcttggaatacttgtaaagccgttatcagctccttcaattaagtacataactgtacctaaaatgattgaaatgatgagtacaaaaaatagaaatacagagatttttgctttactcgcttttaaagcttttgctaaactttgagattctcctataaaacgacctagttttaaaattctgaaaactctaagtaatctaagagctcttaacgctactaagctgtgcgtaccaacaaaaaataatgataagtatttaggaactgtagataagaaatcaataactccgtagaaactaaaaatgtatttagttggtttgttaatagaaatgattctgattacatattcaatcgtaaataaaatagtaattatccattcagctatatttaattcgaaactatacttttcgccaatagtgttaacactttccagcattacaattccaatacttagcaaaatggcaattaaaagaataatgtcaaatagttttccggcaggggtatcagcttcataaataatttcatgaagtctctttttccagttctcttttggttttatctcagtcaaaataatctgttatacaagcaatattacaaattattttctataaaaaagcgattatgaatgcgtttaggtagctaaacaaatgataaaagaggtagaagcgctaaggaagtgtttggtgtaaaaagttaactttaatatttaagaaattcatgcatcacaaattctctaatacccttattgctttacctctctatagtttttaaaataagtttacacaaattgtgcatggatcttgagaattagcagaatctggtgggcaaaatgcatacattggtcctccagcacataatccgtatccgccattaatatctttttgagcttctttgtttaaaacagttcctagcttgttgatgttgtttaacataattttgaatttagatttctttaaagtaactgtaaaataatggtgaatgaaaataattgtgataactgctagcaataaattcataaccgtaattaatactagaaattctaatttttaaattgtttttgaggtattaaaagtattttttagaagtgtattatttgatcttaaaatttataatcttttaatattcacaaaatgtaagttttcactacttttgcgaccttaatacttatggaaacaaaagattggtttacttcttggtttgacacaccatactatcatgtgttgtataagcacagaaacgatgcagatgctcagttgtttatgaaaaatattacaaggtttttgaatcttgatacaacagcacatattgcagatgtaccttgcggaaaaggaagacattctatttatttaaattctttagggtatacagttactggtggagatttaagtaaaaatagtattgcacatgctaaaaaatttgaaaatgataagttgcattttgaagtttgggacatgcgtaagtctattgaaaataagtatgacgctgtttttaatttatttacaagctttggatattttgaagatgatgctgaagacctttcagtgttaaagggaatgaaaagcggtttaaaagaggatgcttttttagtggttgactttttaaatgtgataaaaacacagcaaaatttagttaaagaggaagttaaagaaattgaaggaattgaatttcacattaaaagagaaataaaagatggtt

SEQ ID NO: 2254 - DNA, 24128 bp, synthetic construct
  source 1..24128: mol_type = other DNA
  misc_feature 1..24128: note = Synthetic
attgttgcagtaggtattcctggctacacacgctatcgcacggaggtagtaggtagtgcggaaggtggttacaaggtgacattaagtaaggtgaacgcccttactgacgacctattaaaggactacggcagtatgacggggttctatttccacaccatgcaccacgagtttatgcatattctgaaccaaaagaaaccttacgatgagtcgtttgatgacatctcacgtgccgattatgtcagtggtaactggacgtcagtacccgagaagcaagcctactcacagggtttcgtctcaccttattcaatggagaatccagcagaggatattgccgagctgtactctatctacgttacaagtacacctcaggaatggaataaaatcttgcagattgcaggtccaaagggtacgagtatcatcaatagaaagctgaagatggtgcgtgaatatatgcgtaattcatgggatgcagacattgatttgctccgtaacgctatccttcgtcgtggttcgaagatagcaacgctcaacttggaaagcctggaataagaaaggaagaaagcctcccttcacctcaaggagacgccctcttcacttcaagggaacgccctcttcaaatagaggaacgtgctctctcttatacagaaatcctcatcacaaaaaacaaataattgtgttctaactcatttccgttaggctcttcgcctcttgggcaggctattggaagttgaaaatagccatgagcttgttattaggaaagagtttagaccgtagaaataaaacgaaagaagaaaatgaaaaaactatgttttctattcttaaccatcgtgttgggactgtctatgcagtcgtgtttacatgatgataagacactcttcgaccagccagcagccgagcgtatcgacaagagtgtatcggattatacccagctattggagtcttccgaaggtggttggatgttgcattattatgctggaaaggactatagttatggtggttatacgctcttgttgaagttcaagaatgggcatgtaacggctatgggcgacgtgcaagatcccgaggaacaggctacttctggatacgaggtagtcaaggatcaaggtccgatgttatccttcaatgagtataacaaggtgattcatccacttgcagaaccatggttgggcaaccccgatggagtgcaaggtgactatgaatttagcattcttcgtgctacgaacgatagtatttacttgcgtggaaggaagtggaaaaacgagatggtactcactcgcttgcctaaagacgctagttgggaagagatgatgatgggcattatcaccgttaaagatggtatgaatgtcaatacctacaattgcttccttggcaccgactcactcggtcagtgcaacatcgatggatcgactcgtcgctttacaatgactataggtgataagacattggatatgccttattgcaccacaccaacaggtatttcgctacgcgaaccattgttcttcaatggtaagaaatatcaaaacttcacatggaacgaagagtcgcgtacgctcacagagggcgatttgcgcattgtgcaatacctgccgaagaatcataaggacatagacttctggattggtacttggcgtctgaagacaagcataagacgtaagataacactcacactaagcatgggaacggtggcaaacacgctaaaaggtaagttgcagataggtaatgttgaatatgagatactcatgacttatgaccctgcaacaggcaaactcgaattgcctggacagcctgttactgaccctacatatacctatcccgcaggtatcgttctagtacctggatcaaaggaggaaggtaaactctttggtgaaggtaagggtagtttactcttcacgtgggatgaagatatggagcgcgcaacggctgatgatagtggacaaatcactgggcataaggtcgactcgttctttggtgttgcctacggagaggacttgtcgcctattatgaagcctgatggcagttacacttatgcgtttactctgccaggaatagagtacatgacgaaaataaattgatactgattatgaacaaatatatctatatcttcatagctgccgcatcggtattcttgggtgcagcatgcagtagtgacaatgatttaccagtgtatgctgcagggctgaaggtggtgaaagcagagacagactttggtgttctcggtgagacacatgaggttgtaatgagtaaagaacccgctcgtgcctatgcacttgatgcttggcttacagtgacgaaaacggcagagaagctatcactgacggctcaaccgaatacgagcgcacaatcgcgtaacacgctattggtggttaagaatgagcaaggagactctatcacactgaatatccaacaggagggtgtgaccttcgggttgcctactggcgaggatatctatgctggagatgaggctgttgaacgctctttgattgctacttctaacgtccccgttgagtatagtgggacggctgattggattaaggtaggcaatacgaatgggaaaataaacgtcaaggtcgaagctaatacgacggggcgtccacgtgtagggtgggttacagccaaggcaatagggcttgttgactcattgaaagtggtacaggcttcgctcaacgatgtggttggcgattatgtgcaaacggctaagatgcgccttccaagtcgtgacttagcagagaagacatcgtctgttcgcattgaggcaacgggtacgaacaaggcaaacttcatcgttgacaatcaatacaagtgggaggttagcttcacaccaggcaaaggctttgagatgatgaatggtaagattgttggcaagaaagaggttgttccaggcgtatatgagtaccttatcagtgtaatcgttgctgatgacttcagtaaggaacatgagactgccatcaacggaacgaaggaaagcatcctactcacgttcgataacaatggtaatctagtgttccgtgaggcacagaagttagcttccgaacaaaccttctcatcctatggttggaaccgattcaccgacacgaagcccgttatgggtgctttccgtggaatcggagaggtgtatgttaatccgaagttaacacgtagataaatgcaactttaaattcaatcatgatatagaaaagggtgttttcaccctgactccgcccttgcatgcgaatgtaggggcggagttttttgtgtaagaaagagcctcacccccgccccctctccgaatggagaggggagtagatagtcttatttacaaacaagaagggcgtttcttcgatatgaagaaagcctctcttcgatgcaacagaacgccctcttcatatcgaagaaacgccccttttgaattaaagaaactattttctaactggcacccgttaggcactcctccccttaggggaggttgggtggggttgttccattcggagagggggcgggggagaggctgtagatggaattgggcagaggctgttgttgatttttgatgaggcttcctttcctatttaacaacaaatctgctcatttctttggaggacttctccaaaagtattacatttgtgttgacaaacctaaatgggggtgattacaggagattagacgcattgattatgatcctaatagccctcctttaaaacctaaaagtcagttattacctatgcaaactaaaatcctatgctgcgtgacaggcaccctcgcattgggcgccatcctacctgctcaggcacagaagaagcccatgaatatcgtttatatcatgagtgacgaccattcctatcaaacgattagtgcctacgataagcgtttcattgatacaccaaacatcgattggattgccaatcatggtgtgaaattccaagagagtttcgttgctaactcccttagcggaccctcccgagcatgtatgttaacgggtaagcacagtcatgcaaatggtttcacagataacaccaagacgtttgatggaggacagcaaacctttcctaagctcttacagagtgcagggtatcagaccgcaatgatcggtaagtggcacctcacatcactgcctactggcttcaactattgggacattctcattggacaaggcgactattacaaccccgacttcttatgtaatggcaagccactaaagcgtcagggatatgtgacgaacatcattgctgacctcgcaatagactggatggagaataaaagagacccttccaagcctttctgcttactaatgcacaacaaggctcctcatcgtgtttggaaccctgatacatgcgacttagacctcttcaatgatgtgcagtatccattgcccgagacgttctatgataactatgaagggcgtctggcagcacagaaacagaagatgagtattatcaaagatatggacattgtctatgataataagatggcggatcacgagcaggagatacactctgacaaggagttggaagcgtggggacgtcgtaactatgagcgtatgacaccctcacaaaaggctcaatgggatcgccattatgaccctattatacagaagtttaaggctgataagctatcggggaaggcgttagctgaatggaagtaccagcgttacatgcatgattatatgcgtgtgattcggtcggtagatcgcaatgttggacgtgtaattgagtatctccgtgagaagaatctattggataatacgatgatagtctacacctccgaccaaggtttctacatgggtgaacacggttggtttgataagagattcatgtatgaagagtcgttccgtacaccactgctgatctattgtccgggtgggaaacaaggcgttgttaatgagatggtacagaacattgactatgcaccaacattcttagaagcagctggtgtaaaggttccttcggatattcaagggtgttcgctcttgcctttgttacagggtaagaagcctgcagactggcgtaaatcgctgtattaccattactatgaataccccgcagagcactctgtctgccgtcattatggtattcggacgaagcgttacacactgattcatttctataacgatatagactcttgggagctttatgacctcaagaaggacccttcacaactgcataacatctatggacaaaagggtacggagaaactcacagaacgattgaagaaggagctaaaagagcttcaagtacaatacaatgaccctattaggaaccaatactaagtggcaactttgtacttatcacggactattaatgaattgtgaagacgccttgactcaatagagtcggggcgtcgcttttgataaaggacttatttcttgcatccaagataatcattagttttatgttgacgagataagggttaaataggaaggaaaatcctcaattaggctagataaagccattttgcaaagcattctcttgctagttagtaagaaaataagtaatttcgccgacgtatttatacgatataataaggtggtggagatggtgtctcgactgcttagataaatctattatgaaacgacttactttattattaatgatgttcctgatggttctgatggcatttgctgacggacgcatcaaggtggcgtgtgtgggtaatagtgttacatgggggtatggtttgaccaatagggacgctgattgttaccccgtgcagttgcagagaatgttaggagataagtacgatgtgcgtaatttcgggcactctggaagtacacttctaagccatggtcaccgtccatatatcgaccagaaggaatacaaagaagcgttagctttcaaagccgatagggttattatccatttaggactcaatgacacggaccctcgtaattggtctgaatatgctgaagagttcaattctaactatatagaactcgtcaactccttccgcaaagtgaaccctaaagcacagatatgggtgtgcttgatgtcgtcaatcttcgaacgccaccctcgcttcgagagcggaactagggactggcatagcctcattcaacagcatatcaagcaagtggcaatggctgagaacctcccattaatagacctctatacgcctcttcacaatcgtccagacctctttgcggatgcgctacaccccaatgctgaaggtgcagagatcatcgctgagactgtatataaggctatgacaggtaattatggagggttatctcttgcgccactatatagcgatgggatggtaatgcagcgtaacgaaccgattatctttcgtggttctgccaatgcaaagatggttgttaaggtaagtttcgatggtcagaatcaatccacaacagctgcagacgatggtacatggagcattaatttccctgctcgaaaggctggcggtccttacaaagcaatagttgcagcaggtaaagagcggctgacgttgaaagatatatacgttggagaggtgtggttgtgttcgggacaatcgaatatggagttgcctatctccgccgtacaaagtggtaagcaagaccttgcggaggctggttcacaacccttaatacatctctttaatatgtcaacacgctatccaacgaatgctgtgagctggtcggaagcggtgtgcgactcggttaatcgccaccaactcatgcgagttggaccatggcgtaactgttcggtcgaatcgttatcgggcttctcagcagtcgcatatcacttcgctaagggtttagcagacagtctgcaggtacctataggtgtgatttgtaatgccgtaggaggcactaccacagagtcatggattgaccgttcgacccttgaaaaggacttctctgcaatcttgcgggactggtatcatggcgatttcggtatgaagtgggcaagagaacgtgctttgcagaatattgccaatagcaagaatccattgcaacagcacccttatgcgcctgcttatatgttcgagacagctatgacacctttgttgggttatacgttgaaaggtattgtgtggtatcaaggagagtcgaatgcgcataacatcgagctgcatgaacgcctcttcccattgttggagaaaagttggcgaaacttctttcaacagaagaagatgcccttttatttcgtacaactatctagtctgaaccgtcgttcctggccgcgtttccgtgattcacaacggcgtatggcgttagggttggagcatacttggatgacggtgacaagcgatttgggcgattcacttgatgtgcattacaccaataagaaacctgtaggtgagcggctcgccatgcaagttttgcaccatagttatggacatgatattgtgtcagagggacctgttatagagcgagttgaatccgttgatggaggcttattgttgactttctcaaatacaaaggaacttcatttcatgggcaaccgattgataggctttgagcttgcgggtgccgatggtatttatcatgaagcccaagcaacgatagagaatggttatcaggtgcgtgtgtcgtgtgggtcagtagtagcccatcctgttagtgttcgctatggttggcagccgtttactcgtgcgaatcttgtgaatgaaaagggactaccttgtagtacatttgagatcgcagaacgtagattttagatagagaggacgccccgtatctttttcccttgccgactaggaaggggagtagaaaggcttatttctatctgaagtaatagtttaacaagtttttattagataattgttttcagtatagttagttgtgttttcttatagaggaaactatgttttgaatcttaaagtattaatcccttgaattaaaggaaacgcccttctccaatagagaagggcgtttcgttaataggaagagaggctctcttgccatcgaagagatgccctcgttgattccaataaaactatcgtctttagacaacaatacgtattcctgccccgtggatggggcaggatagaatactaaaagacttcaggaagacttgaatcttcactctcctgtatagaacttaatcagttgagtgatagcctgggtgcatgctggacagaactcaggatgggcatttgtgcgcatacggcagtctgggtaagcgcggtaaacaccatgttgagcatagccagcaggctcgtatgcacccactttccacttgtccctgcgtgcgttcggcttatctaagtcggttggttcaggcgtcggtaatggggtcttcttatcaatcattccttcccacttattgtggaagtcgaccagagttgttaggttcggttcccatggctcgacgtcctttggatacatattaatctcttctttggcataagcatactcatcaccaagtcctgcgaaagagtgtccaaactcgtggacaaccactggtttgaatagaggatggtgtgccattgagaggttgtaagagttcagaataccgccaccaccatatttctcagtgtttactagtacgatgatatgttcgtaaggcgtaccagctagccagtcatggaggtctttgagatggagtgtagtgaggtatctgtcactgtagaaagtgtcgaaatgagagtgaagagccgtgttcttccatataccctttgatggttcggatgtgccactatcaacggatggagccttgacagccacaatattgaatcgagaacgcagcgatttgaaaggttcgtgagcgaagagagcctccatcgcaatgcgacaatcctttataaatgtaggcatttcagcctctgtgtaaccctccgcaatatatgcaatgtgtatgcagtgcgatggatcagcagcctgttgcaaagtctcgtaaggtgtgatattacgctccccgatgtgtcggatgagaatatcctgtggtacaacgatatgcgtcatgcggttagtaacctcgcgccgattgttccttagttcgatagttacatctgctgtatctttgggataaggtactagaaagacgttctcaaacgatttcttgctattaccctgtgcctcatcataagtgagccactcctggaatagagtcgaaaaggagtttcgatagattactttctgcgtacgatggtcacgcacaatgacctgtccattgccctcaacgggcacttctgctagtcgttcgtgcttgccataccaatgtgggatacgtgatagttcgtccacagcgatggtctgctctttggcattccctgcgaagatgtaatctaaacggagcgttgcatcctcaaagtaatggttgaaatcctgcgcaacagcactcatggagagtgcgaggagtagggtagtaatgatttttctcataggtcttgaaaattggttagaactattatttctcattcttcagatagatagaatcattgacaaagtagcgtttgcctctctcaaatacgcatctcttatcatctgcaaagatatgaataattaatgaaattagctatcaggaaagagattattaattccttatttcttattcatagctcattgttaaagcctttcacaggctctttgaagggaatgaagtcttattgttaggttctttataaggcgtttttctctatttaaaagttcctcattatgatatgtgtcgagtgttaagagttgtgtagttgggggtattttagtggtttttacttactttttatagtgtcagaagatggtgataatgtggataggacacgagtatttccgaataaggaaaaggttatgaaagtgcgaagagtttaattttagcggtcattcccgtcatagcttatacgtatataggtattactgattgttcctaatgatacattaggatagtggctagatggattatatttaaacaataaaaaatgccccgtatagaaggacgaggcaacctaatgttctcacaacggaataatccttattgtgaatactttaaaattagttcgttacaaaggtatgtattaaaaaaataataagcaaattttcttaatgaaattttgactttgttgttgtttttttgtacctttacacaaattatcatataatcaattcaacatgaagaaaatactaggattagacttaggaactacaagtattggttgggccttagtgaatgaaagtgaaaacaaagacgaacaatcttctatcgtaagacttggtgtgagagtaatcccattgactgtagatgaaaaagggaactttgaaaaggggaaagctatcacaacaaatgctgatagacagcaggtgcatgctgcaagaataaaccttcaaagatataagctacgcagagagaatcttcgtgattgtttacagaaacaaggttggataggttctgaaccgatgtgtgaagatggtaaatcttctacttttgaaacttataagctacgtgcaaaagcagcggtagaggaagtgtcactgcatgagtttgctcgagttttatttatgttgaataagaaacgtggctataaaagtaatcgaaaagcaaatgataaagaagatggaaagctttttgatggtatgaccatagccaagaaactctatgaagaacgcttgacacctgccgaatactctcttcggttgctctataaaggtaagaagtttacgccagaatattatcgttctgatcttatagaagagttcgagaagatatggaacgagcagcagaagtattatccagagatacttactgacgagtttaaacagcagttagaaggtaaggcaaagagcaatacaagcaagctattccttggtaaatatggtatttactcagctgatacaaaaggtctagataggaggctgcaacctttgaaatggagggttgaagcgatgaagcaacaggttgataaagatgttttagcctttgttatcagtgacttgaaaggacagattgctaatacaagtgggctacttggtgctattagtgatagaagtaaagaactctatttcagcaagcagacaattggtcaatacctatggacttctctgcaagaaaatccacatatcagtattaagaatcaacctttctatcgtcaagattacttagatgaatttgagaagatttgggaaacgcaagcaactttccataaggaattgacatcagaactgaagcaagaaatcagggatattatcatcttttatcaacggccattgaagagtaagaagaatctcattgctgtttgcgaacttgaacagcgtaaggtgaaagtgacagttgatggaaaagaaaaagagataacaataggaccaaaggttgctcccaagtcttcccctatgttccaagagtttagaatttggcaaaatctaaataacattctacttctagaccatgggactaatagcaagcgtccattgtatgaggaagagagaaaccttttatatgaggaactaagcgttaaggagaaactcagtaagactgaggctctgaaggtattgggcaagaagagtaagcaatgggatttgaattataaagagttagaaggtaatagaacacaagctgttctctatgattgttataaccgaattatcgtgatgtcagggcatgaagagtgtaatttcaaaaaactaaaagcctctgatattcgccattatgttaagatgatattcaagaacttagccttcaatacagacatactatgctttgattcatcgttgaaggggcatgagttggaaagacaaccaatgtatcggctttggcatctgttgtattcttatgaaggtgataactctcgaacaggtaatgacgcgttattaagaaagttggaaatagcatttggttttccaaaagaatatgctgctgtgcttgccgatgtcgtttttgaagatagctacggaaacctcagtgtgaaagcaatgcgtaatatttttccacatttacaggctgggaaagattatagtcaagcatgtgaggaggctggatataaacattcgcgtcggtcgcttacaaaggaagaattaaatcaaaaggtgtataaagagaagttagaactattgccaaagaatagtttacataaccctgttgttgagaagatcctcaatcagatggttaatgtcatcaatgcagttattgaagaatatgggaagcccgatgaaataaggatagaattagctcgtgatctgaagattggagctgcagagcgagagaatatgacacgaagtattaatcaaggtaatgcagagaataaacgtattcgtgaaatactagagaaggaatttgcactttcgtatatcagtaggaatgacatcataaaatataagttatatgaagagcttaaaccgaacggctttaagacactctattcagatacctacattcctaaagataagctcttctcaaaagattttgatattgagcatattattccgaaagctcggttgtttgatgattcactgtcgaacaaaacacttgaagcacgtgatgtaaatatagctaaaagtaataagacggcctttgattttatacttgaaaggtatggagaacagggtgttaaggcttataagacgaaacttcttcgccttctagaggatggggctattagtaataagaagtataataatttgctgaaaacggaagcggatataccttctggctttattgatcgtgacctgcgaaatactcagtatattgcaaaaaaggcgtatgaaatattaagtgagttggttaagatcgttactccaacaacgggatctgtgaccaatcgattgcgcgaagattggcagttggtggatgttatgaaagaacttaactttgagaagtatctgaagttaggtttagctgatgtgatagaagatagagatggtcggaaagttaagcgtataaaagactggacgaaacgcaatgatcatcgccatcatgcgatggatgcattgacaatagcttttacgaagccatcttatattcagtatctgaacaacctcaatgcacgcagtgataagagtggtagtatctatggtatagaggtaaaggaactgcatcgtgaagaaggtaagcttcgctttaatgctcctttgcctatcaatgaattccgtgcagaagctaaaaggcatctaaaatcgatcttggtatctattaaggcgaagaaaaaagtgatgacacagaacgtcaataaaattaagacgaagcatggaatcataaaaaaggaacagcttacaccacgtggagaattgcataacgctacatactatgggacaaagaaacgtccattagtaaggatggtgaaagtcggagcagcattagacgaagcaacaataaatagggtatgtagccctgctattcgtgcagcattactgaaacgtctcaatgcttataatggtgatgctaagaaagcttttacagggagaaattcaatagataaaaacccgatttacctagatattgagcagacgaagttagttccggtcttggttaaaataatagagtggggaatgtatcatcctattcgtaaacggattacacctgaccttaaaatcgacaaagtgatcgataaaggtataagggaaaaactgaaagctcggttggcagagtttaatggagatgcccaaaaagctttcagcaacttggatgagaatcctatttatatggatgaagcaaaacaaataactttgaaacgagttagtattgagggcgtcttaagtgtaattccgttacatacattaaaggataaggctggtaagccaattattggaagtgatggaagaccagtattcggtgattatgttcaaacaagtaataaccaccatattgccttttataaagatgacaaaggtaatttgcaagataatccagtatcattctttgaagctgccgaacgtaaatcacaaggagttcctgttatcgataagaggtataattgcgataaaggatggcactttgtatttacaatgaagcaaaatgaatactttgtcttcccaaatgaagctacagattttattccttctgaagtagatttattggatgaagctaattatgatattattagtccgaatctatacagagttcagaagttatcgaaggcttcaggtagagattattggtttaggcatcacttagagactatgttgaatgatgatttaaggttgaagaactctacgttcaagcggataaagtccttaaaaggtttagaagatattgtcaaagtacgtatcaattctattggtaagatagtcgcagtaggtgaatacgattaattagatggcttatgataaagaagacattatgtttcagcaatcctgcttatttgagtttaaagaattcacaattggtaattcgtttgccagaagtggaaagttgtgataacctatctgatagtttcaagcaacaaagtgagcgtacaattccaatagaagatattggagttgtactgcttgataataaacgaattacgattacatcgtctgcattagaagccttgatagagaacaattctgctgtaatcacttgtgatagtaagaatatgcccattggacttttgttacctttatgtggtaacacaacacagaatgaacgctttcgtatgcaggtagacgcatcgttaccactaaagaaacagttatggcaacaaactataaaacaaaaaataagtaatcaagcaaagattttaagtatatatactaatgctgatgtgggatgtatgtatgcctgggcagataaagttagaagtggtgatcccgataaccttgaggctcgagcagctgcttactattggaaaaatatcttcactgatatttcagattttgtaagaggtcgggatggggaaccacctaacaacttattaaattatggatatgcaatattacgtgctgttgtggctcgttctttagtagcaagtggattactcccaacattgggaattcatcatcacaatcgatataatgcttattgtttggcagatgacgtaatggaaccttatcgtccttatgttgatgggttggtgttggatataatgtgtttgactaatgattatagtgaattgacaaaagaaataaagattcggcttctatctatccccgttcttgatactactattggagggaaaaagagtccgttaatgatagctacacaacagacgacagcctctctttataagtgttttagtggggaacaaagaagaatggtttatcctgaattataaagtcaattggtggaattttatagatttagtcaatataggagtatgtggttaatggtattttttgacttacccacagatacaaagaaggagagaaaggctgctgcactttttcgtcagaacttgctaaaagacggatttacaatgtttcaattctctatttacatacgccattgtggtagtaaggaaaacatggaggttcacattaaaagagtctcaaccattattccagagtatggaaaggtggggattatgggtgtaactgataagcagtttgaagggattaagctcttttatggtaagaaaccacataagcccaatgtaccaggagtacagctagagcttttctaaaaagattaaagttccacttttaaaagtgaaactttaatctttcttgcatttttctttttcgtaagtagagagtatattgcttataatcaatgttttattctacttgtgttgtatttgataatgcaaagatactaattttaaagctaatcacaacgaggcactgattgcccattatagcgatggtgttgtatttgataatgcaaagatactaattttaaagctaatcacaactgctcttggacggtcttttaatgcgttctgttgtatttgataatgcaaagatactaattttaaagctaatcacaacaacaaggagcaacaggagcaagcacaatcagttgtatttgataatgcaaagatactaattttaaagctaatcacaactatttatgcccctttcaacaccgctcttgggttgtatttgataatgcaaagatactaattttaaagctaatcacaacagatattcagaaacttcttgcagacatcgcgttgtatttgataatgcaaagatactaattttaaagctaatcacaacgggacgagggctacaagatgagcaaagacgttgtatttgataatgcaaagatactaattttaaagctaatcacaacaggtctctttgtgttacataaaaggcttctgttgtatttgataatgcaaagatactaattttaaagctaatcacaacacgatagagtgtgggttaaatctattgcaggttgtatttgataatgcaaagatactaattttaaagctaatcacaaccaccagcttggaaaccatcattaattatcgttgtatttgataatgcaaagatactaattttaaagctaatcacaaccaaacctgtataaggggttgctcccatctggttgtatttgataatgcaaagatactaattttaaagctaatcacaaccctattattggaaggcttttcgaagctgttgttgtatttgataatgcaaagatactaattttaaagctaatcacaactcaactttaagcgcaggcaaatcatcgtaagttgtatttgataatgcaaagatactaattttaaagctaatcacaacctataagtcattgcaaagttactttgattgttgtatttgataatgcaaagatactaattttaaagctaatcacaacaaactgctagcaatctttttcaaaccggtgttgtatttgataatgcaaagatactaattttaaagctaatcacaacaaaagttgtttggtgtattcgtagatgtaggttgtatttgataatgcaaagatactaattttaaagctaatcacaacctacaaaagcattagaaaattgttctcatgttgtatttgataatgcaaagatactaattttaaagctaatcacaacagcttcaccatgatatcattacccccaacggttgtatttgataatgcaaagatactaattttaaagctaatcacaacctctccgtactgatcccgtccggagaataggttgtatttgataatgcaaagatactaattttaaagctaatcacaacctatgagatggtttccgtagttctttgccgatttatttataccctctctgcttattttaacgaatatatacacgttttgtaactgataattgatgtggtaattcatttttattgtaactttgtcttgtgtttaggacattggagaagttgagtgcttattggagtaagactaaataaggagactccccctaagttcagcaaattataagagccaatatgcctttattgcttttagataacagacaagacaatgagcaagcaagtatttcagacagactcccgtcagcgttggagttattttaagtggaccctacgtgtagtccttacgattctctcactctttggaatcgttttcttagcaatgtttgccttggagggtagcccgcagatgcctttccatcacgactatcgaaatgcggtgtcagcctcatctccttataccaaggacaacaagacggcaacactctataagtcgtttcgtgacttcttcaaggagaagaagatgcataataactatgcgaaagctaccatcaagaagcaacgttttgtggggaaggcggacagtctgacgcagaaatactttcgggagtgggacgacccacggattggtgtgcgctcggcatggtatgttaactgggataagcacgcttacatctctctgaagaacaatatacaacacctgaacatggtgttgcctgagtggttctttatcaatcctaagaccgacaaggtggaatataggcttgacaagcaggcgctacgcttgatgcgtaaggctggtatccctatccttccaatgctcacgaataactacaactccaacttccatccagaaggtatcggacgtatcatgcgtgatggaaagaagcgtacagcactcatcaatgagatggtcaagaaatgtaaacattatggtttcgcaggtatcaaccttgacttagaggaactcgacatacaagacaacgacctcctcgttgagttagtcaaagacttcgcacgtgttttccatgcaaatggactctatgtaacacaggctgttgcacctttcaacgaggattataacatgcaggaactggcaaagtataatgactatctcttcctcatggcgtacgatgaacataatatggggagccagccaggagctgtcagttcgcaacgttgggtggagaaagctaccgactgggcggcaaagaacgtcccgaatgacaagatagtactcggtatggcaacttacggatatgactggcctaatggggagactgcttcgacggtgtcattcgaccagacaatggctaccgcactggatgcaggagcaaaggtaaagttcgatgatgacacctacaacgttaacttctcgtatcaaaacactgatgatggaaagattcatcaggtgttctttactgatgcagcgaccacctttaatatcatgcgctttggtgcagaatatcatctcgcaggctatggtctgtggcgtttgggcactgaagacaaacgtatatggcgcttctatggtaaggatatgtcgtgggagaatgtggcaaggatgtctgttaagaagctgatgcagcttaacggcaccgatgatgttaatttcgttggatctggagaagtgctggaagtaacaacggagccgcaccctggaaatatatcagtgacaatagataaggataaccgccttatctctgaggagtattatcacgcccttccgtcaacatataccatccaacgacttggtaaatgtaaggataaacaactcgttatcaccttcgatgacggaccagacagccgctggacacctaccgtgttgagtacgctgaagaaatataatgtccctgctgcgttcttcatggtgggactgcagatggagaagaacctgcctttggtgaagcaagtatatgacgccgggcacactatcggcaaccataccttcacccaccataacatgatagagaactccgacaaccgctcttatgctgagttgaagttgacacgaatgttgatagagagcgtcacaggacatagtacaatcctgttccgtgctccatacaatgccgatgccgacccgacagaccatgaggagatatggccaatgatagtggcaagtcgacgcaactacctctttgtgggtgagtctatcgaccctaatgactggcaacagaacgtaacggctgaccagatttaccaacgtgtcattgatggtgtgcaccatgaagacggacatatcatcttgctccatgatgcgggtggtgacacacgtaaacctacgattgaagccctccctcgtatcattgagaccctacaacatgaaggttatcagttcatctctattgaacaatacttagggatgaataagcaaaccctgatgcctgctatcaataagggaaaggcttactatgccatgcaaaccaacctttggctggcagagatgatttatcatgtatccgacttcctcacggctctcttccttgtcttccttgtcttgggtatgatgcgcctcgtattcatgtacgtgttgacgttcagagagaaacgagcagagaaccgacgcaactatgcaccgattgatgctgctacggcaccagctgtttctatcatcgtaccgggttataatgaagaggtgaatatcgtgcgcaccatcactacactcaagcaacaagactatcctaacctacatatctacttcgtcgatgatggtagtaaagaccataccctcgagcgtgtgcgtgaggctttcgataccgatgataaggttactgtacttgctaagaagaatggtggtaaggcttcggcactgaactatggtatcgctgcttgtcgctcagagtatgtggtttgtattgatgccgacactcagctgaagcaggatgccgtaagtagactgatgaagcacttcattgccgacaaggataaacgcattggtgcagtggcaggaaacgtgaaggtgggtaaccaaaggaatatgctcacctactggcaagctattgaatacaccagcagtcagaactttgatcgcatggcttactctaacatcaatgccattaccgttgtgcctggtgctatcggcgcattccgtaaagaggtgattgaagaggtgggaggatttaccactgacaccttagcagaagactgcgacctgacgatgagtatcaacgaacatggttacatcattgagaacgagaactatgctgtggcaatgacagaagccccagagacgctccgccagtttgtgaagcaacgtatccgttggtgctttggagtgatgcaagccttttggaaacatcgctcctcactcttctctccatcgaagaagggcttcggactatgggctatgcctaatatgcttatcttccagtatatcatcccaaccttctcaccattggcagatgtactgatgctcattggtctcttcactggcaatgccttgcagatattcttctattatctcatcttccttgtcattgatgcaagtgtgtctatcatggcttacatctttgaaggcgagcggttatgggtactcctatgggttatcccgcaacgtttcttctatcgttggattatgtattacgtcctcttcaagagttatcttaaagcaatcaagggcgagttgcagacatggggtgtcctcaaacgcactggtcacgttggtgaataacccgcctttcaagaagtaaagaagagataccgttagactccccaaagtgcatctatcccttcagttaatataacaaataagagtctaggcatattagggaaatccacttaggtatatatgtgatagttcattcccgtgcgggagcgtcaacgtacccgtatgggaacatcaacgttccagcacgggaacattcatgttccaaagccggaacattaacattccacaggcggaacattcatgttccataggagggaacgttgtttatgctatatgcaggcatgagatggaacgggtgttagcgtgccattgataagacgttgcacgctgtaagctgtgtatgttgtcgtgattggatgacatataataagtttcatggtgcgaccatgagattatttgagaatacggatgctattttgtacctttgttgcgaatcttgtttaagtccctattgtgtgggactgatgataaggaatatgtgttgctaatcgttagaattaatatgaagcgtacctttatagcccatctggttaagccaatagaagcgtgttcccttttctttgtgtttatgctgttggtgggtgctattatgaatgtgagccatcggaacatctttggttacatagagttgatagctgatgtgtattttgtttgccttttattgagcctttgtccacgtatattacgccaagggttggaggttatattgagtagtctcatttatgtgattgcgataatagatgcctgttgtaaaagccttttcaatacgccgcttacaccgacgatgctccttttagcgcaggagacaactggtagggaagcctccgagttcttctctcaatatcttcaaccagaacttctgttttcgctggcgacagtcatcttccttcttgcccttagccatgctgttatggcgataaggaggatgagcttcccaactgcttatcttaagcaaccccttatcgcctctgctttattgctcacacttgttgtcgggacttgtttaagcgtctatgataaggtacaactatacactgttaggaatctgtcggggcttgaaatagctgtaaataatggttttgcccatctttatcatcctgttgaacgtgttatttacggactttatttcaatcacttgatagcgaatcaagtggaaggcgtcatcgtggctaatgaaagactggcggttgattcatgtaactttacgtctcctactattgttctcattataggcgaaagtgcgaaccgacaccattcgcagttatatggttatcgtttgcccacaacgccccgtcagcttgctctcatggaaggtaatgactctttggcagtattcaccgatgtcgtttcgccatggaatctaaccagtagggtattcaagcagatcttctcattgcaatcagtgggtgagaaagaggattggagtaactgtcctctctttcctgtagccttcaagaaagcaggctatcatgttagcttcctgtccaaccaattcccttatggaatcaactatacgcctgattggacgaataacctcgtcggtggcttcttcttaaatcatccacaactcaacaagcagatgtttgattacaggaatactagtatccacgactatgacgatgagctattaaacgattacgatgagcgtatcaataaagggaagccacaattaatcatctttcatctactaggacagcacttccagtactcagcacgttgtaaaagcggtatgaagaggtttagtataaaggattacacacgttcggacctgtcagatcatgcgaaacagacgattgcagactatgataatgcgacgctttataacgactttgttttgagtaagatagtcgaacgattccgcaataaggaggctgttgttgtctatctatccgaccatggagaggattgttatggcaaggatgtggatatggctggtaggctcactgaggtagagaacattgatgttaagaagtatcatgaggagtttgaaatacccttctggatatggtgctcgcctgcatataggcagaggcatcacaagatattcatagagattatgaaggcaaggcataataagttcatgactgacgacctaccacatctattgttgtatttggctggaataagtactaaagagtacaaggcagaacggaatgtcctctctccacgtttcaacaataggcgtcctcgcctcgtactgaatagtattgattacgataaagcgttacaccaatagccttcatcggtgctagtcaaagtgcgacggaatgatagttctcgtgaaagctcattgctcgcattggcgtaactcctaattgcatacacttgatttataacttaacaatcggttgctgtgccttcatcttacgcaaacgggaggtgagatggcggtagagacgagcaacgagttgaggatgtgaaagggctaagtcatgcttttcggagaggtcggttgagaggtcataaagctctttattccctgtaagatacgaatagattagtttccactttccctcacgaatagcgcagttgaggctgatgcccagtccttcaccatcccatatattagggtagttccacaccagttgacgtttctcaaagccctgttgcctaccacgaagtatcggtgtaatatctttcccatcaatagtctgtggcacacgatagtgcttgattcccgccatagagagcagggtagggtaaaggtcctcgatgattatcggcgtatgcgaacgtgagttgggctttacaacgtggttccatttcacaatgaaaggcactcttatccctccttcatatagtgaccctttaccgctcttgagtggtgcattctgtgtgtaaagctccccgtctctccaataggacgatgaggcgagtcccccgttatcactcataaagatgataatcgtctctcgcttgagtccagcctgcgccacccagtccatgaggtcgcccaaacttttatccattccagcaatcaacgaggcgtaggcagcctccttctctgatagtccacgtgcacgataggtgggatagaaacgcatatctcggtcgatgggaacgtgtacggcataatgagacatatatagatagaacggctggtcatactttttcgccttctccaaagccactatcgcctcccgtgtaagggcttcagtcgcaaagatgccagtcccccaataacgttccaagccaggtattgcgaagggagatgtgggctttccatccttagtaaagccatagttacgctcacttagataggttgctaagcctccagcagcagtaccagttatgtttgtattgaagccaaagtggcagggattctcacctggagtatcaatcgcaccccagtgtgctttcccacagtgtatggtgtgatagcctgcattctttagtagttgtacaaaggaaatcgcctttgctgtatgccccacattaccactctgtgcaataccattgtaattccaatcaggtagtgtgaccccctctcgcttcccatctgtcatctggtcgcgatgcaaagtc

SEQ ID NO: 2255 - DNA, 24125 bp, synthetic construct
  misc_feature 1..24125: note = Synthetic
  source 1..24125: mol_type = other DNA
tagagcataattttgtgcaacgggtacgtgatgggatttatctcgaattttctgacgattgtaagattaaaaacaacgttagttctcataatatacgatatgggcttcattttatgttttcgaataacgatagttatgaaaataacaccttcgagaaaaatggtgctggtgtagccgttatgttttcgaaaaaaataaaaatgtatcgtaatatttttaaagaaaattggggctctgcatcctatggaatgctactaaaagaaataaacgacgccgagattacagaaaacacctttgaagaaaacaccattggtattaatatcgaaggatctaaccgaatacagtactctaaaaacaattttattaataatggttgggcaataaaagttcgtggcgcttgctatactaatacttttaagctaaataattttttaaacaactcttttgatatctcttataacagtaaactaaatgataatctatttcataacaattattggagtaaatatacaggctatgatttagataaagacggtattggtgatgtaccctatcggcctgtaaaattattttcgtatatcgtaaaccggacccctgaaactattattttattgagaagcttatttattgatattatcgatttttctgaaaaagtatctcctgtatttactcctgacaaactattagatcatcatcctttaatccataaaataaaatggtagttatagaaaatctacataaaacatttcagaaaaacaaggtactaactggagtagatcttacaatagacaaaggtggtatctttgctatacttggtcctaacggatctggcaaaactactcttatcaaaagtatcctgggtatggtaatccctacacaaggtagtatacaaatcatgggaaaaaacataaaaaacaattggctttatagaaaaaaaatcgattacctaccccagattgctaattttcctaataaccttagagtaaaagaactctttaaaatgatcaaggatataagaggtaataccaataccgatcaagaactcatagaactgtttaaactaagcccttttttaaacaaaaaactaggtaatctatcaggtggaactaagcaaaaggtaaatattgtacttacttttatgtttaatagccccattcttattctggatgaacccacaaccggattggatcccatctctttaattcgcttgaaggaattaattcgaaaagaaaaaactaaaggaaaaacaatcctaattacttcgcatatcatgagttttgtcgaagagatttctgacgaaattgtatttctgttagaaggtaaaatatatttcagaggaaatataacgcagttaaaaacccaaaccgagcagcctaatttcgaacatgctattgcatctatcttaaaaaacacttatgcttaaaatattaaaatacagtttttatgatttaatgcgtagccgctggagttatatatactttttattctatctactgctgggtactgtactattatttcttaacaatgatctttctaaagccataattactcttatgaatgtgattatcatcctagtaccacttataggcactatttttggagttatgtattattacaattctaaagagtttacagaactcttattagcacaacctctaaaacgaaactcaatttttctaggacaataccttggtctctctctatctcttaccatgagtttagttcttggtattgggataccatttatattgtatggaatatttaaatccgatagtatatggaatttttctttactactcataacaggagcgttccttacttttatttttacggcactggcttttaatatctctctttctaatgaaaataagatcaaaggatttggatatgctgtattactctggcttttcctcgctatcatttacgatgggatctttttgatgtcgttaatactttttgaagattacccgttagacaagctatccctatttggcacgatgctaaatcctatagacttatccagaactctaatattattaaaactagatatttcagcattattgggctatacaggtgctgtttttaaaaaattctttggtaccagtttcggattaattgtttcgttatttatgttgtttgtttggattcttataccaacacttagaattatagtaaaatccaaaaaaaaagatttttaatctatagtttactctgagtaaaataactacaataaaatcacttttcagtataaaggatcttaattgaaatatacttctaaattgttttatttcaaataaagagtttcaaattattttcaacacttttcttttaaatcacatctgggggaaaaagtatcagtcgatactttttgtttcgaaatttctagtgatgttttttcgcaaaaaacaataaaaacctgtcttttaaatgattaaaacttaaaaaacagactactttttctttggcacaacaattgaaaattgccataacttaataaaaataaggcaattctattttttgatttgctgaaaccaaacctatttagaaactatgaaatacatagggattgtaaaagaacctgattttgaaaaacgaatttgtttcttacccaaagaaatcagtgcagccattaaccaattaaacttaaaagtttttatcgaaaaaggtattggcgaaaatctaggcatttccgatagcaaattcgaaaaagctggtgccattgtacaaaatagaagcgaaattttggagagatctgattttattttatctattaatgagcctcaaaattttaatattggtgaagccgaaaaaacaataataggatatttcaatatgctattctatccacaaagaacggagaaatatctcaacaaaagcatctctgtatttagtcttgatttattaccaagaacaaccttagcacagtctatggatgtgctttcgtctatggcatcattggcaggttataaagctgttttaaaagctacaaattattataatagttctttcccaatgtttacgacagcggcaggaacgctgagtcctgcaaaggtgttagttttaggtgcaggtgttgccggattacaggcaattgccacagccaaaaggctaggtgctatagtagaagcgtttgatgttagaaaatcttcagaagaagaggttaaaagtttaggagcaaaatttattgaagtagaagggtataaagaaggcaaaaatgctggaggatatgccgtcgaacaatcaaaagaatatctcgcaaaacaaaaagaattaattcatcagcatattagtaaagccaatattgttatttctactgcaaatatccctggaaaaaaagcacctgtattgatagatagcaaagcactagaagctatgcaacctgcatctgtaataatagatttagctgctgaacaaggaggcaattgcatcgctactcaaaatggaaaaataataaatcacaactccgttactattataggagattcatttttatcaagagaaataccacaagcagcctcacaattactatcaagtaattacttcaattttttaaaacacctcgttaactctaacaaaaaagaagaccctattttgagtggttgtcaagttatttataacggaaaaatcacacatcctcaactactaactaaatttgaaatagcttaatatggaatttattcaaaacaatctcgaatttatatatttcgtcattttttgtgtttttatcggtatcgaaattatagcaaatgtacctgcaattctacacactccattaatgtctggtgccaatgctattagtggtgttattatggtaggagcagttattatgatacttcaaataccatctgacaattacctgttattagcaacaggtggaattgctgtattcctaggcgcattaaatatctctggaggattttttgttactggtcgaatgttaaaaatgttcaattcaaaaaacaataaaaaatgaatattatcgtagaggttggttatttaatagctaccgtttcttttttaggtggattaaaattcatgagctcgccaaaaaaagcaaaaacaggaaaccttatagcagctaccggaatggtgctagctgttatatgcacatttataacagttaccactaacaccattccaatacctaaccttattatagctttaaccgctatagccataggaggattcttaggtaaacgtatggcctcaaaagttgaaatgacagcaatgcctcaattagtttcattatttaatgccactggtggagcttgtgcaatgttattaggtattattgaagcatttctaacagataccaatactactctaataggaattcaaattttactgttattaggtctaacaacaggtgctatagctgcaactggaagtatagtcgcatatagaaaacttgcgggtaaaaccaaggataatcgcaaagcaatcgttattttatggtctagaatattactggtaacaatcatttctttacctattctattttttctagaaactttacctgtcaattttgagatgttttgtctaataatggctctagtatctcttacctatggtattttatttgtgttgccaattggaggtgcagatatgcctgttgttatttcgttattaaactctattacgggtattgcaactgctctagcagggtttgtatacgataataaagcaatgattgcaggtggaatttttgtaggttcagcaggaattttattgacccttttaatgtgtaaagcaatgaataggtctttgttaaaagtactaactgggaaatttaaaaaaactactaatacaggagatacagaagaacaaaatattaaagatattagtgtttctgaaaccgtaatgcagttatcttttgctagtagcattgctattgtacctggatacggtcttgcggttgctcaaggacaacacttatgtggacagcttcaaaaaatgttagaaaaccgaggtattaaagtagattttattattcatcctgtagcaggaagaatgccaggacacatgaatgtcttgctagccgaagctaatatcgactacgatcatctaaaagaaatgaatgaagtaaatgatactatgtctcattatgatgtagtccttattattggtgccaacgatgtagttaacccagcggcagaaaccaaacctgatagtcctgtttatggtatgcctattatcaaagcttacgcaggcaaacaagttgtcgttatgaaaagaggtatgagtacagggtatgcaggagtatcaaacgatttgtttggaatggataactgtaatcttttatttggtgatgcgaaggactctcttcaagaaatagttaatcaacttaagcttatataaaattatttatttactgacaccagaactaactacaaatcactttacaaattaaaaaaaccttgtcatcaatagataacaaggtttttaacttagtcggggtggcaggattcgaacctgcgacctccgcgtcccaaacgcggcgcgataaccgggctacgctacaccccgaatacagttatctttttgcgagtgcaaatataaaaaatattttcacttatgttgtaataaaattataaaatatttttttaccctaatttcactagtttttttatagccttatatttttattaataaaaatataaggctataaaaaagcaaattattattcggctgttatttttttctaaaaatatagccaaaagttttgttatttcttcacaaagccagctttgcgccgtatctttatagttcaatatttgaatccaacttcttctctaaatcttatctatggaaaatcttgatgcggcaagactccaaatggcatttactttaatatttcatattgtttttgcttgtattggtatggtcatgcctttttttatggtagtatctcactataaatggttaaaaactcgtgaccaaatgtatttaactctaacaaaatcatggcaaaaaggagtagctattttttttgtaactggtgctgtatctggaactgcgttatcttttgagctagggttattatggccagagtttatgaaacatgctggtcctataataggaatgccattttcattagaaggtgctgctttttttgtagaagcaatagctttaggattctatttatatggctggaataaattaccagaaaaatttcattggatcacagggattataattggagtttctggtgtagcatcaggaattttagtggtggctgcaaatggatggatgaactctcccacaggttttgattatatagacggaaaattcttaaacatagatcctgttaaggcaatgctaaatccagcatggtttacacaagctttgcatatgacattagcggcttttacagcaacaggatttgcagtagctggtatccatgcttaccaagtatataaaaaaagaaaaatagaactacataaaaaagcatttaaaatagctataacatttggagctatagcagctattttgcaaccgattagtggagatatatctgctaaagatatcgcaaaaagacaacctgtgaaattagccgctatggaggcacattacaataccgaaaaaagagcgcctctttatattggtggaattgtaaatgcagaaacccaagaagtaaattataaaatagctattcctggaatgttatcttttttagcttttggagattttaatgcagaggtaaaaggtctaaatgattttcctgaagacgaacaaccaaatgttccaattgtacactatgcatttcaaataatggtcggaataggaactttattactgcttgcaggattattatattttgtttcattaaaaaagaaaaaatggcttagcaataaaaagtattggctattatttgtgttattggctcctttgggatttctagctttagaagcaggatggatcgttaccgaagttggcagacaaccttggattattcataaaataatgaaaactaaagatgcagtgacacctatgcctgggattgtgtttagtttttatatgtatatagtagtatatctaactttatctgtagctgttacctggttaatgattagacagataaaggttttaaataattcaaattcttagaatatgttatatgtagtattattctttttgatgttctctttgtatctatatgtagttttaggaggcgctgattatggagctggtatcatagaacttttttcctcaaaagaaaatcaaaaaattaccaaaaaaacaatttatcgagtaatgggaccagtatgggaagcgaatcatatttggattattattttaatagtaatcctatggattgcatttcctgtgtattataatattatggtagtacatttacatatccctttaactattatcttacttggagtaacattaaggggagtagcttttgtttttaggcattacgatgcggttatagataattctcaaaaattgtatgacggcatgtttatggtatctagtttaattacacctatatttttaggaattgtatttggcgcattaattagtggtaaaattaatattgtagaagacataagcactttaaccttttatgaagcttttatcatgccttggtgtaacttgtttagtatattggtaggtttattttttgctgcactttgtgcatttttatcttctgttttactaataggagaatctacaggtaaaaatgcaagaatttatgtaagaaaatctattattgctactataattgtagtacttcttggattggtaacttttggatatggatatatttcaggaaacgtatttgtaaaggattttataagaagccctcttgcacttatagctgttatactttctggagtattactatatccattaaaaagaatgataaaaaaaggaaacacagtatggagtagatctctagctgggatacaagtttttttaatcttattagcagctataatagctcactttccagatattataataacaactaacagtagtgtaagtttgatagaaaaaattgcaccagatagtgttataaaagcattggggatatcccttataattggaggagctgtaattttaccaggattatttcatctattaaaatcatttaaaatgataaaaattttggaacagaataataatacttccacttaatcttaagattattatatttgtattctattttttcgggatgtggcgcagtccggttagcgtacacggctgggggtcgtgtggtcgcaggttcaaatcctgtcatcccgactagtacaaaccgttcattttcagtaaataatgaacggttttttagttctacatgtcaggggtcggcagtaaagtcgtcagtttgtagtatatttggtctagtacctaaatatacatacgaagatatgcatacatttaaaaaggctcgtttagtaaagtcaaaagctgcaaaaggcaactacataatgtactatgtgtgggatgtgcagaaaaatgatttagtaagacgtagactttatattcctaaaaaatacaaatcagatgcagaacaaatagcatttgccaaagatcgaattaaagagattaatagacttctagctgatggctttcatatagatcgaaaaaaaacggttaagagtaactcaaaaactaaaaatattcgttcaaaaacaatttattctatacgagaagcgacagctaccttcattgagattaaaaaagctaaaaaactttataaacggggtataggtttttacagtaataatttagaacgttttttaaaatggttagaggaacaaggtcaagatagtttgtggataggagaactagattatcaattgattcaacaatattttatgtatttacttattcatagaaaaaatagtcctaaaacgtacaataatactcttggtgttcttaaaactttctataatgagtgtttaaaacaagaatgggtagaaggtaaaaatccatttgataagattgataagcagccagaagaatatggctctaaaaataaacctttctcgaatgagcaaattaaagatataaaagaatatgttctagagcatgatccctatttatggaaaattatttgttttatctactactcctttatgcgcccttcagagatacgcagattaaaagtacgagatattgacttaaaaaaagacttgatttgggtgtctggtaaaattagtaaaactaaaaaacgagatgtggttcctattgtacctggactaaaaaaaatcatcctagaaatgaatttagaagagtatcatccaagtgattatttatttggcgctaatcaaactccttcgacaacgaaaatgggcgaaaattatatgggaaagcattttaaaaaagtgaaagataatttcgaatttgatgaagaccacacattatatgcttttaaacatacagctgtagtgaactggtatgaaaaagaaaaagatattcgaaaaattcaaaaaatgtgtcgtcactctagtatgttaatgactgaacgatatttgaaatctcttggtttattagatgataaagatgcggtttctgagttgccagagatataaagtaaagaatattgttatctctattagaatttcactaactccttaaattttttttttcatgtgtttatcttatcgtttactagaggtcagacggaattttacgattttattaccttattagttttattggagaatgatatagaaaggatgggtattagtttcgggttgagacggtattattaaacataaaaaagaaagcgatctgtaaagaccgctttaaatgttttcacaacggaataatccttattgtgaattgctttcaaaattgttttataaaagtagtaaaaaaaaatgaaaaaattccttatttctaaatcatatcaaaaatttaaaagaatctccttagctgttctattcggttatcctcagaactgatgatttttacaataaatacggaaatccataatcaaaacacgtttaggtttcttacttttcaaataaatatatcacttatgaaacaaattttggggctggatttaggaacaacatctattgggtgggcttttgtaaacgaggctgaggacagtacagaaaaatcatcgattataaaaacaggagttagggtaatccctttaagcactgatgaacagcaagattttaaaaaaggggatagtattacaattaatgcagatagaacattaaaaagaggagctcgtagaaatctacaaagatataagcagagaagaaaagctgttcttcaaattttaaaacaagtaaagtttttggatcaaataaaattcctatcagaagatggggattctacgcatagtacttatgctttacgggcaaaagcacctgttcaaaaaatttctaagcaagattttgcaagagtacttttaatgataaataaaaagaggggatataaaagtagcagaaaagccaataatgcagaagatggtcaaataatagatgggatgaccgtagctaaagagctgcataataaaagcctaactccagggcaatattcttatcagttactggtagatggcaaacaacaattaccagattattatcgatccgaccttcaaaatgaattggatagtatatggaagtttcagaaagagttttatccagaaattttaaatgaggaacacaaagaaaatcttacagggaagaacaaaactcaaacagaaagttatattaaaaaaacactaggcattgacaaagcagaaaacaaagggaaaaataaaaaactggaacaatacgaatggcgaaataaaggagtttcagaaaaaatagaactacgggaattagcttttgttcttatcgagattaataatcaaatccatcaatccagcgggtatttaggagctattagtgaccgaagtaaagaacttttttttgataatcttactgttggacaataccaatacaatttcttaaaagaaaatccgggaaaacctctcaaaaatcaagtgttttacaggcaggattatatggatgaatttgatgctatatggaaagaacaatctaaacattatcccgaactcacagaagaaatcagaaaatcattacgagatattactattttttatcaacgaaaattaaaatcccaaaaaggtcttatcaatatttgtgagctagaaggaaaagaaaaagaaatatgggtagatggcatgagaaaaaagaaatacatcggaccacgggttgctccaaagtcttctcctgtatttcagcaagcaaaagtttggcagaatatcaatgccattagaatcaccaaaaaagataacccaacagaagaatttattcttgaagaggataccaaacaactattatttaaagagctaaacatcaaagactcctggtcctctgcacaactcctgaaatggatttttgaaggatcatcgaatgcgcccaaagattggcaagtaaattttgaaaaaatagaaggaaatcgaacacaagcaactcttttaaaaatatatctccaaatattagaaatagaaggatacaataatatagggcatgaaaaaacggaagcaccaatccttttaaaagatatacaaacatgttttaaagaaattggtattaccccagatattttgactttggacatgtatatctcaggaaatgagtttagcaagcaacaggcttatgaattatggcacttgttgtattcctatgaagaggataaatcccaaacaggagtagaaagtctcaaagaaaaactacaaactaatttcggatttaaagaaacacataccaagttattgacttctgttgtttttcaacaagattacggaaatttaagtgttagggcattgcgaaagatatatccgtttttagaaagtgggcatacttatgatcaagcctgtagtctggctaaatacaatcattctcattctttaacggcagaggaaaatgaaaaccgctctttatcggactctatagagatattaaaaaagaattccttaagaaatcctgtagtagaaaaaatattgaatcaaatgatcaatgtagtaaatgctataatcgctcatcctgatatgggaagacctgatgaaataagggtcgaattagcacgagagcttaaaaaaactgctgcacaacgtaaagatatgactatctctatagcaagagcaaccagagagcatgaagcgtatcgaaataccataaaaaaagaatttggattatcctatgtaagcagaaaagacttgataaagtataaattatatctggaattaaaatccataggatttaaaacattgtattctggcacctatatcaaaccagaagaattgtttactaataagtttgatgtagaacatattataccacaatcggtattgtttgatgattccttttcgaataaaacgttagaattaagagatgtaaatctggaaaagggaaatgaaactgcttttgattattgtgagcgaaaaggttggctaaatgattttgagtcccgaatacaggaaattttttctaaaaaagatattacatacggaaagcgacaaaaactcttaatgaccaaagcagatattcctgatgattttttaaatcgggatctgggtaactctgcatacattgccagaaaagcttctgaaatattacggcaaataactagaaatgtacacgctacctcaggaagcattacagccaagttaagatccgattgggaattgatacatgtattgcaagaactaacatgggataaatatgaagcactaggactgacctattatgaaaaaaacaaaaaaggaaaagaactccctcgtataaaagactggacaaaacgtaatgatcacagacatcatgccatggatgccataaccgttgcttttacgaaacctgcttatatacagtacctgaacaacatgaatgcaaaaggaaataaagacggtattatatacagtattgaacaaaagtatacctacagaaatggtgacggaggaagaaaatttaaaaaaccttttgaaaacatacgggaagaatctaaaaaacatctggagactatactaatctcacacaaggcaaaaaacaaagtagtaacgcttaataaaaacaaaatcaaagtaaaaggtaaaggcaattttatcaccaagacagaacttactcccagaggacaattacataaagaaaccatctatgggcgatcaaacttttatgaaatcaaagaagaaaaaatcaacgctacatttgatacgcataaaatacaagctgttacaaatccagattataaagaagcgctacagaagagactcaaagatcatgaaaatgaccctaaaaaagcctttgcaggtaaaaatagcccgatcaaaaaccctgtttatatagctaataccaccaataaggttcctgaaatcgtaaaaacaaaaacgatacagtcgcaatttactattcgtaaagatatcactccagataattttaaagacacaaaagcaatacataaggtagtagatcttggaataagaaaaatattactggagcgattagcccattttaacggcaatggcaaagaagctttttctaacttagaagaccatcctatttggtttaacaaagaaaaaggaattgttattaaatctgttaaaataacaggggttgccaatgcagaacctttacatcacgcaaaagatcatcatggcaaagaaatagtagatgccaataataaaccaatagcagtagattatgtaagtacaggcaataatcaccatgtagctatttacagagacgaaaaaaataatttgcatgaagaagttgtttcgttttatgaggctgttgcacgaaaaaaccttggagaatccattattaaaaatacgcatgaaaaaggatggaaccttctttttacaatgaaacaaaatgagatgtttgtttttccatctgaagattttaatcctttagaagtagatctactggatcctgataatatacatataataggatctaacttgtttcgtgttcaaaaaatttcgaccaaaaactatgtgtttcgtcatcatttagaaacgcagttagtagatagtaaagaattgaaagacattacttattatagtattagaagcctggataaattaaatacaatacagaaaattagattaaatcatctaggagaaatcgttcaagtaggagaataataaacaaccttggagtaccctcacgaggtatgcttatgaaaatatattttgtttttgaagcaagccgaagaattaaactccacaatgtggattaaagttatgattaaacgcacccttttttttggcaatcctgcatatcttaataccagaagtgaacaattggtagttaattttccggataaagacaaaacagaagtctctatacctattgaagatttgggatatatagttttagaagatccacaaattactattaccaatggtcttttaatgaaattagtgcaaaacaaaactgcagttattacctgtgacaaacaacatttaccatgttcttttttacagcctttggtcgggcacagcgagcaaaccgaacgcatacgacatcaactaaatgcaagtctgccactcaaaaaaaatctatggcaacaaactattaatagtaaaataagcaatcaagctgtacatctggcgaaaattggtaaaaatgcattaaaattaaaacgatgggcaaccgaggtaaagagtggggattctcaaaatcatgaagctatcgctgctgcttattattttcagaatttatttgacatagagggttttagtcgtaaccaaaaaggtatagccccaaataatttattgaattacggatatgcgattttacgggcagttactgccagagcattagtaagtagcggtatgttaccttctgttgggatttttcatcataataaatacaatgctttttgtcttgcagatgatattatggagccgtatcgtatttatgtggatgctatggtatgtagtatcacaaaaacctcgagcgattataaagaattatctagcgatttaaaatccttattacttcaaatacctgcaatagatgtggtaattgatggtaaaaagagccctcttatggtagctatgagcaggactacaaattctttgtatgaatgttttttagggacaggtcgcaagattttatatcctgaatatgaatgaagaacatttttcacgccttaatcaatatagaagtatgtgggtattagtgttttttgatttacctacagaaacaagaatagagcgaaaagtagctagtcggtttcgtaaaaacttgctgaatgatggatttgcgatgtttcagtttagtatatacatgcggttttgtgcttctcgagaaaatgcagaagtacatattaaacgaaccaagaatgcgctacccaaaaaaggaaaagtgggtattatgcaaataacagataaacagtttggaatgatcgaactatttcatggtcaaaaggaagtagaaccagaaaagccatcacaacagttagaattattctaataggctacttgattttttaatcctaaaaacctatataagacacaggatattagtcttttatgagaagtatcctgtgaatcctatataaaaatacaattttgaaagcaattcacaacgaaaaagaaaacaaaagacttcgttttatacctgtgaatcctatataaaaatacaattttgaaagcaattcacaactgaaattgaggataaagaagatgttgtttcctgtgaatcctatataaaaatacaattttgaaagcaattcacaaccaaaggcttaagcagtcgcaaacgatatggcctgtgaatcctatataaaaatacaattttgaaagcaattcacaaccataagaagtcttgaaatgtgttcgccccacctgtgaatcctatataaaaatacaattttgaaagcaattcacaacgcgttcagaatcacttaaatcaagagtatacctgtgaatcctatataaaaatacaattttgaaagcaattcacaactacaagcccgtaaacattgggcaaaactctcctgtgaatcctatataaaaatacaattttgaaagcaattcacaactacgattgcgccaatgccttcagcttcatacctgtgaatcctatataaaaatacaattttgaaagcaattcacaacttctaatgctccttttatctgtggcagctccctgtgaatcctatataaaaatacaattttgaaagcaattcacaacttgaaagatcaaaagatatagaaaccctctcctgtgaatcctatataaaaatacaattttgaaagcaattcacaactcaggagttccgcttcctttttcaaaagccctgtgaatcctatataaaaatacaattttgaaagcaattcacaactggcaatgctagtttgctcatgaaaggaaccctgtgaatcctatataaaaatacaattttgaaagcaattcacaaccctgtttgacttcctgtacttcccccttgtcctgtgaatcctatataaaaatacaattttgaaagcaattcacaactctataatggtagtaaagtacatggtttgtcctgtgaatcctatataaaaatacaattttgaaagcaattcacaaccaactatagagagttaattaactttgcaaacctgtgaatcctatataaaaatacaattttgaaagcaattcacaacgacagacgaatcgataccctacaccccaaacctgtgaatcctatataaaaatacaattttgaaagcaattcacaacgttaacagtaatgcagattatatttttgatcctgtgaatcctatataaaaatacaattttgaaagcaattcacaacaaccatcccgccatattagctactgcatcccctgtgaatcctatataaaaatacaattttgaaagcaattcacaacttgctggagatgatataaaaatcaacaattcctgtgaatcctatataaaaatacaattttgaaagcaattcacaacaagatgcgcgttggcaaataataccaggcgcctgtgaatcctatataaaaatacaattttgaaagcaattcacaactagcagggtaaagcattgtttttttcaatcctgtgaatcctatataaaaatacaattttgaaagcaattcacaactagagaatgggaaatcctattgtaattatacctgtgaatcctatataaaaatacaattttgaaagcaattcacaacgtgaagatgtcggaggattggaagtaatcccctgtgaatcctataaaaaatacaattttgaaagcaattcacaacttattccattctgttgtatcgaaatatgtcctgtgaatcctatataaaaatacaattttgaaagcaattcacaactggatcgatgcaaatatagttactccgagacctgtgaatcctatataaaaatacaattttgaaagcaattcacaactaacaaaccaaatcttaaagcttttaaaaacctgtgaatcctatataaaaatacaattttgaaatcgactttaggagattcagtgactcttaataaaataaataccaagaactaaagcaattcacaaacaatataagctaattgaaatatgaaacggaagtgtcttttgtgaatacattacagatacaatagaaaaacaactgatcctaaaataatatacatatatacaatcattctaaccttttattatcaatcaacagtataacaatataaaatatctacaaatcatctttccaaaaagatctaaaaaagcattttaaggtcactttgtaatcatttttaaacgaatacaaacgactaaataaaataattaatagagttacaaatactataaaaagatagttttcaagtcgtaaatcttatgtgtgtagaggacaaatagatcaataaaataaataataaaatctagtatcaagtatttcttataagaatgtcacgtgagtttttactagtaatgaccaagtatttcctatagggatgacacgtgagtttttactatagcaatgaccaagtatttcctataaggatgacacgtgagtttttactatagtaatgaccaagtattttctatagggatgacacgtgagtttttactatagtaatgaccaactatttcctataaggatgacacgtgagtttttactatagcaatgaccaagtatttcctataaggatgtcacgtgagtttttactatagtaatgactaagtattttctatagggatgacacgtgagtttttactatagcaatgaccaactatttcctataggagtaaaagatcttttctgcttagcaaagagccaacttttccttatagtgatgtgatggaactatttctatagggataagagaatttttctagaatttttccaaaaataatattaactgtgctaagaaaaagaaagaaggtttctgaatccgttttgtaagaccagcatgataaaactatagtggggtacatgaaataaaatatctaaaattatttttactacggttgggttcatatccctataaattgggaagccttattgtagttagaggattaatggttttatagtactttccatatttaagttttactacgctaagaagtatttatactcgcttaaacatttttttagtttgtgaattgctatattttttcagaaattgctctcgattctttcaataaaacaatcctaaaaaccgatgtgtttttaaccttagattccaaaacactaaacctaatcttaaaataaacaacaaacagtttggaaaaaagaagaaaaataacacaagaacaatctctaaaaaagaaagaacagtcaacagatgaaataaagaaagtggcgaatcaagtaaaaatactctgggaaaatccttgggtaaaaggaatagctatactaggggctgtatatggctctctatttatatctaagtacttgattaaagaatatgcagaagtggtagcagctacaaagaaattaagggatgcacatagattataatacactatctctatgcatgtaaatacaatgaacaaagtttttggacaggatagttctaccgtagatactattgtaacagttctaaagattgttaccgcaacttatctagtcctaaaaactattaaaataggggaagatttatattatcaaattgaggctagaaaaaaacgcttacgacaatagatatatctatcttttattaacctcaaattcatcattgataatcccccaagtgttgttatcaaaatcgatatgatgaatattgatgtgtattaaataacttatttgataaatatctaatatattatggtggttggctaacttaaaacaaattcttatcaaaatttcttttgaggtttcttgtattggtttttctaaactattggaggttaccttacccattgcaggcatttggaaaggactctttgaactaatagaataccaaaaccccgatccagtagcttcaggtaaaatatccagtaaaacatcatatttttctgaaactctaatttcaggttgttttttgatgaaaatatctaattcttgattacaaataagtttttcgttttcgtctaaaatttggatgaaagatttctttttatcctgtagatataaagtatttccgatatgtaaaatcccttcttcgacaccaccgatcattcctgatcttgtatgtaaagtataatattcaatacatacggtgcttttatcactggatttatttttggtaacaaagcatttaatatctgggtgcagtaaaggttgtattttttggtttaattgttcgaagttcatattatattgagtaattccaattttttaataatgaaaaagctaataactccacaaagaaccactctaaaaccaaaaactccaataaatgtcaaatacttcattaatgattatttttctttagttaataaataactttcattaggagggtttaacatatagatttcatgaccacccacattaaaataaccttgtttatctttgtatattttataaatatctccttttttattttgaaagtgaatggtatcttttgtaatatttactatttctattaactcttcttctttattaaaataaatttttgaagacgcttcttttatttgaaactttacagttccatcgaattcttctcccatatgctcacctccataatcaaaggtatacacacctatccagtttttaatataaaatgatccttctttttcttgaaatatttcttgagattttttagtaactcttgactttgaagattctaataaaccttcttttttcacttcttgcttacaggcgaataaaaggaaaacactaaatattaaagctacaattttagaattcatgattttagtttttatagtattgatttataattacctcctacatttttttatttcaaaaatgtcataattgtatattttatagcaataagcaccattccatttcggatcgtacgttatataaaaacgagaacctacattttttactcccttataatctgtttgatccaaacatcaatttatataaaaacacacctagtggaacaacctaaattaggttatttataaaatcccttagagaaattaaaatttaaacctttgggacttttactaaccaactttattttatctatccagctatcccagcagattcaacataaatattttttccttttttagttagtttgtacatgatatttctttcagaatagtgaatttcaccatcatcttcatattttatcctttccataatatcaagaattatgtaatcatcacagtcaatattttcatgttttaattcaaaagaatcaaagtcatttgataaaaacaattttctcaagttcgagatatcctcttttttgaattttaaattagacgaatcaattaaagctaaagcaggagcagaatctttactagaaatatacttaaagaataaattcaaattttcaatatcattttgagtaaagcaattggtattattttgcggcttgtcattttttgaatgctttgtttcgttgctttgtattatttccgctttattaacttctttagtcttttcattttttacttcttgcttacaagcaaaaattaaaaaagaggagagcattaaaattgtaatatttgatttcataattgtaagttttttatcgtgtggatttgtaactaccatctgcatcttctgacatctcagggagatcaaaggattgaactttaaattttttaggtttcattattgcaaattctttaccaatactgacagtaccatgttttatttgttgtgttcctgattttccagaaccttgattgcctcctatgtagacatacttatttaatttagaatttttaccaacgataaaggcacaatgtgaataatttaatacgattactgcacccacaaaaggctctgtttcttctccatccttccaaccatctattccgtctttaagacttgtctttttgcttttatatggtccccaatcaaaagcagctccatttccttttgtattaattcctttatactcttccacctgattaaaacaccaatttatcaaagaagcacaccaagcagtattgtggttccattgttttagtgtaccataatgggcaggggcataagtagtactcatgtgataatgttctgtaattctttctttaagaggagattgattttctttaattcctttataggtttcatactcctgtaacgcatacttcatccaaggagctcttttcttatcttcaccatctgcagaattactaccaaattcgcaggtacttgcatcctttttacatgtattttttttggcaacccctcggctataccaaccttctaccaccattttaacctcccatatataggtttttccgtttataaatccacgtctttttttaccttttatttctttttttattgtttcccattcgccttcttctttatgaaaagcagggttattaaaataggcattacgattatgatcccataaaactgctttttcattactacctaaacctgtagatttggggtttagtacagaaagatacacatcagtaagtgtttttatcttgtgtttttatcttgtcttttttacggctaatatgcttttctacataatctaattgctttaaagctgtcattttttgtagctgtttttgtgttgtccccatatctttagcagtactctcaccaaattgtattagtccaacgtagccgtctttattttttatactcgggtcaaaagtaccttctgtttccaatgccattactgtcataagccaattagcacctttgttatttttttgtggtaagccaaggttttttgctatttctattactcgttttctaaaggaacaggttacaaatttagaattctttttatttccccaaattaaactttcgtaagcatttgtagtatcggaaagcactaactaatcctcacatttcactaatgttacaggattttcttccccaatagtattaaagtctgatactagatgtacgcgtttttgttgtttggcatcataaaaaccataccaccataattttaacttgcctttacctactgcttcaacctttgcgattatactgtctttggatatttcattccagtttaatttatcattatatcttgtgataccagctaacatatcatatttatagtaatattttttatcggtcgaatttttgttttttaaaatagaagatataatcctagcttgcatatcttctttattaaataagtctatataactagagtttttatcataattatagattaatggatcaaatgtttcatctgtacaattaattttataagtacctccaataaaatttaagtcactattatcgatttcaattaaatctaaattaggtgttttattgtatttgaaatttaacttagaagtttcttggtttattatttcttttaccctatcggagtgaaatgttttttcgatgagttgccattgtttattttttgcttgtgaatagtatattttatactctgtattttctttaatatcattacatgaattatctgtttcactgtgatttaaaaaatattcatcagttataactatagcccacatatcaaaattattatacagatactcattatcaaatttcattatatttgtgccatctatagatacaatatattcctcgtttttgtaccagtgtttattttttttccattttaattcatcatgatattttaaataaatatccgcagagaattccatctcaagattgtcttttcttttacaaaaagtagaagtaataaaccagtcattaaaaacagtaaattcttctaaataattttgtgcatctaaaaaatcataaccactataactactctgactttgaccttctttacagctacttaataatactgttaataatatcacatatatatatctcataattttttagtataattaatcggtctaaaataccctatccatcctgagtggcttgataaagctcctccatttcttttgtatacagatgttcttgtactatttgttatattatcccctccatttgctttgctaaatgattctccactagctttagtaatagcttccaatatccatacagtatatttcttttctaacctttcacagcacacctagcggtagcagggagattggttaattagaataatcatgaattgaagttaaataccattcattattttgtttatctctcataaagacatagtgtaaaagaataccattgtcaataccgtacatagagtagtttgtagaatcttcttttataactgtttcaactctgtatttatcgtattcttttttataagcaagagtatcatctctaaaatccatatatgaaatatcttcttttgtgaattttaaaacttcaaatttgtcaatttctactagattatgaagatataaagtgtctttgaccctatctttttgaaagatactatcattactgaattttacaaaaaagttattaaaatcttcttttgaggatttttgttgctttactaaattcgctgttttttcagtacttactttatactctagattattagcttttttacagcttaaaaataaaagtattattacagaaagaatattcttcataattatatctaaattagtatttaaacgaagtagggttgtttacccaatcttgggggtctatt

SEQ ID NO: 2256 - DNA, 24125 bp, synthetic construct
  source 1..24125: mol_type = other DNA
  misc_feature 1..24125: note = Synthetic
agtgtcatactggcgtcctcgaataccggacttccgatggtatagacaggctctcccggtgtgacgggatagaatcccaaagaggaaaagaccacgaatgaagtaaggccgcctccgtcctcatcaccaggaactcccatcaggtcgtcacggaaccaagtgtcgagcatctgtcggatcctcttctgagtcttccaaggcgctccagcatagttgtagagatacggaatatgcagcgaaggctcgttagccatcgagaactggcccacattgccggtgtgatcaggaagcttggcgaagaacgagaacttgttgcgcccgagaggtgtggcgaacatgcggtcgagttcgcttacgaaactcgacggtcctcccatcaaacctatcaaaccaggaatatcgtgctgcacatcccagcgatatacccaggcattattctcgtcgtaatactccctggcgcccattcctccggggaaattataatcaaggtcaggaatgaaatcgccgtccttgtctttgggatggaagaacagagtctcaggattaaaaagctttctatagttggtggaccagtttttgaaataatccgcatcttccttattgccagcagcttccgcaagcttagagagcgcccagcagtcgtatgccgtaccaaggcttacagccacaggctggcggttctcccaaccgacattggagtctgtctcaatctctcccgcacgaagcgcgggaatatacccatgctcccaatagaaactgtccaactctccggccggattgccggaccaagggaccaaggtcttctccgtcaatgccttccggcctgcctcataggcagccttcacatctattttcagcccttttgccaaagcgtcggcaaaggtcgggataccgtgattggagttcattcttcgagagtcaccgctgacttcagggaaagtaggcatccagccggtacccatttgctcggccatccgtagataagaggccagaatattttcctccaaggggacgtccatcaacgtacggagcggatgcgccgccctgtaggtgtcccaaatccaatcatccgtgtagaaaggtactcctccatcctcatggacggtgttgtcgaaagcgctccaatatcgtccgtcctcactcatacaaatcggcctttcgaaggtacggtaatatgaagtatagaataccttcatacgtttttccggacctttaacctcgatcctgcctaaaatctcattccagatctttcttcccgccgcggcaagcgcgtccacatcgtaatcagatatttcccttcgaagattggctttagcctgggcctcatcaataaatgagactccatagcgcaacctgaccgaaggctcactgaaaaccatggtgacccaactgttcctctcgtctttggcggattccaccctcgcgggtttggtttccggctccatatagacatatatcttcgtctgatcctccactgtctgccatccagatagagcctccccatcccatgcgacggaaccttctctgcttgagagaatcaccctcaacggatcattcgctttcaatgaatatatggccgactgatgagacaacgcgtagctggcctgaatctccccgtccgagagagtgacgtcaaatgaatatggagtcaaatgctcgttatcataagaaacaggaatcaccgcacccttggagtccctcgtggtcaccgataatttgaacgctgaacgctccctgtggtttgtgactataaccggaaggccgttcaggtactcagaggtgtaatccgagcgctccggatacactctgagcattgagttcggcaactggacagtcgggaatgtcggcacaagcaaatggctgatatttccggcgtaagggttgacataatccaccggctcgagtttcggatcgccacaagcgaccacgaataaagcggccagtaatgcggggaaagcgtgtgatctcatcttgatttgtggatgaatggttatcttcgtaaagatacaaaaaacaaggagatgcggcaaatgtccgcatctccttgtcttcaaatcaggtaagcctactcggtcttgccgttctgggagtagagccaggccttcttgctggcggtctcataagtggacttgtacttggtcagctgaccctttacaatgacctcgtccccaacagcaacctgaccgttgccctcaacccaaggctgatttccgaagtagtaagctccgtagacctcgaaatcgtgggtaggattattggtgttcttcttgtcagcactcaagtcgcagctgccgtcgtcagaaatccagaaagtggctgttcctgcataggtgctgtactcgtaaaggatatcagcgaccttgcctttcacacagacgtccgggaacacaggctccggctcgtccgccgccttggcggcctcgatagctgcctgagcgacatcgatgaaagcgatagcgccagcgatattgaacggatactcagcgttaccgagtccgttggcatcagtggtggcgccattgacgctgtacaactgagccttcttgctggcagtctcagcgacaccgctgtaaacagtggtctttccgcagacgatgacctcgtcacctatgcggacctgggccttgccttctgtccaagcctcaccaccgaaccaatacacactatagacctcgaaatcgtgggtaggatcgttggtcttcttcttatcatcagaaagattgcaggtgccatcgtctgaaatccagaatgttccggtgccattgtaggtgctgaagtcgtaaagaatatcagagaccttacccttgatgtaaatgtcctcatcgaacgttgtccctccaagaaggagcttggcaacctcggatgcggcataaggattcgtggccgtgcccttagggttgtccacgaactcatcgatcttggtggcgatgacgttgatgaacttgcccttgctggaaaggccgttgaagtaaccggtcacagtgatcttcttgccgtcaaagctcttggcgttcaaagcgtccacaggatagactatgcttccctgtttggtgtcaggatcgataccgtcaagagtcatgttgtagtacttaccgtcagaagagacactgagagtaccgctaagcttgatgtactcggccacagaggcggtgtactcagccgcattggcggtgatgtcagtggctgtgggatgctctaccgaattaccttcgctgtcgacgaagacctcggtgagatcggtgatctcaggaacaccattgtaggtggtcttcgtacctgcgatcctgactccgtcaccagccttgagggcagcggcatcattgccatagacatagatggccttcgctccgtcagagacgacagcaccctttgtggtgagggcaacaacaacagttgaaggaagggtctgaacctgatccttgtcagcggcctcgatgatctcagagacggaagcgcctgtagaaggagcgccggcctgggtgatgccgatagtcttgagagccgtggggcctttgatcgtgacattggcagtacgcttggccgtgcgggtgttctctgcggcatggacgctgaagctgccgtccttgttgacatccgtgacctggagccaatcggcgtcgctgctgacaagcagcgggctctccttggcggtgacgaccattttgaaggtggtgtcaacgcaaggaagctcatcgaaatcgaacgcgtcaacgctgatgagggacttcacgtgggagacgacgatagcggttttctccttggtctcgggcgtccccttgtagttcatcagggagccttcgatggtcagctcatcaccaacggaaaactcgttgccggtcgtgattgcggcaccgttgatccagagaccgcggtaaacctccagccagttgttctcgccataagacccgtcatcggacaggaagtaagtggtgttgccgtactgggtgctgatctcgttgatcttgcagacgatacccttcacgcggtaagttccgccagcgacatcaccgtcgccaagaggagctattacctcgagagcctgcttgactgtcatcgtgacgggctctgctttctgggtagtctgaaggagattgatattctgggtcttgccgccacactcgatagtggcgacagcgtcacgggtttcttcggccgcgggggcggtgaaagtgacggtaacctgtccggcaccaccggtagcagggctaacggtaacccattcaggaaggttcgtgacagtccatgaacctgtggcgttgagttctacgggaacggaaccaccaccagcgggaaaggtcacataagaggaagagactttaacctcatcaaggaaatgatcagcctcctcgacgcaaccggtcatcaaaagaccgagagcggcaatcagggaaacaatgatatatttcgttttcataagattctccctattaattagttaaaaatatacttaataccgatggaagcgtaccagcactggccaaggtcatggaaaggaacgaaggtcttggtgctgccgctgatggcggaaggagttgagaaggtagcataaccgtcagcgtcgactccctcatacttgaggatgcgagcctcagagccgatcgcaggattgagatacttgctcacgccccaactggagttgaacaggttaaggacattcttgaggtcgaatccgagctggagagtgttcttggtgttgccggccttgacagtgaagtcatgcttgtagccgaagtcaaccctgtggacccaaggagagtaaactgagtaaggctcagcgtaaccgccctgatgcttgctcatgtacttgtccttgtggacataatccatgaaacggtcgcggctgtcggtgttgacgaaacggaactcgttcttgttgacctgctcatctgtaggaatatagatggcatcgtaggcgtaaccgtcaccattcatgtcgttggtgagcatgtaagactctttgtagccacccctccaggtctcgtaaatgaagttgaagtggttgccactcttgtcgttgaggtcgagagccgccacgacacggtcaggagtcacgtactgagagttgtgaagcttgatgtagttcggaccctcggaagtgggaacgtatgtgaaagcggactcggcggcagaaccaggcataccggtaatctccttggagacggtatgggtgtaagcggccatgaagctgacaccttcgacaggacggatattgaatgtcacgttaccggtccagccataacccttgttggtgttctcaaggacaaaggccttggtggcgttgcggaaaccggaaggatagataggacggttgtcagctccgttgaacctggcgtaaccgccgacgttggtcatgctccagtcggagatggacacgccgttgatggtcttgttgaatattccttcagcggtgaggctcatcgggaaggccgtcgggaaagaatagtcaatagcgagggaagtcttccagatctgaggcatcttgaagtcaggatcgacagcgctgatcgaagaaggaactgttccatccttagggctgacagtgctgggataacccagggagatcaacttgtcataaagggcggcgacggtggctttgccgttggcgtcagtcacaagacctccggcgaaggtgtccatcgagaatcccttggctttggcattcttagcattgatctgagcctgatactggacgagaccgccgttggtaggcatattcgtgaagaacacgagaggcagacgtgcggagaagaaaccggtaccgccgcggaccttgagactcttgtcaccgatgacatcccaagagaatccaagacgaggggagatcgtgatagcacctgtaggccactggccggtgtcgatgtgagtctccgcgtaattcttggccttcggatgataagtcagggccttgatagcctcgttggtcataaggtcgccgtcgtcgaagaacaggccgtcgacacgggcaccgtaagtaagcttgaacttgtcagtggcgttccactcgtcctggatatagattccgagcttgtggaaacggacacgggcagcgggcttgagctcaccgtcgtaaccgtaggtaaggttgacgatctcaggagcggcacctgtcaggaagtcattgaggctgctgtaacgatagtaaccggaaccgttacgcatgtactggttgtcagccatctggtactcgtagttgacaccacccatgatcttgtggttgcccttataccatgtcaagtcgtccttgatgttgtagttgacctcattgacagcgttgttccaggtgaaaagctcataaccgagagccatgtagttgttctcctgggagtcatcgaggatatcgatgaaggggaactcctcggacgtgctgcttcggatagggttctggaccttggaatatgtggcgaggaactggttggaaagactctcggacagacggctattaaggtcgaatgaccaggtgctgaccatgttcctgttggcatacattgagttagcgaaggacattgagtactgggacatacgggctccggacatacgggtaccaccgtccatcgaagtggcgttgggggtgttccaggagttgttcagagtgtagttgtacctgatagcgaggtgatggttattggagatgttccagtcgatacgggcaaggagcttggtgttgtcctcgttggcggggaaatcagtccatgaacctgtgtcgtaaccgtatttgctcttcacgaaatcagagaccgtcttaaggtcagagagtttcgtgcgggaaatcttattgtcagcatccatcttgccatcctcggatcctctccagcgattgacaatcgtagggatcttggactgctcggcgttgacgaagaagaagagcttgttcttgatgatagggcctccgaaagtcataccgtaagtggtgctgcggtccttgtcgcgggcgccactgatctgctcgccctcgatggcgtcaccgcgaaggttctcgttgcggtgatagacataagcggatcccttgaaggtgttggtacctgactttgtgatagcgttgataccaccaccgatgaagttggtttgacgcacgtcgtaaggggaaatcacgacctgaagttcctcaatggcgtcaatcgagataggattgccacctccgggaagtccggcgctaaggccgaagttgttgttgaagtttgcgccatcaacagtgaagttcgatgaacgtccgtccataccggcgaaggtagtaccattaccaccgtaaggagaaagcctggtgacatcggtaatgcttcttgagacagtcggcaaattggagatctgctggctgttgatgttcgtggccgcacctgtcttctcgacagcgagtttggaggcgggagaagcgatgacaacggaagactccagcatctcattgtcagccttaagctgcgcgttgaggttgaaagtctcagcgagctggagagtcacatccgtgtactcgatcgtctggtagcccaggaaggagatggtcaccttgtagggacctccaacacgcataccgttgatcgtgtagttaccgtcgatgttagccacggcggcatactgggtgcctgaaggagtgtggactgctaccacagcggctccagtcaagggctccccggtctcatctttgatgtttccggcgaggctggaagtcgtgacctgcgcaaaggcggcgactcccgcaaagatcgccaccaaagcggcaaatcctcttttaattgattgaaccataatggatttaagtaatataaaagttgttatatttttcctcttttctaaataacctgcgaaattaatataaataatcgggttgctaaaatttatttcattcatacagagaattatcttatctttgcggacgaaaacttccgaggacggatttgacccgcttgcaacctcggtctaaaaaatgctaaagatatgaattaccttttcacttcggagtcagtctccgagggccatcctgataaggtggccgaccagatttcagacgctattcttgacgagtttctccgccgtgatcccgaatccagggtcgcttgcgagactttttgctccaccggtctggtgattgtgggcggcgaggtccgctccgacgcttatgtcgacatccagggaactgtccgcgacgtgatcaaccggatcggatacaacaaagccgattacatgttcgacggcaactcctgcggagtgctttcccagatccatgagcagagccaggacattaaccggggcgtgtcccgggaaactcctgaggatcaaggggctggagaccagggtatgatgttcggttacgcctgcaaggccaccgggaactacatgccacttgccctgtacctctcccatcttactctcaaggaattggctgacatcaggcacaacgagctcgagctgatgccttacttgaggccggactcaaaggcacagtacacaatagagttcgactctaacgacaagcctgtcagggtccacactatagttctctcaacccagcatgacgagttcggttccgacgaggagatgcattccagaattgagaacgacgtccggaacatattgctgcccagggtaatagccaaactcgattctgccacggcatccctattcaaaggggactttatactccatgtcaatccaaccgggaagttcgtaatcggcggccccgccggagacaccggccttaccggcaggaagataatcgtggacacctacggaggccgctcagcccatggtggcggagcattctccgggaaggatccttccaaggttgaccgcagcgccgcatatgccgccaggtatatagccaagaatatggttgctgccggagtggctgaggagatgatggtccagatcgcctacgccattggcgtggccaagccggttagcgtatatgtcaataccaagggaaccggaataatccctgacgctgagatagcggacaagatcgggaagatgttcgacctgcgcccggccgcgattatccgcaaattcggattgaaaaaccccatctacgagcccacggccgcctatggccatttcggcagggatccatacaccgagacagtgactctttggcgcgatggaaaggaagtcaaagaagaagtccagttcttcgcttgggaaaaactggactccgtcgatctcattcgcaacgagttcggactttaagatattggcataaccagcgtcgctactgctgaattgtcattcggtaagtacgcagtccttccaatatctgctcgggactggttaccttcttggacatgatccaatgcgtagagatagcgcccgagtcaatgtcttggataacataggcctgcttgaatatccagcctcgttttgccatgtaattagcggcatcgacgatggagttgaaaataatgtcctcaccattctcgtcaacgagccggctgtctttgtacctgtagtcagcctcttgaccgaaatccaccttgacagcgactttgtttgttaaaatcctcttggtataagactctatctcgcaatagacctcacgagggtacgtgtcaaagtcatccggaccggagaacaggttttcctcggcggtctgggcgaaagcactgatagacagaagcatcaatgccgcggaaagaaacacgtttttcatcattcatagtatagtttaaacctatccataaaaagccgcaaaatccaagccaacaacacgcatgacctcccgcggaaaaccccgacatcttgctggaacggaagtggttcataataaataagataaccaacttgccggtcaaaaaatcaagaccggcagatttttcatatcactcacaatcaaaatcttacgtaccagtctacatattacaaaaaagaagagcgagtcaatatttgacccgcccttaatgttttcacaacggaataatccttattgtgaatggcttcatttttcatttgctaatttatagaactattcttcaaataccaaatattatttaaatttgttaaaaggcaaattcgtataatgatgaaaaagattcttggacttgacctcggaacgactagcgttggctgggcaatggttaattctgcggataataccaacgaacaatcttcaattcttggctgtgggtcacgtgtcgtacctatatcagttgaagagaaggacaattttgaaaaagggaaagcctcgacaaccaatgcggatagaacattaaagagaggtatgcggcgcaatttacaacgacgtaaacagcgtcgagacaatctcatctctatactcaaagacgaagggtggattgacgattcgacgagtctttctgaaaatgggaaaggaagcacccatgagacgttgagactgagagccaaggccgcaaccgaagagatttccctggaagattttgccagggtacttctatcaatcaataaaaaacgaggatacaaaagctctcgtaaagcgaattcttccgaagaaggccagctaatagacggaatgcaaatcgcaaaggaactccactcctctgggatcacgccggcacagtattctctcaaatctattgaagcagggaaaccggcacgattcgatttctatcgatcagatttagaaaaagagcttaacctgatttggtccattcaaagagattactatccggatatacttactgaggagttcaaaaaacagatttctaatcaggggaaaacaggaacaagcaaggtattccttggcaaatatcacatcttcaccgctgacaacaaagggaaggaccgtaaggctcaagcgatttcttggagagtcgaagcactctccaaaaagcttgagcccgaagttttagcctatgtcattgccgacctgagaggagaaatctccaattcaaatggctatctgggtgcgattagcgacagaagcaaagaattgtatttcaaaggagaaacggtcggacaatatctgtatcgttcaataaccgaagatccttcctacagcacaaagaacagagtattctacaggcaggattatattgatgagttcaacaggctttgggacactcaggcttcttaccataacggtttaaccaaatcattaaagcagaggatctccgacaccatcatcttctttcagcgtccgctgaagtctcaaaaaggcttgatatccttctgtgaattcgaaagccaccctatcaaagtcataatagacggtaaggaaaagaccaagattaccggaagccgtgtcgcgccacgatcctcactcatgttccaagaattcaaaatctggcaggttttgaataatcttaccatccttgacaaagaatcaggtgtcaatgtcccgattagcatcgaggagaaacaattgattgccaaagagttgtccatcaaagcaacgcttaggcaaggcgaagtcttaaaaataatcggcaaaaacacccggagatacaaactcaactatgagtctgtggaaggtaactccactttaagcagtctgttctcaaaataccttgagattgtcgatttgtccggacatggggcgtatgatttggataagataagatttgacgacctcctcaatcttatcaaagacgttttctcaatgctgggctgtgattcaaacatattcacattcgacacatcccttcccaaagagcaatttgagcagcagcccctatttaagctttggcacctgctctattcatacgagggagacaactcggcgacggggacaaagtccttgatcgaaaaaatatcgtcaatcaccggccttgatcatgaatactcgaaagtgatcagcaacttaacgtttaaagacgactattcgtcattgagccataaggctataaaaaaaatcctcccgtttttaaagcaaggttataggtatgatgaggcgtgcttacaagccgggtacaaccattccaattccctcactaaggagcaacaggaaaacagagttttagtggaaaaacttgagttgctccctaaaggagaactacggaatccagtcgtcgaaaaaatcctcaaccagatgatcaatgtcgtcaacgcagcgtcagaagcgtatggcaaaccggatgagattcacatagaattggcgagagaattgaaacaaagtgctaaagaaagggaaaaagcaacaaatgacaaccttgcatattcaaaacggaacgaagaaatcatcaagattcttcagactcagttcggaattccgaatgtaaggaaagcggacattatccgctatcggctttatgatgaactcaaggagaacggctacaagaccctttactccaataaatatgtttccccaactcaattattctccaaagaaattgatattgaacatattatacctcaggcccttttattcgacgattcgtttgcgaataaaaccatagagttcaaagatgtcaatattgaaaaggggagaaaaaccgccaacgattttgtgaaagaaaagtttgggaatcaagggtatgaggaatatcgactaagagttgacgacctggcaaacagaggaattatcagtgaaagaaaaagaaagtatcttcttatgccggagaccgatatccccataggatttattgaaagagatctaaggaattcgcaatacatagcgaaaaagtccatggaaatccttagccaatatgtcaaggatgtcttacctacgactggcgaggttacttcacgtcttcgtgaggaatggcaattggtggatgtattgaaagagctcaatttcaacaaatacgacaaagtaggcaagacctatgttgttgaatatagcgatggacgtaaagtgccgaaaatcaaggactggacaaaacgaaatgatcatcgtcaccacgccatggacgcaatcaccatcgcttttaccagaagggaacatatcaatattcttaataaccttaacgcaaaaagcgataaagattccgtattctatggcctgtatcagaaaaatactgtccagacaggcagtaaaagaatatttacccctccaatgcctttggacgaactcaggcaagagtgtaagagaagtcttgattccaccctcgtctccataaaagcgaagaacaaggtggttacaaggaacatcaataagattaagacatccaatggagaagtccgtagaattgaattaacccctcgtggtgcgctccataaagagcaagtgtatggaaaacgcaagcaatatgagacctttgaggtagccgtaggatcgaaaatgacagaagatgtcataacaagtgtctcgtccaagcgtattcgtgaagctctgctcgctcgattaaaggaattcggtggcgacccgaagaaagccttcaccgggaaaaactctatcgacaagaatcctatctaccttgatgacgcacattcttcgactgtccccgataaggttaaatgcgtcagattcaagactgtattcagcatcaggaagaatgtggcacctgatttgagtgtggagaaagttctcgacgcacaagctagaaagaagatccaagaccgcatcaccgaatgtggtggaaatgtccgcgaggctctctccaatcttgaacagaatccaatctggttggatgaagcgaagacaattccaatcaagcgagtaaccattggcgagaacttcgatctgtcagccattcatgacaagcgggataaaaatgggaaattaatgcttgactcagaaggcaatacaatcccaaatgattatgttaacctgcgcaataaccatcatgtggcgttgtatatggataacaaagggcagattcaagaatctgttgtgccaatgttcgaggcattgaataggatcaatcttggattacccgttgtagacaagagcttcaaccgaacaaatggatggtctttcctctatagcctgaaggtgaacgagatgtttgtatttcctgatgagacaagcgggtttgatcctaacgagatcgatcttttggatcctgccaacgccgccaaaatcagccctcatctgttcagagtccaaaaactaagcagtaagtattatgtattcaggcaccatcttgagacatctgtcagcgacgaggataaagcccttcggaatattacttggaagcggatcacaaatatccaaattatgaaccaagtcatcaaggttcgtactgatcacctcggtcacatcgtagcaattggagaatatgattaagagaactctttatttcggcaacccagcctatctctcgttgcggcattcccaacttgtcatcggaaaaccagatgacggtgatttgccctccgacgaagaccttcttaatccggtaaagaccatcccgatagaggacatcggggtggtcattttggataataagcaaataaccatcacatcttcaaccatttccgccttacttgacaataatgtggcattgataacctgcaacgagaagtcaatgccgacgggactgatgctgccattggagtcacacagtgtgcagtcagagcgtttcaaagaccagttaagagcgtctatgccgctgaggaagcagttgtggcagcaaactgtggaagcgaaaataaggaatcaggcagccgttttgaaatacatcacgggatcggaagcagagaacatgctgatttggtccagaaatgtccgcagcggcgacagtggcaatatggaggcaagagccgccgctttttattggaaaaatgttttcccaaatgtggataagttttaccgggacaggtataacccataccccaataacttcctgaattacggatatgccatactccgggctatcatagccaggtcgcttgtagcctctggacttctcccgacaatgggtattcaccaccacaatcgttacaatgcatattgccttgccgatgacatcatggagccttaccggccttatgttgatatgcttgtaatcgatataatgaaagacactaacgaaaaagatttgaacagaagtgtaaaggcaagattattaggcattccagttttggatgtcattatcgacggacaccggagtcccttaatcatagcggcgacaacgaccaccgcttcgctatataaatgcttttcaggtgtcagcaggaaaatactatatcctgaattatgagcagtcgaatcagcgagtaccgtgtcatgtggattcttgttttctttgatctcccgacagagaccaaaaaggagcgaaaggcggccgggaaattccgcaaagacttaattcaggatggtttcacaatgtttcaattctctatctacattcggaattgtccctcaatggaaaacgctcaaatgcatatccggcgagtcaagagtgtaatacctgagtatgggaaagtagggatcatctgcataacggaaaaacagttcgacagcatggaactttttgtaggaaagagaatttcagaattacccgttgtaggtcaccaattggaactgttctaaccgttttcccttttctgtcacagcccacaacatcttgactatcagctatttgccaatagtcagatgttgtgacgttgtcaaagatagaaaaaatgaaagccattcacaacccgcttgcattctcattgttatggccgtaagatgttgtgacgttgtcaaagatagaaaaaatgaaagccattcacaacgcatgaggacaattactattttccgcaatagatgttgtgacgttgtcaaagatagaaaaaatgaaagccattcacaaccttgccctaatgaaagccattcacaaccttgccctggatctcggtctccttctccgatgttgtgacgttgtcaaagatagaaaaaatgaaagccattcacaaccgttttcacgcctgacacctccaaatttcgatgttgtgacgttgtcaaagatagaaaaaatgaaagccattcacaaccccttgaacaccttgccggcctgcccgcgcgatgttgtgacgttgtcaaagatagaaaaaatgaaagccactcacaatgggaaattataaaaattggaagtggctgttgcaaaaactcttgatatttaggataataactcattagccggtcctacaattaagaccagcccatcaatcattttcctaataatcaacaccttgtgtaccagggaccgaaaaagatttccacaagaagagcgatttaaatgtaaaatcattatcttagagttggtgagaaggctcgccaatgtttaatttaaactgaaaaacttcaaaaatggaagccacacacgcctttatcaagggtttacggggtaatgggattttctatcgctctgaggatttcctcgtgttctttactatcgtcagcgttatcgcccggaaaatgaagctgattattctggcattctgcccgatgttcaaccatattcatttcctattcaaggagattagtcttccatcattacgatctttcatcaggcaagtgacttctcttttcgtcaaggaatacaacctggattacaaaagaaccgggccagtctttcaacgtcatttcgggaaatccctgaaaaaagggataaagattatccttggatgcatagcttacgtgttcaacaatcctatcgcaggaaagatgttcgagacagcgatcgagtaccgatggacccttttggcgtaccacaactccacacacccgttctcaacaaagctcaggaaggacacttgcaggaatgtcatgagaatagcgcttagaaaggttgattattattttaaaaacgggacatatttatcctacaatagattacgagacatattcaaagatcttggaaacgaagagaaaaaacagatgattgattatgtgatcatcaagtataacttccttgcatataatgacctgtctgaactttaccatagttttgaaaacatgattacagctatagaatcaaacgccggggccgaatttgatcttgaagatgaatttggagaccattcttgttactgggatatgttgtcaataataaaatcaattggctataaaggatcaagtctcaactttgagaagttaccaaaagagacactggacagcctgttcctgacgctcaaaagacgaactcatgcgaaggatattcacattaacaagtttttacatcggcaggcctgtaacataaccgatttatctacagccaaataaacgatccgccggtcagaaaaacctgactggcggatcatgtaacttacttactacgaagatatttcgtaccagaatgaccgattctaaatcgggaaactgactccgaaagtcattccaatgttggatttgtcgataggaatcatctgtggagtcaccctgaacgagtaagagtctattccccagaatatgttgaatccaggggcgtggacatcgaacgcaccgccaaacgaccatccgaaattgtgtctggcaccactcaggtccaggctcagccaagagagaggtgtccagcatccgaagagacggacctcattgtaaccatagaactcgtacggcttataggtgtacaggaccgcggctgagatgttctcattgaaaggcattatatacttagccccgacattaaggctgaccggaaggaattcgaaagaattcttctttttgtcctgaataaggaaatcaaaggaatcccggatgtcttcaagaggctgcaatttcgcgtcggaatcgatgtcctcattcggatcgtacctccttgttcaaatcatagtccttgtcaatggagcatgctgaaatggccagcataaataatactgaagccaaaaagcggagttttttcattgatgctataatcgtgaagatgttttttacccacccaaaaagttagcggttttatagcaaattgccaataatcacctcctacttggtgacaatgggcggggcgccgggaacccagcccgtggcagagcgggttcctggagccgaggactgttttttggaccggttgaccgcgtcatattccaggaacttctcgaaggaagcctcctcgccgctcaattccatgattctcttgtaaatagcccagcgggaaggagcgttgaaatactcgacattatggttcatcatactgtcatcagacggcctgtagattccttccgagtacggtccgccagcgccttcaaaaacaccggtctcattagcgtaacgttcatcagaaaggaaggcactccacttgacctttgccggatcggcggtgaaatcaatattggaataccagccatacctgtcataaagtctcatgtactccttgacgagctcctgactgggagagccaaaatccgtgctatactcatccgcgaggaaggcgaagccgtgaccaccggcctcgtggcggatcagcgggccataacccatactgctgttgcccaccgaggaataatatgcgattccggtctggagagactccttcatggaagtgattcccatcaagccgttcgaattgatcatcactccaatcagcaggttcttcttgtccttgatgtctggaaccatcagggcatattcaagggccttctcgtccgaagcttctgatatagaaacagttgttcccgcacaatatgtaccgagagcggtagaacaccccgtacctgtccttccgtttttggaaaccactttcaccgcatacacgttaaagcgatcccggaacgtcttgtaaggctcaatctggaagagttcttccatggattgccgcatatgattctcgtaaaggccgccattgaccatatccctgtcggtgtaggcgtcacccatgaacacgacatttatacccttgccgacagtggctttctggagggtaatgacatcgccgtcctttgagtaatcggtcgaggaatattcatcatcatcttcaagagggccgaaaatgtcctcaaggaatggaatcaggtcattaaaagcgacgtggccgaaacggtcttgagaacggtcaacgacatccggcgagcaactgaaaattatatttccattactatcgatcacattggcaaaaggggtaccataacttcctaacgcgtattcctcatgtaattctttgccggctgtagagaaattataccagatgtcatagccgttgctcaaaacatagtcctttagcatcttttctccctcccaatctccccatgccggtctcgctataacctcaagaccagcatcgtggtacttttcgtgcattcttttaagctgcggaagcaaggctgcggaaaaaccgcaccaagaagcccatttgaagaccaccgtagccttgttcttggacacgatctccttataagggatcggtttaccggtgatcgcatcattgatgtccttgtcgaaccagtaaccgggaatgtcccgatccatgactatgaacggatctgatttcctgtagtccagatcatctgccggaacccccgaattgatgaacaaattaatccaatatccgggattatcagtcgtatagaaatattcgggaataagtccggagaacttgtgattttgaattgagaaatgagtgccaagtctcaaccacgattcagggatgactccagtaaagccatttccagaacaatccaatttcggagtatagattccttccacaagatcttcccccatcaatctatcactttccccaagagactcaggcaaagggccatccatcaaggtattcaaattgatggcgacaaaaccaaggggcatgccggagaaaatgtcaggaagacttgtcattgatgtcctctctatgacaagcacttccaaacggcccagcttactgaaacttggtggaagggtcccggtcactccgggttcattctgaagccagaacttcacacaagaagacaaggcatcaaaacagtccgggaactcacctttaagaccttgttctatgagatacaagcgcaattcatgcttttgcttgttccactcaactccattccacgacgtcaaagaagcatcagttccccagttagtggcatttttccaattcggaccatccatcgcattataaatctccatgagggcagccttgatccgactctcttcattcggttcgatagtcactttgcaggtagcctccttgccgccggccttggctatgatcgtcacctcacccgctttaagggccgtgatcttgccaccttctaccgtagctatggtgttgtcactggactcccaggtcacattcttgtcgtcgacatccgatggagacaccgtggcggtcaaagtcacggactcttcttcagtcagactcacctcggtctggtccaaagtcacagaggaaaccgcaatggacttcttagcgactgtcaccgagcaggttccggattttcctccagccatagcggttatcgtggccgtgcctggagacacggcggtcacagttccgttattgacagtggccacagcctggttggaacttgaccaggtcactgatttattcgtggcgttcgaaggtgagacagtcgccgttaggttggtcgagccgcccacttcaagggtgagagtgctctggctgaccgacacgccggacacggcaatctcgggatcctctttcgggccgcatgaacagacagcggccatagtcaagatggaggagaggagaatagtgaataactttttcatattgaccaggaaaaaatactctggtaaatatatgaaaaaaattatgactatcccaaaaaagatgcttcgctacgctcagcatgacattgagcgtcagcatgatgtgggtgcgctagtacccgaagatctcttcgagggtaaggtgctttacagggccgagggtggagatgaaggcggagtcgaaatcatcttcacgacccaggaacccgtagttatattccctgttcttgatccatttctgctggaaggctttgacatcctccagagtcatgttctggacagcctcaaaaacggctttatcacggctctcggtaaggccgagatccctgagtgacaggtactggttaagcacgcccattccagtgacacgccttgtgcgcaactgcgataaaatagcggtcttagccacctggaaagcatgctctgactcaggcatattgttgataatctggtcaaaagcctggacggcatccttcagcttatcattctgggaagcaatataagcaaagaagtaataatcgtcatccggataagacgggttaatcagggaagccctggcggaatatgccaaacccctggcctcacgcatctcctggaagacgatagcgttcatgccgcttccgaagtaattgttgtacatgatgacagaaggatcattcttcacatcgaacttctctcccctgtctgaatactgcacataatagaactggttggcgtcgtaaggcgcaaggaacacctggttcccgttgacctggcgatgaagaggatgctctttcacaagcggctcgggattatcagctatcttgtggtgatccaagatcatcttccttgcggcgacctcctcagagggaccgtaatagagaacctcgtgtttcttggagtagagatccttgacggcgccgagaagttcctcggaagtgagggccataatctgctcgtcagagagggtggacttggccacgaactcaggaccgtaataaatgtaatcctggagggcggagaaacaggcgctctggctcagtttgctgtccgcgcggttcttaagcacatccgccttaagagcggcaaggatagtcgtgtcaggaacggcgttcaatatgagatcctcaacgatgtccatggcctctccgatattctcgtccaagcccctgaccctaccgactgtctgcacaggaccggcggaaagtccgtaagagcacgccaatgaatacatgtccttcctaatctgggcggcgctgcgtgtcggcgtgccgagatagctcagatagccgaacgcgaggtcaagacgaggatcattctggatgccacgatcaaagatcgcggtataggtggcgatatcgttgatctcattcttcttgtacagaagctcaactcctccggagaggtcatccctggccatatccttggtaaaatcagggaaaaccggctcgatcggagcgacctcggtagcctgtatagcggtaaggaagtcgctctgcatgtggcggttagtctcaataggagtgatagccggagcggcgatcttgtcgatattaggatcctctcctatcctcttgtaagccaaggcatagctattggcgccgagatactcgttcgcccagtcggtgacctgcctcttggtgaccttctcaagacggctcaactgaagggcgtcatctttccacttatgcccgctgatgaaagagttgacgaaggccatcgccctacgtccattgctctcaaactgggacatctggctgagtttgatattattgatcgtggacttgataagttcctcgtcaaagtcaccggtacgaagttttccggcttcctcgagcatcaggtcacggacctcctcaagagactgtccctcacgtggatagcctatcataagcaactcaccgtagtcaggacggccatagttcatcatgtagaatccaccgattttctgggcctggatgagatccaggtcagccagtccggcgttgccgttgtacaggacagaagcgacgatattcccgacctcgctacgaaggatgtccttggagcccggagtcctccagccaagcatcacaaactcagcgtcaaggccatagacggtcttctcgacaggagaagttataggaggctcaggctcatattggagagtcttgatgtccggattgggctgccactctccgaaatacttctcgatgatatccacgaatgaatcgggatcgaaatcaccggagacacagatcgccacattgttgggaacatagaaattgctcctgtggttctcgatgttgatgatcgaagggttcttcagatgctcctgtgtcccgatagtggtctggataccgtaaggatgacgggaaaacagcacagaatcaatagcttccatcgccttggagtcatcctcggtgaggctcatgttcttctcctcgtagacagcctccagttcggtgtggaaaccgcggatgacggggtggatgaacctgtcagcctcgatcttggcccaattctctatctggttggaagggatatcctcctgatagacagtcatgtcattggaggtgaaggcgttcgatccggtggacccgatgatggacatcaatttgtcatattcattggggatagcgatcttcgaggcctcatagctgatcgagtcgatcacatggtagagggctatcctctcctggggatcggtcttggtcctatattcctcgaaaagactcctgatctgatcaagcatcggtttctcggcctcatagttggaggttccgaatctctccgtgcctttgaacataaggtgctcaagataatgggacagaccggttgtctcatgcggatcatccttgcttcctaccctgacagcgatgtaggtttggatacgaggggtctctttgttaactgtcatataaaccttgaggccattgtcaagggtgtagatcttggtcttcaaaggatcaccctttacggtctcgtacttgtgagaggcgcaggagcctgcgaggatcagcgccgcggcggtcgctgccgccagaatcaactttctcatcttcttagatttgtaacgagctgcaaacttaatcaattttcaccgcaacacaaaaaagtggtatatttgtaaattctgtataagagatatggcggcgaaaaaagaacatagggttgagataaggaacaagaaagcctcttttgattatgagttcctggagactttcgaggcgggaatagtcctggtcggcacggagatcaaatccatccggatgggaaaggtctcattggtggactcgttctgctattttgtgggaaatgagttgtttgtcaaggggatgaatgtcgccaagtatttctggggatcgtggggacagcatgagccgctccgggaccgaaagttgttgttgacaaaaaaggagttgcgtcatctgcatcaggcggtaaaagagaagggtctcacgattgtcgccgtcaagttattcatcaatgatgagggtttcgccaaattggtgattgccttggctcgtggaaagaaggctttcgataagagggcttccataaaggagaaggatatcaggcgagagatggagcgcggcgattgatatgtcaagaaaccgtcagaacaagttgcgggaggctattccgattcctcctccggctcctcttccggatccgg

SEQ ID NO: 2257 - DNA, 24125 bp, synthetic construct
  source 1..24125: mol_type = other DNA
  misc_feature 1..24125: note = Synthetic
caattggcacggctccgcgtaatccaacccaagaaatataaaaccgtcttcgcaatttcattttaaagggaatcaaacttataaaaaccgccgcaggacgcgccacaaaaattaaaaacaaagatattataagtccgatgccaattacgggaacaatctgtgatggaaacactaaaagacccaaggttaagaaaagcacaatctgcatcaaccacgccaagccatcatacattttaagaatggttttcttatggattaagtattggttccccaagaagacagcacaaatataaatagctaaaaagccgttacctcccacaaaatcggttacggaaaaagtaataaacatcaatgcaattacaagcactggatataagccttcaaaatctaggttgattttattgattataatcttgcttaactttccaaaaccaaatccagctatggttccaataatcatttgttgaaaaaacaacggaatcatggaggccaatcctttatcctgattgattaccaaacccagaaaagcaatggtcaacacataggccatagggtcgttactcccactttccatctcgagggtgggacgcaagttagcacggagcgctaggtttttagatcgtaaaatggaaaatacggcagccgcatctgttgaggaaactatacttcccaagagcaaactttcataaatggtgaaatctgttacgtaataaacaaaagttcccaggccaacagctgtcaataaaaccccaagagttgaaagcacaaaaccttctttcactataggctttacagctttccagtcggtatcaagaccccctgaaaaaagaatgaaatttaatgaaattatgcctatcaattgtgcgagttgcggatcatcaaagctgatgccaccaatgccatcctcacccgctagcatcccaattcccaagaaaagaactaaggtgggaacaccaaatttataagaagttttacccgctataatacttataaaaagcaataacgaaccaacaagtaaaatgttttcaatggttaaatccaataactttcggtttaatgtttcacattttagcaaaatacgaatttaaactttcaaaaataactggaatctatttttagcacgaacaaaaacatctccacagaattctagttccatattcacaaataaccctaattttgcaagcaatggcaactaacaaaatagaactccgcaccgtaaacgttacgcgttatataactccgctaagagaaggaggttctttacctgctttggccgaagcggacgacgattttaaatacgtgctaaaatttcgcggcgcaggccatggtgtaaaagccttgattgcagaattgttgggcggtgaaattgctcgaacattaggcctgagagtacccgagctagttttcgctaagctcgatgaagcctttggacgcagcgaaggcgacgaggaaattcaagatttattaaagggcagccaaggactcaacttggctttgcactttctctcgggcgccttaacctttgatcccgtcgtaataactgtggatgaaaatttggcttctaaaattgtgtggctagatgcctttataaccaatatagaccgaacggtaaaaaacaccaatatgctcatttggcataaggaactttggctgattgatcacggtgctactttttattttcaacatgcttggggcgactgggaaaaagcagctgtaagtccgtttccttatataaaagatcacgttcttttgtctcaggctaccacggtcgaagaaatacatagtgaaatgatagcactgcttcccgatgaaaaactacaggaaataacaaacctcatccctttagattggttaaattgggaaggcgcagaaatgaatgccgcagaaattagagaagtgtactatcagtttttagtacttagaagaaacaatgctaacaactttgtaaaacaaattcaggatgcccgggaaacacttgtatgaatatgcggtaatacgtttggtgccccgtgtagaacgcgaggaattcctgaatgtgggtatcattcttttcagtaaaggtgccaaatacctaaattgtaaatatcgcattgacaccgaaaaactaaaacttttttcctgtgaactggaagtagaggattttgagaagaacctcaacgctttcgaaaaaatctgctcaggatcaaaggaaggaggccctgtggcacaatgggaattccctgataggtttcgatggcttacagcacaacgcagttcttcgcttcaaacctcacgcccgcacaatgggtttagcaatgatttggatgctactctggaaaggctttttggggaattggtgctttaaaaagttgaggcatcgagcagtttagaattgctcgataatcctttattctgccttacttccggttaattattcagtactgcgaaaaccttccccgtataaaaaatattcccgtgattattacttcttattacaagcattacataacctgaattgccagcgggtattgaaatagaaaaagcaccaacttcaacttattcgaggaaaatctttttggttattatctcgccttgaatatccactttaacaatgagcattcccactgaaaaatagttagtaggtatttcaacttcgttaaacccttttttaaggtcgaagtctttgtttgcgattttttttccattgacatcaaagatttctactgaagcgcgctgatcttttggtagctgaaggcctacttttatgggatttccatacttgcttggattgggataaaccgataaagaatacttttccgagttttcatttgatattttttctgatgaacttgtttgatcgggaaagtttcttccaaaacttccggtcagcgcaccataggcttcaaattcaatgatatgcactccaacgttgaatgaattataattcatatttatccgtatatagcgtgctgtagggttgctaagattaaaggtattcccttggctagttgccggagttgtgtttgcattgtaatcggccaaagttgtccaatttgtcccattcactgaaccttgaatatcgtattgataatatcttacaccatcataatacgtaaaaaccactaatttgctaagatcgtattcagctcccaaatctacactccaccactgagagaaaggactggctccccaccaattatctattgtatagataccatcaaccgcttttgaactcggtctttcggtaccactggatgaggttgttgttttgtttaaagcaatatttccaacaggcggtggattgtcgttacttataatatttactgtggcattcgaaggtgaacccaccgtataaccagtacccgaggaaagtgtaagcactaccgtttctaacggttctatctctgtatcatcaatagggattattgttaagctcccactctgctgcccattggggatagttatcgaccccgaaagtgcggtataatcggaacctggagtagctgtgcctccaacggtgtaattaaccgtaagtggaccgttgttatttattgcaccgaggcttaccgtaaaggttccgctatccaacggattctcggcagcagatgcatctgttgcatttattattacttgaggattattacccgacatggttccataagcttcaaattccatgatatgaaccccttggttcgctgaattataattcatatttacccttaaataacgggctttcggattactgaggttgaaagtatttccttgactcgtcgcaggggtcgtatttgcgttaaaatcaactacagttgtccaattgcttccatctgtagaggcctggatgtcatattgataatagcgattattgccataatatgttgtcaatactattttgctaatgtcaaaattgtttccaagatccacttgccaccattgtggatatggaatcccctgccaatagttgtttctgttatagatgccatcaacagccctatcctttgtagaagctccgttagatactgttgttggttttaaaagcgcaaggtttgttccaggaggaataacatcgtcactggaaatgttaaccgttgcagttacaggggcaattatattataaccagtaccctccgacaatgtgatgatgacggtttcagatggttccacctccgtgtcgtcagttggagtaaccgtaatagtttcgctttgctgcccattgggtatagtcaccgttcccgaaagtgaagtataatcagatccaggtgttgcagacccacttattgtataatttattgtaatcggactgccagtatttaccgaatttaaatttacagaaaaggtacccaaatccaatggattctctcctgcactagcatcaagagcaaccaccgtagcgacagggttgttatttgcgggaactgttctgaaatattgtttccctaaccaaacattgtgagtattatcccaagaactataataggagctgtcagaaagaccagaagctgttgctgcccaagtaccagcactcaccaaataatcatcgttaaatacattttgagctttggaagcagtgaaatactctgtatataaatttaaagcaactcctccaatattgttggcaacatcttgcataattagcgaagcataaatatggtcagaatggtcgtctgggtttatacccaaatcatcatccgccacgttgaatgtaacattggaggagggaatcatttcagaagtaactattgcttgaagtgtggcctccaaattggctaaagaactatatgtagcggttccatcaattgccgaaatgcttgctatggaaccattatataatttttgcaagcttttattgttattcaaaggataaccatttccactgtaatctccatcaggtaatcttaaaaaataggctactgcatttcggtatgaaaattttaaaagctggtgcccgtttaccgttacagtggtttggttcatgttattgccaagagcacctacattggtaaaggtattggacataaaccgtatggctcttaaacttccctcttcccttgccagataataactactgcttgaacctccaccaccatctccagcagttacatgcaggaaaataactttttcgttggcacctttaacactgtggtatgcatttgggttcatgaatagttgccaatcatcgggatgggcaatcacatatacactagtagtttgtgctgttaaatttgagaaaccgaaaaagacaatcagtccaattataaatacaaatttgcttttagttttcatgatcaattaattttatttccagtttaaaatttttcatattgaaaaaattaaaaatttatttgattagcgttcttagggtctaataaaaatccccattacacccttttttaaaaaagggtgtaatggggataggccgtaaagataataaaaattatcttatcctattgagggttatcttttataattattttgtttttaacgtatttaaaagattgacaataagcgatataagttccatttattttcaacaagagttacctaatcttccttaaaggtaaaattttctttggtatgatatattacttcggttgtttcttgaaattgtatgcaaagtattgaaccttcaacccaatcgggttgagtattactctggattaatgttgggggtcaaatcaaaactaaaaccacctattgcgattaactacttaacttctccttgataactgatagtaccacggtcattactgcttatagtaagtgaagcataccctgaatcatttactgacaatgctattaaatacgtattcccttcatcatttacagtagtgtttactttgtattccttatttttttcaatagtaaagtttttaggttttccttgaaaacgcatccctttgtcacgacccaaagccattccaccataagctcttccgtaaaaagggaggttactgacaattttctctggggaaaaggttacggaataaccacttcccactaaattttttggggttccacttatgggaaatgctgtgttggcaacaaactcaaaggttttggaattcaacaagttttcaatgttgctagtattttctgtttcttgggatgtgcttgcttttatatccttttcttgcgctaatgcacttacaagaataaaataaaatagcactgcaaacaataggttagatgttttcataatccttctttttgtgtttaagtaatagtaactaagacaggctactgcaactttttattgcttccaatcttgcaattgtttcaaatagatatacgactccacaaaatcaacctgctcctgccctgccatctttttcaatacgttcaatgcggaaacatagctgattaaatttccgttggaagaaataaacttgccgtcttccatatatctcacaacactatcattttgcactttcagattgggatataacttttgaagctctgctcccccgccaatccaagtcacaatttttttgccatctgcaattccagattcgccaattaaatgagcgccggcacaattgctcacggtatattttgtgtttttgttctgctcttttataaagcttacaatttttggattgtgaacttgggtgtacatatcataagcgctgggaacaaaaagcacgtccagttttggacagttttcaaaagtgtaatccggaactatttttaaaccttcctcacttacaattggatccgaagtttcagcgattgtgattacattaaacagttgcttcccagcctcagtatgttttgtaaaaacatcggccgtggcggtaacttctgtagtcaaaacgccgttgtacatcaacaggccaattattggcaaactgtcgtttattggctttaataattgttgttcagctgcggccacaacttcgggatctgttgggccgctttctggattggtggacttatctgtgccgaaattacagccaatcaacgatagggataaaacaataaatagaatgtttagttttttcattgtaataaaggtttgtgttttagcgatattctggattttcaaaactccaatgcgtaccgtcatcccaatctcttcgggagtttccgtatttgggataaccaccttgcgctttcatcatatttgctaaatggagcaaattataagtcataaaggtagtattcctattggtgaaatcattgtgctttgcaccactttctttgtccatataacttggtccgggaccagcttccccaatccaaccacaatctgcttggggcggaatactgtagcccacatgctgcaaagcatagagaatacccattgcacagtgttttataccatcttcattacccgtaataatacaaccacccacttttccgtaaaaataatattgccccttttcattttgcaaactactcattgcgtaaagccgttcaattaattttgtagcaacagatgatttttctcccaaccaaattggagtgcctacaattagaatatctgctgcgtccacttttttccatatctctggccatgcatcttctttcgcgccatgctctgtcatatctggatatacgccgtaggcaacgggatgatccacaaggcgaatgttttcaaaagaaaccccttcggcttccagaatattttgcgaaacgtccatcaatccttgtgtatggctcatttgcggagattgctttaaggtacagttaatataaagtgcttttagttttgaaaaatctggtttttgcataatatgttgtttttgaaaacaaaactgtcaaaagcattcaaagttattatgaatcaactgaacttttgacaattttgtttcgtagttataattaattattttcgagctgtaaacgccactcccagtccaaatacaaggtgaccaattaatgttgccattaataacattaccatagacccttcgcctggcgccatgcccataattgtcatcataattttagcaaagacaaatgccaaaaagccaaaaagtaacccagacaataatgtatttgcaatttttactttaggatcaaaaagatacacataaacaaaggcatatgcaattcctatcataaagtgcataatccagcccactatcaaaggcattcccaacattccagctaccattgcgggaggcgacatttttggcatccccatatagggagccattaaaattaccaacgacattactattgtacccacaatacctgctgcaattgatttacttacattagctttcatagtattctattttttttgatttaattccattgggatattaatttgtacctcatcgcctacaaccattgttgtagaccaactacctgtgcctacattataatgtgttctatttaagctagtgttaaggagcaatcctaaaatcatagtatctttcatcatagggtgttccatttctcctgtgattttaaaaggcaaagacacttttttggtcacaccccgcattgttagatttccatgcgcaaggaattcattttttgaagtcggctccagctttgttgaaacaaaagttatttctggataggttttagcatcaaaaaaatctggagattgtaaatgagaatctctttttgcattttcagtattaatactttttaccttaacggtaaaactgatttttccactagccgggttttggggatctagctgaaaactgccatcaaaatcggtaaaattacctttaacctcagaaaagaagtgattgattgaaaaattgacagaagtgtggtctttatccagcatccacgtgccggaatcttgtgcttgtgcggtaaaagaaaaaaggaatgccacaaaaaaagcgaataaaagggttttcatttttgaaatcatctgttttgtttttattggtttatacttattaataccaataacttcaaaatatcacccgttgctataaattatttttttgcttttcttcttgctccttgatttttcgtatttggctaatgcacttatgcttctgattaacagcattatgcctagtggtataaccgtattgggtttgtatttcggcaagctccttgcctttgtaaaaaagatcgttgattaacctactgcaatggtcagtaatcttcaacatataacctttcattttatccgcataagttttttcacgttcgatatctatattgatttcttcgtaaaaattgctttcgtgcatattttcgaacgctatttcgcggccggcatttctcaatttcttgaaccagatgttcttacttattgctacaatgtaggtttttatggaagccgttaatacaaaattatccatccgcattttttcaaccaaaacaagcatggtatcctgaaaaacatcatctgcatcatctgtactgccattgttttttaaaacgaaatatttgaccgtatcaaagtggttttgatagagtgttccaaaagcaaaattgttttcgcccttcaagtcatctaataacgaatctttcattgttgaaatgtagcatgcattcctataaaattacatcaaatccagtaattttttcaaaatgcttataagaaaggcttcaggttttaattaacctttaaatctatctcctttaaattctcaattctattgcgctgaaggaaatcgtagtagcaattttatacttgttgtaatttaattaaaaatcttactgctaaaagattgaatagcgtttgtcctatttcgctgaaaaaatatctgttttctgagtttttaaatcttccgaaagtaatcggtctgcgtgttccattaatgctttggcaatagctacagtaaatgcggtctatatgttttagctcagagcctaaaaaaatttgaacaataatgttcgagcaacattcaacaaaaaaaaggtgatactttttagagtaccaccttgaatgttttcacaacggaataatccttattgtgatttgcttcagaattgtgaagtaaatataaacaaatatttttaagtgcacttacggttttccgcaattttgtttcaataaaattatataatttgtaggtctattaaaaaaatcatatttatgaaacgaattttaggattggatttggggactacctctattgggtgggcttatgttaatgaagctgaaagagaggatgaattatcctcaattattaatgcaggtgtaagagttgtgccattatctactgatgaacaaaatgactttaaacgtggcagaagtattactataaatgccgaccgtacgttaaaacgtggagcacgtagaaatctacaacgttataaattgagacgtaaagtcttaattaaaattttaaatgaaattggatttatcaatgattccacaaaacttgctgaagactcaaaagattctacccatagcacatatgattttagagcaaaagccacttcacaaaaacttactaaagaagaatttgcacgtgtccttttaatgattaataaaaaacgcgggtataaaagtagccgcaaggctaataatgaagaggaagggcaattaattgatggaatggcgattgcaaaaaggttggaaaatgaaaatctgactccaggacaactttcatttcagctattaaaagaaggtaaaagaatgctgcctgattattatcgttcagatttacaggcagagtttgatctaatttggaattttcaaaaacaattttatcctgcttcattgatgccacatcacaaagaggcgttagaaggtttaggtcaacaagcttcaggtaaatattttgaaaaaacaataggcacagaaagagctgaaaataaaggtgccgaaaaaaaactacgtttatatgaatggcgtgcaaaagctatttcagaaaaaatggacttgaaagaagttgcctatgtgctgaccgaagtgaataataaaataaaccagtctagtggttatttaggagccattagcgatagaagcaaagaattatattttgacaatttaacagttggtcaatttttatacaatcaacttaaagaaaacccgaatacctctttaaaaaaccaagttttctaccgtcaagactatatgaatgaatttgatgccatttggactgagcaaagcaaacactatccagagcttactgaaaaaataaaagatgatattagaaatataaccatattttaccaacgacctctaaagtcacaaaaagggcttataaatatctgcgagcttgaaggtactgaaagagaagttttgattgatggagttaaaaaaaccaaagaaattggtccaaaagtaattccaaaatcttcacctctatttcagcacttcaagatttggcaaaatataaattcaattcaggtttcggcaaaagataaaactttagaagtgtaccacattgaagaagacaccaaaaaagatctttttgaaaaattgaattgtgttgaaagtgtttcagataaagatttcttggagtggttatttgaaaattcagaggaaaaggccgaaaattttaaggtcaatttcaaaaaactagaaggcaacagaacgcaaagtgctttgcttaaaatatatgagaaaattgttgatttagaagggcatcctattgaatttaaagagatgaacggcctagagttggtcgacgctttaaaatcaatttttcataccgttgggataacttatgaaatactagaatttaatcctactttacaaggtaacggttttgctaaacagcctagctacgaactttggcatttgctatattcctatacagatgatacttcagaaactgggataaaatcacttattgagaaattacagaacaaatttggctttaaggagcaacacgcacgattgttggttaacgttacttttcagcaagattatggcagtttgagtgctcgtgctataaagaaaatatatccttatctcgaagacggaaaacgttatgacgaagcttgtgcgcttgctggctataatcattccaactccataaccaaggaagacaaaaaaaactggaaatcccaagaacttaaaatattacaaaaaaatagtttacgaaatcctgttgttgagaaaattctaaaccaaatgatacacgttgtcaacggcattattgaaagtccagaaatgggaaggcccgaggaaataagagtagaattggcaagagagctaaaaaagacagccgagcaacgtggcgaaatgaccaaagccatagaacgggctacaaaagaccatgataatttacgtgaaaaaataaaaaaggaatttggaattccttacgtgagcagaaaggacttgattaaatataaattatacagagaattaaaagtaaccgggtacaaaacgctgtattctggcacttacataaaacccgaagatttattcactaataaatttgatgtagagcatattataccacaatctgtattatttgatgattcattttctaacaaaacattggaattaagggacaataatcttgaaaaaggaaacgaaacagcacttgattattgtgaaagaaaaggatggctttcagattttaaagaccgtgtggaagaagtctttaaagacaacgatggcattgggtatatgaaacggaagaaactgttgatgaccaaagaagagattcctgaaggttttttgaatcgcgatttgggcaattcagcttacatcgcaaaaaaagccattcaattattacaggtggtttcgaaagatattgtttcaacctctggaacgattacagcaaaattgagaagtgattgggagttaatcaacgtactccaagaattgaattgggaaaagtatgaagcgttggggttaacgtattaccaaactaacaaaaacggtaaaaaactaccacgcatacaagattggaccaaacgcaatgatcacagacatcacgcaatggatgcgattgcggtagcttttacaaaaagggcttttattcagtacttaaataatgacagcggaaaaagcagtaaaggctttacaattgaaaagattaaagaaaaatatacttttagagataaagaaggtggtagaaaatttataaagccattcccaactattcgtgaagagagtaaaaaacatttggaacgtatcctaatttcacataaagcaaaaaataaggttgtaaccaataataaaaacaagattaaagttgaaggtggtcacctattaaaaaaagaactaactcctcgtggacaattgcacaaagaaactatttatggaaaatctattgaatataaaaccaaacttgagaaaataggtggtgcttttgacgaggaaaaaattgcaacagttgcaaagaaaaaatatcgagagttacttttaaaacgcttacaagaatttgatggagatgcgaaaaaagcatttacagggaaaaacagtctctctaaaaatccaattcttttaaatgaaaatggagctgtgttaacagataaagttaaaaccgtagtttttgaagataggtttacgataagaaaagaaataactccagacttaaagattgacaaagtagttgatgttggattacgcaaaattctccaaaaacgcttggatgattttaacgggaaacctaaagaagcatttgtaaatttagacgaaaatcctatttggttaaacgaagaaaaaggcattaagtttaaacgaattacgattacaggtgtaagcaatgctgagccattacacttatcgaaagaccatcttggcaatgaactaaaagacagctatggcaatgaaatacctgttgattatatcagtactggcaacaatcatcatgtttcaatttatagagatgaaaatggaaatttaaatgaggaggttgtttcgttttacgaggcagttatcagaaaaaatttgggacaaccaatcataaataaaaatcacgaaaatggttgggaatttcttttcacaatgaagcaaaacgagatgtttttatttccaaacgatgattttaatccttcggaaatagatttgaaagatttaaataacagaaaaattattagtagcaacctgtttagggtccaaaaattatcaacaaaaaattatgttttcaatcatcatttagaaacagaagcagttggagcagacacattcaaaaataagaaagagctttcggaaataacatataaattttaccaaagtgaaaagtatttagaaggcattattaaagtgaggctaaaccatctaggaactattgtgcaaattggagaatattaaatattaaacaatgataaaacgcaccctctttttcggcaatccagcatacctaagcacaaagaacgagcaattggtagtaaactttcctgaggaaggaaaagcagaagtaaacatcccgattgaagatttgggctatgtagtacttgaaaatctgcaaattaccattaccaatgggttgttaatgaaattggtgcaaaacaaaaccgccgtaataacgtgtgataagcaacacctgccctgctctctgttacaaccattggtagggcacacagagcaaacagaacgtatgcggcatcaactaaacgccagcctacccttaaagaaaaacctgtggcaacaaactattgaagctaagattgaaaaccaagccaaccatttattaaaaagggaaaaaaatgccctaaaattaaaacgctgggcaaaagaagtaaaaagtggcgataccggcaatcacgaagcaattgcggcagcgcattactttcagtcactttttgagaacgtagaaaattttagccgaaaccaaaaaggaattccgcccaataacctactcaattatgggtacgccattttaagagccgttaccgcaagggctttaattagtagtggtatgttaccatcggtaggtatttttcataaaaataaatacaatgccttttgcttggcagatgatattatggagccttaccgtatatatgttgattccttggtttatgatttggtagaaaccggaggaaatattagcgatttaacaacaaacctaaaaactgaattacttagcgtacctgcaatggacgtgctgctagatggtaaatggagcccgttaatgacagcaatgagccgaacaacaaacagtctttatgaatgtttttcgggcgaaagcagaaagattttatatcctgaatttaattaataacatcctcctagcctctttccaaagtggagtaatttatgaacgaaaataattttacaaggctaaaccaatacagaactatgtgggtactcgtattttttgatctaccaacagaaacacggcttgaacgaaaagccgcagctcgctttaggaaaaacttgttagatgatggttttgccatgttccaatttagtatttacatgcggttttgtgcaagccgtgagaacgctaccgtccatataaaaagaacgcaaaacgcattaccaaaaaaaggaaaagtaggaataatgcagattaccgacaaacaatttgggatgatcgagcttttcaacgggcaaatggaagtacgagccgaagcaccctcgcaacaactcgaacttttttaaaacctaaaaagtacggtcaatctcagttgacatatcaacttttatgctgaattttatttttcacaaacacccttaaaaatcaggataccagctttttagggctggtatcctgtgattaatcattaaaaatacaattctgaaagcaaatcacaacttacaattcgcaattatggattgtataattcctgtgattaatcattaaaaatacaattctgaaagcaaatcacaacgattagatgctataattgtgaatgtgctttcctgtgattaatcattaaaaatacaattctgaaagcaaatcacaactactattaattgaatagcaataaacttatacctgtgattaatcattaaaaatacaattctgaaagcaaatcacaacttaatgctattaatattattaatactaatacctgtgattaatcattaaaaatacaattctgaaagcaaatcacaactcacgaattgaagtaaaattttttagtgtcctgtgattaatcattaaaaatacaattctgaaagcaaatcacaactcaaggccataattgccaaaattgttatcacctgtgattaatcattaaaaatacaattctgaaagcaaatcacaaccggagatttctttgaaaatgacagcttcaacctgtgattaatcattaaaaatacaattctgaaagcaaatcacaactttcataactaaaccgctttaaccatttcacctgtgattaatcattaaaaatacaattctgaaagcaaatcacaaccattttaatttcagcaattcggttacatcgcctgtgattaatcattaaaaatacaattctgaaagcaaatcacaactctaaatggttttttaaaatcctgtaagaacctgtgattaatcattaaaaatacaattctgaaagcaaatcacaaccctacgcaaaacactacgcgacaaagatttcctgtgattaatcattaaaaatacaattctgaaagcaaatcacaacctacgatacagaatttcaaattgtaactgcctgtgattaatcattaaaaatacaattctgaaagcaaatcacaactaacaaatccttttgtacttaccgactgacctgtgattaatcattaaaaatacaattctgaaagcaaatcacaacgcgccctgctgtcttaaatgttcaaattgcctgtgattaatcattaaaaatacaattctgaaagcaaatcacaacagaaccggaacgctaagttataatggtccgcctgtgattaatcattaaaaatacaattctgaaagcaaatcacaacctgttctatactggccgcttgttgtaaatgcctgtgattaatcattaaaaatacaattctgaaagcaaatcacaacacacctcattggaagtgctgatgctacggcctgtgattaatcattaaaaatacaattctgaaagcaaatcacaaccaggctcagataatagagttcgtttttttacctgtgattaatcattaaaaatacaattctgaaagcaaatcacaaccaggctcagataatagagttcgtttttttacctgtgattaatcattaaaaatacaattctgaaagcaaatcacaacacagatggctcagtctaccccataagcggccctgtgattaatcattaaaaatacaattctgaaagcaaatcacaacacagatggctcagtctaccccataagcggccctgtgattaatcattaaaaatacaattctgaaagcaaatcacaactggtacttcccacttggtctatttcaactgcctgtgattaatcattaaaaatacaattctgaaagcaaatcacaacgagtaggtaacgggattctattgtatagacctgtgattaatcattaaaaatacaattctgaaagcaaatcacaacggctttttcaataagccgattgagcaggggcctgtgattaatcattaaaaatacaattctgaaagcaaatcacaacaagtacgggagccgttataaaggcaatgacctgtgattaatcattaaaaatacaattctgaaagcaaatcacaacttagaatactatttcaatactattccactcctgtgattaatcattaaaaatacaattctgaaagcaaatcacaacagcgccattaatggaagataattcaaaccacctgtgattaatcattaaaaatacaattctgaaagcaaatcacaactataaaataaaaacgtatgcagacgttgacacacttaattgagcactcccaacttataaaccaataaacccataaactcataaactcctaaacccataaactcataaacccataaacttttaaacttttaaacatttaaacttttaaaccttcaaatcaatctcctttaaattctcaattctattgcgctgcaagaaatcgtctatgctttcaaaatgttcaattacacgtttgtccttaaattcaaatactttttcagaaagaccttgcaagaaatcgcggtcgtgggaaaccaaaatcaatgtgccatcaaactgaagcaaggcttcttttagcacatctttcgattttaaatccaaatggtttgtaggttcatcgagaatcaaaacgtttactggctccaacaatagttttaccatcgccaatcgcgttttttcacctccggaaagcaatcccacttttttatcaatatcatcaccgctaaacataaagcggccaagaatattttttatctgcgtgcggatgtcgcctttggcaacttcatccacggtttggaaaactgtgagttccttatctaaaagtgcggcttggttttgggcaaaatagcccactttggtgttgtggcccaacgcacagcttccctcaaaatctatttcgcccataatggctttgatcatggtggattttccttcgccgtttctacctacaaaactcactttttggccacgggaaatactcatattggcgtctttaaaaaccacaagatcaccgtatttttttgtgagaccttccactacaaccggataatcgccactacgttgtgcaggtggaaaacgaagcgccaaagcggaagtgtcaatttcatcaatttcaattacctgcaacttttcaagcatcttttctcgagagtttacttgattggttttggagtaagtacctttaaatcgatcaataaactgttgggtctctgcaataaatttttgctgctcttcgtaagcttttatttgatgcgatcttctatcggcacgcaattgcaaataatggctatagttggctttgtagtcgtaaatccttcccattgtaacttcaatggtgcggtttgtgatgttgtcaataaactttctatcgtgcgaaataactattaccgctttagctttgttaagcaaaaaatcttccagccaaatcacagattcaatatcaacgtgattggtaggctcatctagtagaatcaaatccggcttttgaagtaacagttttgcaagttcaatccgcatacgccatccaccgctgaattcacttgtttgacggtgcaaatcgcttcttttaaaaccaagacctcgcaaggctttttctacttcagcctcatagtttatttcttccaaagcataatatttctcaccaacttccgctaccttggtaatgatgttcatatattcatcactttcgtaatcggttcggatttccagttctttgttgaggcggtccatttcgtcccgcatttcaaaaatttgcttgaaagctttggaagcttcctcaaacactgttgcggtatcatcagtcaacaaatgttggggtaagtaagcaataacggcatcttttggcgcacgtacatttcctcgggtagctttttgtacgccagctattattttcatcatagtgcttttccccgcgccgtttttccccattagagctattttgtcgttctcattaaccacaaaggaaacatcgctgaaaagtgtatcgccactaaactcaaccgctaaaccatctattgaaatcatatcaaatttttaaggctgcaaaactattaaaaagaagtggattagtagttactgtcgcacaacttgttctctgtaacacttcaacttggaaaacgtaatgaggtagctatcttctcacaggttttactgttttaaattcacattaatattgtaatttcacacctcaataaatttcctctccccattccaattgcccttaaattcctacaaaaaacctatgtgatcttaaattttcaatcacatcagtatgccattacatcattttttaaacgatcgctttttgcgcttagagggaaggctttacagtggaaacttatctgaagttcaattcaaaatagaagctgcattagacaagacccaaaccttaattgtcgatttggaccccttggaaaaattcgatgccgcaggggcttatatgctttatattgcttcagaaaaagcacgggaaaacaacaaacaaatcatcctgttttgtagggaaaatgaaattgtgaaacttgttttttcatttgtgggcatccattattccagcaaactcccaacacctagtttttaaagctttttatttacttttcaattaataattggatatgtttaccaagcaatcaaaacttccgctatgcttggttttaattcatttagtaagagcaattgtaaccaaatcgagttacggaaatttttggttgcattctttaaactgaaaatcatcttcccgaattaaggcgcacctacgagtgtgccgtaactgtttccttttttaaacatacatccaactctaaacaccgaaacttttggtgttgccaactcgttttataatttattctgaaaaggaaactgggatgttaattttctatattttaaagaatggtatcatggcaaaaggaagaaacctaagaacctcctcaaaagatgcaaaagcattgaaacaggaaaaaataatgaaaaaactggaagaaaaaaagatgaaaaaacgcaaatcgcgtgtataaattttgtttttgaattgttggtttgatgatgataaagggccagtgtcaatgacaaatttttggccggccctttttctatttaattcaaaaaagaataaaactcctctgaaacatcatttaaaaaaaatcaaaaacccgcactcataaagtacgggttttatcaaattaagtggggagaaataagcctgtggcttagttcaaatataataaaaaaatgaattaataaccacttgctcaaaactcagtgcattgtacatattaactcctaaaaatgtgccgtcagcgcaagaataaaattcctgccagcgcccgaaattcccgaactgtatggacggtaacgctggtctgtcagattctcaatgccgccgctcacatcaaaggtatctgtcattttgtataacgccttaaaattaagtgtgtaccaagctggcgaatagggattgccgttttcgtctaatgcatagatttccgttttccccttttcctcatcgggaagatcgtcaaaatccttttttccttggtaattaacgttcaactccatactcagtttattcgctttgtagtttaagcgcgatacaccaaaaaatggggaagcatggcgcgatgggctagtatcgccattgtcaagttcctcttcgcctttttggaaattcacatctgtggaaaagccaaagccttttggcaatttcacctcaacaccggcttgcaatccataaacgtgggcaacggctgcattttgaatggcttgtacctgacttaattcgccttgatacataatgctgtcctgcccattcagtttataatccctacgcaccaaggcatcttttaaggaggtgtaataccccgtgatatcaacttttaaaacatctccaaaaaccttggcaattcccaaatctgcattataggcatattcaggtttcaggtctgggtttggcaccacaacacttcctggttcagagtcgaacacttttcccacatcgtctacattgggagctctaaaagcactgcccaagtttgtacttatcacccaagaatcagcggggcgataaacaccacccaaacttccagtaagcgctccattgctcaaacttgcttcggtaaaaggaaaaggataaaaagcagtatcaaattcggcatccaacaaaacatggttataacgcgcaccggcacttaatgtgaaattgtcgactaccttaaattcatcggtaacataaactgccaaagattgccatttggattgtggatagcgagcaggacctacttcagaaatacctgttgaaatatcggtcaattcccctttagaatttatgtcgttcaacacgtattccaaaccgtagaaaaaagtgtttttctcagctgttgcctttataaaatcaaggtttaccgaataggcacccacttcttcactctgtgtattgcgttcagttttgttgaaagccctgtctattctgctctcctcaaaccactgatgcgccaagcgaaggctcatttgatcaaaaactgaattgtttgcagtatagttaatgttcaaattattcatcatccaaatctgcgggccatagtcccattcagcataacgaggcaatccattgcgaactctttggttcctatcatatctgccgtagggcgaggtttcagaaaagtgaaatccgtattgaaagtcccaacgttcattaggttgaaagcgaattttctgcattgtatttatttgcgaaaatgccgaaggaatctgcaacaatttgtcttcctgagttatcacaacgtcggtgctgtcctgtctttgcacgtaataatccttaatgtaatcatcgggcccgtggcttccttggcgtagattatcataatcccacgaactaatactcgtaacgaatgcccactttttaaaacccaaattcacattaaaatgccccgttttttccttattggcggaagaatagcgagcaagggcttttcccgtaatcaaaggtttttctgttaaggaaagctgtggtgttaatgtttgaaaactcatcactcctccaatggcatcacttccgtagattactgaaccgggaccaaaaagcacctcggtattttctatggcgaaaggatctaaattgataacattttgaaggttcccggaacgaaatatagcagtgttcatacgcactccgtccacagaatacaacaacctgtttgtcgcaaagccacgaatcattgggctacctccaccctgctggcttttttgaacaaacactttccctgaagcacttaaaagatccgcagcagtctgtgggttttgcaatgccacctcttttgccgaaatagaaataatttttgaaggcacgtcatcactgctttgcctccaacgcgagccagagattactacttcgtctaaactgaaattggaggtttcaagtaaaattttaaaaccctccgatgccaattttaaataactttttataactgttttatagcccaaactccgtatttcaatcttttccaaatctttaaaagccgaaatatcagcctgtcctttagaattagtcgtagcgtagtgattagtctttgcatttgaaagcgttaccaactctatagcttcattggtttgctgatctttaatggttattgtttgtccataggagcttcccacataccccaacaataaccacattatgaatatttttttcattttatggtttgatttaagttaactaaagtccaaaaagtagctttcaatgtccgttcgagcgcagtcgagaactacactggatgaatgaacaatttatgtctccactgtggcttacgctgagcgaagtcgaagtgctcgaccagacagtctttaagtaatctacttttcaaacattctaaaaaattgctaattccaaaatggaagagcaactacataagtttgatctatttatatgttaactatacttcggaggaggcgtaggtggcgttaagcgaatggaattaaaaatattgggatgcatactgtcttgaaatacaagctgtgcattttgtgaagctgtggcttgccaattaaaaggggctgtacagaaaaaggaccacaggtaggtataaaacccttcttgggcttcgcggtggtcctcgtcttggtcaaaggcgattgccaccattttctttagttttttatttagatcggtttcttcgtaatccaaccaacatcggtagaaaattgaatcgccttttatttctgaggaaacaatatcatacatcttgtcattgtattcaaactcttttgaatgttcccaacgcaattttgtttctgcttctttttttgaaaactttagaagtatcaattcctcctgatccattccggcaatcagcttccattttatttcacgctgaatagccgatttttcaaactgcagatatagatacaccgttacaacgggtgcaaacaatataaacaatagcgatatggagattattttttctttcaatggaaaaatcaacgattgcccaaatgtcggaaaactgaaagtatttgcgcgtccatttttattttttattcttctggtaaaaaattaataaaaaaaccacccttattacagaatggtcctttgttataaattttaaaccttcaaaaatcagtaccagccgtgtatattgtacataactgtactgggttggtttttggcataggccatcagcacctgctgcgcacctttggcaatggcaatattggcatccaatactttcagtttatattcccaaggacggtcgctgagcg

SEQ ID NO: 2258 - DNA, 24122 bp, synthetic construct
  source 1..24122: mol_type = other DNA
  misc_feature 1..24122: note = Synthetic
ctcactatttatgactatacgtacacatggataggaggtattaatgaaggtgagtataaattactataccaaacgctgaataaaacaactgatgatatagaagccgctaaagagaatgcttcaaatatgactaatgataactataatagtttagaaaataaagacttcacaatatccccaccctccacaataacccacacttctccaatatcaataaccaaagtaaaatgccacggagatcccacaggctctataaccataaacggaataataggaggtaatacaacaggagattacgaatataatatagagaaaataactaatagtaataattacccatttaccaataaagaaaacatagatataaacaataacacacttactatatctgatatataccaaggagaatataaaataacaataagaaacgttggttgtgataatgatataggtactgtaattacagctacagtcggagagcctttatctcctttaaaattagaaaacgaacttcctattcatcctactggatatggtcttgacggaagtgttacagtaaatggttctggaggaactgagggatcaggatataaatatagtattgatggaattaattataataacactactggtgtatttacaggtttaaaaaatggtaaatatataataaaagtaaaggatgctaatggttgtataatagaaaaaggaatagatatagatattgtagaaccccctgagttaaaaatagcagctggaatacaagatagttttattctttgtaaaggaggcagagaggcttcctatagtctgagtataaaaggaggtaattacaagtcagtgaagtttgatggagataaaaactataatataaaatggtatagagataatatagcaggagacagaaatgaggaattaatagaaaatatatttgaagtacccttagatgaaatatttaaagaagctccttacaattgggtagaaaggtatagtatatctagtttgaaagcaggtagctatactatagacgtaatagatgctagtaacaataaaacctcacacacattcgaaataacagaacccgacaaactattaataacaaatattagcatcctagacgtatactgctatgcaggttctgacgggcagataaccgctaatataactggcggtagacctccttaccgagctgttttgtctaattcggattatgaggaaatagatattttagaaaacataacaggtacagaagctgtgtttgaagggctttctgaaggagagggctactctatagatatatatgatagtaagaattgtactgcaagtagttatgatgtggaagattatgacagaggtatacaaataaaccaaccatccgaagagctacaagtcgatataataaccataaaagaacctacattcttcggagctggcgacggaataatagaagctactatacaagatggtactagtgctgacggaacttataaatacacttgggtagataatacaggtaacgataaagtcttaaatacatctgtacgaaaagaaaatggtacttatatagttacccttattgatatacatgctggggattattatattactatagaagatgataattacagtttggctacttccaaagaggaaaattgtagtattactagtcgtcattacgacttagatcaacctgataaactagagatagattatctagatgtagataccgaaatatcgtgtaactcagacaatagttacgacaaccctataggcgacggagtgctaaaagtagttggtaaaggaggagttaagttcgatgtcggttctcattacaaatacctatggcaaaagaaagttaatggagtctggatagccactggtgatgagcaagaagacactctgggcgaactagccaaaggagactacagaataaacataatggatgctaacggagttatagttggtgaatatgctaatgacgatttgtcatcggttacggctgaatataaatcattggaactaggagaatacgaacaaataaaagcaacttaccaaacggaaaatgtgatttgctacaatggtaacaacggacgtatagatctatcggtaacaggaggtataggtaattatgatattacttggagcaacggaggcactggtttggtacaagaaaacctaaaagcaggtatttatatggcttatatacgtgatagtagagactgcgagctagtaaaacaaatagaaataacacagacaactataatagaaatagaactaataggcaaaaagaaccctacttgttatggctctaccgatggttatgctgaaataaacataacaggaggagtcgctccctacatcataaaatggaacaataacgaaaccacaaacagaatagaaaacttagttgagggtagctacacagcaaccataaccgatgctaataactgtattatgactaaaaccatagagctaaaagatccgtttgcaactgtattgtatctgggcgaagacaggctactatgtaacggacaacaaaacatcatagacataaccgtcgagggcgatgcaggagctacttacgactggatatcagacaatggttttactagtagtgagccaatagtaacacttaccgaagcaggtatatataccgctatagctactaccagcagtggttgtacggctagtgggactattactataacggctagtagcgtagaaatagattctgagttcttagtatcgaccgaggcttatgcaggcgaagagataactataataaacactagtcagcctataagtgacgatgtggtatggatattccctgagcaagtaactatagttagcgagcaggaagatactataactataatgtttgaagaggctggaatatacgaattgatactaaggtcgtaccaaggagactgttatgctgactatgtgaaaccgcttatagtatcggaggctagggaatctgatgaggaagatgaagatactgtttatttgaaggttttcgatatgtatcctaaccctaacggaggtgtgtttgatgtagatatagaactgagggaacgtggtaatataaggcttactttacttaaaatagctagtggtaatgtggtagatactatagacaaaacagggaaggatgagtataaggtagaatatgatttgagtttatctcctggggtatatctgttgatattggagactagtgcgggtaggaaggtgaagaaggtaatagtgctgtgatacacaccccttagtcccctctcgagaggggaaactcttagcacgtcccccctcttgagagggggttagggggtgtgttaaggttagggggtgtgttagggttagggggtgtgtccttgaaccctgattgacagcaaccgtgtccttgaacctgagcaacagcaagtaagcaacagcacgtaacacacagagcgtaaaggacacaccccttagtcccctctcgagaggggaaactcttggtgattaacagcaataaagaacaaatgacaaaaacaattaaaacattaatactaataacactcttctcttgcctcaaagaagaagctatacctataactactgccttcgattttgaaataataaacaacgactttactgtacctgtcaaaatagtgataaccaacaatagtaaaggagctgagtcttatctttggacattgaaaggttctgatcttgactctttgaccgagataagcccacctatagctacttatgacaaggcaggtgaatacattataaaactaaacactagtaacctagacttagaaaaaggagagctagagaaaacatttactatctacgacaatataaatactagttttgctatggaggttatagatagtaattacccccctgtagaggttatattcactaataatactgtaggtgctaacaggtttttgtggacttttgaggatgctaatatagtctctacggtcagccaacaccctgacaatgtagtattcgagactcctggtattcataatattttgctcgaagttggtaatggcatggaggaatatagttatacttctcaggttgaagtattggacgatatagagatagggttcagccatagcgttgctttcgaagatatggactatcaggtgcctgttaccataaactatgccgatgaaagtattagtgctactggctataaatggacatttgaaggaggcgagcctgctactagtactatagctaaccctagcgtggtttatagtaccagtggcacttatactgttagtttagaaatatctaacgacaagaaggctaggattcttagtaaggaagtaactttactgcccgatactaatatttacaaatacaatgacataaaactaggtataaatatagcacataacaacaacgagataggtgcatttttctctactattacaggtgaggtttacaataaagagcaagtagctaatgtagatggtaagcttatagatatctgtttttttgggctgaatagtggttttagttttaaccagtttataagccctactacggttagtgattttactttttatactatagaaggagctacttatacccagtttatcaatctgcaagaaagttgcttgtgtactgctagtatgactatatctgagtttgacctaataagtgatgaaagtggttttaatataaatatagaagaaactttcgaagggttacaagaatttgacaacaaccaagtacccagaatagtattatttaagacttatgacggcagaaaaggagctattaaggtaaaagagtttgtagaccaaggtaccgactcatatatagttatagatattaaagttcaaaagctacagtcttgagatatataataaaaacacttatttttatttctattatattctttagcatgaatagttatactcaaaatattgatatagctagtattggtaagggtaaagctttcaatattaacggaggtttatcatctaatatggtatataaacctacagctaaaactagtactgaggagtttaattattatatgcaggggagtcttaatcttagcttttatatgttcactatgcctattagttatagtatttcgaacgatgaaagcctacttaatagcgatagcccgttcgattttaacacccttagcctccaccctacttacaaatgggttagcttgcatataggcgatgttaatatgagtttttctccttatactttgaatggatatcagtttactggtggaggtatggatttatcccctcctataggtctcaaaatatcggctatgggtggtgagttgataaaaccagtgaaatataatagccaagacattagcatagagccccagtataagagaatgggctacggaataaaactaggcttatcgcgagatcaatacaatattggtcttattttatttactgcaaaagacgaaatatcttctataggaatacttcccgaagacagtgaaatatcacctaaagaaaacctagctattcagctagatgctagtctttcggctatagaaaacatagaaataacggttatgtatgcctcttcggctatcaccaaaaacagtttgagtgatactggtaacaacaaaaaagaagggcttgcctctttactgataaataacaaaagttctaccgagtactacgatgctgtttctaccgatataaataccaaaataggaaaatataacttaggtataggctaccagagggttgatactggctacgaaactttaggtgttttgtattctaataacgattttgaaaatatacaactaagcgtaggttctagttttatgggaggaaaactaggtgtgaatactagctttggttaccagcgagacgaccttagtaatataaaagaaaacacaactatcaggaatatagcttcgttgagtttgaactatgctcagtccaaaaagactagttatacggcttcatattctgacacgtcctcgttcaccagtgccaagctaaaccagttcgacactatcaacgacgataatttgttagacaatgcactagataccttagactacaaacagctcactaggtcggctagcttctcaatgcagaccaatatttcgaagaaaaaagatatagtcaaaagtataacaactaactataatgtatcgcaaactgctaatgagcaagcaggtattatacgtataggggctttgtctacttttcataatatgggaggtggttatagcgtcaatatcaaagaaaaagaccttagctatagtactatgctcaacataacttatagtactgttggcagagataagtcttatactgtagggcctacggctagcgtgagaaaaggtttttgggataaaaagatgagtagctctatatctagctcctataaccagactcagagcgagactagtactagtagaaacatgaatatgaggtttaataatagttatactttgaaagagaaacatgtttttgctctcaattcggtttactctgtcaaatggttagatgcaggtaataccgagaatataagctttacctttagttataactatagtttttgagatagatcttaagaactatatattacaaccccagaggggtgaaatgttaatagaccgcagattataaccccagaggggtgaaatgttcatgaccattacctatctttaaaatcgttagccttaaatcctatcagattaagtttatcctctgccctagttactgcggtgtacaaccaacgataatacgacaaactaggaccgtcgggcagataaggcttctctacaaaaaccgtcccccactgcccaccttgcgatttgtggcaagtcatagcataagcaaacttaacctgtaaagcattaaaaaacttattagcctttatctttatcattttctggtatttactatcattagaatagtctttacttatttcctgatacaatttattagactcttcgtaactaagcgaagcactttccgaagtcaaagtatctaacaataatacagtatcgaacggttgttggtttttataatcgatcatacgtactgtagcttcggcaaacttataaccgtacaattcctttattttagatattctggttacctcacatatatctccattggctataaaaccagcatcagaactctcgtctatccaaaaataattattctttactaccattatataatcgccaacggctatctcgttttcatgcccttttatcttggttcttatctgctgattatattgattagccctcttattcgaccttactattataacagtatcctctaccccatccttactatatgccgtttctatagcgtcttgtatatcatctccttgctctagccagttaacatctttataattaaggtcaaacttatagtcatcgaatatcgcattatctcccgaaagcatttgcctcatagtagtagcattgtacaaaatacccgaatcgctttgttgcctcaccacttgagtaagctcgtattccaacaagtctttatcgtatttcactattaggttttcgctgtctaaagcagggctcaagtcttgttttactggtggtaactgtgccgtatcccctattagcatcagcttacagtttttgccattatagatatattgcattaggtcgtcaagtaaagatccgtcttcgaaaagctttatactattacccgaatcggatatcatggatgcttcatcgactacaaatatagtatcagaagccttgtttttttgaagaacaaactccatagccccattactttttttggtagaatagtatattttcttgtgtatagtaaaggctgtcctattagaatatttggttataacctttgcagccctaccagtaggagccaacaaaactatcttgtatttggttttgctaagagcctttactagcgcacctatggtcgtagttttacctgtaccagcatatccttttagcaaaaatataaggtcttcgttcttttggcagacaaactccgaaagcccttccaatacttcttgttgtatgctagtcggctcgtgtttgaacgactcgttaagcaaaactaaaaactcttgactactaggtgctttcattttatttgtatttgaagacataaaaaaaacctcaaaaagaggcatttttatctgttgtataatctatatacaaatgtacaatcttaattagaatatatatttaaaattcgctaaagtttatttgctttttaaaggttgaattctgccagtaagaaaaacattttcataacaaaagctcataaattataaaattcatgagcttttattaaaaatagatttaaaacaaatctacataaattctaaagaatcaaacaattcctctagcttaccactagatggtcttggagcataagcattgactattttaccttctgggtccaataagacaaacctaggtatactattgaccatatagtcatctaaaaactccgcttggggatttccgttagcataaagctgcactcctctcaattcattatcttttatcatctctctccatttgtcatgcgcattgtcactgtctatagatatactcaaaaactctatgtttttacctctatatttatgttctatttctttaagagccggaaactctcttacgcagggtccacaccaagtagcccatatatctatataaacatatttacctttcaactcagcaagcgatgtagttcctcctttgtagttttcataatctttgaaactaggtgactctttgccttttactaacttatttgtttttttataactcaccttcaattcttccttaaactcactatcggttaataatgccattaactgattgtaaataaactctgaatttttattgttagtatttatctttctggacaacattttaaataaatcgtcttttataatatcgctcttaaactccgaaacataatctataaaaaccttgtcttcagaaagagttttatcgtcaagtatagctttcattaccttgctatgaacagacattgccaatatttgtttaaaataatcactttttttataagtctgctcatcgtctaagtctaaactagtgatttcatcagcataactatccgcaaaactttcactatcgtttctaagtatatatctttgaagattgtataaataaaaataattattttcgctttttgccatttcaacaaaactagagttctctattttataacccttaagtagtgagttacaactctccttataagtattcaaattctttttaaaatcctctggtttcattttaaaaatatcgccaaaataagtttcgctcttttcttctagcaaatacaattgtgccaaatagttattcttttcagaacctatacctgtataaactatagactcatcgaatagtttagtatcgatagttaggtttatatcatcgccttggtcaaaatacaaagccgacaattctggacctacagtaaaactatactttccatcgctaagcctcaaagtatctgaaaacttaccgtcttcatcaatatctattttttgcgaaaatccgttaccagttatattaaccgttttggcatcactgttagtaacagtccccgaaaacaaggcgtaatctacgtttttactcacctcctctttacaagaaagtagagtgataaaagctaaagcaataattaattttttcatttttaattgttttttaattgtttgtatgtgtttatgacgattgtgtagggggtttgttacaagttggttggtgaaactaaaaaaaacgacttccaaatgaatgaaagccgctttgaatgttttcacaacggaataatccttattgtgagttgttgtctatatttcgatgtaaatgtaaataaaatatttcaattaacagctgttttattattaataaaaaatatttaaacataattcatgttttttatcgtcttttataaatgtaggcttgttattttttatatatttaccctaaaaatacaatataatgaagaaaatactaggtttagacttaggaactaccagtataggttgggctttagttaacgaagcagataataaaagtgaggtttcagagatattaaaactaggagttagggttaatccattgtcttcagatgagataaaaacatttgaagaaggtaaagctcttactgtaaacttggaaagaacattagccagaggtgctagaagaaacttacaaagatttaaacaaaggcgaaaatttcttataaaagaattaatagacttaggctttattaccaaagacacttctttagccgaaacaggtaaacatacaactcacgatactctaaaagctagagctaatgctgtaacccataaaatagaaaagcaagattttgcacgtgtattactggctataaacaaaaagagaggttataagagtagtagaaaagccaaaagtagtgacgaaggagagttaatagatggtatggctatagctaagattctacatgacaaaaacattacgcctggtcagtttgtgaatgacttgattaataaaggaggtaaatatgttccgacattctacaaatcggacttaagaactgagtttgacaaaatatggaatttacataaaatagaatacgccaatgtactaactagtgagttttacgagaaactagaagggcagggtaaagtagttacgactaagctatttttgaaagaacacacaatatatactgccgaaaacaaaactaaagacaagaaaaagcaacactatatatggagagctaaggctgtaaatgagatattgagtttacccgaattagcttatgtattagtagaaataaataacaatataaatggttcgagtgcttatttgggagaaataggagatagaagtaaggagctttattttaataataaaactgtaggacagtatcagtacgagcaaatagaagctaataaacatactagtcttaggaatcaggttttttacaggcaagattatttagatgaatttgaagttatatgggataagcaagctgagttttattctgaaatgaccgaagagataaaaaaaaatataagagatatcgttatattttatcagcgtaggttgaagtctcaaaagcatttggtttcggattgtactttcgaaaaatataaaaaagctgcgccaaaatcgtctcctttgtttcaagtatctaaagtatggcaatcgataaacaaactagagtttagagaaaagaaaacaggaactccatatggttttggcgaagaggacaaggaatttatattcgaagaattgaatataaaaggcaatctgaaactaaaggatattttcaagtctattaaccttaatataaaagactacgatactaaagatgtaaaagagctagaaggtaatagtactaatcagtcactttataaagcttaccagaagatagctataatagaaggttatggtgaagattgggataagaaaacagctagcgaaataaaagaagaaatgaaagctgtgtttactcaaataggagtaaatatcgatatactagaatttgacagttctacagaattagacaaacaggaaagttataaattgtggcatttgttgtattcggcagaagacgatactagcgtttctaaagaagataaagtaatatatggcgatatagatgtttcgctaaagaaggtattacataacaaatatggctttaaaccagagtatgctgctattatgtctaacgtgcacttacaaccagactatggtagtttgagttctaaggctcttaataaaataattccttatctggagcaaggacagatgtacgatgaagcttgctctagtgctaaatacagacattctaaatggaaaactaaggaagaaaaagaaaatagagagttaaagggtgagttagctcttctggaaaaaaactctcttagaaaccctgtggtagaaaagatacttaaccagatggtaaatgtagtaaatgaactacaaagcgaatacggaaaagtagatgaagtacgtatagaaatggctagggagttgaaaaaatcagctaaagagaggaaagaagctacggagggtatagctagtagtcaaaagataaatgactcggcaagagatgttttaaggaaatatccatttaacttagctaacccaactagaaacgatataataaaatatagattgtacgaagaactatcttttaacggatataagactctttatactaataagaaagtagataaagaaatgttgttttctaaaaacatagaaatagaacatataataccaaaagctagactttttgatgattctttttcgaacaagactttagcatttagcgatgttaatggcgaaaaagcagatacaacagctattgactttatagaaaacaaacgaacaagtactattaacgaatacaaagctagaatagaagatgctattaaaggaaaacatataagtaagacaaaatacaccaaactcttgatgaaagagagtgaaatacctgatggatttatagatagagagcttaggaacactcagtatatagccaaaaaagctaaagaaatgctagaggaagtagtaagaactgtaaatactactacaggtataattaccgatagactaagaaacgattgggacattataaacgttatgaaagaaatatctatacctaggtacagagctatagaccccaatatgataatacgtcaagagaggaaaaaggataaatatgtagatataatagaaggttggacaaaacgtaacgaccacagacatcacgctatggatgccttgatagtggcttttactagttacaatcatgtaaacatattgaattttcttaattctaaaaaagacgcagataaaaacgatttatcattttatataaaagaaatgatgaaaagatatggtaaaaatggtactggttctaaaaagtttattcctcctatgggtagttttagggaagaggcaaaaaaacatatagaagagattttaatttcttttaaagctaaaaacaaggttgtaaccaagaataaaaacaaaactaagctaaaaggtaaagataagtataatatacaaaaatgtttgactcccagagggcaactgcataaggagactatatatggtaaaatgatagttcctgtaaataaaatagaaaaaataggaactaagtttgatgcagataaaatatctcaggtaactaaaccactatataagcagttacttttggaaagactggaacaaaacggaggtaatagtaaaaaagcttttggagggattaatactttagctaaaaagcctatatatactaacgaagcaaaaactaaaaccattcctgagaaagtgaatattcagttttatgaaaccaaatatactataagaaaggatataacacatgaactaaaagtagataaagtaatagacaaaggaatacaacagatacttaaagaaaggttaaaagaatataacaataaacccaaagaggcttttgttgatttggataaaaaccctatttggttagataaagaaaaaggtatttctataaaaagagttactatacaaggtatagccaaagcagaaagcttacatgacaaaaaagacaataatggagagttgatactagataatgaaggaaaaactcaggctgttgattttgtaagtacaggcaataaccatcatgtagctatatacgaagatgaaaaaggtaaataccaagaaaaggtggtgtcattgtttgaagctgtagccagagttaatggaggcttaggtataatagacaaagaatacaataaagataaaggatggaagtttttgtttactatgaagcaaaatgaaatgtttttattcccttctgatggttttgagcctaaagatattagtttagataattataaaactatgaaagcacaaataagtaagaatttgtttagggtgcagaagattacttattcagattatatgtttgctcatcatttggaaactaaagtaataactaatgatgatatgaaaaacaaaaaacaattaaaaggtaatttgtatcatagaataaaaagtacaaatcctttaaaagggatagtcaaaataaggataaataatataggggaaatagtaaatataggagagtattagttgtttgaataaaagaaaatgaaatgaaaaactacaagcaatcatcaaagaaagatcatgagataattttaaaatttctaaaggatagaatgaaagaccaaaaaataacacaaaaaaaactagctgaaattacaggagtaagtgtaggcagtcttatacgttattttagtagtgaaactcagatgcctttaggcttatacttggagattttaggagtactggaattacgtccttatttagtacctaaagaaatggacaaaataggcatgaaaagcgtacactatttcgattaaaaacgagtaataaataatagagaaaaaatagttaatataggagagtattatttgtttgaataaaattaatgaagagtaaaaattagttatagctgttttttgattatatttatagttaaaaaatagctatttatgataaaaagaacagtgtatataggtaatccagcctatttgaaattaagaaatggacagttagtagtacaagagccagaaggagatataaaaggaactgtacctatagaagatatagcaatgctaatgctcgataattacaggataaccataagtaatcagttacttatacaattacaatctaataattcggtagtcattagttgtgatgctcaacaccttccctttggaatgatgttacccttatatgggcatacagaatattccgaaaaactaaaatatcagctaaatgtagccgaaccactcaaaaaacaactttggaagcaaactatagtttctaagataaagaatcaagagtttgttcttaaaaaatcgaaaagagagttcgaaagaatgtcttattatatagaaaatataaaaagcggagatactagcaatatggaagctaaagcagctaagtattattggaaaaacataacagatggtttcataagagacagagaaggttctgctcctaataattttctgaatttcacttattcggtattgcgtagtatagtcgcaagagctttggtgagtagtggcttgttgcccgttttaggtatatttcataagaataaatacaatccttactgtttggctgatgatataatggaaccctacagaccctttgcagataaattagtttttgactgcgtaaacaaatatggagaaatagaaaaactaagcaaagagcataaggaatatttactaagtatagcaactcacgatgtagtgatagacaaagtaaaccgacctttgatggttgccgtaagcataactacagctagtttgtacaaatgctatactggagaaagaagaactataaaatacccgacgtttgtataaaaaaacaattatgacatgcaacatcaacaaaactatagtaattataaaattatgtggatattagtatctttcgatttaccaaccaataccaaaaaggagagaaaaatagcttctaggttcagaaaaaacttgatagaagacggctttgtaatgtttcagtattctatatatatgagacattgtaatagtagagaaaatgcagaggtacataaaagacgagtcaggagtttgttacctgagcagggaaaagtaagcgttttggctattaccgacaaacagttcggtaatatggaaatatatcacggtataaaagaggtagataaaccaggaggaagtaagcaattaactttgttctaggatagaaaaaacgaaaatcctatcatataacatttaatatatgataggatttttacattttcagaaatcagctgaaagctttgctaggcaaggcttagagttgacgttgctattgctcacgcaatataatgaaatttagacaacaattcacaactgtacatgacgcattaatttcattcttccagttgctattgctcacgcaatataatgttgttagacaacaattcacaacttggtgctgaaacaataacaagtctaaatgttgctattgctcacgcaatataatgttgttagacaacaattcacagctataaatttcaataatttatatagagccatcctaattcatttttcatacctttagaattaaatgatatagtgtaataataagggcctactggtaatttattgttatttccatttatattattacttccgccccatgtgtttatataacccttcttttcgtagacaagaacattatctctattgtaaatttttacaatattattagggtacatttctatttttgctataatccatatttcattcaatccatcatcattaggagaaatagcgtaggtaatgtcatttctaacaaaattattatgcgttatatcgtcggtattacttcctcctccttcttctccttcttctccttcttctccttcttcttcttcttcttcttcttcactaatatcattgtctgattcattatcaattattattgattgttttactatactactgtttccttgttggtccgtgaatatccataatatagatgtattttcctctataggaaaatcagttatggtagtggccgttatagtacctgtatcacaattatctttagtagtgggtttttctatctcatatatagaagtattactgactattttaggaagattaatttcatcaatataaggaggggtaatatcttctatagttatactttgtgtttgactattagtgtttcccgacgaatctttatattcccaggttaatacagtgctttgtgttataggaaatttagtttttgtagtagctattataatgtttgcatcgtgattatcggtagcagtaggtgggtttatagagtatattatacattcttgattaattacattcagattgtttaaatcagcaacaggaggagttatatcatatataaatctatatatattcgattctacattgtctatatgagttatgtctttgaccgtattttcgtttagctttatgctaacctctccgtcttctataggttttagttttatagtgaaatttatattgtcggttgtttgtagcttatatatattagtatttgtaatagagaaatcggatagttccaatcccgatactttttcactaaaaacaatatttactacaacctcttcagatgaagtaatagtatcatctcctgtaatctctacagagggagcttcacattctaatacataagttgcttggctgtcttttgaccaattttcataaagctctgcttcagatatattaccaacctttatgcaatataagtcggtattatcatgaatccagaaatattctagttttatattcttagaaacatctagacttgttagttgattcttaaaacaaaataaatctaccaatgcagtattcttagaaacatctagacttggtagttgattacgaaaacaagatagttttaccaatgccgtattcatagaaacatctaggattgttagtttattactagaacaacctaatgtcttaagtttatagttcttagaaacatctaggcttggtagttgattgctagaacaagatagatatctcaatgccgtattcttagaaacatctaggattgttagtttattattataacaaagcaagtctatcaatgcagtgttcttagaaacatctaggctttttagtttattactagaacaatttaattcctctaacatctcaaaaccctctatacccgtcaagtcttctatgtcatagttacgaatatttagaacggtaatattcctaatattatcagtaagcacctcattatcatctatgttcaaatcatctaaaccaatatctattagggctttaacaaaatttttgtctggtattgaggtgtattcttgtgattgtgagtggcaatatgtagatataatgaataataataaaaaaatctctctcataacttattgtttttcaggtaagtaatgcaaatatacggataattatatagttttacaaatactaaacgctgtttatcagtaagttacgtttattgttttaagaaaattcatttccataggtactttaaattaaaagatatggaattattaaatccttttactttaactgaagacacctccgttttgtaagcaaagctgagttctaaattgggcattatataataagaaaaataatacgagctataattttctaacacataattagtacctagtttaatttgatttttaaaactaccaactaccgatatattgtaaaatggatctatgccctctacatttttcatcataaatgaagtggttatatctaaattattatttagtttcgatatatatccacctcctatatagtaatataaattgtctataaagctatttaaagaattagtattcactttatatttgttattttttaaaatattaggcatagatatacttatatagtatctatcattatgaagataagctcctaagccaaatcgtaaatcggaataactttcattttcggtaaaaagagggtcgtatttaggtgctcctaaattaataaggtctataacgtaaaaatctacacctgtttttagccccaaatacaaattagtgtaatttgataatttaagcttataagtaaaatcaaatgctaaaccggtttcttttaatacatgaataacattattaactactgacaatcctatatatgtgtttcttctaaaagggcttttataatgtaatgttttggttttcggagaattaataagatcaatatatctactctcataactgatatttacagttttataatcatcaatagctatataggcagggtttattatacttttattaaaagtataatcttgttgagcaaatatgctaaaaggtataatatttagtattataattttttttattaatttcatattgcaataatcaatatcctttatatttttttaatataaagatatgataaaaaaacactaattagtgtaaatgagtatgttatattaatgttttgtttgttagatttatggctgtgttttgtattgtttgtgggcgttttggggcgtagagacgcaatgtattacgtatctatattgcaaatcacatcctgaattaccatttatatatagaaatataaaaatgattctatattttataataggtttagtcgtggaagcatctacaatagtagaaattaaaaagaacttatagacctatttattacaaatttatttggtataaatacccccgatataattaaccttacttgctattgctcacgtaaaaatacaattttgaaatcaattcacaaccagatgatgcaacatacattccccaagatgcttgttattgctcacgcaatataatgaaatttagaaatcaattcacaacagtatatgcctaaacaaatagcttataggagttgctattgctcacgaaatataataaaaaaatacagttaggtttttttatagaaatagaggtatcctagacttgtagcgcaaatacctcttattttctgataaaacttggttcacttaatagtatttctcttgattatgcaatatggtttactatcccttcttgtttttataacagagaaaagagtaataccaaatgcatttccaaataccttaatagaagtagaattattttttgatttgtcaagtccaaaaagtaaatcatagcctagctatggttctattttttaacgcagtcaaagtgaaaaacaaactacttatatagggagaattggtgatgtttttggtataatcccccagttatacatcagcccttatatcaggtaatatggttctatataggagaaataatctctttaaacttattaaaaccaggaaatatcaccatgtaatatgttattattattacgatatttatttgaggaatatcctctggagacattatactataaaaagctgctccttctaatatagcccacctaattatattagaggtttggtagactccagttctggtattttcatcttcactaagttctagcttcttcatagataccctaaacataacttcgctacctatgatagccgcaacaggcaccagcaaatacaataattgctcttcaggaatattaaataaattgttccaatcgatggttatactaagtgctgtcgcaaaaacaatcccagccaacaaagctccgtatattatgataaatactctatatttttctttcattattgtttttcttatttgtacttgtttttttataaatataaaaagccattaattaccctaaaatatatagtttaattacttcttattaaagttccttcatcactgtttaagcctactaaagtagggcgtacagcagaatcttttatttcccaatattcatttatattccaatcgaaagacataaaaggagaagaaccatcaaaatcaccttgtcccataggccctcctgtcacagcgtttctatcgctaccaataacagtgtttccattgactgttacagaagaattcccgtaattgtcagcaagagattcattataacccaaacctagtattctattaacatcggcagttcctgttatactcgaattaaatgctatagaattctgtattgttgctttttctaacacacctaccaaaccacctactctatcggcagtagcaactatatctcctgtagcatacgaactcgatatagtcaaataatacatatcgccaaccaaacctcctactccgctattgcctgttacgtttcctatagcatatgagttagacaaagttggtttagtctcattattatagtagaaaaagcctactaaaccacctgttttatcgtttcctattacattaccagaagcataagatgtagatatattacaatcttctgctcttcctactagtcctcctgtattattattaccttctatatcgcctgtagcataagagtatgtgatgtcagaatctagttttatatgtccagccaagcctcctgtatagtctagtccatttacagaaccagtagcatacgatttagtaattatcaatcgtgtaatagagcctaccagaccaccattatagttcccttcacccaaaatatcgttttcagagtaagactcatcaacagtcgaatatgatgaatcgcccattaaccctcctaaatacgagttaccagtaatactacccttactatatgaactagtaatgttagttttataattatctcctgccaacccgcctaagtattcatttcccgtaatatctactacagaataagaatcataaatatctaaaccatcatctgacgcacctacaaaaccgcctacattatcattcgctgttatatttcctgtaacgtaagagtttctgatagttacttttccgcctataagaccaataagacctgccacattgttttctgcctcaatattacagtctataagccctaaattttcgatactagaacctaccgaaaacccaaacaaacctacattatctgtgtcaggtgtatttatcataaggttacttatagttttattattaccgtcaaaactccctctaaaagaattattatagctgtctcccaaaggcttaaaaccttctcctacagtaaatttctcaatatcatctatatttctataattagagttattgttaaaatctaagtctttcatcagtacataactcatatctaagtcatcacttatcacttgtaaatcttctatagcccaaacacctatatgagtaccgttttcattaacaatccatgtaccatcttctttggaaaccttagtaaattgcttaggtatatcaaatgtcatgtctatatcatagcttttttcagagccatcttctgaacttacgttatagtttagtattttggtaaagtcagtagttactccattgttagggcttattatagctccttgagaaaatgatatatatgggattaaactagtaatatctgtagcataaggaaccattacgtttataatattgttctctctgtttatatatgctattatatcagaatctaaattagagttagcttctgctgaaaagacaaaacttagtatgtcattttcagaattaggaatagtctttaatttgacagttatttcctttgtacttccatccatatattctaaagtataaatagctgtattatcttccgaaaaatcaagcttttctcccgaattagggttacaaactgtattttcagaatattcaaaagtaggagtaaaagaacttataattgtccctttaggaaaagtaactgttatattattatcttggtagcttgtaattcctccttctatagaataattacttatagtcgacatatcaatcaatattaccgatatagtgtatatattagttgaattatcttcggcagtaacggttatagttataatattattatctgctgaaatattttcattcccttcaacaactattgcctttatagactccgattctccgtgagaatcaacatttaaagacagagtacctataggaacataaactttatagtcattaacttcaggtgagtaatctttgtctaacgccacattagaaccgtctgatttagttatatataattgggaaatattcgattcgttgcttttatcgtcttcttcactacacgaaaacatacctattgacactataagtatcaatactaagagtttaacttctttgaacatagttatattataattgaaaaatcatcaattattcctgattatacaaaacaagaataattgatgaaataaacttcttagttattacccaatataagtggtaatccgtcagatccacctattattacagtcttagcattgttcgattctgctaatttcaaagtagcttctatacctttatctttaagtatcttatcggttagcgatgcgttcaatattctgtttgcatcagctttaccttgtgcttgtattatttgtcttagtgcttctttttcggctttttgtattttaaattcatactccaaagactcttgctcttgctttagtttattctctattgcaagttttatggtcggaggcaatattacatctcttaccaatacatcgttcaattgtacatattgagattctagtattttattactttcttcataaatttccttttgtatagcatctcttttggtagaatataactgctcaggagtgtacctacctactacgctacgagttgccgaacgtatagctggttttattattaagtcaacatagtctctacctttttctttgtgcagaaaacctaatttatctaatttaggttgaaaccatacagaagcatctagttttatttccaatccgttcgacgacaatactgccattcctttttcgaatatctcttgttgacgtacattgtaaataacaactttgttccatggagctataaagtgaaatccttcatctataaactcatcggtatttacaccatcgttaaatgtttcgtataatactcctgcttgtcctgctggtattgtaactgtcgatttggttatcattataagacctactattactaatactgctactaacacaattccttttggaaactgtggtgtttgataattttgtgccattttattttatttttatatttttccgtgatattttcttaaaaaccactctactgacaaagttaacaaaataaacataactaagtactttctatctattaatgatttgctatgaattactttattttttataatgctatgcttctgtgtttttaaatgtttttctatagcaatactaaacccttctaaacccatataaacaccttgattaacggtagataattcttttaattctttggttttatttatattgaacacgtcttctatatctgttgctaatatctcgaatcgacccgtttttttgacttttttattaactcccgaaaatacttcgaaactatatttccctatttcaagactatttaacgacaagttatatcgtttattatcttttacaaaaagatgtttttcctgagtttggtcttcttttattatattaaaaacaaatcatctcttaagtctattttgttatttacattgtatttcgacacatttat

SEQ ID NO: 2259 - DNA, 24122 bp, synthetic construct
  source 1..24122: mol_type = other DNA
  misc_feature 1..24122: note = Synthetic
agcaggagatgaaggcgagggtgcaggaaatgcgggccaaggtcgtagaggccgaggcgctggtgccgcaggctatggcagaggcgttcagaaacggaaatctggggattatggactactataagatgaaaaacgtcgcggccgacacgcagatgcgcgagtcaatcggcgggcagaacccgcaggcgcccaaatcataattgttttgggggacgattgtttgtgattgccgggggattatcagggatgattatccatataataacggcggacgatagtttgtgggatgattgttcggaatgatggtgattgaagacctttgcgccgggcggctttgcagccgcccgttatttacggagcgatatggacgcgatattaaacaatctcgaagcgctgctgttcttactgatcttcttagcctcgatcataagcagcttcataaaacggcgcaaaccggccgacatggcggacgacgatggcgacacgcccgcgccgtccgccccgccgccgtcaacccagcgccggccccaggcgcctccgccggccaggcagccgcgcccgcagtccgtgaacgtcgaagaagagatgcgcagggcgctggacgacattttcgcggcaaaacagccgccgtcctacgaaaaccgcaggcaggcggcggcatacgatgacaaaaagagcttagacgtccgcacccgcgccaacgcgcagccgcaggccaataagagattagtgcgggcaccggcagcatcaggcggcgacgccgacgccgagtggacgctgaaagcgctcagggcgcgcgacgcaaaggaggcagccaaggcagcggcgaaagaaaggacggattatgaggagatactgctgccgcccacgccaatagcggcattcaactgcgaccagccgatactggaacaggcgcgcaacggcgtaatatggtcggaaatcctgcaaccgcctgtgtctatgagataaaatagcataatgcattccttcaaggatgcgggaaatctttgggaggacgcgtttttcaccaatccacagatcacaccggatgccgaaactcttttacggggatgcgttttccgacgatatgcgcatccatattccctgctaaattgctggaattacactattctacgacaaacataatcgtttccaacagcgtcccgttagtagtctctacaacatctatcttccaattccccaccttatccgcgtcatcagcagaggccgagaaatcgcgcttggtattcgtgcgccaacttgccgactttatctcgcggatgtgggtctgcacgtgcttgccgttgcggtaccagcggtgctggatcgtcacggtgtcatacgcacctattacgtgcgtgaagtagtggagctgtctgacatttttggaagagaacctgccgggcatgatgcccacgggttccctctccacaatgagcgtgcaaattgccgaacgctcgaccctgacccccctccgcaccgggcggatgacggtgacggtgtcgggagcggcggccttagccgctgatacctgaacagcaggcgcctgctcggcggatgccagtactgcgggcgacggcgtaaggggcgcctgctccggcatcgacggcggcgcggcgaccggggcggttcctgaagacctggccatcttccctcctgagggcttgccgcccttatccttgtgcggcggcggctgctggagatccttctgggtaaccgcatgcttgtccgggaacataagctgggctacgaaaaaagagaccatacccacaactacgataataagaaccgactttactgtgtaactcataattttaccccactcctgtcgcaatctattgctttatatatatgttacaaataatgcatatgtaaaatcaagaaaaaaagtaacaaattttgaaaataaaaataatatttgcacactggttttatgtaaaattttcaaacgatgcaaattcaagccgcagacaaccggaatacgggcaaccctgcgaagcgtttttcgccttaaatccacgcccaaaattcaaccggcggaaccggggataatcagggaaatcccttaatcccgcaactcatggttcagacatatagattcacctgttaaatattgtatccgcgccggccggcaacatcaagtctgtcgtgcagttgcagggcggcgcgggtacaatatttaatcgtttcttcaataatcaatttccccacccaaaccacggcataatgtattttatgggtctattgacactatcaattttttcacggcaggattgtttatgataagggtaggatttgtcggctggcgcggtatggtcgggtctgtcctcatggacaggatgcgggcggagggggacttcgcggggtacgaaccggtgttcttcaccacgtcccaggtcggtgataacggtccggacgtgggcggcggcgcggccccgctcaaggatgccttcaacatcgatgagctcaagggactcgacatcatcgtctcctgtcagggcggcgagtacacaaacgacgtccacccgaaactgcggggcgcggggttcaaggggtactggatcgacgcggcgtcggccctgcggatgcacgagtcgtgcttcatcgtgctcgaccccgtcaacagaaacgtcatcaacaacggcatcaaggccggcatccgcgactttgccggcggcaactgcacagtcagcttaatgcttatggcgctggccgggctcttcgggcgcgggctcatcgagtggatatcgagcatgacctatcaggcggcaagcggcgccggtgccaaaaacatgatcgagctcgcggcgcagatggcgcacttgacaaacgctaccgaatcgctgcgctcaaacccggcggcaagcgcgctggaaattgacagggcggtaacggcggagctgcgcgggtcgtcaatccccaccgccaacttcggcgcgcccctcgcggcatcgcttataccgtggatcgacaaacaggtctacggcgggcagacgcgcgaggagtggaaaggcgtcgcggagaccaacaagattctgggtacgacaaaaacgatcccggtagacggcatctgcgtgcgcgtaggggcaatgcgctgccacagccaggggctaacgataaagatgaccaaagacgtgcccatggacgagatcaacgacatgctggtcgcgcacgaatgggtcaaggtcgtccccaacaacaaagaggacacgcttaagggtctgaccccggcggcggtcagcgggacattgaccgtccccatcgggcgcctgcacaaaatgaacatcggcaatgattatctggcggcattcaccgtaggcgaccaactcctgtggggtgcggcggaaccggttaggcgaatgctgaaaatcgcgttggaaaacatcggttgagggggttggtggcggtattccatgccggggcgttacggggcgcgcaaagccccgtcccccaaaaacctaatactaaacctccattatttccttttccttcaaagcaagctgctcgtcaaccatcttgatatacttgtccgtcactttctgaacatcgtctaaccccttcttctcctgatcttccgtgactaacttatctttctgcgccttcttcagcttctcgttggaatcgcggcgtacgttgcgcagcgcgaccttgcactcctcgcctaccttgccgcagctcttgaacaggtccttgcgcctctcctctgagagcggggggatgggcagacggatctggttcccgtcgttctgcgggttcaggcccagattcgaggcctgcacggctttctcgatctccttgagcatactcttttcccacggctggaccacgagcatccgcgcgtcgggcaccgatatattggcgacctgattgagcggcgccgggttgccgtagtactcgaccattatgccgtcgagcagggccggcgtcgcgcggcccgtccgcaccttggccaagtccttcttcaaactgtcgatcgtcttatgcatacgatcttcggtctcttttttgatgtcttccatcgcgcccatataaccgtctcctgtgttaattaattatgcggacaaccccgttgccgtccccatataatattgattttaaaacggacgaccgcgttgccgtccctgtaatgtcaatccgtcaatcgccgaatttaacgactgtccccaccgactgaccttccaaacacctcgcgaggttcccgtcctccagcagcttgaatactattattggaaggccccactccatgcagaacgagaacgcggtggcgtccatcactttcaatttcctcgacagcgcttcggcgtgcgttatctcgtcaaacttcttcgcggacgggtttttcattgggtcgctgtcgtaaatcccgtctaccttcgtggctttcattatgatctcgccgccaagctccgcgcagcgcagggccgccgccgtgtcggtcgtgaagaacgggctgcccgtacccccgccaatcaccgccaccgccccggattccatcaactctaccgcgcgcgccggcgtgtagtactccccccccaccctgtcaatccgcgtcgcagtcagcacccgcgcgtcaacgccgcaggccttgacccgctcggcaaacgctatcgagttgatgaccgtggcaagcatccccatcgcgtcgccggcaatcgccgaaacgccctcggtcgtcgcgccccgcaaaaaattcccgccgccaatgatgaccgccgtctgcacgccgcccttagcgacctgcgcgacctcgcccgctattttggcgatgatcccggaatcaataccaaagccgcgctccccggcaagagcctcgccagaaagtttcagtacaacgcgcttatatttatatgaatttgacataccgcagctccacgcgttaccgcacacatattcgtaaaggtatcaccacaacaccacatacaccccataatatacgggcacggccaaagaccgcgcccttccatcaacaacccattttcatcttagtccgactcgcccagctcaaaccggaaaaactccaccggcttaatctccgcgcccacggccttcgacacctcggcaatcatctccttcacgctcttctcgtagcggatggaggtctggttgacgagcgtgaactcctcgtagtacttctgcagcttgccgtctatgatcttctcccacacggcctcgggcttgcccgactccttagcctgcgcggcgtagatctccttctccttggcgatgacatcggcggggatgcttgacgcgtcgaccgccgacggcctcgcagccgctacctgcatagcgaggtccttgccaagctccgccaactccgccgacgcgagcgccgcaggggttgaggccgagaacttgatcagtacgccaatcttgccggcgccgtggatgtacgagaaaaacttctctttcgacgggtcggcgaccatcttcttatagcggcggaactggatcttctcgccgatcttgccgatgagctccgtaaccttcgcctcgaccgtgatagagccgatggacgggtcggagagctgcatagcggcggcgtggtcggctggcttctgcgccgtaaggatcttgccgaggttgtcgatgaacgcgacaaagtcctcgttcttcgcgacaaagtcggtctcagcgtttacctcgtataccatggccgcgtcgcctccggttactatggagaccttgccctccttggcggcgcggtcggcgcgcttggccgcggtggcctggccctgcttgcggaggtcctcgatggcgaggttcatgtcgccgttggctttaatgagggcctctttgcagatcatcatgccgaggccggtcttttcgcgcaactcttttacctgtgaagctgatatttccattttattttctcctgtattgtagggcagccgctttggccgcccgtgattaaaaattcaacatcaatctctaaaaaaccaacacatctgattaatcatcttcctcaggggtaacgaccttggcgatttttttgtggactacgcggtgacgcttggccttgccgtcatcgccgctgccggacgcgccggacgactcctcctcggacgcgccttcgggctcgtccttggccgccatctcctccgccgccgcagacgctaccgcgttctcgaggatgacgtcgcttatcgcgcgggtaatcagctgaaccgactttatcgcgtcgtcgttgccgggaatcgggtagtcaacgacgtcggggtcgcagttggtatcaacaatggcgccaatgggaatgcctaggcgcttaccctccgcgatagctatatgctcctttatcgtgtctacaacaaatatgatggacggcaggcggcgcatatgccggatgcctgtgagaatcgcgagcagcttctccttcttcttggctatgagcaggcgctccttcttaggcagcatctcaatcgtaccgtcggcctccatcttctcaatcttgtcgagcttggcgatactctgcttgagggtctggaaattggtcagcataccgccgagccagcgctccgtaacatagggcataccgcagcgcgtggcctcctcgcggatgcaatcgcgcaactgcttcttggtcccaacaaaaaggaccttgccgcccttcttcacctcgttcttcacgcgctcaatgaacttgtcgagcgtgacgatcgtcttgttgaggtcaataatgtaaatgccgttcttggggcaaaggataaagcgcttcatcttgggattccagcgcttggtctggtggccgaaatgggtaccggcgtccaacagttcaggcaacgtcaatgaagacatggtactgctccttctggtatgtatgggttatggctgccacggctgtcaccgcgaaaaaattaccatccatttgacaggacagcacccgtttcccgctcggccgtgtgattaaatttcaatatgtaacgatacggctgatatggatgggcgagtttcaaaccggcccatcctaaagccgtcattgtcatcaaaacatccccgtataacaaccggacattaacgtttcgagaactggaagcggcggcgcgcaccggcctggccgtacttcttgcgctcgacaacgcgggagtcgcgagtcagcatgccgcccttgcgcaaaaccttgcggttgtcctcgctcataagcgccagcgcacgggagatgccaaggcgaatcgcgcccgcctggccgctcaaaccgccgccgcgcacattggccacgatgtcgaaactgtcggccacgctcagcatctgaaggggcttctcggcgtccatcaccagcacatcgctcttgaggtagtcgagcatcgtcttgccgttaatcaaccgctcgcccttgccgggcttaatgatcacgcacgcgatagcgttcttgcgctttcctgttccaaaatacctgttttccaaattactgctccttctactatattaattatgtttaatcacctttacacacacaaggatgaccacccccgcccgcaacgccttaaactttctgcaccaccggcgtagggccgaccgacagtttcagcgccttgggctgctgcgccgcatgcgggtgctccgcgccacggtagacgtgcagcttcctcatgatagcccgcccgcgggggttcttggaaaccatccccttaaccgcgtggatgacgacctgcgtcgaatcaagagccatctgctcctcgtaaggacggtgcttgtcgccgcccgcgtactgcgagtggcggaagtacgtcttggtctccggcttgacgccggtaagcctgaccttgtcggaattgatgacgataagatagtcgccatgatcctggttgggtgaataggccggcttgcccttgcctataagcacctgagccgccttgctggccaaacggcccagcgtcaactccgcagcgtctacaataaaccagccgcgctcaatcttcctgctgtccacaactacagttttcattctgaccctcactgcctgaaaatacggtaaaaatggctaatctactaaaaatatgtcatggcgggagcaaagtcaatactttttttgatttttttggaatttcaccgaaaatcgtcccgccacccccctaaaacgtccctccggcgcggaacaggcggacaaactccgcggggccgacatccacagcccccaatgccgccttgtaccccatgggcatcccaaagtcccaaaaagcgaacccccggccctccaaataacgcgcgatacggatgagcagcaccgtcccggcgtgcccctcatcgtaaaaccccgaataactggtgtacaccccgccgcaaacgacgccgaaatcgccggcggcaagcgccccgtcacggtaaagcccaaaagcggcgggataaacgcccggaccgggggatagaccgccgctgccggcccgcccagccgcaaccgacccgcgccttatatccttaatgcattccacaagcggcggagtcagccagtcaccgccgtgcttctccacgcaacgccccaaaatacgctcgaactccgcgtccggacgcagctcgtagcgccccaaaaaccggcggaccgaccgcttaacgtgcaaattcccaaacaaaagcaccgaacggacaaggtgcagcttgggcagcaaaacataccagcactccccctccccatcatccgcgatatccgccgacataaccaaaaagccggcccccatcagccgcgacacaaactccgggccgaaatcggcgccaaaacaccactcctcgctgtaacccgccgcaagcataaaatccacaatcacccggcagtcatcctccgggccgatgtaaatgtagcggtcgttcacgtattttacggatatatccatcagctgttctttttcagggatcatccgctgtcactccaccccaaccaaagcagcctgatcaaaatgatacagggcatcgttgatctcaataatatcgtatctgccgtttacaatgaaatactcaatgataacatcaaacaacatactgcgcgacagcgaatacccggcccggcaaagaagcgcgcgcgtttcgtcaagcgtcagtttcaaagcaaccgcaagagccagcgccgtcttcttggcaggcgaatacccctcgttgctgcgtatcttcgaaaagtgccgccggtcaatacccgcccgcttgtaaacctccgcgtcctcaagccccctcgcctgtatcaacttaatcagcgcaaccgaaaacgtatcctcaagccgcgacgcgcggtcaacaagcccggcaggcggctccgcgacctccaaatcaatattgccgcaattaatatcgtaccgataatcacccccaacggcaacataatgcgcatcaacaaacccccgcaattcgccgcgcagcctctcccggatcacccggtcaatatcatcaatagcattctccgtccgctgcgtgtggtacgtgcaatacatcgaatatatataatcaacaatcccccacccctcaaacaaatcaagggcatcaacgccggtaatgcccttggctaaggcgtagcgctcaagcaggaaaataaaataccgcgactcgtcggacaaaatacccaaatcagcgcttgcgttcattcatacctcttgcaaatgtttaatcatattcatatatatttacgatacggctctcgcccaacttcacaaacctgcgcgtaaaccccgccgcctgccccctatccgtggcagtgtagaaccccgtaccgaaatcaaccatattcctaaccggcaagtatccgggggaccggtacaccggcataacttccgtggtatagggtcattgggtccgggtccttttttaggtatctgtacctaaaatacattctaacaaggccaaaatcaaaatatccgccttttgaaatgttcgttaattttataaattatttgctaaacacagaggcaaatactatatttaaaaatattctgtggtggagttccaaggctgaattggcagtaatgactatcatttatatattgcaaatactataggaggacaagtgaaaaagattctggggatagatttgggaaccaaaagtataggttgggctctggtgaacgaagcggaaaacaatgatgaaaaatcatctattattcggttgggtgtcagagttataagttatgataattttgtcagtacagataccagaaaagagtcgaaagaaccagaaaaggatttcgcgggcggcaaaggaatttcgccaaacgcgggaagaactcttaaacgctgtatgcgccgtaatctgcagcggtacaaacttcgccgggagaacctgatagaaattctgacggaacacgcttttatctcggatgaaagcatactgtcggaaaatggcaaccatactacattcgaaacctgccgtttaagagccaaagcagctactgaagagatatctttggaacagtttgcccgtgtactgttaatgataaataaaaagagagggtataaaagcagccgcaaggctaaaaatcaggacgacgggcaaataattgacgggatggaagtcgcccaaaaattatacaatgaggaactcacaccggggcagctttgtttacaattattggaaaaaggccaaaaaacgcttcctgacttctaccgatcggacctccaatctgagtttgaccgaatttggactaaacaaaaagatttttacccggaaattctcaccaatgagctaaagggtgatctcgttggaaaaaacaaaaagcaaacatgggctgttttcgcaaaaccatttcaactggtaggaattaagcgggaaacaaaatacgaagaccagaaaaaagaaaactacgcttggcgtgtcaatgctctttccgtgaaaatggggccggaagaactggcaattatcttgcaggaaattaacgctcaaatcagtaattccagcggttatttgggcaaaatcagcgaccggagcaaagaattatttttctacaaacaaacggttggacaataccaaatggccgttttggataaaaatccgaacgccagtttaaaaaatatggtgttttaccggcaggactatctggatgaatttaataaaatttgggacgtacaatccaaatttcacaaagaattggatgaaacgctgaaacaagaaattcgcgatgtcgtgatcttttaccagcgaaagcttaagagtcagaacgggctgatcggattctgtgaatttgagagccggaaaaaagaatttgaggttgacggaaaaaagaaggttaaaatcattggcagccgcgtgatacctcgatcttcaccgttatttcaagaattcaaaatttggcaaatcttgaacaatatcgaacttactaataaaaataccggcgagataaatttattatcacccgaacaaaaagtatctttattccaaaagctgcaaaatgttgaaaggctcagcgataaagaagccttaaacgtattatttgataagtctgcaaaaaactataaactgaattatgagaaaatagaaggcaacaaaacgcgatcggcaatatccaatatattgggtgattcagacctgttgtcatttgatttcgagaaagaacaggacagccaaccattgtacaaactctggcatttgctatactcctatgaggatgacaactcagcgtcaggaaatgacaggttgatagaaattttaggccagacatttaaactgtcaacggaaatcgcaaaaaaactggcaaacatatcatttcaagatgactacggaagcctttccgcaaaggcaatccgtaaaattttaccctttcttaaagaaggacaccagtatgatgtggcttgcgaatacgccggttacaaacattcagcgagttcgctaaccaaagaagaaattgaacataaaacattgaaaaacaagttggagattttacctaagaacgccttacgcaatccggtagtagaaaaaatactgaatcagatggccaatgtaacaaacgctattatcgagacatacggaaaaccggatgagatacgtattgaactggcccgagagctaaagaaatctgccaaagaacgtgaacaaatgacactagccataagtgaaaataccaaagacagggaagaaatagtaaaaaagctaaagaatgagttcggcctccataatccaagcgggaaagacatcattcgctacaagttataccgggagttggctgcaaacggctataaaacactatattcagatacttatatcgcacaagaagagctattcagcaaaaatttcgacattgagcatatcattccgcaggcacggctctttgacgactcctttgccaacaaaacactggaaaaacgagacgtaaatattaaaaaaggaagtaccaccgcctacgattttgtccgaaacgagtatggagaggacaaagcaaaagagtatctcttaaaggttgaaaagttaatgaaagacaaaaagatatccaaaactaaatataaacatttaatatggagcgaaaaagatattccggatagcttcattgaccgcgatatccgtgaaacgcaatacattgcaaaatacgccaaaagtatgctaaacgatttagtaaaatacgtagtgtccacaacaggctccatcaccgaccgcctgcgcgaagactggcagttgatagacgtgatgaaagaattaaactgggataagtaccaaaatcttggcctaacagaagaatataccaatgaagaaggtcacaaaatccgtaaaattaaagactggacaaagcgcaacgaccaccgccaccacgcgatggacgcattgacggttgcattctcaaaacgcagtattatccaatatctcaataatttaagcgcacgaatcaccagaaaatgcggctgcggatacgaaaaatatggacttaacacggaagaatacactgactggacttgcccggaatgcggtaaaagatattttacccgaaaagacactaacataatatatgccatcgagcgaaatgagctataccgtaacgacaaaggtaaattaatctttaagccgccatttgccttgaatgaattcagggcagaagcaaaaaaacaattggaaaatactttgatctccataaaagccagaaacaaggtcgttactcaaaatataaatacaagcaggaaaaaaagcggaacaaacaaaaaaatacaacaaaccccccgcgggcaattgcataacgaaacgatttacggaagtcaaaaaatatatgtagcaaatgaagaagccgtaaacgcaaaattcgatgaaaccaaaatctctactgtatcaagaccagtctatcgcgaagccttgctgaaacgtttacgcgaaaacgggaacgatcctaaaaaggctttcacaggtaaaaacagtttagcgaaaaatcccatctacttagacggtactcatacaaagcaagtgccggaaaaggtgaaaacggtgtcacttgagaccatttatactatacgcaaagagatttccccggacatgaaattagacaaggtaattgatgaaaaaataaaactcattctaaagaaacgccttgaggaattcaatggtgatgccaaaaaggcatttaccaatttagacgaaaaaccgatatggcagaacgaagaaaaaggaattgctataaaatgtgtgacaatcaagggcatcagtaacgctgagccattgcacacgaaaaaagataaagacggcaacgacataccagacaaaaacggtaataaacaacccattgatttcatcagtactgcaaacaatcaccacgtagcaatttaccgtgattccgacggtaacttaaaggaaaaaatggtgtcgttccttgaagcggtcaggcgagccaacgctggattgccgattatcgaccgaggatataaacaaagcgaaggctggacattcctttttaccatgaaacaaaatgaatatttcgtatttccgaatgaacagaccggatttaatccaaaagaaattgatctgatgaatcctgaaatttaccatctgattagcccgaatttgttcagggtacaaaaaattgctacgaaagactattgttttaggcatcacttggaaacttctgtggcaaacgatctcaaagatataacattcaaacgattagcatcactatcttttacggaaaatgtagtcaaagttcgtataaatcatatcggccagattatccatgtcggagaatattgaatgtataaacttactctacgtggaaaatgattatgataaaacaaacattatatttcggcaatccggcatacttaagcaccaaaaacggacaaattgtcataaaaacagatgacacggtgacgacacgcccgatagaggatattggcatcgttatactggatgacacgcaaataacaataacgcaatccaccatcaccaaactattagaaaataatgttgcttttatccactgcaacgaaaaacatatgcctgtcggaatgctgctaaacttagacggaaacacacttcaacgtcagagattccaaaaacaaatagaagcaagcgaaccgctgaaaaagcagctttggctacaaacagtccaagcaaaaataaaaaatcaagcctcgctcctgtctcacttaggcaaagacatcaagcgcatgaactacctgcaaaaaagtgttaaatcgggcgacccaaataaccgcgaggcacaggcagcgtcttactactggaaacacatctttgaagaccatatcccagacttttcccgctctcaagacggcccccctccaaacaacatactgaattacggctacgcaattctgcgtgcggcaatggcgcgggcgctcgtaggcaccggtctcttgcctacgctcggcattttccacagaaatcaatacaacgcctactgcctggccgacgatattatggagccataccgcccatgtgttgactatgccgtcatagagtacatagcccaacatggtattcctccggagaccctttgcccgaaatttagcaaacatttcttgacagtcttgcaaactgatgtatatttgggaaaagaacgtagtccactattggtggcactaaccagaacatcggcgtcgctactggcgtgctttcagggcaaaaagcgcaaaatcctgtatccggaactaaacaatgcctttaaaaagaattagccaatatcgtgttatgtggataatggtactcttcgacctaccaaccgagaccaaagccgatcggaaacgagcctcccagttccgtacagatctccttcaggacggcttcgaaatgctgcaattttcggtctactggcgccactgcacaagcaaagaaaacgccgaaacccacataaaacgcgtaaaagaagccctgccaaagtacggcaaggtcggaattttgtgtatcacagacaaacaatttggcaatatgcagctattttttaacgcaaacgcagaaaaaaataaaaaaattccggaacaacttgaacttttttgaaaaatatattatatttatagtagacgaaccaattcacaataaggattattccgttgtgagaacatctagtacctcggctacctctggggtggaagcctcccgcaagggaggcttttttatctaaataacccactttagacctgtttttaacctaaaaaaccttgcccacccccgccaaccacccccttttagtccgttttcggccctctcgacggttgtacagggcatagaaacgaaaaagcggcttatccgagatataatagctaaaagatagctggcgacaccctaaaatgcctctacgagcagtcgccaagccaccaaaaccatgtttttgccatttctaatgaatgacgtaacatattatattatcaggagttacaacggatatgttgcgaacctccctataatataaatttagacgaaaccaattcacaaccgccctcgcaagggccaaaaagtccgacgttgcgaacctccctataatataaatttagacgaaaccaattcacaacacaactctacaatgaccgataagcagcttgttgcgaacctccctataatataaatttagacgaaaccaattcacaaccgctgccgacgacgaacccaagggcgaaccgttgcgaacctccctataatataaatttagacgaaaccaattcacaacttcaagagttgtggattacgcttcaagggagttgcgaacctccctataatataaatttagacgaaaccaattcacaaccttatcgtatttcggggccgtcactacgggttgcgaacctccctataatataaatttagacgaaaccaattcacaacaatattcagaaatatcactgaaaaaggcaagttgcgaacctccctataatataaatttagacgaaaccaattcacaacatccgctcctctttgccgctccacttagccgttgcgaacctccctataatataaatttagacgaaaccaattcacaactaccgttgcggttaatcgtttcatggggccgttgcgaacctccctataatataaatttagacgaaaccaattcacaaccgccagaaaggaatagtaaatttacattggttgcgaacctccctataatataaatttagacgaaaccaattcacaaccgaaattgtggttatgaggcataagcttctgttgcgaacctccctataatataaatttagacgaaaccaattcacaactgtaaggcccgcttcagcttaaatttctttgttgcgaacctccctataatataaatttagacgaaaccaattcacaacctgcgggctgcgcaccgacaatcaatccggttgcgaacctccctataatataaatttagacgaaaccaattcacaactggttttgatgttttgagctatctcccgagttgcgaacctccctataatataaatttagacgaaaccaattcacaacctctgtatagtaaatttacattgttttgtgttgcgaacctccctataatataaatttagacgaaaccaattcacaaccgcgcagctcgacacatggttctcgcggcggttgcgaacctccctataatataaatttagacgaaaccaattcacaacgccggctgcagatagggcttgagggaatcgttgcgaacctccctataatataaatttagacgaaaccaattcacaacccgacatcctgaaaaccttttcaagcatagttgcgaacctccctataatataaatttagacgaaaccaattcacaactagggttcgccgggtatcaattaattaaagttgcgaacctccctataatataaatttagacgaaaccaattcacaactaaccataatgacatcccccactttctaattgttgcgaacctccctataatataaatttagacgaaaccaattcacaaccaacctgtcggtgcattgcgcaaggtgtcgttgcgaacctccctataatataaatttagacgaaaccaattcacaacaaccggtaactcgcgcttctggtgtatacgttgcgaacctccctataatataaatttagacgaaaccaattcacaacaatttaacaaaacactatataataaatttagttgcgaacctccctataatataaatttagacgaaaccaattcacaacagaaaaggtagacatcgccgacgctatttgttgcgaacctccctataatataaatttagacgaaaccaattcacaactggcatccatcttcaacttaaagtgtgcctgttgcgaacctccctataatataaatttagacgaaaccaattcacaacaaaatacgccaacacgttcagcggaagggtggttgcgaacctccctataatataaatttagacgaaaccaattcacaactgatgtgccatatagtaattttacacccggttgcgaacctccctataatataaatttagacgaaaccaattcacaaccggcaaccatgagaggcgcgggcgctttgggttgcgaacctccctataatataaatttagacgaaaccaattcacaactactggctaattgacacgatattcagccagttgcgaacctccctataatataaatttagacgaaaccaattcacaacataaagtccgatgtactgaatcgaaagtagttgcgaacctccctataatataaatttagacgaaaccaattcacaactaatctgcttctttcccggcgcgggcgttagttgcgaacctccctataatataaatttagacgaaaccaattcacaactcagaaactcaaagaaaccgccgatgattgttgcgaacctccctataatataaatttagacgaaaccaattcacaactgccgaggtaattgcgtcggttattgctatgttgcgaacctccctataatataaatttagacgaaaccaattcacaactgtgccgccgcgtatttggcggtttgtggtgttgcgaacctccctataatataaatttagacgaaaccaattcacaactgattcgtagcgcttattgctcgcgccgagttgcgaacctccctataatataaatttagacgaaaccaattcacaacagcaccgttgcgataccgttaccgcgcaggttgcgaacctccctataatataaatttagacgaaaccaattcacaacggtaatgagtagcgggacgccgtgtgcattgttgcgaacctccctataatataaatttagacgaaaccaattcacaactgcaggaacgggtggtagtagtaccggcaggttgcgaacctccctataatataaatttagacgaaaccaattcacaacgatgccgttagtgccgagaaacaaggtattagttgcgaacctccctataatataaatttagacgaaaccaattcacaacatacaatacctatcccgaaaggcgctcacggttgcgaacctccctataatataaatttagacgaaaccaattcacaaccgccgtccgcccatgttacctcggcgtttgttgcgaacctccctataatataaatttagacgaaaccaattcacaactacctcttgcaatggctctatgtggtgccgttgcgaacctccctataatataaatttagacgaaaccaattcacaacacccccttcgcaaaagccgagggtttcatggttgcgaacctccctataatataaatttagacgaaaccaattcacaactaacccgtatttaatagccatttccttttgttgcgaacctccctataatataaatttagacgaaaccaattcacaactacgcacgtccatacaggggccgaccgacggttgcgaacctccctataatataaatttagacgaaaccaattcacaacatacgctcctctttgccgctccacttagccgttgcgaacctccctataatataaatttagacgaaaccaattcacaactaaaaacaaaaaaaatggagggcgattccgttgcgaacctccctataatataaatttagacgaaaccaattcacaactagccccggtagcttcacaattaatttgagggttgcgaacctccctataatataaatttagacgaaaccaattcacaacggaacaattcagccgcaaaattggtaggcagttgcgaacctccctataatataaatttagacgaaaccaattcacaactgtccggctgtacacattggtgccgcgctgttgcgaacctccctataatataaatttagacgaaaccaattcacaacggccgcgctctgcgctcctacccatacggagttgcgaacctccctataatataaatttagacgaaaccaattcacaacgtccacaatgaagcattctttccctttttgttgcgaacctccctataatataaatttagacgaaaccaattcacaacgcttcgcatgataatgtcttccggcgaaagttgcgaacctccctataatataaatttagacgaaaccaattcacaacactgtacccgcatagacggtatgactgtatgttgcgaacctccctataatataaatttagacgaaaccaattcacaacctccgagcgtggctcttatgctcaggaatcgttgcgaacctccctataatataaatttagacgaaaccaattcacaacagcatacacgtactaatcaaccgcgcccggttgcgaacctccctataatataaatttagacgaaaccaattcacaacagaactcggcaaatgaggctgaaagaagtgttgcgaacctccctataatataaatttagacgaaaccaattcacaacatggggaatgtgtgaccctatcgggtacgtgttgcgaacctccctataatataaatttagacgaaaccaattcacaacactgccgaaatcctcggacatgccccggtggttgcgaacctccctataatataaatttagacgaaaccaattcacaactatcgacggctgcgggcgcggctacgcaacgttgcgaacctccctataatataaatttagacgaaaccaattcacaacagtatacatgtactaatcaaccgcgcccgagttgcgaacctccctataatataaatttagacgaaaccaattcacaacctctgccatttttaggtacccgcagccgtgttgcgaacctccctataatataaatttagacgaaaccaattcacaacttcccggccgatcttgcaaacccatgagcggttgcgaacctccctataatataaatttagacgaaaccaattcacaactaatctgacttagacatgttttcgggttcagttgcgaacctccctataatataaatttagacgaaaccaattcacaacagctgcccaatcctacttaaaaggcccgcgttgcgaacctccctataatataaatttagacgaaaccaattcacaacggtgtggaaaaagccccgaagcagcgttgcccggtttggaccttgcaggctgacaagcggggtggatagcaccgcgttgcgcagttgcgcccgtgtcggcagatcgaaatccacccctaccgcactcttgagcgaccgagccgtccagtcgctctcgtagtgggcaaaatctaccaccccatcccggagcttgcggtagtagtcggcgtaaacgccattaaggtcgtcttggatgaggtcggtgagggcccgcggccgccgatacatccgaactgccggagtagtaccaccatccccgtgcttgacgaggcgttcgccggcctgcgggagggtgctactcgccctggcaaaagggacggactggacggaggtcgtgccggcaaaccaaacgtactacgaatggctcaaggggcaggacccggattttcaaaaagaagcgatagggaagacgcgggcggaactgctgcgtagcggggagctttcggcggaacggttcgcggagctgaacctcaaaaacacgtttgagccccagacgctggcggagatgagggcgttggatgaggaggacttgaagagggcttttggcagcatggagaccgccgaagagagcgtcgaaccgctctttggcattcagattgtaatagttatccaacacagacaaaaacaggctcttaccgaaccagcgggggcgtaggagcggccggttccactgttttgggggctacgacacgggagcgctcgataacttttctgtgtcggcgttagcaatgtacaaccgcgatatccccttcttttccccacgaaatccgctcgtcccatgattttttctttgtttcttcccgccggtcaaagatcatgaggtatgacggggcgccgggggcggctttgtcacggtatttggcgatttggtccagcccctcctctaaaacctcttttggggtgtcccatgagcggagaagcttgatttcgatgatgaacttgtcgccccggtactctacgaacaggtccatcctgccacggccggcggcggattccggttctaccctgccgttgccgtttgtgaggcgctgaagaaaggcggtcaagagcaggtgcggaaacgcttcggtgtagtcggacttttcttcccatttttctgaaaaacgccgccaaaacgtctggaactctttgagcagggagtccatgtcgagcttgccgtctgcggtctgccagcgccagtttgagggcggcggcatcatgttgtggtagccggagttcaggtagcgggtcagtatcttttcgtaaatagggtttgagatggtgaacccggtcgcggtatcccactttataagcccgaggtctttggacagctctaccgccgggtcggcttccccgaaagacgggtcgctgtccccgatcatgattgtttctatgacgtgcctgattttggggtcgtttaggcgcacgtttagggcgtcgaggtgcgtttcgcgggcaaggatcatttcttcgcgcgcttttaggatatggtcgagggtgacggtttggtagtcatcctcgttgagtattgacgaggtggcgcgctcgaaaagcgagttgactatccaaggctgcccccaagactgctgatagacgtaattcagggcctcggcggttatttcctgcccggtttcggcggttcgctgcgcgaaaagggcggcaacgtcctgtttggagaagttggatataaaaaccgacgcgcgcttgatattaaacggcgaccccggattcggcgcgatgccgtctttggacgcggtgatgtagtcccgcaagtctctcatgccgaccaagacaacggatacggggaaagatcccggccctcgaacggcaaaaccgcctcgcaactggcgtagaaaactgataagtggctccccttccaacacatcaacctcatcaaagagcacaactagcggcttgggtaaaacctgttccgaccaccggtgcatagtttcatccaacaacagcgcaggctcgccgagggacatctccggtacgggaagtccggctttcttcgcaaaagcacagaccgccttgttaatagtaatcatcgctttcgcctgatcggttaccccctgacagctctcaaggctgacatagcaggctaccgcctcaccaccggcgttgatctcccgcgcccatgcctgcaagaacgtggtcttgcccgtctgccggggggcgtggagcacccagtagagcttatcccggatgtaccggctcagctgggcaccgacaagcctgtcggcagggggcaacatatagtgatccagtgggttacatggccctgtagtgttaaaaaagcgtacggggcgcttatccagatgatctgtcattatattctactccgctccgctacattgaacgggttcctttccggggacatccccctaaggcataatataattaatcggcggggctaacgccccaaaaatcgacctctggccgcaaatagcaagtacgtcgaaacgtcagctgggggggcaacatcggtttttaaacggccagaaacgtgttttcggctatatttaggcggtataaagagcatctgagtttatgcttctcgttaccggagattttggccaccgctttgccaccggcgttgatctctcccgccctatttggcttaggaagagaccgcgtaacctattgtcgttcgaggaattatgtgcatttgttggcatcgcttaagataccgggattgccgatgccaatcttactgagcggcatctttgcccaaccggataccagataaaatgtattccaacgcaaatgttcgagccgcgccaaattattccttggcgtatcgcaaatcataccgttttcagtatgaagatagtcaataataagttttgttctcgctgcttctgcttcgtcgcgctttttttggatttctcccatttcgattgtccatttaagctcgaatattattgctttgccccggccactacggtgcgtcattattatatcgcaccggcctaaaccggtttcgcgattggattttacggagtatttttgcattccggatagaatgcccaacatcacgccatgataaaagtcttccttgccatccatgtagcttatggtgtctaacatgaagtcgccaagctcctcctgcaggacaggcgcgttgccggagagaattgcctcgtaaagtttgctaagatcccgttgtttgacttgctcgcggaaccactcttggactttattgtaaaaaataatgtctaattccttgttcggaatcttcatttcaacgacgattctgcctttctcatcgactgactcagcgacttttttcaagtagccggtaaagaacatgaa

SEQ ID NO: 2260 - DNA, 24122 bp, synthetic construct
  source 1..24122: mol_type = other DNA
  misc_feature 1..24122: note = Synthetic
gctaataatgtatgcgtaatgaacacgccgggacagaatgcgaatgctgtagccgaattggtgtttggtatgttgctttatggaattcgtggtttctttaatggaacagcgggtattgaactgaaagataaaaaactggggatattggcttatggacacgtaggacgtaatgtggctcgggttggtaagggctttggaatggatcaatatgcttatgacgcctacgcatcgacagttaccatagaaaatgacggtgtaaaagcattgacttctgttgaagatttgtttaagacctgccagattgtatctttgcatatcccggcaacggcagaaacaaagaaatcgatcaatttcgaattgatgaattcaatgcctaaaggagcgattgttgtgaatactgcccgtaaagaagttgtggatgacgaagggttactgaagatgttttccgagcgatcggactttaagtattttacagatattcagcctggaaatcacgcggagctattggccgcttatccggatcgctattttgcgactcctaaaaagatgggtgcccaaactgcagaagctaatataaatgccggtcttgcagcagcaaatcaaattgtagatttcctgaaaaatggaaatgagcaatacaaagtgaataaataacaattgtctaacaaaataacatgtaatggcggtaataaaaccatttaaaggaatcagaccacctgtcgatttggttgagaaagtagcttctcgaccatacgatgttttgaattctgaagaagctcgtgaagaagcgaaaggaaacgaaaagtcgttgtatcgtattattaaaccggaaatagattttcctgtaggaacagatgagcacgatgcggctgtgtatgaaaaagccgtcgaaaactttaaactgtttcaggaaaaaggctggttggtgcaagatcaaaaagaaatgtactatgtgtatgctcagacgatgaacgggcgtacgcaatatggcttagttgtttgtgcttcagttgaagattatctgaaaggtaatattaagaaacatgaattaacaaggcgggataaagaggaagacagaatgaagcatgtgcgcatcaataacgcgaatgtcgaaccagttttctttgcttatccggataatgctgagttggatggtattgtgaaaaaatataccgataaagctcctgaatatgattttgttgctccattagatggttttggtcataccttttggcctattgataatgtgcaggatattcagcgcataacggaactgtttgcagctattccttccttgtacattgcggatgggcatcatcgttcagctgccgcagctttagtaggagcagaaaaggccaaacaaaatcctgcccatcgtggggatgaggaatataattatttcatggcagtatgttttccggccagtcagcttacaatcatcgattataatcgtgtagttaaagacttaaatggactttctgatgcggaatttctggctaagttatcagataacttcatcattgaagaaaagggaacggatatttacacaccggcagcattgcataatttctctctttatctatccggtaagtggtattctttaaccgcaaagccgggcacatacaatgataatgacccaattggcgtgttggatgtgactatttcttctaatcttgtgttggatgaaatcttaggaattaaggatttgcgttctgataaacgtatagatttcgttggtggaatacgcgggttaggtgagttgaaacgtcgtgtggataatggagagatgaaagtcgcattggcactttatcctgtttctatgaaacaattgattgatatcgccgataccggtaacattatgcctccgaaaacaacctggtttgagccgaagcttcgctccgggctggttattcatagtttagactaattaatattatatggggcaggctgaaaacctgccctttttgttgaaataaaaaccgtaaactatcagatgagtaaaataaagaatatcgtttttgatttgggaggagtgattattgatttagatcgagatagctcgcttaagcgatttaaggaaataggtgttgctaatatagaagactatctggacccttatgagcaaagaggaatctttcttgagttagaaaacggaggtgtagatattgaagaattccggattaaactaagtgaaattgtagaaaaacctttgacaaccgaggaggttcagtctggatggttgggttttatagaggctgtgccacagtataagctggattatatactggaattacgaaaaaactataatgtttttattcttagtaatacgaatccggtcgttatggaatgggctaaaactcctgctttttccgaagccgggcttcctgttaccgattattgtgataaattttatgcttcattcgaaatgaaagttactaagccaaatccccggattttcgatttgatgatacaggactccggtatgcttgcttccgaaactctgtttgtcgatgatggtaaactaaatgttgaaacaggagcaaagctgggatttttaacttaccaaccattgaataaagaagattggcgcaaaccaatagatcagatattgcaagggaatgcttaaacaagtgtcacctttatctcgcgctcacgtaacatttcgataatatgcgtgggcgcatttttatttgttataatatggtgaactttgtcgatgtcgcaaatcttgcaaaaacctcgtttgccgaatttggaggaatcagtcaggatgatgatttcttgcgaagcatcaatcatctgctgattaatacgagcttcgttcatgttgctggtcgtcagtccgtaatctaaatctatgccgtcaacgcccaggaaaagtttgttgcatgaaaggctttcaaggatattttcagcatagtgcccgatgatagaaactgagttcttcctcataataccaccaagttggattacttcaatattcggattgtaacaaagcgtcagcgaaaccttgacggaagaagtgataactgttatcatttcatctattgtgctgattgcgtcggcaaatgacaatagcgtggttccggatgcaataataattttgtcgttctcgtttaatagttgagccgctgcacgcgcgatacctactttctcttcctgatttattttctccttgtcgtcaatatgtctgtcggtgatgatcgcactcatactgcttgcactgccgtgattgcggtagagcattttccttccctcaagatgttttaaatcctttcgtatcgtcacttccgaaacctctaatgtttcgcttagctcctgtacctttacgtgacctttattttttatttgttccagtatatattggtgtctttcggcaatacttcgcatagcgtttgtgttttgtgtgtttatgcaaatatacaagattcgcgtatatcaaaagattataggagctaaaaaaacttattttgtttcatatatgtttcgataaagtttcgaaagcttatatattgtgttataaaagtttcgaaaaagctttgatatatttaaaacgtaattatctttgcaatatataaacctgcgtaataacaattaatacaataatttgcttgatgaaaagagaagatcacattaagaaaatagccgatactacaattggatgggatatccttgtggttggtggaggtgctaccggtatagggatagctttggatgccgcttcacgtggattcaaagctgtactgttggaacagtccgactttacgaaagctacatcgagtcggagtactaaattagtgcatggcggagtgcgttatctggcgcaaggagacgtaggtcttgttgttgacgcgcttcatgaaaggggatttatgcgaaaaaatgcacctcaccttgtgaaggatcagcgatttattatcggaacctaccgttggtgggaaaaggcgttttatacgattggattgacaatgtatgacattctggccggacgaagaagtttcggtcgctcattgccaatgcgaaagaaagaggttataagcgaaatacccggaatctcggaaaaaggactcaggggtggggtagtttaccatgacgggcaatttgatgattcccgtatgggcattaacctacttcaaacagctgttgagcatggcgctacagtggcaaactatgtgaaagtatccgctttgacaaaggatgcaaacggacggatatccggagttgaggctgtagatgaacttaccggtcagacgtataaactccaggctcgtgccgtgataaacgcaacaggtatatttgtagatgatctcatgcaaatggacgcgccggaaaaagaaaagatagtacgtcccagtcaaggagtgcatttggtggtggacaaatcatttctgggaggcgacacagcgattatgatacctaaaacaagtgatgggcgtgtaatgtttggtgtgccctggcatgataaggtggttttaggaactacagatacaccgatgaatgagtttgttctcgaaccaaaggcgttggaagaggaagtagaatttatactaaaaacctccggacaatacctgaccaagcaaccaaaacgtgaagatgtgctttctgtattcgcaggacttcgtccgttggctgcacccaaaaagacaacagatggtaaaaaaacgaaggaaatatccagaagtcataagattgttgtatcgcccagtggattagtgacaataaccggaggtaaatggactacctaccgtgatatggcggaagatgcggtgaatcgtgcgattactgtatgtaacttaacgaatgtgccctgcaaaaccgaagatatcttgatacatggctatcaggaaaaggtggatcgttcaaacttctcgtatgtttatggcagtgattatccgaaaatccgcgaaatagaaagtgaaacagcagaaaattcgaaaaaactacatcctgcctatgattacacagtggctgaagtgatctgggctgtgcggcaagaaatggcaatgacgcttgacgacgtgttgtctcgaagacttcgaataacgtttttggatgcccgggctgctatgaacatggctcctaaagtagctgcgattatgatgacagaaatgaagatgaacgaagaatggaaggaccggcaagtggatgagtttgttcatttagcgaaaaactatttgctggaaccctgattttctggcaggatatttatacttttgatttttggaataatctaatattgaaaaacgcatggaaaaatacatattggcatttgatgccgggacaaccagttcccgcgctattctctttgatagaaaaggggaaatctgttctgtagcccaaaaagaatttacgcaatactttccgcaaagtggttgggtggagcatgatccacgtgagatatggtcttcacaagctgcagttgctgctgaagcaattactaaaataggcgttaatggtctgaacatagccggaataggaataaccaaccaacgcgaaaccacaatcgtgtgggataaagaaacaggcgagcctgtgtataatgcgatagtttggcaagaccgacggacatctgaatactgtgatcagttgaagaatgacggacaattgcaacttattaaggataaaaccggactaataatcgatgcttactttagtgccacaaaagtaaaatggattttggacaatgtagaaggggcaagagaaaaagcagaagccggaaaattagtgttcggaacggtagatgcctggattgtttggcaactcactcgcggagaggtacatgttactgatgtatccaatgcttcacgtacgatgttgtttaatattcacacattgacatgggatgacgagttgttggaattatttacgattcctaaatccatgatgcctaaagtatgcgaatcaagtgagatttacggatataccaaaactacgatttttgcaactaaagtacccattgccggtattgccggcgaccaacaagctgctttattcggtcaaatgtgtgtggaaccgggaatggtgaaaaatacttacggtaccggatgctttattctgatgaataccggagaaaacaaagttgtatcgaagaataatttaattacaacggttgcctggaaactgaatggaaaagtaaattatgcgttggagggtagcatatttgttggaggcgcaatcgtgcaatggctgagagacggactaaatattatcaaatcgtctgccgaaatagaagaacttgccaaaactgtaaaagataacggaggtgtgttttttgtgcccgcgctaaccggattaggagcgcctcattgggatcagtacgccagaggaacaattgttggcatctctcgtggaacaacttccggacacattgcccgtgccgcacttgaaggaatcgcttaccaaacgatggatgtaatcaatgccatgattcttgacgccggagtagggttgaaggaattgcgcgtagatggtggagctgcgaaaaataatctgttaatgcaatttcaggcagatattctggggcaaacggtaattcgtccgcaaacaacagaaactacagccttaggagctgcttatttagccggattagcggtaggcttctggacaagtctggatgaaatacgcgcgcaatggcatgtcgatgtaactttcgagccgaattcaaaaattgatatgcatctggcaaaaaaacaatggaacgaagctgttcaccgtgctcaatcatggattaaataaccctaaaacttatactattgcatgggacaagatttattattcgaatttattggaaccgcaattttggtactgttgggagacggtgtagttgccaatgtgattttaaagggaacaaaagggcataattccggttgggttgtgataactattgcctggggattggccgtgtttgtagcagctttcatctccgcaccttattccggagctcacctgaaccccgcactaaccgttggtttggctttagccggactgtttgaaggaaatattatcggttatatcgttgcccaaatgatgggaggtatacttggtgcctcgttggtttacttgttttataaacctcattttgatgctgaagaagacagtactaccaaacttggcgtgttctgtacaatacctgcgattcgtaattatacatacaacttcatttgtgaagtaattggaaccttcctgcttgtttttggaatactgtatgtggcaggagcggaaatatccggtccttatccggtggcattattaattgtggcaatcggtatgtcgctgggaggtacaaccggatacgcgataaacccggctcgagacctggctcctcgcattgcacatgctatattaccgataaaaggaaaaagagatagcgattggacttattcctgggtgcctgtggtagggccctttaccggggctttattggcaggcggattatatttattaatatagagaaaaaggcaatccggattccggattgcctttcttataatacgaacgtgagtaggattaaagcttgtttgccgaacctaatacgttttcgattttgtgtttgtacaacttcttcatgttgtcgcgagccggacctaaatatttacgtgggtcgaattcagcaggcttagttgcgaaagtttcgcggatagaagctgtcatagccaaacggctatctgagtcgatgttgattttacataccgcagaagcagctgctctacgtaattgttcttcagggataccgatagcatctttcaatgcaccaccgtatttgttgatagtattaacctcttcctcaggaactgaagatgcaccgtgcaacacgattgggaagcccggaagttctttttcgcaaccttccaatacgtcgaaacgcaagggaggaggaacaagaacacctttagcatcacgtgtacattggtccggagtaaacttgttagctccgtgagaagtaccgatagaaatagctaaagagtcgcaacccgttttagtaacgaagtcaaccacttcttcaggtttagtatatgtatggtgctcagcagaaacttcatcttcaacacctgcaaggatacctaattcaccctcaacagttacatcgaattgatgtgcgtattcaacaactttctttgtcagcgctacgttttcgtcataaggcaggtgagatccgtcaatcataacagaagagaatcccatatcaatacagctcttgcaagtttcaaaagaatcaccgtgatctaagtgaagcacgatttgaggatttttgcagcctaattcttttgcgtactcaacagcaccctcagccatatagcgaagaagagtctggtttgcatactgacgtgcacctttagaaacctgaaggattaccggagaattagtttcagcagcagcctggataattgcctgaagctgttccatgttgttgaagttaaaagcagggatcgcatatccacctttaactgcttttgcgaacatttcctttgtgttcaccaagcctaattgtttgtaacttagcattgttatatgtgttattacgttattgattaaaaacttgtacaaatatacaaatattcggtgtactgtatgctattaaacatactaaaataacacaaaactatattacaaatgaaaaaatacttcccatttctttgtttcttcatgatgaatgaatacctttgcaagccaatttaccggttaccagctgaataaacagattataattaaaaataagataaagcaatgaaacaaggtattcaccctgacaactatcgtgcggtagcattcaaagatatgtcaaacgacgatgtattcatcacgcgttcaacaatcaacgcaaaagaaactattgaaattgatggcgttacatatccattaatcaaaatagaaatttcaaatacttctcacccgttctatactggtaaatctaaactggtggatactgcaggacgtgttgataagttcatgagtcgctacggtaaccgtaacaagaaataaggattcctcttaaggaaaactgaaaaacacaaaaaggctgttcgaaattatcggacagccttttttgtatcctgtcggtacgctattttctacacattactatacgtttaaaaagatatcctttatttttaaaaagatatcctttatttttcgaaaaataacctttatgtatttggctttgaatttcaacggctgcaaaaatgctgttttttaggaaaaacacaggcggattagtcccggatatcattggatttattaaatttgaaaataaacacagacaaatagcttagttgcgttttctaattaaaaaaataaaccatgatctatcaatttaaaattcaaattaaaggaataaaaaagccacccgtttggcgtcgtgtagcagtcccttcaacctttacctttgagcgttttcacgatgtgattcaactatcattcggttggttaaactaccatctgtaccgctttgaacccaaacccatggatcgcggattagtaatctccataccatcagaagacgactgggagccggtaaaacacgcaagaaaaatcaaactaaaagacatcttcaattcagaaggacaaacctatatgtacatctacgactatggcgataactgggaacacgaaatcaagctcgaagccatattgccggaaaacgccctcaaagccgtctgcctggccggaaaaggcagttgcccccccgaagactgtggaggagcccccatatacgaagaaataaaaagaatactacgagaaacccccgaaacccccaccgccgcacactacagagactggctcgaactcgccccagacgaaacctgggaagaactctggccctttaatgccaacgaagtaaatgaggaattgagattgttgtgagttgtggaaaaagaaaagcgacatataaaatatgccgcctctaatgttttcacaacggaataatccttattgtgatttgcttcaaattgtaggtgcaaatataataaaaaaatgaatttaatcaatataatgaaaaaaaatgagaactattttgggattagatcttggagtatcatcaataggatgggctcttgtcagagagggagataatgaaaatgaaacgtcatcaattatcaaattgggtgtacgtgtgaatccgttgactgttgatgagacctctaatttcgaacgcgggaagagtattacaacaaatgcggataggactcttaaaaggagtatgcgtagaaatttgcaacgttataaattaaggagaaacaacctgatagaaatactaaagaggaacggctttatttctgaagactccatattgtcagagacaggaaacaaaactacttttgaaacacatcatttaagagcaaaagcagtcaccgaaagagtaaccttggatcagcttgctcgtgtattattaatgattaataaaaagagaggttataaaagtagtagaaagtctaaatctcaagatgaaggacagttaatagatggtcttgaagtagcaaaaaggttatatgaggacaatctaactccggggcagctaatttatctgttcttgaaagaagggaaaaaaaatattcctgatttttatcgttcagatctacagattgagtttgataaggtatggaattttcaaagtcagttttatccggaaattttgactgacgatttaaagacaaaatcagaagggaaaagcaaactaaataccgcgaaactattccttgcattacacggtgtttatacagcagaaaataagaataaagataaacgcttgcaagcagctaagtggcgtgtggacggcttgaaaaaacaattgactgttgaggaagttgcttttgttattagtgaaattaacggagaaattagtaactcaagcggttatctaggtgatattagtgatagaagtaaagaactgttctttcacaaacagactgtagggcaatttttaatgatgcaactgaaaaataatcctaatacttctcttaaaaataaagtgttttatcgtcaggattatttgaatgaatttgaagcgatttgggaaaatcaagcgaagtatcatgatgtgttaacacctgaactaaaacaagaaattcgtgatgttgttattttttatcaacgcagattaaagagccagaaaggattgatcagtttttgtgagtttgaaagtaaagaaattgaaataattgtagacggtaaaaagaagataaagaaaaatggatttagagtatgccctaagtcttcgccaatttttcaagagtttaaaatatggcagatattaaatgatattgttgttaagaatgaaggaggtggttttgagaaacgtttcctaactcaagaagaaaaggaaactttatttaaagagctgaatataaaaaaagaaatgaaagcttctgaggtcataaaacttctttttaagaaaacctcaaaaattgaattgaatattgatagaattgaaggaaaccgcacacaagctgctttatttgaggtttatcaggatataatagaattgagtgggcatgggaaatatgtttttcaaaaaatgaattcctcagaggtgttagaattagtaagctctgttttttgtgctttaggttataatgttggactacttaattttgactcaactttagagggcagtagcattgaaaaacaacctttgtttcagttgtggcatcttttatattcttttgaaggtgataaatcaaatacaggaaatgaaaaactaattcaaaaaattactgatctgtttgggtttgaaaaatccttttcaactttgtttgcaaaaattacttttcagaatgattatgggagtctaagcgcaaaagcaataagacgaatattaccttatttaagagaaggaatgaaatacagtgatgcttgtttcaaagcgggctatcagcattcggctaaatcgatgactgttgaagagaaagagcagaagcagtataaagaacgattggaaaatttttcgaagaacagtttgcgtaatccagtagtcgaaaagatattgaatcaaatgataaatgtgatcaatttaattattgatacttatggtaagcctgacgaaatacggatagaactagcgagagagctaaggaagaatgcaaagcagcgtgcgttaatgactcaaaatataaatcagacagctataaacaatgaagaggtcaaaaatatattgaaaaataagtttggactatctcatattagtcgtaatgatattattcgctataaattatatgaagagctaaaacataatggttaccatacactctattctaaaacttatatttctccggaaaaattgttttcaaaagaatttgacatagaacatattattcctcaatcgcgattatttgatgattctttttcaaataaaacgttagagttaagtagtataaatcgtgaaaaaggaaatgatacagcatgggattatatatttaagaagaaaggagacgaaggtgttgaagattatgaacaacggctggattcactgtttaaacagagtgcgatttcaaaggcaaaatatgtgaagcttaaaattaaaggagatgctattcctgatgggtttataaatcgagacttgaatgatacgcaatatatagccaaaaaagcaaaagaaatattagaagaactggttaaaaatgtagtttcgactacgggtgccataacagatagattgcgtgaggattggcagcttgtagatgtgatgaaagagctgaactgggataagtatgataaattagggttaacggaggtttttgagaatagagacggtcatattgtaaaacgtattacggattggacaaagcgtaatgatcataggcatcatgcgatggatgctttaacagttgcttttacgaaacatgtttatattcagtatctcaataatttgaattcaagaattgataagacaagtgatatctatggtatagagcaaaaatatttgtcaagagatagtaagaacaagttgaaatttaaacctcccatgcaattgcatgaatttcgaaaagaagccagaatgcatttggaaaatctttttgtttcaattaaagcaaagaataaagttgctacaactaatgtaaatacgattgataaaaaagagggagtgagtaaaaagaaacagcttactccaagaggtcagcttcataatgaaacaatttatggccgtattcagcagtatgtcacaaaaacagaaaaagtcggcgcctcttttgatgagattaaaatagcgaaggtcgtacctgaatgtcataaaaaggctttacttaagcggttagctttatttgataatgatccccgaaaagcattttcaggaaagaattcgatatcaaaatctcctttgtttttagatgaaaatcatacggaaatgctgccggaaaaggttaagttagtcaatttagaatatatctataccattcggaaagaaatagccccggatttgaaattggataaagtgattgatcataaaattagaaaaattctacaagcaagattaaatgaatttggaggagataataagaaggcgttttcaaacttagaggaaaatccaatttggttaaatgaaaaaaaaggaatttgtattaaacgagttactattcgaggtgtaagtaatgcgaatgctttgcatgataaaaaagataaagacggtagatttattttagataaagaaggacggaagattcctgtggactttgttaatacaggaaataatcatcatgtagccatctataaagataaggctgggaatttgcaagaaactgtagtttctttttttgaggcaacaatgcgtgcaacccttcatcaaccgattattgataaatcttataacgcaagtgaaggttgggagtttctgtttacaatgaagcaaaatgagtattttgtttttccgaatccgcatactggctttgatccgaatgaaatagatttaaagaatcctgataattattcaacaatcagccctaatttgtttagggtacaaaaaattgcaacaagagattattttttcagacatcatttggaaactaatgttgatgataataatgctttgaaaggaattacctggttgagaataggacttggtggtcttactgatattgtgaaagtaagagtaaatcatattggacagattgttaatattgaacaggattgaggcttgatttattatttaaaaaaaagaggaggaattaagtattcctcctctcaaaataaaaaaagcaaatcacaactaaactcaatatttattgtattgaatttattttgttaaaatctaattttggaggtgatagcttttttatgaaaaagctatcatgtataaataaataccctccaaataataattaaaaaattgataagcattcatctgcaaagataaatttattttgaacatttattgagtttagagtcattttattttgttttggtgttaaattatgataaagaaaacattgtattttggtaatccggcctatttgagtctccgtaatgaacaacttattattaagttgccggaaattgaaaaaaatgattcgttgccagatcatttcaaaaaggttagtgaggcatcttttcctattgaagatttaggtgttgttatgcttgatcataaacaaataacgttaactcatggattaatagaaaagttgttggcaaataatgttgccctattaacttgtgatagtaccagaatgcctgttggtatgatgttacctctttcaaagaatactttacaaagtgagagatttgcatcacaaataaatgcctctgatccattgaaaaaaaacctatggcaacaaacaatcaaggctaaaataacaaatcaagccagagtcttgaaaaaacatagaacgtgtaatattcgtaatatgttgtattgggcaggggaggtgaagagtggagatgctgataatcatgaagcacgttctgctgcatattattggaaggaagcctttcctatgattgataactttacaagaggaagagattgtgatccccccaataatttattaaattatgggtatgcggttttgagagcagttattgcacgttcgttggtaggtagtggtttgttgcctacattaggaattcatcaccataatcgctataacgcttattgtttggccgatgatataatggagccgtatcgcccgtttgttgatgaccttgtattttcaatagtaaagagtggcgaaaattattcagaattaacaacttcagtaaaagcaaaacttcttgcaattccaacaatagatgtgatgatagaaaaacgacgtagtccattaatggttgcagcaggacaaacagccgcctcactaaacttatgttttgaaggtaaattacgccggataaagtaccctgaattgttataaagtatgagacagagtcggtttaatcaatatcgtattatgtgggttatagtattatttgatctacctactgaaactaaaaaggatagaaaagcttattcggtatttagaaataaactacagaaagacggttttactatgtttcagttttctacttatatacgccattgcatgagcgtagaaaatgctaatgtacatataaagcgtgtaaagaaatttttaccagaaaaggggcatgttggaattttatgtataaccgacaagcagtttggtatgatggagctattttatggaaaaagtcctgaatttaaagataccggagcccagcaacttgaattattttagaaaccccaaatcttaacacgtctcaagatttaaggtttctaaataataaaaaatcaaatgcaaacaacctttgtaatacgttgatatatacgttattactgtgtggtatactgtaatcaatgaactaaggtacaattttgaaagcaaatcacaactgaaagccctttaccttctacaacgtcaaactgtaatcaatgaactaaggtacaattttgaaagcaaatcacaactataaacgtatccatcatcttctatcacatactgtaatcaatgaactaaggtacaattttgaaagcaaatcacaactgaagtattctgttgataaaaagtactcaaactgtaatcaatgaactaaggtacaattttgaaagcaaatcacaactctatccatccaatatgttaattgatagcgactgtaatcaatgaactaaggtacaattttgaaagcaaatcacaacatacacaaccggcatcacgacattatccttactgtaatcaatgaactaaggtacaattttgaaagcaaatcacaactggcagacttaagagaatcaggcggtatcgactgtaatcaatgaactaaggtacaattttgaaagcaaatcacaacgccatcccaccaataatcaggaacgtccgtactgtaatcaatgaactaaggtacaattttgaaagcaaatcacaacagcaacggaatgatagttgtacccctcataactgtaatcaatgaactaaggtacaattttgaaagcaaatcacaacctccctgaaccttgaaaaaaaatgcggaggactgtaatcaatgaactaaggtacaattttgaaagcaaatcacaactatccccgttaatagcggacagcataagttactgtaatcaatgaactaaggtacaattttgaaagcaaatcacaacatatcacggaaaaaggaaatggctggtttactgtaatcaatgaactaaggtacaattttgaaagcaaatcacaactcttgttgacgtgcttcattgccgatttccactgtaatcaatgaactaaggtacaattttgaaagcaaatcacaacttccttgcggacataccaatagcttaggcactgtaatcaatgaactaaggtacaattttgaaagcaaatcacaacccgccgtacgccttacgattcgctaaaagaactgtaatcaatgaactaaggtacaattttgaaagcaaatcacaacctgtttcttcgtggtttatgtaaaagcccaactgtaatcaatgaactaaggtacaattttgaaagcaaatcacaacctatcaggtacaatgagaatgacagatcggactgtaatcaatgaactaaggtacaattttgaaagcaaatcacaactattatctttcttgccaacaatgtcaatagactgtaatcaatgaactaaggtacaattttgaaagcaaatcacaacccgccgtacgccttacgattcgctaaaagaactgtaatcaatgaactaaggtacaattttgaaagcaaatcacaacctgtttcttcgtggtttatgtaaaagcccaactgtaatcaatgaactaaggtacaattttgaaagcaaatcacaacctatcaggtacaatgagaatgacagatcggactgtaatcaatgaactaaggtacaattttgaaagcaaatcacaacggaatccatatctgttagtaaatcgtggaaactgtaatcaatgaactaaggtacaattttgaaagcaaatcacaacttgtagctgaaatgttcggctttgaacctactgtaatcaatgaactaaggtacaattttgaaagcaaatcacaacctatcaggtacaatgagaatgacagatcggactgtaatcaatgaactaaggtacaattttgaaagcaaatcacaacttgtagctgaaatgttcggctttgaacctactgtaatcaatgaactaaggtacaattttgaaagcaaatcacaacaaatggatgtgcctttggaatttaaggacaactgtaatcaatgaactaaggtacaattttgaaagcaaatcacaacaacttggttatacaatcattataataagcactgtaatcaatgaactaaggtacaattttgaaagcaaatcacaactttaagagaacggtatggtaagcctattcgactgtaatcaatgaattaaggtacaattttgaaagcaaatcacaacacgttgttacggattatattacgtgtgcggactgtaatcaatgaactaaggtaagcattcggcgtcctccgtctttttcttagctttacttggttctatctttgcccaaaaaagattatgtggaatctcaaagaatttgaagttgtctattcgcattataagtccagcggtctccgtgtcaaagacttttgtcataacgagtgcatttctttatcccgttttttctattggcagaagaagctgaagtcctatggcagagaattgccttccccttccggtttcgttccgttgatgttgaattcttcaggttctccggcaaagagttcttctgattattcggatgtttcatatcatcaatcaaaaaccgagtctgtttgcgaggtggtctatcctaatggaataaaactccgtttacctttagatacggatatccgacagttggaacagcttatcctcttatttcgttaagccatgtttaatctgaatgaatccatccgctattggttgtatcctttcccgaccgatatgcgtaaaagcttttataccttgagcgggatagtgaccgatcagatgggctgcaatatccggagcggtgatgcctttatctttatcaaccgaccttgcacctcaatgaaagtattacacatggaaaccggcggattggttatctatcatttgcggcttgaagagggcactttcaagcttcctgcttttgatcaagagagccgttctcaccggagttcctggaaaaatctgatgcttatgatacaaggcattgatgcgcaaacctgcaaacaccaaaaacgctggaaaggctgataaataaagggtgttaacccacttttttcttgtctgaatcgttgaagctccgtatctttactcttgtaataaagcggggatagatgcaggaaaacaacgaaaatacggatgaacttttgctggtgcttttggataaatgcgaccgtcagtatcaggagatacaacgcctgaaaagcaaactgaaagaccgtacggatgtagatgccctgcagagctcttatgaacaaaccatctcccttcagaaggaaaagatactttctctggaaagccaggtagcttacctgaaccgccgtttgtggggtaagaccagtgaacgctttattaaggaagatccccgccaacgtcgcattgactttgaggggatggatgttctgcccgaagaaaaggaactggtagagaaagcagcccaagagcttgccgcttccaaagaacgacgcacgcgtgagcgggtaaaagaaaaacccgtccgcaaacccttgccggaagatctaccccgcaaagaagaacatgtttaccctgcagttgataatctggacgataataccgtttggagcgaattggacccggaggtgaccgaagtgttggagtatgaaccgggcaagtgttatgttcgtcggattatccgccacaaatatgcgctcaaagataaacaacaggaagtggcaagtccaatcgtaacggctccgcttccagttgcttaccaacctctctcacgcagttatgccggagcttctcttttagcggaactgttgatcggtaaatatgtgaatcatcttcctttttaccggcagatacagatgctcaaacagatgggggtcaatcttcctcctcccacggtcaacggttggttccgagacaccgcggatttactccgccccctgtactatcggctcaaagaattagtccttgctaccgattatatacaggtagatgaaaccacgcttcccatcgtacaggaagagaagcataaaaccatcaagggatacatctggatggtgcgttctgtcatggactcactcgtattctttcattacgatcagggttccagggcacagaaagtggtattgccattactcaaagacttccggggagctttgcaaacggacggctatgaagtatacaaggtctacgaagacaagcagggtgttcttcctcttggttgttgggcgcatgccagacggaagtttgaagaggctttgaaagaagataaaaccagagcagaatatgccttggagcagataggtctgctctatgaggtggaacgggaagctgattaccggaatctcacgtatgaagagcgggcccaaatgcgcgaacgtcttgcgtatcctatcttggtggtctttgagaaatggttggtaaatgaataccctaaagtcttgcccaaaggtcggattgggaaagcgatcaaatacacttacgggatttatcaccgtctgacccgttatcatctggacggccgatatcgcatggataataatctggccgaaaacagcatccgtcccctggctttggggcgaaagaactatctcttttgtggaaatcacgatgcggcggaagatgccgcagtgctgtactctctactgggctgttgtaaagcggttgatgctaacttccgggactggatgctctatgtattgagtcacatccatgactacgataccgattatacgaaagatttggcagaactgttaccacacaagtggatgcaaaaaaactccaaagaaaaatccaagaaaatctgaaacgactccgaatgttttcgtagtttttgaaagttacttctctataactgaaaatcgtttgctatcaatacgggggacaccgaatgcttacgaactaaggtacaattttgaaagcaaatcacaaccttcacggcttggtccttcatacggtagtcactgtaatcaatgaactaaggtacaattttgaaagcaaatcacaacagttgcctcatcgtacttgattggagtgcactgtaatcaatgaactaaggtacaattttgaaagcaaatcacaacttagccgcaaggatataatcataacttcgaactgtaatcaatgaactaaggtacaattttgaaagcaaatcacaactgaatttataggttcagatactgttccgaaactgtaatcaatgaactaaggtacaattttgaaagcaaatcacaaccgtgagcgccttttccaaggagggtatacgcactgtaatcaatgaactaaggtacaattttgaaagcaaatcacaactactgttaaaatataactgctgtgttcctactgtaatcaatgaactaaggtacaattttgaaagcaaatcacaacgatactccaaccactccctgaataccgcttactgtaatcaatgaactaaggtacaattttgaaagcaaatcacaaccacgcccccgtaccttgcgatacgtcaattactgtaatcaatgaactaaggtacaattttgaaagcaaatcacaacttctgacgctattaaaaaagcggaagttgactgtaatcaatgaactaaggtacaattttgaaagcaaatcacaacacctatatgtaaatttccgaaccgcagttgactgtaatcaatgaactaaggtacaattttgaaagcaaatcacaacacctatatgtaaatttccgaaccgcagttgactgtaatcaatgaactaaggtacaattttgaaagcaaatcacaactggtaagtcacggcttccctaaactacccactgtaatcaatgaactaaggtacaattttgaaagcaaatcacaacgcatccactgtttaggttaccactgtttcgttaacattcggtgtgctccgttttgtttacatttgattcttttatatagttgtttgggtgtaattctggcttttcttacgagtagtctgtgtcatcgttaggggtatgactgcgcacgtatatcattcaatacgggaattacatactattgattgaaactttaccgtttgataatccggatgctccggattatttactcgatcaacgtcaagctcgatattagtttatgtcttaattttatgcttctaagtcaataagttttccttctttgttgtatgccagatcaactccatgttcatcatcccattcgcaatcacagtgtaaaataagttgcatttcatctgtattcccaattcgttccacgtacagatcttttaaatatatgtagttccaaatttcactttcaacagctaaatgagcaagtgtatgatgcatctcattctcttcgtcccaaacatctgatataaagtttatacagtcttggtggagcaaatgggtaagttcatcgattctgtcttgattggtttttgccaaaaagatttgtaacaagctatcagcctctgccatgaaattagcatccaaagcaggggtgtaattggcaaaagtgatcggaacattctgcttattccaataaggaatttcaaccgctttcaacgtccaccaatcgtcaaactctcctttaggtataactcctaaaactgctgaggtaatttctgtttctttgctcaccaccttctgtttaaccttgatttcatcgcaaaggcttttgaagactgtatcacgctcttcttctgtttttataccgtagagaagtttgcgtcccagttcatttttattagttactatgtctccaacctcatcactggttatcgtaatctggctatacccatctcttggctttatgctcaactgggtatacgtgtagtgaggcaaaaagtagcaacaatggcccgaaggaaaatgataaagcaaaccatatctaaactccgtttcggtgtcaggttctcgttgcagcacgggatgatacttgcggataatccagaaggattcctctgcttcatcccacgcacaaagaggataattttgtaggagctgttctacttctttctttttgtttgccagtatgttagattctgatctttcgatctcccagccggttaatgatgtgtacatttgtcgtaatttattggatgattgtacgatgagttgcttgttgtttttgaagtacaagatgaactcttcaactttatggtcgcaaaaataagtttattctatcagaaacctttgctgtgtggatagaaaaaatagtcaatattgcttttccgaaggtagcgagtaaggttcaaactggtcaaaatcattggatgatcactctaatggaaaatatggattatcggagaaatgccgggagagcaatgaaacggatgagagataggggtatgtaaagaaggtgtaggtgagtacaccttctgaaggtttttttagtgaaatctgtttgttacacagacgctcaagtctgcttttccattgatggcttccacgaatgttttaaagtgggccgtttcgttgtgtgtgttgatggcgtcttgagatttccatacttcgataaatgcgtaggtcagcggggtgtttgattttcctaattcgtaataaacacatccttcttccgcgcgggaaccggctactactgctgcaacaagcgttccctttcggaagatagtcctttgccggttaatatgcgcaaaataagggtagaacatcgtgtggtaagtggaatccatgatatctatgtctgtttatttgacgagatcgattttggtcgtattttcaattgttgtccggcaagtcgttccgtgatgaaagatattgtgatggccagattatcgcagccttgcagtaaacgcacctctgtggaaatgcaggaaagagactatggaataaaaataccattggaaaaagtctatcgaatgatggatgttttgacagatgctcgtataaaacaacttcaacagttaagctggaatcattcccggtcacttctgactaaagaagtcaagatcatgttttatgattgtactgccccgtattttgaaagttttacggaggatgaattccaaagcttcggttacagtaaagatcataaattcaatcagggataagtgttattggccttgatggtaaccgaataggggttttcggtcggttaggacgttttcccaggaaatatgtatgaaggtgacacttgtctgcagatgaggtattgagtcaaaatcacggtctctggcaagtggaagaatcgttccggctgcaaacatgatttacgtgtatgccctgtctttcactggtcatctgatagaataaaagctcatttagctatatgttttgccgccttttctttgattcgcttccttcaatatcgtattctaaaagaaaaacaggaaggttattcgaccgacaggatacgacaggaacttttccgtgtacaagaaagcatagtttgtcatacgactaccgatgatcactatgtgataccctccaaacccagtactgaagccaatttaatctatgaaaccatgcagatgaagcgacacactgtgccctttaaattagaga

SEQ ID NO: 2261 - DNA, 24122 bp, synthetic construct
  source 1..24122: mol_type = other DNA
  misc_feature 1..24122: note = Synthetic
atcattcacataatatttataaatgaaaaactatatttttactattgtactcatatttatgggtatggggcttcgtgccaataatcccgtgcgagaagggaatataattgatggtcatgttttggtaaagggttcggaagagaatataccctatgcgacaattcagatcgtagggcattcttatgggactgtttccaatgaagaggggcagtttgagtttaaaggtttacctgctggaaaatatacattgcgagttcaggcattaggctataagaaacaggacaaagtagttgaagtgagtaaagaatatgctactgtcgtacatttcctgatggaagaagaaacatttgtgacggatgaaattgttgtttctgccaatcgtaatgaggtgagccgtaaggaggctccggtcattgtaaatgtaatgggagcaaagctttttgaaacggtcaattcaacagatttggccaagtcgttatcgtatcagtcggggttacgggttgagaataattgtcagaattgcggattcccacaggtacgaatcaacggcttggaaggaccgtattcccagatcttgataaatagccgtccggtaatcagtgctttgtcgggagtatatggcttggaacaaattcctgttaatatgatagacagagtggaggtcgttcgtggaggtggttctgctttatttggtgcgaatgccgtaggcggtacgattaatattataacgaaagatccggtaagcaattcatttcaggttgcatctactatgtcgaatatgaacggacagagttgggagcaatatatgggtgctaatgtttctttggtggcaaaggataatagttatggcatagctttgtatgaatcttaccgaaatagaaatccttacgatgcggatggcgatggattttccgagttgggaaaattgaatatgaatactttcggatttcgttcttattacagaccgacaaagttcagtcgtataaacctggagtatcatacgacaaatgaatttcgtcgtggtgggaataaatttgatctgcaaccgcatgaagctgatattaccgagcagacaaagcatgtgataaacagcgggggagcaagttatgatctttcatggaaagaatataagcataagatttcagtatatggttctatacagcatacggacagaaatagttattatggggctcaacgagatttgaatgcttatggtaaaacaacggatctcacttgggtagttggtgcgatgtatataggtaatatgaagaaatgtttatttgctccggccacattcaccggaggggtggaatatcaggataattcaatgcatgatattatgaccggttatggtagagatatgcagcaggatgtacgtattgccggtacatttattcagaatgaatggaagatgaaacaattcattttattaataggtggacgtctggataaacataacctgattgataatccgatatttagtcctcgtataaatttgttatataaaccgaccgataaattgcaggcccgtttgacttactctacaggattccgtgctccgcaggcctatgatgaagatttgcatgtaacggccgtaggaggggagggaatgttaattcgtttggcagaaggattgaaaccggaacgctctaatagttttagtggttcggtagactggactgcgaatttcggacattttcaatccaatttattgatagaaggtttttatacggatcttcgtgatgtgttcgtgctggaatctatcggacatgataatggtaatttggtaaaagaacgtcgtaacggaagtggtgcacgagtgtttggtgcgaatattgatgcgaagattgcgcatggtaaagaagctgctttgcagcttggatttacggtgcagagaagtcagtataaatcagcggaagcatggagtgaggatgaagctgtggaaaagataaagcgtatgcctcgtacaccggattattatggctattttacctttacaagtgctccattaaagaattttgattttgctttatccggtacatatacaggtaaaatggtagtgccgcattttgctccaagtgacatccctgctgaatttgcgaatatgtatattaaacaagatcgtttggaaaggacacccgatttctttgatttgaatattaaattaaactatacttttgtgttgcatgatcatattaagttgcaaattaatggaggtattcagaatatattcaatagtttccaaaaggatttggataaaggagaatatcgtgattccggttatttttatggtcctactcaaccaagaacttattttgtgggaattaagattatgaattaggaaaagagctattgatctgtgataataaagcgaagaacctgctgaatatagctattttataaatggtagcaggttcttcacttttataaatggggattatctttcgaaaactctgctgcgtgctaacatatatgctccgataacgccagctttatcttttaatttagatgttgttattatagagtctttgctcaccaagttcaaagaatatttgcgaatggctgattttataggtcgggtaatataatcgccgatggcagaaactgttccacctgtaattaaaatatttattatttagaaagagttagatgtgctattctaagttgttgtattatagtagaattgaattaattaaaataataagaatgacgacttactttcttaaaatagtaagtcgtatatcgtgaatctattttggcttgacttcattaatgagattcttaccctctgtataagatttgatattttctaatgtggtggttgcaatatttcgcatagcttcatgcgtaaaaaatgcctgatgggaagtgacaataacatttggaaaggataaaagacgtgctaatgtatcgtcatcaataattttatccgacttatcttcatagaaatattcactttcttcttcataaacatccagaccggcataaccgatttttttgttttttaatccttctatcaaagcattggtatgaatcagttgtccacgaccggtattaataagcataacaccatctttcattttactgatagaatagtcattaatcagatatttagttgtatctgtgagcggacaatgtagtgagataatatcggaattatgataaagttcgtctaatgttgtataaacgacttgatgttcacgggcaaaattatagtctggatataaatcataagctaatatattcattccgaatcctcggagtatttgaatcaagattttagctattttgccggttccgatgattcctactgtttttccatgcatatcgaatcccattaatccgtggagagaaaaattcccatcacgggtacgccatgttgcgcgtggtattttacggttaagagatagcatcaaggctactgtgtattctgctactgcataaggtgaataagcaggtacacgtaccacggtaattctatttgcttgtgctgcagataagtctacattgttgtatcctgcacagcgcagagctaataatcttactccattatcagccatgactttaagtacttctgcatccgctatgtcatttacgaatatacagacagcatctgccccctgagtaagcatgacgttgtttttattgagatgacctttgaaatatttaatctcaaacccaaactttttatttaccttatcgaaagatacttcatcgtaaggctttgttccgaaaaatgcaattgtgtatgtcatatagtcttttttattgaaacaatgagctatgtaggaaagtttgaatcaagatggataataagttgattatatatctgcttggatttagaaagaagttttttctcttttataaatattgtaatagtttctcttgaaacaatcagcttaaagtatataaaacagataaaatttaatggttattgaacttatttgcacaagactattgtgtgtgtgcaatattgtcgtatctttgcacctgaattaatttaaaaactgttataatgaagaaaatttcattgattagtatcgtgttgctaaccgtttcaactacaacttttgccggtggacttctcaccaatactaaccagaacattgcattcttaagaaatccggcacgagatgcttctattgaaattgatgctgtatattcaaatccggcaggacttgctttccttgctaaggatggttttcatatatcactaaacggacaaagtgcatttcaaactcgtacgatcacttctagttttaaacccttcttgatgaataccgatggcagaacaacaggtacagacggtagtcgtgtatataaaggtgaagcatctgctccttttattccatctgtgcaggctgcgtataagagaaataattggactttctctgctggatttgctgtgaccggaggtggtggtaaggctacgtttaatgaaggacttggctcttttgaatcacaggtggctttacttccgttggcattgcaacaagccgggtataatgctactcagtattctgtagatagctatatgcgtggtaaacaatatatttttgggttgcaattgggagcaacttataagattacggattatctttcggcttttgttggagctcgtatgaattatgttagtaatggctatgaaggtcatatccgtaatatacaggcaaatattggtttaaatggtgagatgattaacgtgaataaatattttacgactgcagcagaacaggcatcacaagcagcagcggcttatcttgctgccggaaatcaagctgcagcagaacaatatacggcattggccatagctgcacaagaagttgccggtcaaactgctgataaaaatttggattgcgatcaaaccggttggggagtaacaccgatattaggacttgactttaagtggaagaaatggaatgtaggtgtgaaatatgaatttaataccaaactgaatgtggagaataagactcgtgtagatgatacgggattatttaaagacggtgtaaatacacctcacgacatccccagtatgctgacggttggtgtatcttatgaaatacttctggtacttcgtgcatcagtaggttatcaccatttctttgatacacatgcaaagatggcgagtgataagcagaaatctatcagtcagggtacgaatgaatatctgggaggtattgaatgggatgtttgtaaatgggctcaggtcagtgcaggaatgcagcgtactaaatatggtttagaagatggttatatgtctgatatgagtttcactaccagttcatattcttttgggtttggtgcaggattccggttaatggaagatttgaaattgaacattgcttatttctggactaattatgatacttataataaagtaactgctgactataatggtacaggattagattttaaagatagttttacccgtacgaataaggtattcggtatcggtttggattatcgtttctaatttattcggataatagcttattgtaagagagggttctaaaaaatcctctctttctttttattattcccttataaactgctatctttgcaacccaattaacgtacgatgccgtgaatagcggtcgtgtattctagaacaccacgtaaaaaacaggaaaatgaaaaataaagtatctgtaccctttatgctgttgggaatacttttttgtgtatgtctcgtagcatctaatttattggaaaccaaagttgttcaactttggggcattacggcaactgccggattgatcgtatttcctatttcttatatcattaacgactgtatagccgaagtttggggctttaagaaagcgcgcctgattatctggagtggttttgcaatgaactttttggtaatcggttttgcgcaattggctgttatgcttcctgccgcacctttttgggaaggtgaagagggcttcaactttgtgtttggtatggctcctcgaatagcagttgccagtttgacggctttccttgtcgggtctttcctcaatgcttatgtgatgagcaaaatgaaagttgcttccaatggaaagcatttttctcttcgtgccattctctctactttagtaggcgagagtgcagattcattaatcttctttccgattgcattcggcggactgattccggtgaatgagttactgataatggttgctacacaggcggtattgaagtcactttatgaagtcattatccttccggttactatatatgtggtgaagtatataaaaaaggtagatggtagtgatgtgtatgatgagcacatttcttataatgttcttaaaatcaaagatatttaattcgtatgaataaagaaacagcattggtcgtgttcagtggtggacaagactcaactacttgcctgttttgggctatgagagagtttaagaaagtgtatgcattgagttttatttatgggcaaaagcaccggaacgaagtggaactggcccgtcatatagctgatgaggctgaagtggaatttgaagttatggatgtatcctttattgggaaattaggaagaaactctttgacggatatgtcgattccgatggatcaggaaaagccgacggatagttttccgaacacttttgttccgggaaggaatttgttctttttgagtattgcagctgtatatgctcgtgaaaaaggaataaatcatatcgtaactggagtttctcagactgattttagcggctacccggattgtcgtgatgcttttattaaatcattaaacgttacattgaacttggcgatggacgagcagtttgttatccatactcctttaatgtggattgacaaggcacaaacatggcaacttgcggatgagttaggggtacttgagttgattcgccgtgaaacattgacttgttacaatggtgttcaaggtgatggatgtgggcattgtccctcttgcaaattgcgtaaagaaggattggataaatatctggaagcaaagaataaaggtataaaattgtaataaaataataggaatggcagatttaaaagagcagctttctcttttaggaagaaagacggagtataagcaggattatgctcctgaagtattggaggcgtttgataataaacatccggagaatgattattgggttcggtttaactgtcctgagtttacaagtttatgtcccatcaccggacaacctgattttgcggagatacgcatcagttatttaccggacatcaagatggtagagagtaaaagtctgaaactttatctattcagtttccgtaatcatggtgcttttcatgaagattgtgtcaatatcatcatgaaagacttgattcgtttgatgaatccgaaatatattgaagtaacaggtttgtttactcctcgtggcggtatttctatttatccttatgctaattatgggaaacctggtacaaaatatgaagaaatggctcatcaccgtatgatgaatcatggtatgaaatagaagcctgattattatacatacggtcgattgattttaaaggtgcggtcctttgtttacaaactcctatcgtttgcaaacaaaggaccgtatgtataaaaaacacttaatgggaagattctttttgcatcttatcgaccaattgattaataaatatctttggtcttttcagcctcttttgtatttagtatatcctttcccttttcttagggttgaaagagctttctgtactttcattatttgtcatttctctatgtatgatagctttgtgctttgattaacatgaatatgaccactgctgcaataattcctatttgcaaccaatcagcccatacgcccaaagtcaatgacatactaatccattgccaaagtataacaaaaatacctaaaccaataagcatgttacgcatcatggaggaaagtccatcgatgtccaccttggctttttcttctttcgacatagtattgtaacctgcaatcagattaggaaaacgtttcaccaaaagaccacataaaatgagaatgcctccggttataaagtttacttccataattctaatacattaatttgattaattgtctgcagattatatcgcttgcaataatgatgacggcatatgacaatcctaatttccaacctttaagattacatgaaactttgaaagcctgatacatccaaatgagaactatcactataaataagatggatggaaacgtaatgaatgctccttttatcatgtccggctgttgcataatccattcaggtgtggcagtagtcggaatattcattagtttctgaactgattcgggaaagaaaaataaattcatcaatataaaaggtagttgagcgaaagcaattgttccgaatacgtcgatacctctgatgtgtgagggagaaagtaacttgccggctacaaagaataatatggaaggaattaaccatataattatatgttctccggcaaagcaccaccatgcattgttcgaggccggaccgaaatgcagtagtccgtgataatggatcggtgctatgatggacatagcaattgagataataatgcctgcaatgccccataagagagcttgtatacccgctattttcaggaacggattagacagtgtactgaaaaaatgttttacgtttgccatagttatgatattttgttgagtttgataatcagatcgtccaataaattacgtacggtaggatagcttagtcccatactctttgccatatcctttaggctaccgcttgctttcacgaagtctaagacaaaagtttgttccttttctgtgagacgggctaggggaggaagttcaaattctccgcatactttagtgccgcattgttcgcaaaatagttcgcttacttttaaagatgtatcacagccggggcactgtaaaggcaatcgtttcttaatttccattttgttaatccataagtattgttttgcaaatatagaatattattttaatattgtcaattatatatttaataaaattgaattatatattcgttttattcattttgtgaacaacgttttccataatctgttctcatgtttggaaatctgtaactatgctgttaggattatatttaattgcgatattgaaattagggagaacagaaactaaaatctactctaaaaaatattttcgtttcaattctttctaaattttatttatctttgcacaaaatgtcggagtatatccggcattgttgattagacataatattatcagaacaagaaactggcactttcaaagacaaagataatatgatgtctgcgctagcttgtattgcaataaatataagttctggtgcgggcatgctgtattctcttttgtcaggtatgccagtacctttgttctgggattacaagtatgcttgcacctttttaaataagggtgagcatacacaaagacaaagagtatgaaaaacccggaaacacaagctttacgcagagctttgacgaaagtgcgcagacaaaacaacaaagaaaaggctgaaatattaaagccgtttttagagatgctggatttaagtatcagttctgatatgttattctttagcaaagatgatccagaaagtattttccctttacctcttgataatatatttggtttgcaaatggatgaagattatctttatctattttgtcagaatggatatgtacatattctcgggataagagaaagaggacacttggttcaatttttggaaaggaaacgtccaagtgttttggagcaatttaaatattttctttggagttgcttcggtaaatcataggaatgatattataccatataatatggtagtccaacttattattatcaagactttctttagtggttaaagattgaaaaagaaaaaagcccccgataaaggacgagggcaacctaaatgttttcacaacggaataatccttattgtgacttgcttcaaattagttttgcaaaaataagaaataattttctacaaaacaaccttctgtagaaataaatttgtatttttgaaaagttttgataaagattctattatgaaaaagattttaggccttgatttaggtactactagcataggatgggctttggtaaatgaagctgaaagtagtgaagagcaatcatcaataatcaaacttggtgtgcgtgtaaatcctttaagtgtcgatgaacagagaagttttgaacaaggtaagagtattgcaacaaataccgatcggacattgaaaaggagtatgcgccgtaatttgcagcgatataaattacgccgtgagaatctgatagattgttttaaagagaatggattgataactgatgagactttattgtgcgagaatggtaaccaaactacttttcaaacctatcggttacgtgccaaggctgtaacggaggaaatctcattggatgaattggcgcgtgtttttttgatgataaataaaaagcgtggctataaaagcagccgtaaagtaaaatctgtggaggaaggacagaaaattgatggtatgtcggtcgctatgcaattgtatgatgaagatataactcctggtcagttagtattatcattatttaatcaaggtaaaaagtatgttcctgatttttatcgttcggatttgcaaaaagagcttgatagaatatggatgtgtcagcaacaattttatccggaaatattaacggatgaatttaaggaattgctgaaaggaaaaagtaagtcgaatacaattaaaatatttctaggaaagtataagctgtatacggctgataataaagggaaagataagcgattgcaagtttatcaatggcgtgttgatgctttaacaaaacagctttccattgaagaagtagctttggtgattagtgaattgaatggagctattgatagctctagcggttatttgggagcaattagtgatcgtagtaaagaactatattttaataagcttaccgtagggcaatttcttctgagagaattagaacgcgactctaattggagtcttaaaaataaggtgttttatcgtcacgattatttggatgaatttgaagctatttgggaaaagcaagcgacgtttcatccggagcttacttctgaattgaagaaagaaattcgtgatattattatattctatcaacgtccactaaagagccaaaaaggattagttggtttttgtgagtttgaaagtcgccaaatggcaatttgtatagatggaaaacagaaaatgaagacagtgggttgtaaagtatgccctcagtcatctcctctttttcaagaatttaagatttggcataccctcaataatttgcgagtgattgaaaaatcatcgaacttatcgcgtttcttggaacaggaagaaaaggaaactctatttatggaattgagtgttaaggataaacttaataagaaagatgcccttaaattgttatatagaaattataaggatttagatttgaattatgaagatttagaaggagattgcactcaatcgatattgtttaaagcgtatcaaaagattattgcaatgactggaaacggagaatatgatttctctaggatgccgtctgatgaaataaaagaaaaggtaaaggttatttttgatggattaggatataatacggatatattattttttgattcgtcaaaagaagggcatacttttgataaacaaccgatgtatcagttgtggcatttgctatattcttatgaaggagacaaatcaaatacaggcaatgatagtttgattcgtaaaataacagaactttgcggttttgaaaaggaatatgccaatataattgctaatataacatttcaatcggattatggcagtctaagcacgaaagctattcgtaagattttaccttatatgaaagagggaagttgttataatcaagcttgcgaatttgcaggttatcgccattctcagcgttccttgacaaaagaagagttggataagaaagaatataaagatcatttggatcttctccctaagaatagtttgcgtaaccctgtagttgagaagatacttaatcagatgataaatgttgtgaatcatgtggttgatacatttggaaagcctgatgaaatccgtatagagttggcacgcgaattgaaaaagagtgcgaaagaacgcaaggttatgactgagaatataaataaggcgacaattgaccatgataagtatcggcaaattcttcaaaaagaatttgggttggtgaatgtgagccgaaatgatataattcgttataaattatatttagaactaaaggataatggttataaaacactttattctaatatgtatatacctcaggaaaagttgtttagtaaagaatttgatatagagcatattattcctcaggcgaaattatttgatgattctttttctaataaaactattgagagcagaaaggttaatattgagaaaagcaatttaacagcctatgattatgtattgaataaatatgatatcgaaggtgtgcgtgattatgaagtccgtatcgagaatatgtataaaaatggtgcgcttcgtaaaacgaagtataataaactattaatgaaagaggctgatataccaaatgatttcattgagcgtgatttacgtgattctcagtatatagctaaaaaagcccgtgagatattagaagatttggtgaagtttgttgttcctactgtaggttctataactgaccgtttacgtgaagattggcaattggtagatgttatgcaagaattgaattgggataaatatgataaattagctttaacggagattgtagaagacaaagatgggcgcaaaattcgacgtataaaagattggacaaagcgtaatgatcatcgccatcatgcaatggatgctttaacaattgcatttactaaaagatgtattatacagtatttgaataatttaaatgctagaagtgataaatccagtagtatttatggaatagaacgaaaggagctctatcgcgataaacatgaaaaattgagattcattcctccgatgccattagatgtgtttagaacagaagcgaagcggcatctcgaaagtgttctaatttctataaaggctaagaatagggtagttacaccaaatattaataggacaaaagcacagaatggttataataaaaaagagcaattgactcctcgtgggcaattacataatgagactatttatggtagtataaaacaatatgtaactaagatagagactgttggtggagggtttggtgctatgcaaatagcaaaagttgcgaataaaaaatatcgagacgctttattggcacgtcttgttgcttttgataatgaccccaagaaagcctttaccggtaaaaatagcttggagaaaaatcctatctatttagatgaacttcatactcagcgagtgccgataaaaattaagactgtaactttagatacaatttatacgatacgtaaaagcatttcaccggatttaaaaattgataaggttgttgacgttaaaattcgtaggcttctggagaaacgtttggtagactatggaggagatgcaagaaaagcattctcaaatttagaagataatcctatttggctgaatgaagaaaaaggaatttctattaaacgagttacgataaccggagtaaataatgcagaaccattacattgtaagaaagatcataatggtgaactgatattggattctgaaggaaaaaaacaacctgtggactatgtaaatacaggaaataatcatcatgttgctatttatcgcgatgaaaagggagaattacaagaaaatgttgtttccttctatgaagcaacagctcgcgctattttaggtgaagccattgtgaataaagcttataatgattctgaaggttggagtttcttattttctatgaaacaaaatgagtattttgtttttccaaatgagaatacaggctttgatcccaatgaaatagatttattagatccggataactatgcattaatcagtcctaatttgtatagggtacagaagataacctcaaaagattatgtgtttaggcatcatcttgaaacaacagttgagaataaaaaagaactgcagaatattacttggaagagagttacttcacttactaactttgataaaattgttaaggtcaggattaatcacattgggcaaatagtttttgttggtgaatactaaattgtggtggaaaagaagattaagtatcttgcagtaggactaataagtagatcgaactttattaagtcatagctgatatccttgtatattttataatcggcagtaataaactttaaatactagtactatgataaagaaaacactttatttcggaagtcctgtttatctgtccctacggaatgcacaattagttataaaacttccggaagtggagaaaagtgcgtctttgccggatacattcaaaaaacagtcagaagttacgaggccggttgaagatctaggtgttgtgatattagataataggcagatcactataacttccggtgtgcttgaagctcttttagagaataattgtgctgtaattacttgtgatagtaagagtatgcctgttggattaatgctacctttatatggaaatacgactcaaaatgagcgatttcgtcaacaattagatgcttctcttcctctaaagaaacaactttggcaacagactatcaaaacgaagattgataatcaagcttctgttttgaatgattgtgtaggagaagaaatgaaatgtatgcgcgtttgggcaaatgaagtaagaagtggagatcctgataatttagaagcgagagcagctgcgtattattggaaatctttatttggttatattgaaggattttctagagatcgtgaaggaattccgcctaataatttactgaattatggttatgcaatacttcgcgcgatagtggctcgtggattagtgacaagtggtttgttaccgacattgggtatacatcatcataatcggtataatgcttattgtttagctgatgatataatggaaccttatcgtccttatgtagacaggttggtttatcagttagtgcagtcttatggatctgaattggaattgacgaaagaaataaaggggagtttactttctattcctactttggaagtaaaaataggaggaaaacgtagtcctttgatggttgctgttgggcaaacgacagcatcactttataaatgtttcagtggcgaacttcgtcatattttatatccggaaaaataatggatcgttttagcgaatatcgtgttatgtgggttcttgttctttttgatttaccaacggagacaaagaaagataaaaaagcttattctgattttagaaagaatttacagaaagatggctttactatgtttcagttttctatttatatccgtcattgtgctagtagtgaaaatgctgaagtacacataaaaagagtgaagtcctttcttccagagtttggtcaggttggaataatgtgcataacagataaacagtttagtaatattggattgttttatggaaagaaagctcagtgtgttaatactccgggacagcaattagagttgttttgaaagtaaaaaatcccattttaagatgggattttttgtaggaaacaaccttcttttttattttctaaatctatgtgtaatgtattaatacacagatagtaatgtgggttaagttgtttccaatggttcaaagatactaatttgaaagcaaatcacaactaaaattgtgcagacagaatatggtttccagttgtttccaatggttcaaagatactaatttgaaagcaaatcacaacaagatgataacagacctacccgtgttgattgttgtttccaatggttcaaagatactaatttgaaagcaaatcacaacgtgtgtgtgtgtgtgtgtgtgtgtgtgtgtgttgtttccaatggttcaaagatactaatttgaaagcaaatcacaaccccgggtgggttggtagaccataattatagttgtttccaatggttcaaagatactaatttgaaagcaaatcacaactgtgaatctgcaatgttcacaactacattgttgtttccaatggttcaaagatactaatttgaaagcaaatcacaacagtgtggaacaaagcttactgggtggaagtgttgtttccaatggttcaaagatactaatttgaaagcaaatcacaacacaacgtcctaccttcaattaatacaaaagttgtttccaatggttcaaagatactaatttgaaagcaaatcacaacgaatgttatcactgtattcgcattcaataagttgtttccaatggttcaaagatactaatttgaaagcaaatcacaacatagaataaaccgtttgcctgagacatttgttgtttccaatggttcaaagatactaatttgaaagcaaatcacaactgcgatagtttggtctatcaattataaaggttgtttccaatggttcaaagatactaatttgaaagcaaatcacaacaagattgcaaattgaaattagaaacatattgttgtttccaatggttcaaagatactaatttgaaagcaaatcacaacttctctattgaaggaaacgtagcacctaatgttgtttccaatggttcaaagatactaatttgaaagcaaatcacaactacctctaacctcataaaatcatgcaaagagttgtttccaatggttcaaagatactaatttgaaagcaaatcacaactcttttccataatcgtattttttaattagtgttgtttccaatggttcaaagatactaatttgaaagcaaatcacaactatcgtctttccatcattgtgagatgtttggttgtttccaatggttcaaagatactaatttgaaagcaaatcacaacccatagttgcagttccaaattgttcgtaaggttgtttccaatggttcaaagatactaatttgaaagcaaatcacaacaaatacacaaacaatcattcaacacacatagttgtttccaatggttcaaagatactaatttgaaagcaaatcacaactccccagcctgtgttagtttctggataaaggttgtttccaatggttcaaagatactaatttgaaagcaaatcacaactaagcaattacagataatcgaccgcctttggttgtttccaatggttcaaagatactaatttgaaagcaaatcacaacaccttgcagaaccatcgccttatggaagggttgtttccaatggttcaaagatactaatttgaaagcaaatcacaactcggcagcccatctatcgtggtactcaagaagttgtttccaatggttcaaagatactaatttgaaagcaaatcacaacacaatagcattattaataccattcatagtgttgtttccaatggttcaaagatactaatttgaaagcaaatcacaactgatcggttagttgcattaattcaatatcgttgtttccaatggttcaaagatactaatttgaaagcaaatcacaacttgtataagataagggagaatttagaaaaagttgtttccaatggttcaaagatactaatttgaaagcaaatcacaacttcccaagatgtgatctgtacagtaggtgcgttgtttccaatggttcaaagatactaatttgaaagcaaatcacaacttcccaagatgtgatctgtacagtaggtgcgttgtttccaatggttcaaagatactaatttgaaagcaaatcaaaactaacacgttgccgtgtggcaataagaccttgttgtttccaatggttcaaagatactaatttgaaagcaaatcacaacacaaattgaagcgtggttcaccgaaatgtgttgtttccaatggttcaaagatactaatttgaaagcaaatcacaacgtaccgtcaaacggtgtatcctgataattgttgtttccaatggttcaaagatactaatttgaaagcaaatcacaacagacctgtctaactgattgatatcaattaagttgtttccaatggttcaaagatactaatttgaaagcaaatcacaacgtagcgacgcctggacggacttcggcgacagttgtttccaatggttcaaagatactaatttgaaagcaaatcacaacccaatagataacactagggcttgcattaaagttgtttccaatggttcaaagatactaatttgaaagtaaatcacaacaagtcgctcaatttcttcgcttcggatgttgctgtttccaatggttcaaagatactaatttgaaagcgaatcacaactaatcttcgccattccgcgcatggggcgaggcgttgtttccaataattcaaagatactaatttgaaagcaaattacaacacattcgtcaataagttcacgaagtagttcgctgtttccaatgtcccaaaaatattcatccaaaagcaaactatagcatactaagctttcattttatttatgtaagttcttcctaacgcttcaaaagctctaattaaaagatctgtattaatacaattccaatccgaattcctctttcagtttcaatagctcgggattcttttgactcatcatctggaaacgttccactctgctgtaagcacggatattctcagtcggggcacttacgcggacggtcattgttatcttccggttatgtaacttatttcgcaaatggtcttgtatctgcgggataagaggagtcattattttctctacaagttcgttgtccacagcgacctcaaaagtcgtatcgttcagtaactttggtttcatgttcatcattcgcccggcagttgctttctcttctaccggaagttggttggcatactcgcgccagtaataatccaaatccttttcgttgaaaatgaaatcttccgctatttcggtctgtaccggtttaacggttgctgtttgctgttgttgtacctctctgcttgccggatgtttgatagatacgccaagactgcccgccttgaatacgggaatctttttctcttcactctgttgtggaataggattttgccgtatcggtggagtattggtcggctgggcttgaggtgctacaccttgctgcacagtttgtgactgtacagatgaagttgatgcaactggagttcttgccgattgttgtgcctggacagatggttgggcttgtgccggctgagcctgagcactttgcttattgaatatgggttttatagcttgttcagggctacgcccatgagctgtgtcgtctgcatccgccgtcagttgtgccacctgaatcagggttatttctactagcagacgtttgtttttgctggcacggtagttcaggtcgcagtcgttgcaaagtttcattgccttgtaaagaaactgtggcgggcatttttgtgcttgctgttggtagcgttcacgtatgcttgcgcccacttccagtagtggaagggtggaagcatctttactgacaagcaggtcacggaaatgagatgaaagtcctgtaataaagtgacttccgtcgaatcctttatttaatatatcgttgaagataagcagggattcgctgatcttattatccagcaggcagtctgtcaggcggaaatagtattcatagtccaatacattcaggttgtcgataacattcttgtactgtatgtttcctcctgtgaagctgactacttggtcaaagatggacaatgcgtcgcgcataccgccgtctgctttctgggcaatgacattcagtgcttccggttctgcggtaataccttccttttgtgccacatattgtaggtgctccactgtatcgttgaccgtaatgcggttgaaatcgtatatttggcaacgggagaggatagtaggcaatatcttatgcttctcggtagtagcgagaatgaatatggcatgatggggaggttcttccagtgttttcaggaatgcattgaaagctgcctgcgaaagcatgtgcacctcatcgataatatatactttatatttccctatctgtggcgggatacgcacttgttctatcagtgaacgaatgtcctctaccgagttattggatgccgcatccagttcatgtatgttgtatgagcgttgttcgttgaaggcccggcaagattcgcattcgttgcatgcttctccgtctgccgtaggattcatacagttgatggtcttggcaaagatacgtgcgcaagtggttttccccacacctcgcggtccgcaaaacagataggcgtgagccagtttctgacctgctatcgcatttttgagtgtcgtagtcaatgccttttgtcctacaacggagtcgaaagttgaaggacggtattttcgtgccgatacaatataattctccataataagggatattctgctgttttttctgtttttgcaaatgtacattaaaagaatgaagaatgaagaatgaagaatgaagattttaaataaaatagttatctttgtcccgtattcaattatcaatcagccatgagtaggttactaagcgtctggaattttatccgcaggaataaatactatattaccatcggattgtttatcgccattatcggttttctcgatgaaaacagtctgcttcgccgcgctaagaataaacgtgagattatgcgtctggaggcggagatccgtaaatatcaggctgaatacgaagaaagtacgaaacgtttgaatgaattaatggcaaatcctgcggcaatggagaaggtggctcgtgagaagtacctgatgaagaagccgaatgaggatatatatgtatttgaagaagaatgaaacaatatcaatcgatgatttttggagccggagcgattctggcattgttgggagcggcggttatgattacaggttgggagtatgctccttatatatattgtgtaggagcgttgcttatcgcttatgtacagctgaccaacggctataaaggagataatgtcactatcaaaagattacgtaaacagcaggtattcggtgcggtattgttattgcttaccggcttgttcatgtttaccacgcagcataacgaatgggttgtttgcctgactgtcgctgccgttcttgaattgtataccgcttaccgcattccttatctggaagaaaaagataaatagtttcttatgatggacgatatgcctgattcccttcaagtcagagagattgaattaagcaacggatttacggtttggttgaatgaagaccacaaccagcctaaagtattcggtgcggtagttgtcaaagccggagctaaggattgtccagatacgggtatagcccattattttgaacacatgatgttcaaggggacggacaagatagggactacggattatgaagcggaaaaggaaatactggatgccatcgccgataaatatgatgaactggcagcgtgtaaggatgaaaagcttcgtccggagttgcagaaggaaatcaaccggttaagtatccgtgctgccgaatatgccatacccaatgaattcgacaagcttacttccatgtttggcggcagtcagctcaatgccggaacttcttatgattataccgtctatttcaatgtcttttctccgcaatacttcgctcattgggcggagctgaacagtgaacgcttgctgaatcctgtattccgcctctttcaaagtgaactggaaacggtttacgaagagaagaatatgtatagcgatatgatgggaatgttggcaatggagcgtttgactcaccggtatttttcaccgcatccgtatgcctatccgataataggcagcacagagaacctgaagaatccgcaactgacacgtatgcgcagattctttgaagattattatgtggcatccaatatgggattgattctgagcggtgacttccatgcggaagaggtgattcctatcttggaaaagaccttctcgcgcatccgtagcggtaaagcaccggtaagcccgtctgttgtgttgccggattttaggggcaaggaaaaggtaaaggtgaaacttcccgtgccttttgtcaagatgatggcgctcggattccgtggtgtgcctgccaatcataaagataaggtagccattaatattgcgatggcactgcttaataatgagaacgggacgggatatcttgaccagctttcggttaatcataagataatggcggcgatgtccatgaatcagggactgaatgaagccggtatcctggcggtggctattgtgcctaaactcatgttccagtcatacgcttcggcggagaagttggtatggcgcgagataaaccgtgtgaaaaaaggagatttcacggatgaggctttttgcagcttgaagctggagcaacggaggaattatgagttggcactggaagacatcaatgcccgtgccaagatgatgatgacactctattcgcaaggaaagagttggaaagaatatcaggaagagatgagcgggatagatgccttgacgaaagaggacgtggtgaaggtggcgtgcaagtatttcacggataattatctgtatgccacgaagaaaacgggcaattacccgaaaaacaatcttcccaaacctgattttgaaccgatagtaccccgcaacggtgatgcggtatccgaatatgcgcagaagctgaaggaacttccggtgaaagaggtgtcaccacgttttgtcgactttgccaaaaatgtaaagaaagtgaccttggctcctttggcaacgctttatcttacaccgaatccggtgaataagattttcacactgaggctttcttatcatgtaggctttatagaatatcccgccttggtacaattgaatgcttatctgcctttcttgggcacggataccatgccgtttaaggaatttcgcaataagctgcaatatctgggcagtgtactcgagtatgacgtggaggaacataaattccatataaaactatccggctttgatgaacattttgccgagtccgtccgtctgctggggctgttcatgcaacacgtcgaggcggacgacaagcagttgaagcagttggtgaatgaagaaaaagtagcggcaaaatcattcttcaaatccagtgaagatgtggcggaagccttgtttcagaaagtgaagttcgggaacggatcttccaagctcaccaaactttcactgaaggaagtgaaacacctgaaaggtaaggagttgctggagctgtttgataaagtgaagcatacggaatgtgttatgcattattgcggcacgttgggtgagagtgaagtggtggatacggtcggggagtggatgaatccggatgagattactttgccagcctccaaccgcttacgcgatttgcaggtgtatgaccgcccgaaagtttatttcttccatgacggaaaagtatcccaaagtattatttacgggtatatctgcggcgatacgttgaaagacgagcgtacacgccatacttccaaactgttttccggctatttcggtggagatatgtcttctctgatgtttcaggaaatcagggaatttcgttcgtttgcctatcgtgtgagggcagaatatgaattacctttccggcgttgtcccgacaaatccggctgcttcgtaaccatgttgtccacgcagagtgacaagacgacggatgcgcttgaggtgctggatgctttaataaaggatatgcccctgaaacccgaaaagattccggccgtacgtcaggcgttggtaaacaatgtcaataacaatttcccgtctttcagggagctgtcggcacgggtttcccagtgggaagaagacggtctggcttctgacccgaatgaaacttacctgcatagtcttttggcgacggatatggaagatgtcgatgctttctatcattctcaggttcagggacgcccgatggtctatgccattgtaggaaatgaaaagagcattgatatgaataaactctcggcctttggagagattatcaaagtaaagaaggaagatatctacagataagcggaaagcatccttaacaaacttatttattagtgaatgttcaggtacttattagctcgttttcacgggttaacaagcgcttttgtgctgactcattgtctgtctcacaacaggtgcattagctattgcacatattgtgagatagctaacgcacctgttgtggaatagctattccacctgttgtgagacaactacttgataaaggatattgtattagttatccccaatgtttagactactttgcagggaggcgacagatagtttc

SEQ ID NO: 2262 - DNA, 24122 bp, synthetic construct
  misc_feature 1..24122: note = Synthetic
  source 1..24122: mol_type = other DNA
tagttcgtacagaaagtgcctacggcctcaccgccctgggccagcatcgcgggatcggcgcccgccttcacggcctcgtccatgaagttctgcgaggtggtgccgttgctgatgaactcatggcagagtctagggagctgtgagttgtagatgaatccgttgactttcagccaccagcttctcagaagcggagccacgaacggtgcgacaaggcctccgatgttgatgaacacgtagaagatctggaatccggagtcacgttttccctgtgcctcttttagggcctcgggaccctgcttggcggcgtcggcctcgaaattgtcgtacatctgtccgacgatcgcctggagattgcccttgaaaaggccgttgccgaatgcgatcatgaagagtgcgaagcaggtcagaggcaggagccaagacttgttctgaggtgtggcgaggatcggaacggagaggacgacatagccaagagccattagaacaagacctttctggattgtccctttgtagttctgtgtgcggtcggcgatgatacctcccacgaggctgagaatgtatattcccgcatagaagaatgagtagatgagccctcccgtctcgtcgctcagcccgaacttcgagcaaaggaagagtgtgagaaccgcgttcatgatgtagtacccgaagcgctcgcccatgttgctcagcgccgctgaaatcagccctttaggatgtcctttcatacaatgttgtttacttttaaattatttgtgttattaatatttcattctatgccccgcttggctctccgtttggctgtcatacgtgcgtccaaaatccatctctctcttactgctcgcataacaagttactaatatacgcaaaactccccaactcaccaaatttatgtcgtaggcctatgacaattatgtgaccatcacaggccgcgcatagccaatgtcgggatctgtccgtagccgtataatcaaacggacagtcaatgacagcttatccctcggtatttgcatccatacctatgatggatttactgtggtggttcttttacgaacctttttacgaacctttttgtggcatcagatgtgtcgttagcgacttcttttacgacatcggtgccgtagttgagattccagagggttacgtggaactcggtggcgttggaactgaactctgggcgtggtattcctttaatgactcgaatctggcatattctccgaggattttcttcattccgctgccacgtcgttccataaggtcaagacggctgaggaaatcggcggggagggattgcgacgtttggacgggacggaaagcgggttcaactgctgaatcaggcggccgtcaatcattcctcccggtgaatatacctccatccggtcgtcgtagatgtcaatgtggatctcgctgccaagttcttggtagtcgcggtgaatgatggcttatgtaaagtcagatattatgtcaagcactccgcccgcggcactgttttacgcttatcagagccataaactttacataatcttttcagcaagagctcgtaaaagcatcattcctttggttgtcagaaggtatttctggcggggatgcctcggcgaatcaggatacatcgctcgtatgaaaccgtcgcctattgacggagaaagatagactttcaggaaattgtcccgtcctttcagcccgatgcactccatcatctctttcacggacaactccttgtcccctatagtgcggatcaggacctcgatgttcggattatccgtgtggaacttgtcctgtacttgtctcgaacttgtcccgaacttgtcctgaacttgtcctgtcccgaaatccaagttcggctgtacgctccactctggagagggatggatgtgaaggtagcggttcctaaggtcccaatgttcgccgaggagtaggttgcggaagaagcgctcaagatagaccggagaatagtcgatgcctttcacaagattcttatagtttgcccgcaccagcgcattgcggaaataccaggaatggtctgcgaaaaggtcattgttgatgtcgaagcctacggagcggaggtattgaatggtaaagacggcggtggcgcgcgtgtttccttcgcagaatgcgtggatttgccaaatcccggagacaaaacccgtcaggtgggcgatcatgtcttctctggagattcctttgtaggagaatgagcgttcctgttcgatgtcatattccaaggcctggtgcagatcctcccagttcaggtagctgacggacgcgccttccagcacccattctttcttcgagatgtcatagtcgcgaatccgcccggcgtgtttgaatactccgtcaaaaattcttcggtgcagagatatgataccgttcgcgctgaaatcaaatgtcccggaggacaggattttagtgatgtttaccgagactttgtccgcttcttcattgtccgcatctcctgaattatgcgtggtcttggagatatagtattgcttcaggagttcacgtgcttcatctatggttatgtcgccttcgatgttcctgcgtgctgtctgctgaaggtattcggatgtcttcagcccatccacagcctgcagtcctattgcgacgcgccaagcctccgccctgtctttttgggcgggttctccttgccggatgtactggttgaagtcaagatatgtctgcattatctttccaatatttcattaagaagtccttctgtgctcttttcgatgttccagatgaaagagaacaggtggttgtattgcgctgtattcattagtttactgttatgttcggcaccctaagatgtctcatattaatttttgtgtaattacattaattttctgaggtttccaatataacaaaaatagtgattttttaggagctttatacagaatgttcatgaaatcagcttcaatatttgattctgaaatagtcaaggagtttcttgtaatagtcttgtgctgtcagacaggtatctgtaaggtacccgggaattgttttccattcgtgcaatccacgataatagaacattttcagttcgtctgtaataatgaacggaacaatgtcgtgattaagacattccttgaacattatcaggcgtccgactctgccattaccatcctgaaaggggtgtattgcttcaaaacgctgatgaaagccaagtatatcatcaaacagaattacctttttccctctgtattcttttaacaatgcacgcagttcatgccctacattctgtggtgaggtcgtctccattcctccaacctcgttaggtatccgtttgtattcaccgaccgtaaaccaggatttcgatgcgtccgaagtcccgcttttcagcaaccggtgaagttgttttatcatactttctgtcaatggctctttcgcgtggtcaattataaagtcgatgcagcggaaatgattggtggtttcaatgatatcatccactttcacagcattatccgtgattccaatcgtgttagtctcgaatatgtatcgagtctgctcttttgttaaccggctaccttcgatatggtttgaattatatgtcaggtcaatttgagtgcggtgatatattccgcctttgattccggagtctttttgctcgcacaatgtcttcaaaaggggagatatcctgttttttgcattcttgcgctgagggagtggagcctcggctggcacactccacgttttgccgacaagctgtgctccggcaattttaccttgaacacagtagttcctcactgtgcgttcggcgacaccgtgtgccgctgcatattctttagtagagacgtaatccataatctacggcacggaaaatagcatttgccgatacaaatataggatttcttgccgataacggcaagaaatggcggttattttgtctattcttccgaactcatgccgataggccttgtccctaatctgtgctcagcttgcacgtaaattatcatttatctgacagtcatatccccaaggtgtcagtcaggcgaaagattcggaaatacgaggaatctaggtacgccgtttctgagttctcgttcccataaccgaaaaattgtctaaatttacacccaaaacataaatgcagatggaaatcgatgaattggaacgtggccggctgaggagcaaagtgctgaacttccttaaggccaatgatattgattatgagttgtacgagcatccggcattgtgcacggtggaggagtgcctgacgtattgggggaatatccccgaggcgacgcattgcaagaaccttttctttcggaaccataagggaaaccggcactaccttgtcagcatggaatgccacaagacactcgacattcatagtatggagcatatgctgaagcagggaaagctgtctttcgcgtcggaggaaaggatggttcgatgccttgatctgcatccggggtcggtgtcggccttcggactcatcaacgacatcaatccaaaggatgcggatcccaaggaactattcccgaacggacatagggtcaaatattacattgacagtgcattacgcacggcggacaagataagtttccatccttgcgagaacacggccagcgtcgtgatttcgggggaggactttcaccgcttcctgtcgatatggggcggcgaggtcgaatggttggaaatatgattggtacggaatccggaatcataattaaatttcatattgacctcctctttcattatatttgcctgatgtgcgacagattgtagaaagatgaagattttgacgaaactgatgcaaggacttctgagggtgatctcggcgcttccgctggggttccattacgtgtgggcgggcttctttgcctggctgctgcgtgatgtgatgcattaccgccgtgatgtggtgatgatcaacctctcccgcgctttccttgacaagaaatacaaggagctgaagcaaatctccaatgcgttctacaagcatttcggcgaggtgatagcagagacgatctggttcggcggatgccgcaatccggaaaggctgcacaggaaacgtttggttgaatataccaacctggacaccgtggaggccgcgcttgccgagagccccggggttgtcgtcttgaacagccatttcggcaactgggaactaaccggaggctgcctgaattacgactaccgtccaaaccgggaacaatcggtgatgaacgtagataatgtaatcgccgtctataagccgttgagcagcgggatgtgggacgagataatgcgtgtcaaccgctgcgctccggtgctgcgggacggctacaccggctacgtcagctccgttaacctcctgcgtttcgccttgtctcataaggaggacaagaaaatctacataatcccgaccgaccagtgcccttaccggaactctacggtgaatgacgttgtcgatttcatgcaccagccgacccggacgatgctcggcggcgcgtcgatcgcccacaaactgcactacagcgtcttctatatgagcctgattccggtctcccgaggccactacgagtggaccttcaaggaaatatgccgcgacgcctcgacaatgacccctcactcgataatgcaggaatattacagcctgcttcaggtcgatctggaaaaacacccggagaactacctctggacgcacaaaagatggaaatgacaaaaattttatgaatatgaagaattaccgcacagtatcgcttctctgtctggccgccgctttgctgccggagggaagaatctcggcccaggatcccgtaggaaccgtttcctacgcccttcctcagaccaccattacaatcgaggtggaggccgtccgtgaatatttctacgcgggtccttacgccaaatacgcccagaaatatcttggcgtggacgcccgtcaggccgaccagaccacctgcacgctcagcacggtccgtatgaccccgtacatcgaggcagaccagaatttccgctactatgtcaatcctgacaaggccacacagtctttcctttcgcttacctcccagggacttatcgcggtcaatgacggaagtttcggtgagagcgccgagtggaggttcaccacgcaggccggggctgatttcaacggaaagggtgtaagttccaacctcacatccgaggccgccacgctttaccgcggagtaaaggaagacgcatcctacaaccgcatcgccgtgcagcagaatatggttgtccagaagtccttggaacagagggctaaggaagccgccgacatgatcttcaaccttcgtcagaagagggttcagatcgtcaccggcgacaccgacgcgacctacagcggcgaggccatgggcgccgcccttgccgagatctccgccttggagaaggaatacatgtcgatgttcatcggttacagcgatttccagacccagaagctgaaatgtgacgtggttccggtgaaggacaggaaatcccagacctatgtggcattcagaatttccgacaccgatggcgtggtctccgccgacaacatgtccggtaagccttaccttcttgaggttattcctcagcccataggagagactgaaggcaaggctgtccagtccaagaccaatgtggccatctacaggatcccggccatctgcacggtacgcctctccgacggtgtgacatccctccttcaggacaggatcgctgtctaccagctcggaacggagggctatttcccgctttcgaaataattttcaaatattcacatattaataagtaatgctatgacaattaaagatttgcagccaaaggccgtttgggagaacttctacggcctgacaagggttcctcgtccttcaaagcacgaaggcaaggttcaggactatctcctgggctggggaaaagaacacggtgttgacgtgaggaaggacgacaccggcaacatcatattcacagttccggccactccaggctacgagaaccgcaagggagtgataatgcaggcccacatggacatggttccgcagaagaccgctgacacgaagcacgacttcctcactgatcctatcgagaccgagatagacggggagtgggtgaccgcgaagggaactaccctcggagccgacaacggaatcggagtcgctctcgctctttccgttcttcaggacaagactttgaggcacggcccgcttgaggctctcatcacctacgatgaggagaccggcatgaccggtgccaactcgctcaaggccggaatattaaagggagacattcttctgaaccttgactctgaggaggaaggcgagctttgcaccggttgcgccggtggagttgacggcgcggctgacttcgcatacagaacatataagactcctgaaggattcgtcggctacaagatcaccgtcaagggactcaagggcggacactccggaatggacatttccctcttcaggggcaacgccaacaagatcatctgccgtcttctcgaagccgtaatctctgaatatgacgtgaaggtcgcgtccatcaccggtggatccctccgcaacgccatcccgttcgaggccgaggccgagattctcgtcccgtcagcggactcgcgcaaggtcaaggctctcgttgagaagaagttcgaggagtccaagttcgagtaccagtactcagacccggatatgattctcatctatgagaagcagagcgctccggctgcccgttacatcagccctaaggtgatcggcaaggctgtcaaggccatccttgcctgccctcacggagtccagaggatgagcgacactcttcctggcctgaccgagacctctaccaatatggctatcgtccgcacccagaagggacatcttacggttcattctctgacccgcagctcgatcgacgcggccaagatgtatctcgccgactcgatccgttacgtatttgagcttgccggcgcgaaatattcgacatcaggcgcttacagcggttgggctccgaaactcggcactccgatgatcaaggttctggaagacacattcaagagcctattcggtaaggaactaaagatcactgccacccacggaggactcgagtgcgccattatgggagccaagtacccgaactgggagatggtctccatcgggcctaccatcctctatcctcattcaccggacgagcgcgtgaacatcgcctccgtcgccgagacctggaagttcctcgtcgccgtgcttgagaatattcctgaaaagtagttttcctcactatgaggttggcggcaatagtcattcctgacgctgagcttgccgaagcgccggacatattcgcggattttgtatgaatattcaaatgcgatttgaccgctaatttgcgaaagttgagataattgactatatttgcagtccttttgggttggcatacgtccccgaaaggattgcaatttatttattattaaacaattaagtcaaatgttaaaacagtacgagaccgttttcatcgcaactcccgttttgtctgaacaacagatgaaggaagcggttgccaagtacacaaaactgatcgccgacaatggtggcgaggtagtgtacgaggaggactggggacttcgtcagctggcatatccaatccagcacaagacctcaggattctattatcttatccagttcaaggctgagccaagcttcatcgccaaccttgagacccagtatttccgtgatgagaggatcatcaggttccttaccgtggctcttgacaagcacgcagaggcttacgccgcgaagagaagggagaacaggaacaagcctgccgctcctaagacagaggaggctccggctgaggctccggtagccgctgaagagaaaacagaggaaaacgcataatcaaggaggaatgaattatggcacagaatgacgcacagaacgcaggaatccgctatctcaatcctcctacagtagaggttaggaagaagaagtactgccgtttcaagaaggcaggcatcaagtatgttgattacaaggacgctgagttccttaagaagttcctcaacgagcagggtaagattctccctcgccgtatcaccggtacttctctgaagttccagaggaaagtcgctcaggcagtgaagagggctcgttcccttgctctgcttccttatgtaactgaccttcttaaataataggagagcgagattatgaagatcattttgaagaaagaagttgccaatctcggcgaggccggagatgtggtagaggtaaagtcaggttacggccgcaactatcttatccctcagggattcgcttgcgccgccactccatccgctcttaagcagcttgaggagacaaagcgccagagggctcacaaagaggccaagcttatcgctgacgccgaggctctcgcagccaagatcgaggccacacctgtcaaggtggccgtcaaggtcagcgagtctggcaagatctacggttctgtcactacagctcagatcgaagaggctctcaaggccgctggtgtagaggttgacaagaagaacatcaccctcggtgagatcaagaccgtaggtgagtacgaaggctctgtcaagtgctacaaggctgtcaaggctaccgtaaaggtaaccgttgaggccgaggcctaatcccaagtttatgttaagccgattttggctgacaatattttagaccgcagatttcctgcggtcttttttcgtctctctttagcaacgaaatcacgttaaaatgttgccacggatctcttcttagccctctcgggcgatgaaatctggttgaaatgtcgcctgtcgcccacgtctaaccctctcgggcaacgcttgaggccgaaaatgtcgcccgtcgctatcctcttgtttttccgaattaacgtcgccgcctattacgaaaaaaagcgagtccaaagacccgctccagatgtttacacaacggaataatccttattgtgaattgcttcgttattgtgattacaaagataatgaattaaatcaatttaacaaattttcttcaaatcgtttgacattattgataataaaacgtaaattgtggtcataaaactaccatatacgattatgaaaaaagttctgggacttgatctggggaccaccagcattggttgggctatggtgaaccaagcggagaataatgaggagaaatcatccatcatcagagccggagtcagagtcaatcctttgacaacggatgagaaggatgcgtttgagaaaggtaaagccgtcaccacgaacaccgacaggcggctcaaacgctctatgcgccgcaatcttcagaggtacaaacttagaagaaacgaacttgtctcaatcctgaaggaacttggctggattgatgattccacaatactggctgaacatggcaacaggtcaacattcgaaacttacgaactacgttcaaaagcttgcacggaaagtgtctccttgacggaattggcacgtgtcctgttgatgatcaacaagaaacgtggctataagagcaatcgaaaggcgaatgcggaggaggacggacagcctgtggatggaatgtccgtcgcgaagttactgtacgaaaaggggaagactccgggacagtattgctacagccttgtcaagaaaggaaacaaggttttgccagagttttatgcgtcggatctgaaatcggagttccgcagggtctgggagacgcaacgactttattatcctgaatatcttacggaagagttctggaatcagattgacgggaagacacgttcctctttgacaaaactcttctttgcgaaatacaaaataaccaccgcggacaataaaggtaaggacaagagagttaaagcctatgaatggcgggccgcggctgtcgagagcaggttgccgattgatcaggtagcatatgtcttgtgtgacatcgctggaaatcttggatcgtcaagcggttatcttggcaagatcagtgataggagtaaggaattgtatttcaacaaacagactgttgggcaatacctttattccaatattcagaaggatccgcatttcagtacaaaaaacaaagtgttctataggcaggattatcttgatgagtttgaggctatttgggaaagccaggcatcttttcatcccgaattgactgatgaactcaagaaggagatccgcgatgtcgtgatattttatcagagaagactgaaatcccaaaaaggactgatcagttattgcgagttcgagagcaggaaggtagatgtggaaatcaatggccggattgtacagaaaatccgcggttgcaaggttgctcctgtctcgtcaccgctgtttcaggagttccgtatgtggcagaagatcaataatatcatcgtcaccaataaagagactggagaacaaggcacgctggaacaggatgacaaggttagattggcagagtgcctaagggtgaaggacaaactgtctgataaagagattcttaagttgttgttcaagaaacctaaggatttagagatgaacttcaaatccattgagggaaatgaaaccttgggcaaactatattcaaaatttcttgaagtggtgtctttggccggtaacagtgactatgaatattcaaaactacgtcaagaggagttgatgaatatcctacggactgaatttgcaaggaacgggttcaacacagcggtccttgaatatgatccgtcgctgcctaaggaggaatatgaaaggcagccattgttcagactttggcatttgttatattcatacgaaggggataagtcccagacaggcaatgccagtctgataaataagatcgctgagatctgcggaatgccggaaaatcttgcgaaaatcatcgcctccgtttcattcaaacaggactacgcttcactgagccataaggcgatgaggaagatacttccgtatatgatggacggaaatgaatatagtctggcttgcgaatatgccggatacaggcattcaaagcaatccttgacaaaggaggagatcgagaataaggtcttgaaggatcgtcttgatcagatcccgaaaaactctctccgtaatccggtagtcgaaaagattcttaatcagatggttaatgtgatcaatacggttggtgacaggtatggcaaaccggatgaaatccacatagagctggcaagggaacttaagtcctcgcaggaggaaagggctcgggccacggaatccattgcgtcaaacaataaggagaatgataggatcaggatgattcttgagaatgagttccatcttgcttacgtcagcaggaatgacattgtcaagtacaaactgtatgaggaacttaagaacaatggttacaagacattgtattccaatcaatatattccggcggacaagcttttctcccgtgagattgacattgagcacatcatcccgcaggctgtgttgttcaatgactcactgtcgaacaaaaccttggaattcagagatattaatctggaaaaaggcaaggacaccgctttcgattatgtcaagaacaagtatggggagagcgggcttgaggattataaacttcgggtaaaccatctctttgagtcaggaggcatctccagaacaaagcgtgacaatcttcttcgtgattctaagaatattccggaaggattcgtcgaacgcgatttgaaggacactcaatacatcgccaagaaggcccgtgagatacttcttgaatatgtccgtgtggtggtctcaacatcaggatctataactgacaagcttagggaagactgggggctggtgaatctgatgaaggaactgaatatgccgaagttcgaagcggctggatttgtggagacaatcacgacttcggacggaaaggatattcgtaagataaaggattggaccaaaaggaatgatcaccgtcaccacgctatggacgccatcactatcgcgtttacaaaacttgctcatattcaatacctcaataaccttaatgccaagggtgacaaatcttccagcatttatgcgatattgcagaaagagacttatctctctggctccaaaagattgatcattcctccgcttccgttggaccagatgaggcgggaggtccgcagacaacttgaaagcattctcgtgtcaatcaaggcaaagaacaaggtgatgacggagaatatcaaccgtataaggatcaaggacggtgtgaaaaacgtcaagtgcctaaccccacgtggtctgctgcataaggaacaggtttatgggcaacgtaaacgttatgagacttatgatgtggcggtgaacgggaagatgactgaagacgtgatcgctacagttgcgtcaagtgagacgaaagcggctttggctttgaggctcgcgcagttcaaaggtgacccgaaaaaggcgttcaccggcgctaattcattggataagaatcctgtttggctggatgccaatcattctcgcaaggtcccggcgaaagtcaagtgtgtgcgtttcgtgaatgtatattccatcaggaaaaacattgatccaagccttagtgttgagaaggttatggacggaagagtgcgccgcatcctcaaagacaggttggctgagtttggtaacgatccaaagaaagcgttcgtgaatctggacgagaatccgatctggttcaacaaggagaaaggtattatcctgaaaagtgtgaccatagccgagaatttcgaccttggccctatcaggatcaagagggataatctcgggcgtgtcatctgcgatgcagaaggaaatcatattccatcggactatgtcaatttcaggaacaaccaccacgcggcgatattcgaggatgcggacgggaatattcaagaacacatagtttcgttctatgaggcggtgcggaggcggtctgccggacttcctgtcgttgacaaagaatataacgctgacaagggatggaagttcctgttcacgatgaagagcaacgagatgttcgtctttcctaatgaacggactgggtttgatcctcgggcagttgatttgatggatccggagaattattcggctatcgggcctaatttgttcagggtgcagaagatggcaagtaaggattattggttccgccatcatttggagacgactttaggggatgatttaaagttaaaagatattacgtggaagaggattaccgccctcaataatttgaagggcatcgtaaaagtacgaatcaaccacatcggagagatagtatcagtcggagaatatgattaaacgaaccctgtatttcggaaatcctgcttacttgtcctacaagatgaagcagttggtcatccgtcttgtggctaatgacccagatgagtattccgagcagatccgtactgtgccggttgaagacattggagttattgtggttgataatcagcaggtgacattcacatcaggtctgatggctgcgttgttggaggagaatgtcgcgttggtgacctgtgactccaaacatattccgaccggattgatgctttcgcttcaaggacattcctcgcagaatcaacgcttccgaaatcagttggaggcgtcattacctcttaaaaaacagctttggcagcagacggttgagtgcaagatccgcaatcaggccgctgtgctgaaatatgtctcgggagaggatgcgaagaatatgcttgcgtgggcaggttcggtcaagagcggagattccgagaatatggagggacgtgccgcagcatattactggaaaaatgtgtttgaggtacgcttcgtgcgtgaccaattcggggaatatccaaataatcttctgaattatggctatgccatattgcgagctattgtggcaagggctcttgtcgccagcgggatgcttccacttcttgggattcaccaccacaacaagtacaatgactactgtttggcagacgacattatggaaccttacaggccttttgtggataggttggttctcaatgttatggatgaatatcctgatgataaagaactgaataagaacataaaagcacggcttttgactattccggtccttgatgtgaatattgatggacataagagtcctttgatggtcgccgtgtccaccacgactgcctctttgtacaaatgttttagcggagtatgccggaagatagtttatccatcaatgtagaaaccaggtacagtaaatatcgggctatgtgggttcttgtcttgtttgatttgcctgtggcgacaaagaaggatatgaaggccgcctcggctttcagaaagagtctcatagaatatggattctctatgttccagttttccatctacctgaggcattgtccgtccaaggaaagtgccgatgtgtacattctaagggtgaagcgtatccttcccaaaaaaggaaagataggaatcctgtacatcacggacaaacagttcggcagtatggaactcttcatcggaaaggattcctctcctctcccacaggtcgaacagcagttggaacttttctgacagaatcacaaacccttgataaacaatgaaatcccagccctcaaaggccgggatttcctcttttagttacagttcataaccctctgacccatactgttttgcagagaatgagctgtaaatcaacccaaaggtacaaagaacgaaagcaattcacaaccgtacaccgtgaaaatatctttgtaaattcgctgtaaatcaacccaaaggtacaaagaacgaaagcaattcacaacaacccccttttttattttacttagtcgtcgctgtaaatcaacccaaaggtacaaagaacgaaagcaattcacaactattgttaaacatcccgttaaggcttccctgctgtaaatcaacccaaaggtacaaagaacgaaagcaattcacaacggaaattgtttcatcattgattttgttgatgctgtaaatcaacccaaaggtacaaagaacgaaagcaattcacaacgcagcagcagtccttgatggcctggatgagctgtaaatcaacccaaaggtacaaagaacgaaagcaattcacaaccggcgagataataggtattgcgcttcgccggctgtaaatcaacccaaaggtacaaagaacgaaagcaattcacaacccacgagagcattggcaaagattagttaatgctgtaaatcaacccaaaggtacaaagaacgaaagcaattcacaacccgaatgtcaggaagcccacattggcgccggctgtaaatcaacccaaaggtacaaagaacgaaagcaattcacaaccccgtctgtcgctctgactgctttttacggctgtaaatcaacccaaaggtacaaagaacgaaagcaattcacaactgctcgtcaatcagaacggtcgtccgttcgctgtaaatcaacccaaaggtacaaagaacgaaagcaattcacaacttaatgattatcagcgtactatgaacgatgctgtaaatcaacccaaaggtacaaagaacgaaagcaattcacaaccgtcgatgaacatacttacttcggagaggtgctgtaaatcaacccaaaggtacaaagaacgaaagcaattcacaactcgtgacaaggcaggttctttcgattggacgctgtaaatcaacccaaaggtacaaagaacgaaagcaattcacaaccagcaatgggataatcggggcggagtgcttgctgtaaatcaacccaaaggtacaaagaacgaaagcaattcacaactgcgtgggcaaaatgcctgtagcgaaatacgctgtaaatcaacccaaaggtacaaagaacgaaagcaattcacaactacactcttccctgatgaggttgtattgggctgtaaatcaacccaaaggtacaaagaacgaaagcaattcacaacgaagaaccgtggcgacttttagcggcatatgctgtaaatcaacccaaaggtacaaagaacgaaagcaattcacaacgttatacttattacgtacaatccggcggttgctgtaaatcaacccaaaggtacaaagaacgaaagcaattcacaactacttcacggacaatatattacgatgccaacgctgtaaatcaacccaaaggtacaaagaacgaaagcaattcacaactagttggtgtaggcgtagtgcagggtgatggctgtaaatcaacccaaaggtacaaagaacgaaagcaattcacaactttaaagtcactttaccgttgacgatgcaagctgtaaatcaacccaaaggtacaaagaacgaaagcaattcacaacccttgcatatactttgagaccatgagttgcgctgtaaatcaacccaaagtgcaaagaacgaaagcaattcacaacttattttcacagaattacataagctttttaaccgtcaaaggactcctggatattcgagaaaattgactataattgcagcattgtgttttgaaacaatggctagaaaagaagagttgacaacaactatgcacgctgaactgatggaaggcgaaatgactcgtgaagaactgacgctctgtgccgtaaagggagctatgcgcagaggtctatcaaaagaagaggcctgcaaacgatatggctttaccgtaagcgagtgggagcaagaatatacgaaacttacttcttccctgagaggtaactcttgaaataaactacagacggtttatcggtcaaatctatctcaccgtcacaatctttacccatcataagatctttgatccaatcatatcaagtcagcagtctcataggaaacagtgttggatgcataaaacttatcgactatcgccatagcttcctttatggattcctgtgataatccgacagaaagcgcagtgttgcacaaaattgcttccgtcgcattgctttttatctctgacgggagcatatatatcgcaaaatgttctcgacgaggtggtacttatctttgagaaacagtctcgattgactaacaatgtgttacaaattattgctagtcatggcaggagagcaacgttttgtaacttatttattaataggattttatcaattatagccgtgtgagagacgtctctgaacggtaacgatttatggcgtttttgttgcttaagaggtatttcatgctcttttcggcaacgttttgtgggtgaagtgttacccaggagtgcgaagaatgatggcatattcatagatgcgaagggcaatggaggcggaatattccggcacttgaatattcattagcatattcattgaccttttgggaaaggttggagttgattggaattttttttacttttgtttggacaaactgccatgatggaatcgtttgtctgcttgctttcctggcaagcatggccggaattattaacacgttaatgaagattagttcttgaatatgaaagaatatgtcattgcccttgatcagggcacgagctcgtcaagagccattgttttcaataagaggggcgaggctatggctgttcgccagaaggaattcacacagcatttcccgaagccggggatggtggagcacgatccgatggagatctgggccaccgaatatgcgatgatgactgaggcggtcacatcgcttggacttgggggagcggacatcgccgccatcggaatcaccaaccagcgcgagaccactatcgtgtgggatgccgagacaggaaaacctgtttataatgccatcgtgtggcaggatagaaggacttctgaatattgcgactcgctcaaagccgcgggagtgacggatatgatccgacgcaagaccggcctcatcatcgacgcttatttctccggaacgaagatacgctggatccttgagaatgtaccgggagcccgtgagcgtgccgagcagggaaagcttcgcttcggcacagtggacagttggctggtgtggaacctgaccggcggacacgagcacatcacggacgtgagcaacgcctcccgtacgatgctgttcaacatcaacacactggaatgggatgaagagcttcttgatcttctgaatattcccgcatcgatgatgccgcatgtcaaatcctcatcggaagtttatggagagactgatcttttaggcggaaacgttcctgtcgcgggaatagccggtgaccagcaggccgccctgttcggtcagatgtgcaccgagccgggatccgtcaagaacacttacggcacaggttgtttcttgctgatgaacacaggtgagaagccgataatgtctaagaacaaccttctcgccaccatcgcgtggaagatcggcgacaaggtggactatgcccttgaagggtctatattcgttgccggctctgtcgttcaatggcttcgtgacggccttggaatcatcaagagttcatctgaggttgagactcttgcggcctctgtaccggacaatggtggagtctatatggtgcctgcgttgacgggacttggcgctccgtactgggatcagtatgctaaaggcgggatattcggaataacccgtggaaccacggcggcacacatcgccagagcggctcttgaaggcatcgcattccagacaaaggacattgtctcggctatggagagggattccggaatccatctcggggaattaaaagtggatggcggcgcgtcccgcaacaaccttatgatgcagttccagtccgacatccttggcgccaaagtcataaggcctaaagtgaccgagacgacggctctcggtgcggcttaccttgccgggctggctgtcggcttctgggagagccttgatgacgtgaagaagcaatgggaggcagacagcgtcttcactccttcgatggatgaggatgccgtcaaggcggccaaagccggatgggccgacgctatcggacgaacattaaccaagaagtagtgaatattatgaatccatatttcgccgagttcctcggcacgctagtactaatccttatgggtgacggagtctgcgcatgcacctgccttgagaaatccaaaggcaagggtgccggttgggtagtgataaccttggcgtggggctttgccgtgatgtgcggagttttcatcgctggaccatattcaggagcgcatctcaatccggccgtgacaattggtttggccgtggctggctcgtttccttgggcttcggttttaggctacatcatcgcgcagatgttaggtggcttttgcggtgcgacccttgtctgggcattctacaaggatcattacgatgccactgacgatccggacacgaaactcggtacgttctgcacgatgccggccatctacaatccggcgaggaacttcttctgcgagttcgtcggaacctggctgctggtattctgcatcctgatgttctccgttagtggcaacacctcggaagtcggccttggcgcgagcggctcgttccctgtcacaatgctcattatggcgatcggtatgtcccttggaggtgcgacaggctacgcgatcaatccggcaagggatcttgccccgcgtatcgcccatgccgttcttcctttcaagaaccctaagcgtgacagcggctggaactacagctgggttcctgtcctcggcccgattgccggagccgcgttcgccgctctgtgttttatcttgatattctgacgttatatggttggtgagcctgcggtgcactgagctgccgaagtgtcgaaccaaccaaccatataaacgacataaacattaggtcatattatgagacaacatattcataaattgttttgtctggcggcaatggttatgctcgcgtccgccatggctcaggacgcttccgcgcagcaggcgctttggagcggggcgcaggtggtgtcccctcaaatcaatgaagacaacacggtgactttcaggtactccggcccaaatgtaataagagtccaggtgaccggcgactttctgccgccacagaaaatcagcactccgaacggtgacctcgaaatcccaggcatcgctgaactgacacagaatcagaacggcgtctgggaatataccagtgcccctcttgagccggagctttacagctactccttcatagtgaacggccagcgtatgaacgatccgtcgaatgtctatcagataagggacgtggccacggtcacgagcatattcattgtcggcggcggacaggctggcctttacaaagtcagtgacgtgccgcacgggacggtgtcgaaggtctggtatgacagcccttcgcttggaatgaggcgcaggatgacggtctacactccggcaggttatgaaaacaacggaaaggccagatacccctgtgctttaccttttgcacggaatgggcggggacgaacaggcgtggatggagctcggccgcgcctcccaaatccttgacaacctcatcgcgcaaggcaaggcgaagccgatgatcgtggtgatgccgaacggcaacgcctcgcaggaggccgccccgggcgagacttccaacggcctcgtccagccacagttcaaccttccgaagacaatggacggcacctacgaaacctccttccctgaaatcattgaatatgttgactcccactatcgtacaatccgcaaaaaggagggacgcgcgatagccggactgtcgatgggcgggttccattccctccacatctcaaaggaatatcccggcaccttctcgtacataggcctcttctccgccgccatattcccgtaaaagaaatctcctgtctatgaggactttgacggcaaactggcgagacttttcgccaccaaaccatcacttttctggatcggcatcggaaaggatgactttctctaccaggccaactccgacttccgcaagaaactcgatgacgctggttatgaatattcctacgtagagtccgacggcggccacatctggcgcaactggcgcatctacctcagccggttcgtcccgctgctgttccaatgacaaaccggcttgaagtgaatcacgcctatggactcagccatagaaatcaggctgagcctctatattgctgaaatgtaacaaacaacgaatatgagcgcactttctgtactgtatatagtactcccgatccttgctgtttccctttgccatacccttgaggtgctgttcaccgccaagcgatgggcagggcggcattgggtgtccttgatgaatgaacacccaaatttattgaatgtcctcttccgcctttccggaatgaatatgaagtcattcctcatagccgccggagcctgtttccttgcggttctcctctcaaccgccgcattgttcgccggcggtttatgggccgaactcgtctggacgacagtctttatggcatattcagtgtgcgccctgataaacctcgtgcgtgctgtaaccctcaaaggctatgttcccggacttgtgaccagcattatctccgtccctctcatcgcgtacgcggcatattcattatccctcgtctggccttggtgggaaatcctcctgttcgccatcctcggccttttcctcgctgtagctggtcatttcatcgctcagcgtatagggtagctttcaaccactatttcggcatcaccgagataagattctcgtaactatcaacgcaatcgtacctgacatcagcgccgttcaagttgttgaaaagagtcctggcgcagtctatccttgctttctcgataggcctgatctccatagaactcatatccccttttgctctcagcgatgaagaaaacgtgcttcactgttccctcattaaacgctatcgcccaatccggtgagtaatttccgacaggagtcgggatctggaaaccacgtggaagtttcgatagacacagacctctgtagcttgatcaagtgaccttacgaactttttctcattgttgtcatcagcgatgccgtcggtgaaaacataatcctggatgctctttgccgcacggtacgccttgcctacgtcctgactgcgtttctgaagccggcgtggtcatcctcataagtgatagccccgacgtccttattccacaaatccctgcggtacagaaatccgtcctgatacggctgccccgcaaagaccgccaccgtgctcttcaccgcgtcagtctggtactgttgtatcttgaagttgaattacatccgccaaatactaacggtgtttaattttttcttctaattctctaagttccaacatatcttgtctgtccgcttctgctgcatcaaacgctttgcgtcttttatcgaatttatcgtaaataagcataacttgtttttccatctgctgatttgaaatgcttccttttccagataaaacctcttgtccctgaaacgatagcatggagtcaacattttttctccagaaatcaattgtaagatcttttcgttccttgacacgtaattcggcagattccagaaagattgtaactaacctgttcaatttatcaagttcttcattggaaaggtagttctttgcgatgatgacatcttgtttgcggacaatgctccctttccatgaagtcagtcccatattctgcttttgagcatcagccctttccatcacaatctctgccgccgtgtggtatgttacggcatacagcaacttgttttgtgtttctgcaaagaacatctgcgttgacttgtcttcagctacatagtcactgcttaatttgaatagatccctcaatttctggtaaaatctcttctcggatgcgcgtatgtcacgaatttttgcgagcaattcgtcgaaatagtcaggtcttccatcaggattcttaagtcgctcggtgtcaatgacaaacccttttaccatatactcggatagatttctggtcgcccattgtctgaactgcgttccgcgtaccccttttatgcggtatccgatggccagcaccatatccagagaatagtgttctaccggatatgactttccatcggtagcagttgtcaaaatttctttgacaactgctttttttggcaattcattctcctttaatatgttggatatatgataactgacggtttgtttagaggtggcaaaaagttttgcgatctgcatctgacttagccaaaccattccgtccgtactgatcaatacaacggaagaaagaccgtcatcagtattatatattatgatgtcttcttgctgagttacatttagactggtgtcaatatattctttcattttatccatttttagcggttggtggaatcgtcccattattttcgcatcaaaatgcccaacaacttgttgagcatttgctgataatcagagaatgaaagttgagacattccatattattagtgagtgttttcgtgactatattattcttctttcccgataatattcttgccattcatatcctttcct

SEQ ID NO: 2263 - DNA, 24119 bp, synthetic construct
  misc_feature 1..24119: note = Synthetic
  source 1..24119: mol_type = other DNA
ctcaaattgacttgctgcccgtttgaagtcgagagtaggcagggtaggagcgctacagttgccttggcatccgcagctgtggttttcttctttaccggccaccttttcgagggctttatcgttgaggttgggatattggttggtaccgaggagtatctctttgcggcgagcaacattggtgtggcgttctgtcgacactgcgttgacttgttcttgtacataaccagcttgcaatgctgcgtggaatccgccccgctcctcgatgtcgaggaatattttccatgcttgttcggcaatagatacagtaagattttcgatgtaatacgagccggctcccgggtcggtgattttatcaatgtgcgactcttctttaagtaacaattgttggttgcgggctatgcgctctgagaagtcgtcaggcgtagcaaaaaccttgtcgaatggcaatgtagtgatggagtcgacgccgccgagagctgcgctcatggtctctgtttgtgtacgcagcaggttcacatacgagtcgtagagagtttggttaaattcagatgtggttgcgtgagccatcatcttgcaagaatttacgtctgcggggttgtattgttttacgatttgggcccacaacatgcgagcggcgcggaacttggcaatttccatgaaatagttagacgaaatgccaaagttaaatttgatacgtgtagcagcttcgtcgggagtaaaccctgcatcggtaagcatggccatccattcattaccccaagcgagagcgtagccgagttcttgtgtgatgtgaccaccggcgttgttgatgagcagagcatctacggcaaagacacggtagtttttcagagcggcagcggcttgcattacttcgcgagcgcggtcggccatgtcggtaacgtcttttccttttttgaggatacgtttgtaggggtcgaagttgatagaaccacgcaaagaggccaagtcatatccttttttcgtataatattcagtgaggagcttggcgaggtttgcggcattgcgtatgcatgtgaggaaattgatttctatgcagtcggcgtggatgccttcaagcagagcctctatgccttcgggggtgatttgctcgctttgcagatggaaacccagggcgtcgatgcctttatcgaggatgtcgagagctttggcattggcctcttttacatcggtaacatcgatgtcttggcgggtgagccattcgttgtcggttcttgtaccgcgtacgaaaggatattcaccaggaagtgagttcagtgtttttaaattctcgatgtcttcttcgcgatacatcggttgtacattgaagccttcagatgtcctccatacgagtttcttgtcaaagtcggctcctttcaagtctgctatcactttctctttccattcctgtgtggagacaggcggaaattgatcgaacagtttttctttgcttactgccatagttataattgattaagtgtactataagtgtttttcgttgttattgttactgcaagttggcgagaacgttttgcgttctacctctatattacaagttgtaaatcggctgtaaatgtacagtttattattgataaaacctactgtagagggcttgttttttattttatagttctgaaacttactatttttctcttttttgctcggcaacagtctgggcatcccatttgtcgttgcctgtaagtacttgtgctgcggtatatttcttggggtcagtaatgatttttgcccacttgacgcgttgcccttttgcaccagctccggtagagccatactcgcccatgaagggcgtattgtggtcttttttattatgccatactcgccatccgtcggggtgtatgtgtgcagccatatcgcagttgatatatacagctcttccatattcgcgccatgggcggcctaagtatactttttctacggcttcgtcggcggtgagtttgcagtggttaaatacaaatccgtaagatgtctcttgtcgtgtagccggtgcggctatgtagcccttggccttgctgtggatggtacagttgtcgaaatatgcagttgcccaaccaaatataaagtcgacgctaccttctatacgacactctttgtagtattgtcgtatgtcacgctctttgccatagggatagagagtatcttggaaccctttgaaggtacaatggtaaaagatggcgcggtcgctgtcgatgagggctgcgacggcttgccctacgggcccggcggtattggaaaaggtgatgttttcggcgtagaaatcatcgccgtagatatagcatgaagcagaaccggatgtacccataggttcgcccattgcgtttttctttttggcataatcgttaccggtgataacgacaccttcttgtcctatgagtgatacgtattgtttcgatggcggaacaatcagcttctctttatatgtgcctttgcgtatgagtatgcgagtctcgcggcctttgctgtagtcgggtacaaggctgatagcctcttgtatggtgaagacatcgccactgccgtcttgtgcaacgactatgtcgtagtggcgtatatagggttccagtgcaggcactgtagtggcaagttctttcacagctatggcggctaccattttagccccttttatattgaggtgagtattgtcttgtttcccgtctgggcagcaggccagtttgcctggttctacccacatgaagtattgacgcgatagttcgtcacctaacgaagccacccactcgtgcgtgagacggttcatatcgataaaggctacgtttaactcttgagctacacgtcgcggaacttcgcggtattcgccgtgggtatcggtgagtacgccatcgacaaagttacggcgtacgatagagttgaatagtacggggataccacctttctcgcgtgtttcgtttacaaatttgcgcaaattgtcgtcgaatgtcgagcccgggtcggtatgccgtttttcgtcggttttctcgtcattatgtccgaattgtatgaatacatagtcgccttttcttattttgttgcgtacggtttcccaacgaccttcgtcaataaagcttttggtgcttctgccgttttgagcatgattttctatggctactttttccgagaaaaaaccaggcaacacaaagccccatccacgttcgggattaccaccgtcgagttttttattggccatggtagaatcgcctatcatgtagattgtaaattcgcgttcgttgcgtccgcttagtagtatcaaacaggttactaatagtaatggtagaatgaattttttcatggttgcgtgtattgtgcaatttgattgatggtgcgaaattactatatttcatcaagacaaagcatatcattatccctaaaatagttttgttgactacacgtatcatacacctttatgagagtctcgtattattccattgagtcggctgctgatggtcaaaagcccctctttgatactctctggtgtgtataatctgtttaatcttgtagataatttgtttttgtcaatataatggataataatagcattttttttaattgcacagcatggtgataattgctaatattgcactccgtaaagaaacccgtagtgggttacttgataatgccataaacacatgtattgctataaatttaatttactctcttccataactctcttgttggcatgtacgcttgcaggatgtaatgtacaggaggaaaagagtagcgagtttgaggcatattacaaaaatgtgccgtttgagacgcaaccagtagaacgccccttgtttaataattataccgtgtcagtgactgattttggtgccgtaggagatggtgtggctgatgaaacccaagcgataaacaatgccataacagccgtctcggaaaaaggtggtggtagagtcgttataccggccggaatatggtatacaggtcccatagagttgaaaagtggtgtagacttgcatgcctgtcgtaacgcgttgattatatttaacgatgatcccaatgtatatcctattatagaaacttcgtttgaaggtctgaatacccggcgctgtacgtcacctatatgggctcgcaatgccgaaaatatagctttgacgggtgaaggagtttatgatggagcgggcgatagctggcgttttgtacgtcgcgagaaggtgaccgagtcgcaatggaatgagttgctgtctcgcccgggttgttatgtgaatggcgacctgtggtatccgagtaaagagtcgtatcaaggtcatatcatttgtgatgcgttcaacaatccacaaggattggaagacgatgacgaatgggaggcaatacgccattggttgcgtcctgtgatgtttagctttatagagtgtcgtaatctgcttgttgaagatgtcactttgagaaactctccggcctggatgttgcatccgttgatgtgtgagaatgtaattatcaagaatgtcaagatattcaacccgtggtattcgcaaaacggcgatgctctcgacgtagagtcgtgccgtcgcgtacttattgccgattgtcttttcgatgctggcgatgatggtatatgcatcaagtcgggtaaagatgccgatggccgcatgcgtgctatgccatgcagtcatgtagtcgtgcgaaactcgcaagtgctgcatggacacggcggttttgtcgttggaagcgaaatgtcgggtggagttaatcatatttacgtagaaaattgtacctttacgggcaccgatgtgggcttgcgcttcaagagtgcacgcggtcgcggaggtgtggtagaggatatatatattgagaatatcaatatgtgtgatatacctaccgatgcactgacgtttaacctctattacaacggtaagtcagtctccgaagatgatggtagcggcctgaaaagtattactgccgagccggtgacagaagagacgcccgagtttagaaatatatatataaagaacatcaagtgtcgtaatgccaaccgtgccatgtattttcacggattgcctgagatgccgttgaagaacattgtcatagaagatgtcgatattacggccactcaaagcggacagttcgcttatagcgacagcatcactatgcgttgtgtgcggattaacaaagctgcttcgacatttgcattcaacaattgcaatatggtggatacaaccggtatagcatacgcacaatagataaaactatcatataaactaaaatcaaaatacaatgaaaccattgaacaaagaaacggcatcaaagaccgtacgtcccgaacgtattattcaatttggcgaaggtaatttcctgcgcgctttcgtagattggattatctttaacatggacgaaaagaccgacttcaacagcagtgttgttgtggtacaaccgatagaacgtggcatggtagacatgctcaacgcccaagattgcctctatcacgtcaacctgcaaggtatcgacaagggtgaggccgtaaatagccttacaaaaatagatgttataagccgcgcattgaatccttatactcaaaatgccgagtttatggctcttgccgatcaacccgaaatgcgttttgttatttctaatacgactgaagccggtatcgcttttgaccctgcttgtaagcttgaggatgctcctgcatcgtcatatcccggtaagttgactcagttgctctatcgtcgtttcaaaacattcaaaggcgatatgagtaaaggtctcatcatcttcccttgtgagcttatcttcttgaatggacataaactgaaagagactatctaccaatacatagagctttggaaccttggtaacgactttaaggagtggtttgaaaaagcttgcggtgtatatgctacattggtagaccgtatcgtaccgggattccctcgtaaagatattgcagctatcaaagaaaaattgcaatatgacgacaatttggtggtacaagccgagatattccatctttgggtgatagaagctcctcaagaggtagccaaagagttccccgccgacaaggctgggttgaatgtattgtttgtaccttcggaagagccctatcacgagcgtaaggtaaccttgctgaatggcccgcatactgtattgtcgcctgtagcatatctttctggaatcaatatcgtgcgtgatgcttgccagcatcctgttgtaggtcgttacatacatcgtgtaatgttcgatgagttattagagactctcaacctcccgaaagaagaacttgtgaagtttgccaacgatgtacttgatcgtttcaacaacccgtttgtcgaccatcaagtaacttctatcatgctgaactctttccccaaatatcaaacccgcgacctccccggcttgaaggtttacttgcaacgcaaaggcgagctgcctaagggcttggtactcggcttggctgccattattacttattacaaaggtggcgtgcgtgaggatggagctgaaatcgttcccaacgactcgcaagagattatggacttgctcaaagagttgtgggctaccggcgatactcgcaaggtgacagaaggtgtattgggcgccgagtttatttggggtgaaaacctcaacaacatacccggccttgccgatgctgtaaagggatacctcgattcgatacaagagaaaggtatgctcgaaacagtaaaaggtattttggactaatatcgcctattacgacaacatgaacaagtttataaagataaatcctgtcgataacgtagtagtggctatcgacccgctgaaagcgggcgataccattaccgtcgacggcaacgacattaccctgcgtagcgatgtaccagctggccataaagtagctcttaaagattttgccgagggtgataacattatcaaatatggctcgcctataggtcatgcacgtatggctattgccaaaggtgactgggtgaacgagaagaatataaagaccaaccttgaaggcctgctcgattatacctataatccggtagataccaagctcgatatacctcatcgtgaccttaccttcaacggctatcgccgtaaaaatggcgatgtaggtgtgcgcaatgagatatggattatccctactgtgggttgcgtaaacggggtggtaaaccaattagccgagtcgcttcgtgtcgagacaggttgtaaggatgtcgatgccatcgtggcttttcctcataactacggatgctcacagttaggtaatgaccacgagaatacacgcaaaatattgcgtgatatgtgcctgcatcccaatgctggagccgtattggtagtgggactgggttgcgagaacaaccagcccgatgccttccgtgaaatgctgggcgattatgataccgaacgcatacgctttatggtgacgcaacgcgtacacgatgagtatgaagaaggtatgaagattttgcgggagctctatgcaatagcatcgcaagacaagcgtgtgagcgtgcctttgagcgaattgcgcgtaggcttgaaatgtggtggctctgatggtttctcgggcattactgccaatcctatgttgggcgtattttccgatttcctcattgctcaaggcggaacgtcggtactcacggaagtgcccgagatgtttggtgctgaaacccaactgatgaatcgttgcgatacggtagaactctttgataaaaccgtgcatcttatcaacgatttcaaggcatactttatagctaacaagcaacctatctatgagaatccatcgccaggtaataaggccggcggtatatcgactctcgaagagaagtcgcttggttgtacgcagaagtgtggtaagtcgggtgtgaaagatgtgctgatgtatggcgaccgtttgaaaacacgtggtctcaatcttctgagcgcacccggtaatgaccttgtagctgctacagccttggcctcagccggttgccatatggtactctttacgactggtcgtggaacgccttttggtacatatgtccccacggtgaaagtatctaccaatacaaatctctacaataataaaccgggatggattgacttcaatgccggaacattggtagagggcgaaacgatggagtcgttgagcaaccgtttcatcgattatattatcgaggtggcaagcggccgcttcaccaacaacgaacgcaaaggatatcacgagattgctatcttcaagactggtgtaacgttgtaatataaactgtttgtataacctcggcacgccatcactacgatggcgtgccgctaaacattaaaagagacagaatatgaaaccatttatggacgaaaactttttgctgcaaacagaaaccgcgcaaaagttgtatcatgaacatgcggcaaaaatgcctatcatagactatcactgccatcttgtacccaaaatggtagccgaagactatcggttccgttctatcaccgagctttggttgggtggtgaccactacaaatggcgtgccatgcgttccaatggtgtcgatgagcgctactgtacaggtaccgacacgaccgattgggaaaaatttgagaaatgggctgagacagtaccttatacgctgcgtaaccccctttatcattggacacacctcgaactgaaaacagcattcggcatcaataaaatacttaagcccgagactgcccgtgaaatttatgacgagtgtaacgagaaattggctcaacccggatatacggcacgtggatttatgcgtcgttacaacgtagagtgcgtatgtacaaccgacgaccccgtagacaatctcgaatatcataaagctacgcgcgaaagcggtttcgagataaagatgcttcccacttggcgtcccgacaaagctatggctgtagaggtaccggccgacttccgtgcctatgtagagaagcttgccgaagtaagtggtgttaccatcagtacattcgacgatatgattgaagcactgcgccgtcgtcataaattcttcgaggagatgggatgccgcttgagcgaccacggtatcgaagagttttatgccgaagactataccgatgcggagatacgcgccatattcaataaagtgtatggaggtaaagagcttacacacgaagagacgctcaaattcaagtcggctatgcttgttgcttttggtgaaatggactgggaaaccggttggacacaacaattccactacggtgccattcgcaacaacaacacgttgatgtataagaaactcggtcccgataccggattcgactcgataggtgaatttacaaccgccaaagccatgtcgaaatacctcgaccgtctcaataccgaaggcaaactcaccaagacgatattgtataacctcaatccgtcggccaacgaagtgatagctaccatgttgggtaatttccaagacggcagcgtgccgggcaagatacaattcggctcgggctggtggttcctcgaccaaaaagatggtatggagaagcaaatgaacgccctctcgttgctgggcttgctgagccgctttgtgggaatgctcaccgactcgcgcagcttcctctcatatccgcgtcacgagtacttccgtcgtaccctttgcaacctcttgggtcgcgatgtagagaacggcgaaatacccgcctcggagctcgactttgtaggtcgcatggtagaagacatctgctacaacaacgcaaaacgtttcttcaacttctaagtctcgcataaccccaatctacattcctgcttgttggcaggaaataaaacagggagctgcttacggtgtcgtgagcagctccctatttttatatcaaaaaattatttattgccgtgcgtgtggtggctgtgctgttgtagctattacaaaaaaggaggaggaacttcccgaaaaatcggagttcccccaactaaatgttttcacaacggaataatccttattgtgatttgatgaatttttatattgcaaatatagataataatttttatatatatacaaatattcggagtaaaattttgtatatttgatgaattattgtttttataaatattatatataggaatgccatgaaaagaattttagggttagacttaggagccaatagtatagggtgggctgtggtaaacgaggccgaaaatagtgatgaaacatcgtctatcataagattgggggtaagagtaaatccgttgacggtagatgaaaaagataattacgagaaagggaaagcagttacaacaaatgccgataggagaaccagccggtcggcacgacgcaacttgcaacgttacaagttgcgtcgggaatgtctgcgagaagtcttgatagagggaggcgtgattactcccgaaacagtgtgtgccgagcaaggcaaaggttctacccacgaaacataccgtctgagggcgaaggctgtaaccgagccggtaaccttagaggagtttgcgaggatattgtttgccatcaacaagaagaggggctacaaaagcaaccgtaaggccaataaagaagatggtgtggccatagatagcatgtcggtagcaaaagaattatatgatagagaaataactccggggcactattgttacgagttgttgcaaaaagggaaaaagaaattgcccgacttctaccgctcagatttacaagtagagctggataaaatatggtcataccaacgttgtttctatcccgatattttcaccgaccaattgcaagagcaactcgtcggtaagtcgcagcagcaatcggtagccattatgaccaagtgcggtataaatcttgccgagaataaggggaaagagaaaaaactacaatattacaagtggcggagtgaggctatttccaataagctcgatataggtgaggttgcgctggtaatatgtatgttgaatggcgaaataaatgcttcgagtggttatttgggcaatataggcgaccggagtaagaaactctatttcaaccagcagacaatcgggcagtatttgtataatctgttgtgtcggagcaggcacaactctttgaagaatctggtattttatcgtcaggattatttagatgagtttgaggcagtatggcaagaacagagtaagtatcatcccgaactcacgtatgcattgaaaaagaaggtgcgcgacacaattattttctatcagcggccgctgaaaagtgcaaagggattggtaagtatatgtgagctggaaggccatatccaagagatagataaagaaggcaagaaagtgcagcggacggtaggaccgaaggtatcccccaagtcgtcgcccatatttcaggagtttaagatacggcaacgtctgaatgatacccgtcttaccgagatagtgcgacatcccattacgcaccgtatagaacgtatagtgcgagaactgtcgatagaggagaaaaatatattgtgtacagaactctctatcgtaggtgggcttgaaaaagaagatgtgttgaagttgcttttcggaactgctgaaaactatgatttgaacttcaaagagtatgacggcaataagacatttagcgccttgtttgccaagtatcgacaaattgccgagttggcagggtgtaatatgtcgaaatgtaaaactgcccaagagaagatagaagccgtagaaaaggttttcgatacgtgtaattacgagacacagcttcttcactttgactcttcgttgccttctcacgattgctatttgcagccagcgtatatgctgtggcatctgttatactcttatgaaggtgataactccaagtcggggatagaggggttgataagaaaaattatggaattgacaaggatggagcgagagtacgctgccatgattgcaggagtctcgttcgagtcggattacggtagcctgagtaacaaggctatgctgaaaatactgccttttatgaaagatggcaacgattacagcgtggcttgctgctatgccggataccgacattccagaaattcattgaccaaggaagagaacgagaataggccactcaaagcacatctcgatatattgccccgcaatgcgttgcataatccggtggttgagaagatactaaaccagatggtacacgtagtgaatgccgttatagacaggtatggcccattggatgagatacgtgtagagatggcacgtgagataaaaagctcggcacaagagcgtgaggacaagtataaagccatgaacgacgcggctcacaagcacgaggcgatacgaaaggtactacgtgaagagtttcatatcgagcatccaagtcgtaacgatattatacgatataaattgtatgaggagctcgaagcgaatgggtataagacattatataccgatacctatataccgcgtgagagtattttcagtaaagagtatgacatagagcatattataccgaaagcgcgcttgtttgacgactctttctcaaacaagacgttagaggtgcgcaaggccaatatagagaaaggtaacatgacagcctatgactatgtagcttcgttgggtgccgatgctttggcggcctatgaagaacgggtcgattatttgtataagaagaaaaaaatatcgcagggtaaatggaaaaagttgaagatgaagcaggccgatattcctgatgactttatcgacagagacttacgcaacacgcagtatatagcccgatatgcaataggcatgttgcgcgatgttgtaagagtcgttgttcctacggttggagcagtaacaagccggttgcgtgaagactggcagctggtagatgtgatgaaagagctcaaccgcgacaagtacgagcaattggggttggtagagtattatcgcgatagagatggccgtttgttatggcaaataaaagattggagcaagcgcaacgaccatcgtcaccatgccatggatgctttgacggttgcttttaccaagatgtcttatgtgcaatatctcaacaacctgaatgctcgtagcgacaagtcgtcgagcatctatgccatagaaaaggccgaactaagtaggtcgggtaatggcggacaactgcgtttcaatcctcctatccccgattttaggcgcgaagccttgcggcatttgcaaacggtgttagtatcgattaaagctaaaaacaaggtagttacactcaaccttaataaaacaaaatgcaggggcagtaataaagggcgcatacaactgacaccccgtggcagcctgcataaagagacggtatatggaatgagacgacaggtctcggtgataaccaagacgataggtgctgcgtttactgccgatgtgatacagcgagtgacaaacagacggtatcgcgaagcgttactgcaacggctggcgcaattcgatggcgatgccaagaaggcatttaccggcaaaaatcgtctcgataagaatcccgtatattgcgatgaggctcatcggcaagctgttcctatggttgtaaagatatttacctatgaggttatatatactgtgcgcaagagtgttgccgataagttgaatatagagaaggttgttgatagtggcatcagaaaaaaattacaagagcatatcgacaaatacggcgaggcctcattctctgaccttgaaacacatcctatctatcttgatgaggagaaagggataaccattaaaaaagttacggtaaaaggattgaacaatgctgtgcctttgcacgataaatgcgactatgccggtagatatattaccgatgccgccggccgccgcattcctaccgattatgtaagtaccggaaacaaccatcacgtagctatttttagagatgccgatggcaagttgcaagagcatatcgtttcttttatggaggccgtagcacgttgcgtgcaaggattgccggtcgtagataaggcatacaacagagaggtgggttggacattccttttcaccatgaaacagaatgaatatttcctattccccgatgagaagtcagggttcaatccccaagaaatagacctgtcggaccccgaaaattatgcccgtatttcgccgcatctgttccgggtgcagaagttagcttctaagaactatatgtttagacatcatttggaaacgactgtcaatgaagagaaacaactaaaaaatattacttggcgacttattcaaaatactgctgcccttgaaggcattgtaaaagtgcgtatcaatcatattggtgaaatcgtacatgtaggagaagagtagtatgataaagaaaactctctattttggcaatcctgcctatctgagcctcgccaacgggcagcttgtgataaagctgcccgaggtagagtgtaacggcacgttgcccgaggtattcaggcgtgaggctgtgcgtacgattcccattgaagatataggagtagtattgctcgacaaccggcaaatcacaataacacagggcgttttggaagcgttgttagagaataattgtgccgtgatttcctgcgatgcttcgcatatgcccgtgggactgatgctgcctttggaaggccatacgttgcagagtgaaaggtttcggtatcagctcaatgcctctttaccgctgaaaaaacagttgtggcaacagactgtgcaagccaagataaccaatcaggcaacagctttgtatcgcttgcgaggttgtgaggtggggaatatgcgcttgtgggcacgagaggtacgcagtggcgaccctgataattatgaagcccgtgcggcagcctactattggtcgtgcattttccccggtatcgacggttttgtgcgagcccgtgaagcgatgccacccaacaatctgctcaactacggttatgccatattacgggctgttatagcccgttcgttggtggggtcgggcttgttgcctacatggggcatacaccatcataaccgctataacgcctattgtctggccgatgatattatggaaccttatcgtccgtatgtcgatgaattggtggcgggtatcgttgccgaaggtatagccatagatgcacttactaccgagttgaaagcgcgtttactcaccatccctgtgctcgatgtagtgatagagggtaagcgtggtcccttgatgatagccgctacccgtaccacagcatcattggcagcatgtttcgctggggagcagcgcaagatagcttatcctgtgatgtaagacacccgggaatgttatgagtagttttagtaaataccaaattatgtgggtattagtgttttttgaccttcctaccgatacccggcaagagcgtaagcggtatgccgactttcgtaagcggcttataggcgatggcttttccatgtttcagttttctatctacgtgcgtcattgtgccagccgcgagaatgccgcagtgcatatcagaagggtaaaatcatttatacccgaacatggctatgtcggaatattgtgtattaccgacaagcagtttggtgagatagagctatatcatgcagccaaaccgcagagtatggttgctccttgtcagcaattggagctattttgaaacaaataaacctgcccgatggcaggtttatttgttttacatacggtcgtttttttattctatttcttgttgtaagtttctgatgtgcagctatatacacgtattgtgctgtatgtaatcacatcaaagatacaaaaattcatcaaatcacaacaaatgctgtaaaaacgacaatggcaataaagctgtatgtaatcacatcaaagatacaaaaattcatcaaatcacaacaaacgagaaccatcatccacttcgtgcaagctgtatgtaatcacatcaaagatacaaaaattcatcaaatcacaactactacatgacaacaaaacggttgccaaaggctgtatgtaatcacatcaaagatacaaaaattcatcaaatcacaacctgctcaattgaggttgaaagtagttgtcagctgtatgtaatcacatcaaagatacaaaaattcatcaaatcacaacgattgtggcaaaggctcattacaatggtcagctgtatgtaatcacatcaaagatacaaaaattcatcaaatcacaaccactttttaacatttaatataaacaagttggctgtatgtaatcacatcaaagatacaaaaattcatcaaatcacaacttaacgatgcctacttttgggctctacaagctgtatgtaatcacatcaaagatacaaaaattcatcaaatcacaactggaagggtcttatttctcctctggcaatagctgtatgtaatcacatcaaagatacaaaaattcatcaaatcacaacgacatcatcaacgcaatatgtggagcaaacgctgtatgtaatcacatcaaagatacaaaaattcatcaaatcacaacttcagttcgcgcagggcgtctatgctgatggctgtatgtaatcacatcaaagatacaaaaattcatcaaatcacaacgatagcagcggtgggtactgcgagtcagctcctttaccatacttttgtcgcaaagtagtcatccagggatataggctgccatcgacataaccgccttgccggaatttatctttggtgtgaccctctatggcaactgataccttggtggggatgctccggtgtagcgctttttgtatctcgttctgttttttgttaagagtcttgaaaattcatcggaattataaattttttttgatttgtttggaagttatagggatagtatgtatatttgtgtcatatccttcattcagatacgggcaggtggaagctcgggggggcatctatatgatgctcgccatatcgtgggttcgaagcccacctgaatggaggattattttatttttatctttatgtaatttcctccgttgtcgacaaggccacaaaattcatccaatcacaacattttgggcgttacagtaattcggccacaggctgtatgtaatcatgttgaatatgttgatactcagaaatatagagaaccgatgagcggtgcgaggattagaaacaaggtttgggggctgattaaataggaattgcgttttgtaattgggagagataatgttatttcgtacacttagagagttatttcatacattctcacgaatatagctttgccatgtggataaacctggctacatttgcttgggatatcaatagaatgaaaaaacaattagtcatatcgacctctctcgacttggttcgtatagcatcggatagaatcgtctatatagcatcggacggaaactattctacgcttgtacagacggataatgaggtgcgtatgatttcgtaccagttggggcaaatcgaaaagatgatttcttcccagttgggtagcgatggaaatagttttatccgtattggtaagagtcttattattaaccgctcctacatctactacatcaatattcccaaacagaagttgatactttcggatgtggcttcgtttaatcataccgtgactgcatccaaagaggcactgaaacagttgaaagagctattggaaaaggagatgaaatagttatgaaagaacttaaagaaatccgagatgaccaaattcgcattataggtgaaggagaaagcaagaatcactggccgcgccgtatatggattatcatcctctctgttctgggggttgttgcaatcggtgtaatcatgctgctttcaataaggcataaggaggaggcggttgtggaattgaaacaacccgaaccggccttgtttgaccctgtgagagtgcccgaaccggtagagccacagcaatggatagggcggcgtgtcgattcgttggcaacaggatttacagagattcgcgatacaataatcaatgatattcccattagaatatatattcctcacaatgccgagatgtcgttgcacataggccgaatggataagagagatacgagcgttgtatatgtagctcaagcagcagatgtgagagccgataatggtggaattgtaggtgcctttgtactgaatggcgaacctaaagcgtggggattgtcgaaaaagggattttgtgcatctatccgtggcaaggtaattgtcggggtggccgataatacctctctttttgaagaggcgaccgagtgcggtggctatttttttagacagtatcccctcgtaaaagatgggcaggtgattgataatgagcccaaggggaaggctgtaagaagagcgatatgcgaccgtctcggtgagatatttatggtagagacgggtacggccgagtcgttccacgattttgcgcaggcattggccgatatgggtgtaaatcaggcggtatatcttgtcgggtcatcggcttatggctgggcagttgacgagaacggtacgacccacgaattcggagatgaaaattattacacggggcgtagaaaattgcccgagaatacaagttatattgtttggagaaagagataaattatacgtgtaggcctatttcgagggggcgataggctgcgtcacgccagtaggggcttaccggctgtggtgcatcagccgctgaggggtgcgactcttcccgggctttctccttcacaggcccgaaatcaaattcttctttcgtaaaagcggtgttggcagaggctgcattctattccttgccgacaccgctcgctttatatccttattgaagagccgggagtttgcgatacccggagagtcggctcggcaaaatgctgatggcaaaacggaccgagtcgatgatgataacgggatagatgcagtctcgcaaaaatggcagcatgatgaaatgatgcggtgagggagatttcatacactcgcaaaatgatttcatacagtcgggatgaaaagcaccagcctgtgccgtttccgttttataaattcgcatgaaaaataattgcaagactatatgagagatatattcagagtcctcctgacaggggctgtaatagccctccttacgggatgtggaaatagggaaaacgcctctatggatgaccgttatacggaagcggtgaaacgcaactcggtttattattggaagacggtttttgacatcgattcaacagcgatgtcgttcatagaaaaacacgatatcggccgtatctacttgcggatgtttgatgtcgctacggagcctgattttttgaatggaaactttgaaatagttccgatagccacaacaaaatttgcatcctcagtccccaataatcttgaaattgtccctgttacatacattacaattgatgcactacgagctatggcaggtagggaagccgagttcgcatcacttattgtagaaagattgttggcaatgtcgtcttataacgaatgtggcaaaatcaatgagattcaactcgattgcgattggacaagtactaccaaaaacagttacagcaaattgtgcagaatagtgaaagactcgttgtctttgaaagggatagatttaagtataaccgtgaggctgcaccagttgcaggaaactcctcctcccgcagatagaggtgtgctgatgctgtataatacaggtgcattgaaggatacggagacttgtaattcaattctgcatatcgacgatgtaaggccatatatgaagcatagaagatatgccattccgttagactactcatatcccgttttcggatggggtgtaaagttccggaacaataagtttgtgtctattgtaccatacgatgacaaagagtgccgggataatgagtttgtcagatatgaaagacctgcatcggccgagattcttgaagtgaagagacttgtagagcagaatctgggtaaacctgccagcggaaatatattatatcacttggatgaaatgcaacttgaaaattatacagaccatgaaatctctcagatactttttaattagtctcatatcgctacttacggccaataacgcattggcttgttgggacgcatggtacacaccgcggggatattatatgtatagggtttacaataatcggcccgaccccgaactggcgattgaaggatgttatccgggtgccggaaagaactgcgaagagtggcaaagattggtttcaaagtccatatcattggaggatatatatgaggtagtgtataaaatgacattagaagagtatgaagctatttatgacaatagaactgcaaaatatgaaaatgaatttgtagaatggattaccaagaaggatacagcaattttagatttcttactgctggcaaagactaatgaatacatacgcttgaaacgcaattctcgctggtattatccttcaatgaaaattggcgcaagaatgactttggaggaagttgcagaaaaggcattgtctgaaaaaaatgagaggctcagagataggtatctgttgcaagggataagagctttgttctcattgtcaaaatatgaagagtgcattaagctatgggagagtgaagtttcacatttgcctgaggataatcttatgcgacaacttatttgcccgtatatagctggtgctgaatttcatgccaaccatgcccagaaggctgtcgagtattttgctcaaataggcgacatacggtctatgctctattgtatgggccgagccggggagaaaatttcaattatcgatgccttagaattggtatgcgagtatgcccccaatagcaattatatagaagagacattgcaatcgtatgtaagagaacttgagccgttgggcgaattttatggaaaagatacattcgttaagacaaccgattgtgaaaaactatatacgttatgcctgaaaatggctcatgaaggtagaggcaataatcccgccatgtggtattatactgctgcattcttgacagacctggagggtaatgcgacaaaagcatcttatctgttaggcttggcagaaaacagtaaatcgtcgtcgtatatagacgaatcgataaaggtgttcagaatatatttagacgctaaattattgccatataactcatcgtacgagagcagattatttactcagttaaattggctggacaaaaaaattaggagtaatatcgatgataaagtccgcaatgaaactgcgcgcgggtatatgttgcttagcggcgagagttactactattggaacgatatgatgcgtagaatattgctggcagaagtgtgcccccgaatgattaaggcaggaaagacaacccgagcattgcaacttgcaaatatggctgacaataggttgctcaatcttgtaaataagcgaaatgtgtatgattgggtaaacgacgaatatgagatagtaaaaacttatacaatgagtagctatcggtattctgacagattcaacagatatgattacagcaatcatttttttgaaatgattgatagtataggagtggataacacaatcaaatatgttcagcgagtaaataacccgcaaggcaattttgaccgtttcctgaatagtcgtggttatataggacaggactatctgaatgatattgtgggtacacaatgccttcgtaatatgcgatataaagaggctttggaatatctcgggaaagtaagcaaagcatacaaggcccatcataatgtgtatatgaaatacgaccctttcagtgccgaccggaaggctatcagaacgaaatcagatttcaagtacgacttcgcgcgggagatgtattcattagaacaaagtatgaatattatgacagaaccaaatagaaaggctcaactgatggtgagatatgccataggactcagaaattcaattgatttatgttgggggcttacccagtattatcgaggaacaagttattggggacaggtttgtgaaaagcgtgattgggaaaatgacggtaatacaaaagccgctatgaagaaggcaaaagagttgataaacctggcatgtgacatagtgacagatgatgaaacaggggcaaatatccaatatatgctttgtaatttcaaaaccgtggtttataagtatccgaataccgagaaaggccggttggttcgaggtaaatgtgacaatctttacgattaccatgcagaatcatatagaagtcggtaggtcatatatctatattgctttgggctgtttgtatctgcttacttgtgagcacccgatatgtaacgacgataatatctcaattagaataaataaacctgcccgatggcgggtttatttgtattacatacagtcgttttttattctatttcttgttgtaagtttctgatgtgcagctatatacacgtattgtgctgtatgtaatcacatcaaagatagtgaaaggtgagggcagagccaagcgagaacgaagtttccagcgatgactatgccgagccgcctcctatcttatgtaaagataagcaaactcgcccgatttcggatggatttaggaagaataatgtaaactattgggctttcagggagatacacagtattattccgcatttgtaaatgtgtgctttgaagccgttttttgaatagttaagcagaaaaattgctacctatccgttgcccattccagttgtatggagttgtttggaaatcctttctgctccgaccgtaaagaacgcagttccatcattttggcttagcgaaggtacttattttttttgagatatgaaaaatataggttccgtaagtcaatggtgatagctttgtcgatgtctgacgatatttgacatgccgatgattaactctgtctccgttaattttgcaaacaatggaacagattatgaatcagacagatgtaaaggtttcgttctaccttaaaaagagcgaggcggatgccaggggaaactgtcccgtaatggcacggcttattgtcggcaagcactctgaaacaacattcagtgtcaagcttcgtgtgccacagtcattgtggtcatccggacgggcatgtgggaaaagtgttgcggcaagagacataaacaacagactggatgaaatacgtgctgccgcgctcggcatctatgcggaacaatctgcaatccgtgaggatgtaacagcagaggatgtaaagcatcaacttttgggtatggcttcggaacaggaaaccctattaagctatttcagacttttcattagaaatttcgagaaacgtgttgggattaatcgtacggaaaagacattgagggcttaccgcaattcctacaatcatctggtacgttttttacagatgcaatataagctgtcagatatcccttttgccgcattggaccgttccttcattgaaaaatatgacttgtatctacgtacggaatgttgtctggcttcaggcacaatagtcaatcttaccgtccaactgaaaacaattgtcggagaagctattgctgacggtataataacagtattcccgtttgtcggatatgaaccggtacatccgaaaccggaacagaaatatctcacctccgaagaattgaataggattatgacaacacctctccatgatcagattctttatcatgtgagagatatgttcctgttttcctgttatacgggtattccctacagcgacatgtgtctgctgacaaatgaaaacctttctctcgcggaagatggtacctggtggataaggagttctcgcaagaaaaccagtgtggattttgaaataccgcttatggaactgccgttccatatcattgaaaaataccgtgatatggctcctgaaggaaagcttctccccatgtattccaacagttcattgaatcgttatttgaaacgcatcgccgaaatttgcggtatagggcgtaagttggtttttcatgcagcccggcatacctatgcgacagaaattaccctttcgcatggagtcccgttggagacagtcagtaaaatgttgggacacagtcgtattgagaccacacagcattacgcaaaggtgacagacaataagatagatacagatacgaaagcattggacaagaaaattgctgaaaggttttctgtagtcatttgataaccggataaaaggacaagattatgaaagaaaaaattaacaatacggaaatcagacatcgcagtacgtttgcggtactgttttatataaaccgcaccaaagtccgcaaagacggaacgtgccagttgctttgcaagataagcatagatgccaaatgggaacagataggtacaaaagtatcagttaaccctgccatctggaatcctgaaaaggacgggctgacggccgcagtgagaatgcccttaccgtcaaccgggccattgatgatttgaccaaagaaataaatgagcattacagacgaataaagagcagtctgggattcattacggcggagcaggtgaagaatgccgtgatgggtgtc

SEQ ID NO: 2264 - DNA, 24119 bp, synthetic construct
  source 1..24119: mol_type = other DNA
  misc_feature 1..24119: note = Synthetic
cagaccgggcagaccatctcctcgaagaagagttccttgcgcttgcgcttccaaggattttcctcttcgtcgtcaccatcgttctggagctgggccaggatgccggggaaagtggacatctccatgtccgagtcgctgccgatacgcaacaattcatctgatccataaaggattacctgcaaagcatcctgcggaatcgtgtcgatcgggtcgtggagcgagaacttgtagcggcgcgcgatggcttccagataacggaagagcgtgtttccccgcatcgggccgacgctttcgatgccgccatcggcgatcgaacggctccggtcggggatgatcttgtcgatatccgcacgggccaccatacccagtccacggcagtgcgggcaggcgccttgcggcgaattgaacgagaaggtatagggtgccggcggctcgatcgagagacctgtgtccggacagacgaggttgcggctgaagtgttgcagggtgtcgtcgtccagcgaaaggatggccagggaacccttgccctggttcagcgcgttgcccaccgattcccggatgcgtttacggtcgtcggcttgggggacgagtttgtcgaccaccagctccacgaagtggaccttgtagcggtcgagcggacccgcttcgctcaggtcgcacatctgtccgtcgatgcggacctggctgtagccgcggcgctgcaactggacgaaaagttcgcggtagtgtcctttgcggccacgcaccagcggcgcgagcaggatcaccttgcggccctggtagcgttgcaggatcaggtcgacgatctcctcgtcggtatagcgcaccatctccttgccgctctcgggcgagaaggcctgtgaagcacgggcgtagaacaggcggaaaaagtcgtagatttcggtgatggtgcccaccgtggaacggggattgcgccccaccgtcttctgctcgatggagatgacggggctgagtcctttcacctcgtcgatatcgggtctttcgagaatgccgatgaactggcgggcataggcggagagggtatccatatagcggcgctgcccttcggcacagatcgtatcgaaggccagcgacgacttgccgcttcccgacaggccggtgattaccaccaacgcgtcgcgggggatttccaggtcgatgtccttgaggttgtggacccgggcaccggtaatcgatatcttctcgctttcagccatggtcaggcgggttgcaggaagggattggtcgcacgctcatagccgatcgaggtggcgggaccgtgacctggcagtacctggatgtcgccgtcgagcggcaggagcttccgggcgatactgtccatcaactgctcatagtcgcccccgatgtggtcggtgcggccgatgctgccggcaaagagcgtgtcgccgctcaggagcacgccggcttcgcggcagaggaagcagacaccgccctgggtatgaccgggcgtggcgatgacttcgaattccgtttcaccgaacgggatccggtcgccgtctgccaggtcgtgcaacgtgccggtaaagggcttgaaggccaggcccagctgcgcgcaccattctcccgagcgtaccatctgctcccggtcgagcgggtggatccacgcatcgatgttccaggtgcgggccacgtcttccaggccgaggatatggtcgaaatgtccgtgcgtgagcaggatcttgacgggattgagctgctgctgcgccacgaagtctttcaggcgctgcagttcccggtccccgtagttgcccgggtcgatgaagacgcattcccgggtcgcatcccaggccacgtagcagcactcccggatcggattgaagtagaaggtctttatttccatctttttggcttcgaacatacaaaaatacgaaaagatgttgtaaatttgacaggcgaaccaaaaacagacgacatcatgcatatcgcgatagctggcaacatcggcagcggcaagaccaccctcacccggatgctggtcgaccatttccactggacccccaaatacgaatccgtggattataatccatatcttgctgatttttacaatgatatggaacgttggtctttcaacatccagatttatttcctcaacaagcgcttcctcgacgtggtcgagatcgccaagcacgaggaaatcatcgtccaggaccgcagcatctacgaggacgcctgcatcttcgcccccaacctgcacaacatggggctgatgtccacgcgtgacttcgaaaactaccgctcgctcttctccctgatgtcgtcactggtcaaagcccccgacctgctgatctatctgcgcagttccatcccccatctggtgggcaacatccagaagcgcggccgcgaatacgagagcagcatccgcctcgattacctcaagggcctcaacgccctctacgaagactggatcgggaactacaccgacggcaagctcctgatcctggacgtggacaaactcaatttcgaagaaagcgccgaagacttcagcaccatctgcgaccgcatcgaggcccagttgcacggcctgttctaaaaaaacttttccgcttattccggaatccccatcaggcgacggatttcggtcttcgctgctttccagcgggggatgtcgatcttcgtcccgatgacttccaccaccttggccgccagcgcggagcccacttcgccgcaagtcttgagcggcatgccgttggcatgggcgaagaggaagccggccgcataggtgtcgcctgcgccggtggcgtcgaccgcttcacccggccagggatcgatgaagtggaactcgtcgccccgctggatcatcgaaccgtccttgccgatcttgacaatggcggtatccaccatttcggacatggcctgcaaggcctgccggggcggctgatgcgtgaaggcggctgcttccgtctcgttggcgaagatgatatcgacgtagttcttgacgatatcctgcaggaacacattgttcgactcgaccacgttgtaggaggccatgtcgagcgagatgatcatattgtgctcccggcccatctccacggcgcgacgtaccaggtactggttctgcaccagatagccctcgatgtggagatagtcgtagccttcgaaatactcgggcttcaggtcgtcaggctccagctggagcgcggcgcccaaataggtggcgaaggtacggtcggcgttgggggcggtgatgaagaccatcgcccggcccgaagcgaccgtgccgaccagcagattggacttgatgccgttctgcaactgcgactggcggaagagcgaaccgagttcgtcgtcgcccaccttgccgatgtagcccgaaggcatgcccaggatggccgtcgccgacacggtgttggcagcggagccgccggcaacgtactggactccgatctccttgaggtcggaccagatggtgttgccggtcttggcgtccacatgctgcatgctgcccagcggcagattgtacttcttgaggagcgtatcgtccggaaggacggccaggatgtctgtcaaggcatttccaatgcccaggatcgatttcatgaacggtcggtattggaaggtcaacggccccagaggctgcggggatagacgccttgttcgatcaggcggccgatcttggccaccacgtcgggacggtcttccttgtacgtgacgccgaaccacttcgcatcgcagttgagcaccttgaaggaagcgtcgtggcgtttgatcagtacgtcagccacatagggaatgaaaaattccgccttgggattggttttcacgtcgtcggaggcgaggaagaccttgaacagttcctcggaccagctgaaatagtcgggtgtgaatccccagaagttcatcgagaccacgctgtcttcagacacctcatggtcctgacctttctcggcatagtaaaccttgccgtcagccttgcgctggatggcggtccgctccgtgaccgtcgaaaggcaggcgttgtcgtcgagttcgcagacaccgcgggagacactgccgaattcggagagcgtatttttcaggaaatagccgaccagggcatattttccccggcaaccttcgacgctgcgcaggaaatcagccacgacctggaagccttcgcggccgtagaagtcgtcggaattgatcacggcgaaaggctcgtggatcacatctttggccatcatcacggcgtggttggtgccccagggcttctcgcggccttccggtacggagaaaccttccggcaggtaatccaactcctggtacacgaattccacgtcgatcttcccgccgaaacgctccggagagtagatctgcttgaaggcgtcggcgaaagaatgccggatcacgaagaccaccttgccgaaaccggcctggatggcatcataaatggaataatcgatgatggcctcgccgcaagggcccagaccgtccatctgtttgagggagccgtaacgggaacccattccggccgccagcaccaaaagtgtaggtttcatatctttctgcaatcgtttatttaatttccaggatggcggctgcgccgggctcgacgacatacttctcgcccactttcaagcgctcgccggtcatcacgttcttcgctcttttcgcatgttttgcggtaatctccgagaaatggtcccagtcaaccgcgtaatcctctttcccgccgttgaggatgaccatcacggcctcccctttcacgacccggaaatagacgtacacattgcgggcatccggacggaaatggatcatgtcgccctgcgtaacggccttggaggtcttgcgccaggtgaacaggtcggagacatacttgcgcagcacgacctgctcgcgtgtgaacttgccccacggcatgtcgacccgctcctgcgagtggcccgtggtgccgtcagcgctgcgcagaccgtattcgtcgccgtagtagagctgcggcacgccgcgcatggtggccagcagcgcgtaggccatcttgatcttttcgggatcgccgcccagttcatgggccaggcgcgaggtatcgtggttgccgatgaagatcaggatgtcggaaggatcctcgtacagacggtcgagggccagggagttgtaaatctgcagcatcgaaggctcccacgatgtaccgtcggacgtaagggccgagagggtcgcgaacatcagggggaaatccatgaccgatggaagctgggaattgtacccgtccttctgacgcacgccttcccagtacgcacaggaagccacgtcgccgaaccagacttcacccacgatgttcaggttcttgtactcgccacggattgccttcgtccaggcggcgatgcccttcttgtcggaatacggataggtatccaccctgagaccgtcgaggtcggcatattcgatccaccagaccgccatctgcgtcaggtactgtcgcaccagcgggtcggccatgttcatgtccggcatcgtcgtatcgaaccagcccttcacgcaagtctccttatcgatatctgcagcatggggatcgctgtgcgtggacatggcggcattggtccggatcagacggtctccgccgcgttcgaggttctccggatagttgatccaggtctgcgacggcaggtctttcatccaccagtgggccgtgccgcaatggttcggcaccatatccatgatcactttcagccccttgtcgtgggccttcgaaacaaaggtccggtacagctcattggagccgtagcgcgggtcgatgcggtagtagtccgcacaggcatagccgtggtaggagtagctcttctcattgtcgaaggtcagcggcgtaggccagatggtcgtcacgccgaggctcaccaggtcgtcgagatggtcgatgatgccctggatgtcaccgccgtggcgtccacccagattcttcggtgcagccttctcaacggcttccttcacggtatcgttgctcttgtcgccattggcgaaacggtcgggcatcagcagatagacggcgtcttccggtccgaaggaactccgtttggcggaaccgtcgcggcgcttgagcagctcatagtcgaaatcgaactggcggccgtcaggcgtcaccaggttgaaggtatacgtgccgggttcgagccggctgccgatcttcacttccacgaaaaggtagttcggattgtcggtggaagtcacctttcctacggtaaggcccttgatggtcgcatcgaccgtcacctgggaaccggcgatgtcctttccgtggagcatcagttgcaggtcggtttccatcccgacccaccagcagggaggctcgacccggtcgagcttgtcggcccgcagcgcagtggtactcagcatggccaggcagaggagcaggatcctagtcttcattttcttcaaactcgctttcgtcacagtcgccgaaacagtcgcccacgctgaagatgatgtgatagccgtgggccggcagggtaaattcgctgtcggtggtcaccagatggttttccaccttgtaggtcactacctcatcggagaagttgaacatcgccaggcacatatcgccttccacttcacgctcgaaggcgaagacctgcttcggatggtcggtcggcagcacggccatcgtaccgccccagggatacgcccagaggcaggcgtgctggtcgcgcagcttgatgagctcggtatagagacgtgtcatctccatcggatcgccagccttccagtcgatcggatctttctcaaagaattccagacgcttgggcaggcagatctcgtcgccgttgtagagcatcgggatgcccggaagcatgaaggtcagcacggtgaactgcttgagcgaagggccgaacatctccaggttggtgcccgaccaggagttctggtcgtggttcgaaacgaagttcatggccagcgttccggcaggcatgccggtcttttcggcgtaattcacgtagaaatcggccaggtcttccgcatttttcttgccggcggccatatcataccacagatgcatctgctgccaggcatagtaggcgtcaaatgcgttcttctgcagatcaggggtttccgcttctgccaggaagaaaagattgtcgggatgctgggcgcggaaatcggcgaacgccttttcccagaaatcggtcggaacctcgctcgccacgtcgcagcggaacccgtcgacgccccggtcgatccagaactgcatctgctgttccatagccgcatacacctcgggatggttcacgtagtcgagatgggcgatgtcggtccagtcgtactgcgtagccaggttgcccagcgagtcgagatggtaccagtccttgtggtcgcgcgtccaggcatggtcgcggcccgtgtggttggctacccagtcaaggattaccttgaagcccttttcgtgggcggcggccaggaagtggtcgaagtcttccatcgtgccgaattcggggttgacggcgcagtagtcctgcacggcatagtagctgccgagcgtacccttgcggccttcgacaccgatcggatggatcggcatcagccagaggatgtccacgcccaattcggcgagccggtcgagctgcggctcgacggctgcgaaagtgccttcgggcgagaactggcgcacgttgatctggtagatcacggctttctgcgcccactcaggatgtatgacatttgtgaaattgccttcgggcgcggtcgtcttgtggcaggcggccaggcacaggaacgaaagcaggaagatcagtgtctttttcatatcgtcggattatttgatgatttcataggaaagcggtgcgacctcaaccgtacagctgtttttcccgcgcacggtcaaaccgcacggcaggttgagggtcagggagcgggattgcgcacccttgttgagcaccaccgccaccgtctcgcccatatagctgcgggaataggccaggacgtccttgtcgacgtacagcagtttataatccccatagatcagcggcatcgagacgttgtgcatccgggccagcgccttcgtggtggcaagcacgctctgttcggccggcgtcaggtcgtcgaactgcatccagcggcggttgtccgggtcgttcgcgcccggctggccgaattcgtcaccataatagatgcacggaatgccgggaatcgtgaaattgaaggcgtgcagcatcttcaggtatttgtagcccacggggtcggtgacgcggatgtcacggtgccagcccgcagccttctggtcctcacccggcttgaattcgtggctggccaggcagatgtagcggggacggtcgtggttgccggtgatgttgcccatcaggtggtgcgaaccatacacggacaaatcttccgcaatgcggtcggccagacccgtaaagtcgccgtcttccgaagtggtggcccagccgaaggtgtcatagacattgaaatcgaactgcgcatcctgcatgcccggcttcacgtaagagttgatcagttcggtggaaccgtaggtctcgccgatctggtagaaggtccggccgggcaggctgtcgtagagcttgcgggtgagcatgcgccagtactgttcaggcacgtgcttggtggcatcgtggcggaagccgtcgaaatcgaagtgctgcatccagaacagcgccgagtcggtaagttgggcgcagatgtctgcgcgttccaggtcgagggtcgggatatggtcgtcgaaccaggttgtcaggcggaattcatcgtagagctggcggttcggccggccgtcgggtgtatcggacggggtggtccagtccggatgggcggtcagtgtcggactctggatatgcatgtggttcgacacgtagtcgagaatcacattcttgccatccttgtgcgccttgtccagcagatcgcggagttccgcctcggtaccataacgcacgtcgatggccgtggcgtagtaaggccagtagccgtgatagccgctgaaccgggtcttgggatcgtagatctgtccccaggcgtcccaaggattctgggtgatcggcgaaagccagatggtggtcacgcccagcgagtcgaaatagcctttctcgagggtctgcgtgacgcccaggatatcaccgccccagtagtccaccttgggatggaccagcggcgaatggagcggcatgtcgttgtccttgcggccgtcgacgaaccggtcgatcatcagtgaatagagcacctgcgcgtgcttgtcggtgcggtcaagctctttcgtcgtgcgcattaccttgccgtaacggacgggaacaaggatgtcgttgcccaggccgtcggcattggcgcagaacgcgcgcacgtaggagcgctccatcttctccgcattcttcggcacagtgatctccagcttgctgcggtcgatcacccggatgccgtgctccttgtcgagcacggtgttctgccagagcaccagcacgtcatccgcctggttctcgatcaggatatagaaccggtccggcttcccttccacgggcgccgtggtgatgaagggcgccttctccgggtcgcaagcctccatcttcacgggcagcatgttcttgagcacgagcgcacccttccccgccacggacgtaatctccatccaggaaaggaacggcgtatccagccccgcatcaatcgtaagcgtatctgcctcgggcaaagtcgggaaataatcccttacgatcacctgggtacttgcctcctgcaacagacaaggcgacgccagcggccccctgtcgaacagcggtgacggcgtcacccccttgtggccgcatcccgccgccacgagcagtaaaagaaagatggacagtttttgcataactttcaaagttagcaaaaatatcaaagctttgaaagatttctcctgttttccttcactcctatcctcctgataaaaaagagcgagtccgcagacccgcccttgatgttttcacaacggaataatccttattgtgaatggcttcatttttagtgttacaaaggtagcttaatcatctgataattgcaaaaataatgttaaatttgagagataattattgagcacggtataatgaagaagattctcggactcgacttaggaacagccagtatcggttgggcggtaatcgaaagagcagaaaaaacagatgaatccacaagaatcgttgcctgtggttctcgcgtggtacctctttcttcggacgaaaaagacaatttcgaaaaaggaaaatcaataacgacaaatgcggatcgcagattaaagcgaagtatgcgcagaaatcttcagagaaggaattcccgaagagatgcgctgattgctcttttacggtcggagggctggattcacgcggacgacgttttgtctgaagaaggtaaagggaccacccatgagactcttcgactgcgtgcgaaggctgcacaagagaaaatcagtcttctacaactggcccgggtactgctctcgatcaatggaaagcggggctataaaagttctcgaaaagtcgatacgggcgaagaaggtcagttaattgacggaatgagcatcgccaaggaacttcagttattgcagattacaccttctgaataccgtcaaagacatatcttggatgggaaaccgaagcgatttgatttctatcgctccgaccttgaaaatgagtatgagaagatatggacttttcaacaacatttctatcccgatatcctgacagaagaactccacaagcaacttcaacggcaaggaaagcaagggacatcctcgattttcctggcaaaacatggcatttatactgctgacaacaaaggaaaagacaaagataaaacggccgtaacgtggcgagtcgccgctctcacggaaaagctggaacccgatgtcctggcctacgtgatttcagatatccgaaaagacatccaaaactccagtgggtaccttgggcagatcagtgatcgcagcaaggaattgtttttcaacaatgagactgtcggtcaatacctttttcgacatttacaagaagatcctctttatagtacacggaataaagttttttatcggcaagactacatcgacgaattcaaccgtatctggacagttcaggccggttattacccagaattgaacgattctctgagacgcaaaattgctgatcagatactgttttatcaacgacctctcaaatcgcaaaaggggctggtttctttctgcgagttcgagagccatccaattgaagtacttgtagacggaaagaagcaagtcaaaactacggggagccggtgcgcccctaaagcatcattacttttccaagaattcaagatttggcagatcctgaacaatttgcgcatcaaagacagagtgaacgatggcgaacgaatactgagtcttgatgaaaagaatctgctttctcaagaactgtctattaaaagaagtatgagacagacggaggttcttaagcacctaggtttggctcctcgccgctatgaactcaactattcggaaatagaagggaacacgactttatctgcacttttctccgcttacctctctatcgtagacttgtcggggcatggagaacacgatattaataagctgaattacaatcaggtcctctcagttgttcaaactgtcctacctattctcggctgcacaaacgacatctttcattttcagcctgatctcccgaaacaagaatatgagcaacaacccctattcaaactttggcacttattatattcctacgaaggagataactcccataccggcaaagaatctttattcaggcgaatatcagacttgacaggattggaccgtgaatatgcgaaagtactcggcgccattacgtttaaagatgattacgcctcacttagccataaagctatcagcaaaatcctgccgtacctgaaagaaggagacacttatgacaaagcctgcacacgggctggatacaatcattctcacttcgaaactgccgaggaacgtggccaaaagcaattgctggatcatttggagcaattgcccaaaggatgtctgaggaatcccgtcgtagagaaaatactcaaccaaatggtcaatgtcgtcaatgcttctacccaagcatacggcaaacccgatgagattcatattgaattagcccgtgaactaaaacagagtgcaagagaaagagaaaaagccacttccgacattgaaggcaataaaaagaggaacctcgaaattgtcaaaatccttcaagaggatttccacatcaccaatgttaggaaaacggatattctcagatatcgtctctatgaagaattgaaggaaaatggattcaaaaccttgtattcagacaagtatgtaccaagagacaaactgttttccaaagaaatagatattgaacacatcattcctcaggcaagactgtttgacgactctttctcaaacaaaacaattgaatacaaagacatcaatattgaaaaaggaagacggacggccgcggacttcgtcaaagaaaaatatggtgaggaaggttatactcgcttcagactgagggttgacgaccttcgaaacagaggcgccctctctgacaaaaagaggaaaaatctgctgatgacggaatcagatattccctcaggttttgtagacagagatatccggaattcccagtacatttccaagaaggctcaggagcttttgaaggactatgtaagaatagtccttccaacatcgggttctgtgacagcccgactacgcgaagaatggcagttggtcgacgtgatgaaagaacttaactttgcgaaatatgaaaaagccggcaaaacagcgattaccgaagatattgatggcagaataatacgcaaaattcaggactggaccaagagaaacgaccatcgccaccatgcaatggacgcgattacaattgctttgaccaaacccgaacacatacagatcctcaacaacctcaatgcccgaagcgacaaagactctgttttcttccaaatgcttcaaaaggagaccgttgttatcgggaacaaacgaatcttcacgccgccgatgcctttggacatccttcgtggtgaggtaaaaaggtctttaaatgataccctcatttctatcaaagccaagaataaagttgtaactaacaatatcaataaaaccaagactaaaaacggttatcaacggacgacagaacttaccccaagaggtcctttgcataaggagcaagtctatggacaacggttcagatatgagactttcgaggtgacggtcaacgcaaagatgacgaaagaagtcattgccaacgtcgcttctaagcgtctccgcgaagcattatttatacggctgaatgagtttgatggtgatcccaaaaaggcattcaccggaagaaacgcattagacaagaatcccatttatctggattccctgcatacggaaaaggttcctcagaaagtcaaatgtacccgtcttgccccctactattgcatccggaaagatatcggcccggatttaagtatcgacaaaatcatcgacaccaaagtccgttctcgaattgaggagcgtatttcagagtatggtggaaacgcaaaagcagccttgtccaatctggatacaaaccccatttggctcaacgatgccaaaacaattcctattaaacgtgtaacaattggcgagaacttcgacctatgtgctattcacaacaaaagggacaagaatggccaaataatccttgatgcggatggtaatacaatcccctctgatttcgtcaatctccggaataatcaccatgtcgcactatatctggacgctgaaggaaaagttcaagaatccatcgttcctttctttgaagcattgaatcgagtcaaccaagggcttcccgttgtcgacagaatgtttcattcagatctgggttgggaattcctttacagtatgaaagtcaatgagatgtttgttttcccggacgaagccaatggcttttatcctcaagaaattgatttgttgaatccagccaatgcttctttgataagcccgcatctttatagagttcaaaaacttagtagtaaagattattatttccggctccatcaagaaacttctattgaagacgataaagcattaagggacattacgtggaaaagagtacaatcaattcaggctatgaaggatgtcgttaaagtacggattgaccatcttggcagaatcgtcaccatcggagagtatgattaagcgcacattatattttggaaacccagcatatctcagtgtcagtaattcacagcttgtcataaccaagccttctgatggtgacttgccacccgacgacctgtcccaactcgttaaaaccatccctattgaagatatcggggtggtcgttttggatcatcgacaattaacgatcacttcttctgtcttctcatgcctactcgataacaatgttgccgtcatcacgtgtgatgagaaatcaatgccctcaggcttactactccccctgcatgcaaacacgttgcaaagcgagcgttttcagtatcaactcaaggcctctctccctctgcaaaagcaactatggcagcaaacagttgaagcgaagatacaaaaccaagctgctgtcttgaagtatatcactggagaggaagctcggaatatgcttgcctgggctaacagtgtaaaaagtggagataccgacaatatggaagcccgagccgccgcctattactggaagaatatctttccgaatcttgatttcttcacgagagatcgttatggccctaaacccaataatctccttaactatggatatgccattcttcgtgctgtcattgcccgcgctttggtcggctcagggttactgccaacgctaggcattcatcatcataatcgttacaacgcttattgtctggctgacgatgtgatggaaccttatcgcccttttgtggacaaattagttgttgatattgtctccgacaacaacccttgcccttcccttacccgcgaaataaaaacccgcctactaagtatccctgttttggatgtggttattgacgggcatcgcagtcctttgatcatagctgcctccacaacatcagcttctctatataagtgcttcgctggcatttccagaaaagtaatttaccctgaattatgagcacccggttcagtgaataccgagttatgtgggtacttgtattctttgatcttccaacagaaacaaaaagggagcggaaggctgccgctaaatttagaaaagacttgatcagcgatggctttacaatgttccaattctctatctacctccggaattgtccttctatggaaaatgcgaaaatgcacacaaaaaggattcgggggtttcttccggaatatggtaaggtcggtataatctgcatcaccgagaagcagtttgacaacatggaactattcgtcggcaggaagaactcagaattgccacgaattgaacaacaactcgagttgttctgaagtgttttttcttttctagacaacgccacaacgcacagtttatcaaccacttagaaaaactgtgctgttgtgacgatgtcaaagatactaaaaatgaaagccattcacaacggtaaagatgtactctctggtgtaggctccgctgttgtgacgatgtcaaagatactaaaaatgaaagccattcacaactggatcgggctcgccgctggcaataaggggctgttgtgacgatgtcaaagatactaaaaatgaaagccattcacaacaatcctaatctgatctatggttctggcactgctgttgtgacgatgtcaaagatactaaaaatgaaagccattcacaacctacaccttacatatcaagagaaaataccggctgttgtgacgatgtcaaagatactaaaaatgaaagccattcacaacacattcctcttggaggttttgataccagcggctgttgtgacgatgtcaaagatactaaaaatgaaagccattcacaacggatgagaaatgaagaaactgattaatatgctgttgtgacgatgtcaaagatactaaaaatgaaagccattcacaacatcgtcagatcggcgtcgtacagttcgaacgctgttgtgacgatgtcaaagatactaaaaatgaaagccattcacaaccgacagctggtgcaccgctacgacctctggctgttgtgacgatgtcaaagatactaaaaatgaaagccattcacaacttgttggccaatttgtcacttatggctttggctgttgtgacgatgtcaaagatactaaaaatgaaagccattcacaacttctcgaagtataataagcacctgaggaagctgttgtgacgatgtcaaagatactaaaaatgaaagccattcacaaccagatggaggagtacatggaaagagagcagctgttgtgacgatgtcaaagatactaaaaatgaaagccattcacaactaccgccggagagcgtgcgagaaagcgcgggctgttgtgacgatgtcaaagatactaaaaatgaaagccattcacaacccctgcggtcgttttcgtgcttcgagccgccgcatcaaatcgggcaagagttgtttttaataggttcatccggcaaacatatagatgggatcatgtagagacagtagtagtcattgcacttttgcgctgatagtctgatgtgtacattgcagcgcccacgaaggacagcaaccgtgaagattcgggccgcgttgtgatgcgcccgtcctgggcgtctctatcaccgcggaaggttgtcaacgcattctggagaatcggtgcaccgcatcatctgaacccgaaaaacggctggcacgctttagaatctaccgacgttgatagtcagttggttgcattattgctttgtgccctccgtggcaaaaatggcccggatggaacaccgataactgtaatcatctgattatctgcgccaatccagccctcaatcgtgccaggcaaaagttgagttcgaggaaatcccgacccataagaccatgtgtgataaactaccttctgatcacgattccatccacacgattgccggataaaccgaacggttgtggggccagctgagggcccacaggactggactagcgtggaattacaggtaggctgcacgatagcataacatccagacgtttgaggccatcaagggcagggggagactcctgccttcttttttcaatcaagcaaaggccaaattgttaatggaattgatccttgcagcgaaagattcatcaaatctcgctgtatgtaattcatatttcagttggagacgcatcaaggattctgcgggaatgcccagtgcggcttcaaacagcagtgcagtctttgtagtcacggggcgttttccattcaatatctcgttaagcacagagtaagtcatacccaacgcatcagcaagcctacgttgggagataccacgaaactcgatctcatctttgatcacatctcccggatgagtcggaataaaaccataacccagttctgccataattcttatctataatgcttggataattcaagaagtctgcaaatagtgacaacaacatctcctccttcctttctgctagagaattccaaacgatactgatcgttgattgcaactgattcggtgccggttttgtctcccgagagcgcctcataccgcaaagaattatacctaaagaggtcctcgatgcgtgagactgattccataatatccactatcttgacatatttcctgacaatctgcggttggaatcgatgctttttgtcacttgcatgccctgtataatacagttctgaaagatatgccttgtcaaactcaataatcatactcctttatctttcttctgcaaatataatgataataatgataggattcgcaaaaaaagcgaattttttgacaagaaactaaaagtacgacccccagatgtggacaaggggaaagtgtgagatgaaattgaacggtctgctagctacatatcattgtaggaacaccgcggaagcataggggccgagggaaagcaggccgctggagccgtcggctacgccgttggagacgatcatcttgtcggtcgtacagccggttacggcgaaggcggcggagccgccgccgaagttgtgggccacgaggacggtctggccttcgtagctcatcttccagagagccacggcggagttggggctggaaagcggctccatttcacccttggccagggccttccaggcattgcgggcctgggcgaaattgcgatagacacgaaggatggaagccggatcctgctcctgtgcctccacggaaatcgattcggagagcatggcgtggtctaccttgccgcccagcgatgcggaagccaagccactgttgcgcgcccacttgataggagctcggacatattcatccccttttcctttgttaccccaatagcccagttcttcaccctgatagatgtagggcttgcccggggaggtcagcaggacggccgcggccagtttctccttggccacgtcgcggcccaggtcgtgggcgacgcggtcttcatcatggttggtcagcttgatggcgtcgataaagtcagcgcggtatttccggaactgattccggaaatgggtgaccgtctgggcaaagtcgttgccacggccctggttgatccggtccttgagcgtccaataatagtagaagttgaaattggaaggcaggccttcgtagtacggcgccatcttgtcgacattgtcacaccaggcctcgcctaccatatagaagtcgcccttgccgccattgatcttccaggtggtgttgcagcggtcgtaccactgtttgaggaacgtaacgttgtcggcggtattgttctggtagatccagatcacggcgtccaggcgcaggcctgctacgcccatctcgatccaatggtcagccgcttcagccagcgacttgaaagccggtgacgtggcagcggtagcggccggaccgtagttgaggtccggcatcgacttgtcgaagctggcgaaataataggaagcgtcaccgccgaaagtgatattggcggccgtcgtattgttcatctggaacggaacaccgaaggtcacgcccttgccggtaccgccccatttggttccgtcagcccagttcgtgctggtgcacaccaggaagccccagtcggtatcgatatcgagggtgatctcgtagatattggtgcctgtggtgtagaggccgacgtgctgggtgacgctgccgtaccaaagccagcatttcgggctctgcgtgttagggctctgcacaggttcgctcgtctgggtcaccgtaacggtcttggcgttcatatccaccttgaaatggacgcggcccttgtatcccgcatccgcgccggtcatgggataccaggtgcccataccgccgttatcgtagccgccgggcgtgtcggaaatcaggtagtaatccctgtaggggctgtccggatcggcggccgcctgtttgaaccagatattgtcgctgccggaatgattcagtacgaagtcgagatagatgccgatattccgggccttcgctttcgaaatcaagtctttcaagtcgttttccgtgcccaggcgcgaactgacggacgtgtaatcgttcacattgtagccgtggtacgacatggcctcgtggatcggcgagagccagagggcggtggccccgatgctgtcgagataatcaaggtgctgcgtaatgccgcggatgtcgccccagccgtcaccgtcgctgtcggcgaaactatagacgttgatctggtaggtaatacccgaaagcttctccgtggaagcctgaccccgccaggactcatccggcccgccgggaatgtccggcccgtccggacccggcttgacctcggggcatgcggtcagcagcagggtcgcaagaaacagggctgcaatatggaaaaatcgtttcatgatcgtactgtcgtaactttcaaagataatgaaaaaacctctcattatcaaaaaagatgcccgggccttcgtacaaggtccgggcatcggttcatcaggcggaaagccgttacttgatggtaaccgtttcgcctacggcgtgataatcgacactgaaggaagccaggtcggcagacacggtgatgttcggaccgtcctgggtgacctcgaaggccttgccggtctcgacaaacgtaccgccgcggttcacggcccagtcagcgcccctgcggagcttccaggccccggagatcgactgattgtaggcattccagtggccggcgccatcgtacagcatgaagacgtcaccgccccagctgttgaagtcgccgatcattccccagaactccttcgtgagagttatctgttcgtctttcggataatagaccaccatataggtaccttcttcgggagccttgaagttgctgccgtcctgcgtcacttcgaaagcgctctctgcagcagtgcaggcgccgccgcggttcacgccccaatcggactgataacggatcttgatctcgtcatccttaccgagggtcacgggcacgctgtaccagacgccattggcgcccaggttcatcggaatatcgccggcccagccggtaatcgttccgaccacgccccagccaagggttccgatcgtctcgttgttcgcattgtacaccactttgaaagtaccggtcatgttgatgttgtcaccgcccggagcggcgccgacgaactggccgactgcctccggcgtagcaccgccgcggttgacgtcccagccgccgtcgaaacggaccttccagccgccgctctcaacggtgatggcatcgctgacccagatacccggcgcgacttcgctcatgaccacgtcgccgctccattcgttgaagtcgccgatcacgccccagctcttcttggcgttggctacggtgatcttctcggcctggggatcgtaggtcacgatgtacgtgccgtcttcaaccttgatgttgtcgccgccggcgacagcatcgaaggcttcgcccacagcggccatcacaccgccgcggttttcagcccaatcgtggttcttgcggatcttaaactcgccgctgatcgccgtttcggggctgacccaggcaccttcgtccaggaccatgtcgatatctttctcccagtcgccgttgacgccgatcaggctccagacggtaccgtcggagaccataagcatcggctcggcgccgctcaggtcgagggtcaggagccagtagccggcaggaagcttgatgttgttgccgcccgcaaaggccgggaaggcttcaccgatgttgaccaggtcgccaccgtagttctcgtcccagccgccgtctttgcgccacttgaactcggtatcttccggagcgttgactcggaccgtccagacaccggcgttctccgtggcgatgacatcttcatcccagttgccgttgagaccgatgacgttccagccgctgatcgacttgtcgatggtgatcgtctgcgcttcagggtcgtaggtcacgacgtagtcgccttcagcagggagcatgatgttcgggccatcctcactgacagcttcgaacggcttgccgaattcctcgaagttgccgccgatgctcaaggcccagtcgtggttgtggcggagcttgaagccgttggtgttgagatgcgtgacagggctcacccacttgccgtcggtcaagaccatatccacatcgccggcccagctgttgaagtcgccgatcaggctccagacattgccgtcgctgatggtgatcgtattgttggccgtatcgagcacgactttccagaaacctgcggcaacctggatgttcgggccgccggccaccgcctcgaacggctcatccaaggccacgaacgttccgccgaagtcggaatcccaggcaccgtcgagacgccacttgaattccgaagcttccggcacggtgatataggccgtccagaggctgccgtcgttggtggcgaggatgtcgttctcccagtcaccgttcaggccgatgatgttccaacccttgacaggctccggctccggaccgggttcatcgccgccgatgatgccggataccttggcacccgtggtttcggacaccttggcaaggccggcgcccggattcacgaagaggtcgaagataccgtcggcaccgaccacgatgttcgcaccgtcctgcgtgacttcgaattcagcgtcaaggctgctgaaggtaccgcccatgttcacggtccaggctttgtcctgacggaacttgaactcgtcgcctgcggcaagggtgacgccgagtgccacgtgccagttgccgtcggaaaccatggccaggtcgccgtcccagctgatgccgtactgcgacagggagccgatgaccgaccagttgcttgcttccttgaaatcggggaacggatcgtaagcttcgctgatccatgcggttccggcctcaggattgacgaacaggtcgtagtagccgtcggcaccgacgacgatgttcgcaccgtcctgcgttacctcgaagggcgtgtcgagactgccgaaggtaccgcccatgttcacggtccaggcctggtcctgacggaacttgaattcatcgccggcacacagctgtacgtgggcggcgacatgatttccggcaccgtcggtccacatttcgagatccttgtcccagcttatctcgtaagccgacagggagccgatgaccgaccagttgctggactgcgtgtattcgatgtacgggctgcccttcggaagggtcaccacgaaattggaaatggaaaccttttccttggagtcgacatggccgttgcggccgttgtcctgcgccggattctgcatcgtggcgcggaccagggcctcgaaactgagggtctgatcctcctggaaacccatcgaaaggaacaggttgctcagcgtagagacgctcgccgtcatgacattgtccttgttggtcgtggagacgaccttgttcacgctctttccgtcgatcgaagtgatgacgagcatatggttgggagcgatcttctcgttgaagcccatgttgaacttgcccggagtataagccacggtcagggccttggcacccatctcgtaggaactcacgaccggcgctgtcgccttggaaggatcgaactgggcaaattcgtcatcgggatagcaagccgtcgccaggagggcgatcacacctgcgaaaagaatggataatactttcttcatagcgttgtcctcctgttaatagccctgattctgggagagtttgttgttggcaagccggtcagaatccggaatcgggaaaagggcgcgatagctgtcaacggcggtaccgccctggacgccgcccttccactgccagacatagtccgaactggtgaacaggccgaagcggatcaggtcgctgcggcgccagcactcctggtagagttcgcggccgcgctcgtcgatgatctcgttcagcgtgagggcattgactgccggcataccggcacgctcgcgaacctggttgaaggccgagaggccatcgatcgaggcaccgcgggcagcgcactcagcagccatcagcagcacgtcggcgtagcgcatcatcgggaagtcggtgtcgacgaagccgagctcctggcccggggtgccgtcactcttgatgttgcggaacttcatgaaggcatagccgttggtgaactcgccgatgtcgtcgatgctcttctgctgggtagccgtgtagaagaggttgcgggcgtcggcggagctgaacttgtcgtagaattcaggcgtcgtgcggagaccgccccagccagaggagatacccagggctgcagggtccatctcgccgcccgtggaggcgaagatcaggtagttggtcgcaccgtagctggtggtgttgacgccgtcctgctcgatggcgaagataatctcgtcagtgcagcggttgttgtcggccaggaacagctcctgatacgggctgaagtcgccggaagaagtggtgtgcagcttgtagccgtcacccatcaggctgctgagcacctgggcgcacttgtcgtacatcgcggtgcccgtatagacctgggcgttcagatacagcttggcaagcaggaacttggccacacccttgtcggcgcgggcatagccgttgccgcggggagctgcgagcgcgctgttgttgatcaggtcgctgagttccttctcaagccagttgaaaaggtcggcacggttgatctggtcggggaaggcacccaccacgctcgtctcgtcagcgaacggcacgttgccgaagttgtcgatggcgtggtagtaag

SEQ ID NO: 2265 - DNA, 24119 bp, synthetic construct
  misc_feature 1..24119: note = Synthetic
  source 1..24119: mol_type = other DNA
ttacccactaatgttccataagtttcaaaatcgccacactgtattgcctcatacatatcaagagcatgttccttcatctccgaaagcaaagtcagatgtgaattgctattcaggaacattccccttacaatttcggctaatatatccttcgccgtacgagttatacctgtataatacaacaaatggcaggcttgatattcaggatcggtaaacaaatattccggcaaccacctaaccagaggagcctgactaaatccttcgccggtctggagtaatttcagaccatgaagtatgcctccatactgatcttgccatccgccgccggtagtcaataattgttccagaataagagtacggttgcctatttcatttttatcccaggccaagccacaaaaatcggatattgctcccaataccgtagctgcaagaatagaactggttcctaaacccgaaccggcaggaatagccgccaataatgtaacttccaagccacaaccaaagtttttcaattgttcttctagcgaagaataattttccaaggcaaattcaggtacgaatccagccaaagccaaagctgctttaggtatggaaaatggagaacctaccttattatagtttctgagttcatcccaggaagttatacattccattgcccccaggtctatcgaccgtaaaataattttatattcattcgatggttttacataaacctgtaaaggaggttggccatttaattcgatcgccacatttaccacgttaccacccgagtacatacaaaaaggaggcgtatctgtccaacctccggccaagtctattcgcacagggcttctaccccaaacaatctgatcgcgatatacattaagatgaggatactgtttatcatccgcaatagatccaatcaaaccatcacgtaataaagaaaaagcatattgttgttcgcttgcaaagtcttttccctgcaattgtaatacacgcgctctaaacatccgatcgtgtattcttttcatcaatgaagcatcttccggaagttgttccggaagatctatattgttatttacgaactccgctgcggcatctgccagatctaattgataaaaaacacttttctcatgattggccgcaagcattggccaatctttttttctgaaaaattcgcgttgctctaccaaacgaagcaaatttgctttatcggataactcattggccgacatttttagtgcagacttccaaagttcttttccctctgccaattcaggttcagatatcatccatcgcaaaagaatacctaaatcatcgaccgatttacatatagggaatatacgggcattctggatatcattacaaacaggcaattgtattgcacgtttcaaagcccattcaatgacagattgccccataaacgaagtagtactatctagtaaaccgcctttgaacgcatcattaaagccataaggacgggcaacaaaatctttatcatttacaggaaccacatccacacatgcactctccggcagatttaatgcccaattgttaacaggcacacccgtaattatgtgtttactatttaacgtccaatattgacctatacaactattttccacccataattcagaattaccaaccgtcaatttctgatgaatttctgcattctgaacaaacatagccggatgcggtttcactttacgttgcataatagcccgttggtcacgtaccaagttctgcacagccaaagtagaagaaatcaattcacggctggttccataatgataaaactcacctccgggtaaaggtaatatggcaactgtcaatttatttagttcagaatcttttattttaggattctcaccaagagctaaaccaaattcagaataaagatcataggttttcatcatgccgtcactctgctcataagaacgttccatcagcaattcaacagcacggtcgctcaacagccaaataccaatatccatcaaaaacagatgcgttgcagccaactctcctaattcttccaaagaaggtttttgcaacataaagcccagttcatccggagatttccggctggacacaaaaacaccatggtttgtcgctaatgcaggttcaacccataatccgtaacaaactacgtctgcttcaggtatttcctgtaaaggctgactattccggatataaacatcaccgcttgcaattaatgtatgcaaagactccggagccttttgcatgattttctcatataaaggcaattgcaacgacagcaaattttgagataatttttgcccccgtgcccaacgaaaaacaggaatcggagttaacacttttcccgacggagcataaccgggcaaacgccggctttgtcctccggcatgaagtaatattcttttatctgcagataaccattcggaaaaaggcatctccttcgcttcgcttttatggcacgactctaataaccaagttgttcctccccctgaacctaaacgtgcaccgacaggatcggaagtacaaaaccattcattcgcattaactttttctattttatgaaagcaatccaccaaattaggaggcaaggataataattttttcatgacgtttttatactaaaagaactcactacactaagtaaatggtctataaattagacctgtaaaggtacaagttttatttaattttttcattctccatacgtattcatttaaattatcattttaagaaaggcattaaataccctgcaaaaatttagagtccgataaaaaaagtttgtttttactaatcgactctttggattaatacataaaacgtatcttactttgtatttacttaatatataatagtatggtatacggttatgtaagagtcagtacagacaaacaaagcactgacaatcaaagatttgaaattgaaaaattcatcaaagctagaaatatgcatattgatagctgggtagatgaaacaatcagtgggacgaaaggtatatccgaacgtcaattgggcaaattgctgaagcaaatacgcaaaggcgatattcttattacaactgagctttcccgccttgggcgtaatctgatgcaagttatgagttttttgcatcaatgtatggaaagggatattattgtttttacagtaaaagagggatacgaactcggtaataatattaacagtaaaattttagcatttgcatttagtttaagtgccgaaattgaacgcaacctcatatctcaacgaacccgcgaagctttggccagaaagaagacagaaggtactaaattggggcgcccgaaaggtttcagtctggatcaatgtaaactagcaggtaaagaagaaataatcctgaaatttttaaaggagaaaaaaacgaagttatatatcagtaaaaaactgggtgtcaacagacagactctacgtgattttatgaaaaatcatctggaatcgcctcagaaataaaaccagaatggaaattagaacttttaacaacttagcaattttttaacttgtgttaaattaagcaagttcctccatccttttctgcatttatttgtttattcgtattaacttgcagaattatatagagaaaatatgttcgaaatatctaaaaagatactttttcctctgttttttactatagacagaggtagtattatttacatctattttgatttgtagactttagttcaatctcttaatacaattctaaatggaaaaaacactcgtaattttaaaaccatgcactgttcagcgcggtttgatcggtgaaattgtttctcgttttgagaaaaaggggcttcgtctggcaggtatgaaaatgacctggttgactgacgaaattttaagcgaacattatgcacatctgaaagaaaaacctttctttcagagaattaaagatgcaatgagcgtatgtcctgtaattgtatgttgttgggaaggtgttgacgctatacaggttgtacgcactttagccggtgctacaaacggaaggaatgcagctcccggaactatccggggagattatagcatgagtgtacaagaaaatattgtacatgcatccgattcgccggaaacagcagctatggaattaaaaagatttttcaatgatacagaaatctacgattataagttaaacaatctgttgagtctgtatgccaatgatgaattttaatcataaaatagccggaattgcaaggtaaaaaaccttttcaattccggctattatatttagaaacttacatcctatcctctcgaaccggatgaacaacctaattactaatctaaaaatctaataccatgaaaaacacactacaacttaataacaaaagcagattcaaaaaagtttcggaaacgatctctttttccatttcattcgaatggaataaaagttgactttattgtatttttccccaattgcgtctatatttgtacttttattatcaacaagagtacagacaaaattaaaatgtattagatatgcataattggtttgaatgcaaagtatcttacgaaaagatacttgaaaacggaatgcagaaaaaggttaccgaaccttacttggtagacgccctgtctttcacagaagcagaagctcgcattattgaagaaatacgccctttcataaccggcgaatttactgtaacagacattaaacgggctcgtctttccgaactattcttcaatgaaaatggagatcgtttttacaaaataaaagtctatttcatcacattggatgaaaaaagcggagcagaaaagaaaactgccgcacaaatgcttgcacaagcttgtacactgaaagaagctattgccgtattggaagacggaatgaaaggaactatggccgattatactattgcctctgttactgaaacccagttaatggacgtattcccgtttgatgcaaacagcatcccttctgctccaaaaacgggagaagaactgatagccgaacaaaagaagcaggcagaagaaaagtaacaaatatgagtatcacccagaatttagtacgactgaaagcttcattaccggaaggcataaagcttgttgcagtatcaaagtttcatccggcagaagctatacaggaagcgtataatgccggacaacgcgtgtttggagaaagtagagcacaggaattgactgccaaacagaaagtactgccaggagatattgaatggcattttatcggaccattacaaagtaataaagtaaaagacattgctccgtttatttatatgatccacagtatagattctttaaagctattacaggaagtaaataaacaggctgcaaaacaaaaccggatcgtccgcgtattattggaaatacatgttgcagaagaagaaacaaaacatggttatacaccggaagaatgcaaagaactattggaaagcaaagccccttttgaattgaaaaacatttgtatatgcggaatcatgggaatggcaacaaacacggacgatacagaacaagtccgtaaagagttccacttgttacacaatttgtttttggaaatcaaagaggcatacttcaaaaacaacgaatattttacagaattatctatgggtatgagccatgattacccatctgctatccaggaaggctgtacaattattcgtgtgggaaccagcatcttcggcgaacgtgagtattagtcttttaaccattttaaataacggagataaaggcttgacaaaataaatatctatatttgtaaagttaaacgaaattaaatcgacatgattgacattaaaacccaatatgcgggacttacacttcgtaatccgcttattgttggcagttctgggttaaccaataaagcagaacgcaacaaggaatttgaaaaagccggtgctggtgctattgtattgaagtcgcttttcgaagaacagattgaaatgcaaagcgaaatacttatgcaagattccgattacccagaagctgcagactacattcgaggttatgtaaaagccaaccaggtaaacgattatattgagctaatcaaaaaatcaaaggaactttgtacaatacctattatagcaagtatcaattgctataaagccgatgcatggattgattttgccaaacaaatagaactggccggtgccgatgccctggaattaaacgtatttttccttgaaaccgaaataggacaagactttaatgaaatacgggatctttacgtaaatattatccgcagagttaaagaaacagtatcaattcctgtcatcttaaaaataggaaaaaatttcagtaatattccagatctagttaatacgttaaaggtaaatggagccgatggagttgtcttattcaaccggttctatcaaccggatattgatattaataacatgcagttagtttcgggtaacgtatttagtagccactcagatctgagcgatacaattcgatggacagctattatttccgggaaaattccgggaatcagcattgcgtcatcaacaggaattcatgattgggaagacgttatcaaatgtcttttggctggagcatctgcagtacaaatgtgcagtgcagtttacacacatggatcggaaattatttcgcaagtacttacctgcatagaagaatggatgcatcagacacattaccattcgatttctcaattttgcggaaagctaaattatgcaaacatctccaatcctgcagtatatgaacgttcacaatttatgaaatatttttctaacagagactagtaaatatctcacaacaataaaaggaacccgcctgaaaagtaatatttgcatattacttttcaggcgggttccttttatttgtaaataaggcaaataaaatattttccactaaacaatatttttacaagaaattatttatatatttgcagctataattcaatttataaaaaaatggagcctatttgcattataaaagacatatataaaacgctgtatgcatttgaaaagacattcacagaaaacaacgatataacaatcaacgaagcaatgctactttgttgtttgaaagagggagaatcaaagtctgccggaacgatttgtgaatttatcggactttccaactccagagtttccaaagtaattacagcagtggaaaacaaaggatttattcgcaggaatatcaacaaaaacgataaacggcaaatgtttttctctcttacatcaaaaggaaaagagaaaatacaacaaatgatggaaaaggaattaaactttgattttcttttcgaccaattacaaaattgcatacaaaaggaataatccctttttttatccaattattttccactaacaactatgtatagtataaacaaaataaataaattatgaagtatttgattattggaggcgtagccggtggagcaaccgtagcagcccgtttgcgtagaatggacgagaaagctgatattatcttgtttgaacgcggtaagtatgtttcgtatgccaactgtggacttccttattatataggagacactattaatgacagaaacaaacttttcgtacaaacggtaaaaggttttaccgacaggtttcgtatcgatattcgtacagaacaagaagtaacagctatctatcccgacaaaaaacaagttgaagtaaaaaatttatccaccggagaaatatataccgaaacatacaataaactggttctctcaccaggagcagaaccgttgcgcccaggtattgaaggaatccaaagtaaaaaaatatttacattacgaaacattcccgatacagatactataaaaaactatgtaaataaagaaaagccccagcaagccgttgtagttggcggaggtttcattggtctggaaatggcagaaaatcttcacgaattaggcattcatgttacaattattgaaatggctaaccaggtgatggcaccattggattattccatggcagctattgttcaccagcatttgaaagaaaaaaaagtaaacctgctcttagaagatggtgttgatcgctttgaagaaaaagggaacaacataattgtgcacctcaaaagcgggaagcaagtagtttcggacatggttctactaagcattggagtacgtcccgaaacgaaactggcaaaagaagccaacttaactcttggtaaactgggaggtattgaagtcaataaatatatgcagacttccgatccggatatttatgctttaggcgatgccatagaagtaaaacatttggtaaccggcaaaccggcattaataccattggcaggtccggcaaataaacaaggccgtatcgtggctgacaatatcgttttcggtaataaagaaacttatcagggaactattggaaattccattgccaaggtatttgatctgacagtcgcgactgccggagccaatgcaaaattattgaaacgtgaacagattatttattgttcttcttatacacactctgcttcccatgcaggttattatccgggagccgtacctctatctattaaagtactgttttcaccggaaagcggtcaattatttggagctcaagttgtaggctttggcggcgttgataaacgcattgaaatgatggcacaggtaatacaacgaaaaggaacgatctacgatttaatttctttggaacaagcctatgctcctccatattcttctgcaaaagacccggtaaacatggccggatatgtcgctgaaaatatcctgacagggaaagtcaaagtagtacaatggagagacatcgccaatttagacaaagatacgcttttggtagatgtccgtacccgtgatgaatacaatcttggttctttgcccggagcgataaatattccggtagatgaattgcgtgaacgtctttccgagctaccaaaggataaacccataatagtaagttgcgctataggtctccgtggctatttggcttatcgtatattagagcaaaatggttatactaacatccgcaacctatcgggtggatataaaacatggcacactgcaacggcgaaaataacccaacacaataattctgttcccaacaaacccataattgatgatgagccagaaagaacctcaggcaaattaatcgaaatagatgcatgcggactacaatgtccgggacctgtccttcaactcaaaaagcattatagcgacctgcaaacaggcgaacgtttacgtattacagctaccgatcagggatttgccaaagacgtttcttcttggtgtaatatgactggagcccgtttagttgaagtaaaaaataaagccggcatcattcatgcaaccatagaaaaaggagaagctaaaaatgcttgcaaaatgattaccaacggagacaacaaaacattaattgttttcagtgatgatctggacaaagcactagcctcgtttgttattgcaaacggagcagcttctaccggtaaaaaagtaactatgtttttcacattttgggggctgaatgtcataaagaaacgaaagaaaccggccgtatcaaaagatatattcggaaaaatgttcggttggatgatgccttcacacagtggaaaactaaaactttcaaaaatgaatatggcaggagccggcagttggatgatgcgtcttattatgaaacgcaaacatatcgacagtttggaaagcttaattacccaagctacagaaaacggagtggaaatgattgcctgtacaatgagtatggacgttatgggtgtcaaaaaagaagaacttctagacactgttactttgggcggagtcgcctcctatcttgaacgtgccgaagaggctaatgtgaatttattcatctaaccaacacaaatacattattcctatttttaactatttccaaaactaactctgataagccaaaaggctgcttttacaagcaactttttggcttttataattcaaaaacaaagggcgagttgccccgccctaaatgttttcacaacggaatgatccttattgtgatttgcttcaaattatctttgtattagcaaagatatacatttttcaataagaacaagaatatgtttacagatatttcttatttttgaaaaaaacacaaatttaatacaaatgaaaaaaatattaggtctggacttaggcacaaatagcattgggtgggcattaataaatgaagcagaaaataaggaagagatatcttctattgtaaaattaggagtacgcgttaaccctttaactgttgatgaacaaaaaaaatttgaacagggaaaaagtattactacaaatgcagatcgaagccttaaaaaaagtatgcgaagaaatttgcaacgttacaaactccgtcgccagaatcttattgaagtactgtgcaacaatggttttattaccaataacactatcttatctgaaaaagggaattacacaacatttcagacctatcgcctacgttcgaaagcaattactgaaaaaataacactggaggaattctcacgcgttcttttaatgataaataagaaacgaggatataaaagcagtcggaaagttcaatcaaatgatgaaggagaattaattgacagtatgtctatagccttacaattatatgaaaacgaccagactcccggccaattctctttatctttattaagacaaggaaagaaacgtctccctgctttttaccgttctgatttgcaattagaactaaataaaatatggaatttccaaaaacaattttatccggatatcttaacaaacgaattcagagaacaaattaaagataaaagtaaactgaatacctctaaaatatttttaggcaaatataaaatttatactgcggacaataaagagaaaaataagcaattacaagcttatctatggcgttcagaagcattaagcaaacaactctcattggaagaaattgcatttgtagtcagtgatgtaaatggagcaatctacaattcgagtggttatttaggcaacatctgcaacagaagtaaagaattatatttcaacaaacaaaccgtaggacaatatttaatggcagaattggataaaaatcataattacagccttaaaaacaaaatattctatcgccaagactacttagatgaatttgaaaagttatgggaaacgcaagctttgtatcatccggaactcacttcaaaattgaaaaaagaaataagagatattatcatcttttatcaacgccctctgaaaagcaaaaagggattaattgatttttgtgaatttgagagcaaaaatatagaaataacctgcgacggtaaaaaaaatttgaaaacagttggccttcgagtatgtcctaaatcctctcctttatttcaggaatttaaaatctggcagatacttaacaatataatagtaacagaaggaagaaaccacaaacgtttcctggagcaagaagagaaagaacggctttttgctgaattgaactggaaagaaaaactatctaaagccgaaattttacaattattatatgtaaaaccgataggtatcgatttaaattttaaagaaatagaaggtaatcggacacaagccgcactactcaatatttatttgagtattatcgaagctagcggacatgacagatcaaatttatcccaaatgtctatgccagaggttgtagatgttataaaatccatatttaatggtttaggatacaatactggtattctatcctttgactcctcattagagggcaaaaaatttgaagaacaacccatgtacaggttatggcatttgctttattcttttgaaggagatgactccaaaaccggaaatgaaaaattagtgaataaattaattgaactatatggattcgagaaagaatatgccattttacttgcaaatattaccttccaacctgattacggaagtttaagcactaaagctatacgcaaaatattgtcgttcatgaaagctggacatgaatatagtttagcttgtgaatatgctaaataccaatactctaaaagagcattgactaaagaagaactgaacaagaaagtttacaaagatagactatccctcctacctcgtaatagcttgagaaatcctgttgtagaaaagatactcaatcaaatgattaatgtcgtcaactctattgtggagacttatggaaaaccggatgaaattcgcatcgaattagcaagagaattaaaaaagaacgctaaagagcgggaaaaaatgacaaatagcattagaaaagctacaagtgaaaaagaagaatataaaacaatcctgcaaaaagaatttggacttacaaatgtaagccgtaatgatattatacgttataagttatatttggaattaaaagaaaatggctataaaacattatattcaaacacttatattcccagagaagaactttttagcaaaaagttcgatattgaacatatcattccacaagccaaattatttgacgattcattttccaataaaacgcttgaaagccgcaatgtaaatattgcaaaaagcaataccaccgcttacgattttgtgaaaaataaatatagtgaacaagagttatctgattatgaagaaaggattcatagactcttcaaaaataattctatcagtaaggccaaacacgacaaactgctcatggaagaagctaatattccaagtggatttatagaaagagatttacgggattcacaatatatcgcaaagaaagcacgtgaaatactggaagatttagtaaagtttgtcgtacccactattggctctattacagacaggttacgtgaagattggcagttggtgaatatcatgcaggagttaaattgggagaaatataataagcttgggctcactgaaatttatgaagataaagatggccggaaaatacgccgaatcaaagattggacaaaacgcaatgaccatcggcatcatgccatggacgccttgacaatcgcttttacgaaacaaagtatcattcaatatctaaataatatgaatgcaaaaagcgataagtctggaagcatttatggcattgaacaaaaagaattatatagagatgaacacaataagtcaagattcattcctccaatgccattaaatacatttagagcagaagccaaacgacagttagaaagtattttagtctcaatcaaagcgaaaaacaaagttgttacacaaaacaccaataaaacaaagaaaaaaaatggtctaaatacaaaagtacaacttaccccacgtggtcagttgcataatgaaaccatatatggaagcattaagcaatacgtcattaatatggaaaaagtaggttcaaattttaactctgaaaaaatcttgcaagtagccaataaagaataccgcgaagctttattgcatcgtttaactatatttgataacaacccccaaaaggcatttacgagaaaaaacagtttggataaaaatccaatctacttgaataaacttcaaactaaacaagttccatcaatagtaaaaacagtttcattggaaaccatttatacgattcgtaaagaagtctctcctgatttgaaaatagagaaagttattgatgcccaaattcgtcggattttagaagcacgattatatgaatataaaggaaatactaagcaagcattttctaatttggaagaaaatcccatttggctaaataaagaaaaaaatattgctattaaacgagtaacaataagcggtgtcagcaatgcagtcgctctgcatgacaaacgagatcataacgggcatcctattcttgatggaaaaggcaagaaacaaccggttgactttgtaagtactaataataatcatcatgtagctatttatagagatgcgaacaaccatttgcaggaaaatgtcatttctttctttgaagctacaactcgtgcgtctctgggattaccaattgtggataaagaatataaaaaatcagaaggatggatatttttattttccatgaaacaaaatgaatactttgttttctcaaataaagaggcaggtttcgatccaagtgaaatagacttaatggaccccgataattatacacgaattagtccgaatttatttagggtgcaaaaaattacaacaaaagattatgtattcaggcatcatttggaaacaacagttaatgacgtaaaagaactacaaaacatcacttgggtcagatttcaatccttaactgatatagataaactaattaaagtaagaataaatcatatcggtcaaattatttccgttggagaatattaaaacgaaacaaccatgataaaaagcacattatactttggaaatccggcatatctatcattgaaaaataatcaattagttatcaagctccctgaagtagaaaaaaataatactttaccggatagtttcaaaagagacgcggtcataagtaagccagtagaagatattggggttgtcgttttagataacaaacaagtcactataacttccggagttttggaagctcttcttgaaaacaactgtgctattattacatgcgactgtaaaagtatgcccgttggacttatgctacctttatgcggaaatacgactcaaaacgagcgtttccgggatcagttggacgcgtctttaccattaaaaaaacaactttggcaacaaacaatcaagatgaagatcgacaatcaagcgacagttttgtttaaaagcagaaattgtgaaattaaaaatatgcgtgtgtgggctaataatgtccgaagtggagatccggataatttagaagctcgtgcagcagcctactactggaaaaatctatttccggatattaaagattttaccagagacagagaagggattccacccaataatttattaaattatggatatgccatcttgcgtgctgtggttgccagaggattagtgtcaagcggcttactgccgactttaggcatccatcatcataatcgttataatgcctattgcttggcagatgatatcatggagccttatcgcccatatgttgatgaactaatagtcaatattataagcaataataacgacattacaaatctgccaaaagaaataaaggcaaaactattaacagtcccaactttagaagtttctgttaacggaaaacgtagtcctctcatggtcgctgtaagccaaacgacagcttcattatacaaatgttttagtggtgaacttcgccacatagcatatccggaaatatgaatagatttagtgaatatcgtattatgtgggttcttgtattttttgatctcccgacagacacaaaaaaagaaaagaaagctcatgctgactttcgaaagaatttgcaaaaagatggttttactatgtttcaattttctatctatatacgccattgcgcaagcgttgaaaatgcagatgtacacataaaaagagttaaatcctttcttccacccaatggccaagtaggtattctatgcataacagataaacaatttggcaacattgagcttttctttggtaaaaaagagcagcctgttaataccccaggccaacaattagaacttttttaaaataagaaatcctgctttttaagtaggatttcttactgaattacaatcattttttattttcccaatcacacgcattaagcactgaattccaactaattgcagacagtctattgtattcagtatgtcaaagataatagtttgaaagcaaatcacaacggcatgggagatgtcccattatcaatatagattgtattcagtatgtcaaagataatagtttgaaagcaaatcacaactaacaggctggctgatgaatttaatacagaattgtattcagtatgtcaaagataatagtttgaaagcaaatcacaactccatcaataaagatttatcgacacagccattgtattcagtatgtcaaagataatagtttgaaagcaaatcacaacatgtctatatttttttagaaatcctcgtttattgtattcagtatgtcaaagataatagtttgaaagcaaatcacaacgcaacagtggtgggaatgaatttgccacatgttgtattcagtatgtcaaagatagctaaaactaaccgattataccaaatattgattgaacggatttttcagatatcggaaattgattcacatctctgccatttttgttttcaaagaataaccactaagtactatgtagtcgaaaagggactaaagtcttcatccccgtaagataacttgacttctgtaatttgcaatccaatattatgatgacaagtaaaactatctatttattttcagctctcaattagaaaaatagaacattctatcacccacagaacattccgctgtttatactagaataagcgctgatccattagaatttttattaaactcacatcgccggcttgataccattctttactaaaaaccaattcatgggataagaacacaaaaaaccggcacacattgccaattgcataataaaccaaaataaaaaagtatcatgcggtaacgaataaggcattgctacaataatcagcagataagacaatatatacattccggcttgccaactggtcagagaaaggaaatccactttcaaagcccttaaaaagacagagcttcttgttgcacttttcatcatcggacgaatagctgcatactgaaaccaagctccgataatcaatgccaaaatataatccagcgtccactgccatacaatattatataaacctagagaaaacaaaagctttgaaccgacggactcacctattatatcagccaacgtacatccggcaccacagtgaaaagtcgataatgctatcttttgccaaaaaggtttatcatccattctcatattcatgccagacatatccatatccttgtccatactcatatccatagacgatccggcagattttccaaaagaaaaataagcccatagaccaagcaaaccactccacaaggcagtcaaaggccatacgacattcataaccttcatcgattgggagtgcagccttaagctctgtatgataattgcagcagaaataaaagcaaaaattaaaaacaaaacagaaacaatcgtaagtaaaagcatagccttttgttttatattagtattatgtgaatacgaacaaaccgtaaatattaaatgttcacccggtaacataacccaaaaagatcccgacactactaaaagcatcgggatcttttcataaaataacaggatcaaaatccttacaatatgtcattcttattatttaatcatatcaaagcctgtataaggaatcaaagcctttggaatacgaatgccttccggagtctgattattctccaataaagcagccacaatacggggcaaagctaatgcactaccatttaatgtgtggcaaagttgggttttcttatttgcgtcacgataacgacatttcaggcgatttgcctgatagctctcaaagtttgaaaccgaactaacctccaaccaacgtttttgagcttccgaatagacttcaaagtcaaaacacaaagcagaagtaaaactcatatcccctccgcaaagacgaagaatacgataaggcaattccaacttttgaaccaaaccttctacgtgagccaacatttctttcaaagattcataggaatgttccggtgtatcgatccgtacaatttctatctttgaaaattcatgcaaacggttcaatccgcgaacatccttaccataagaacctgcttcgcgacggaagcattgagtataagcgcaattctttatcggcaatgaattttcatctaaaataacatcgcgatagatgtttgtcaccggaacctccgccgttgggatcaaatacaaatcatccaacccacaatgatacatctgcccttctttatcaggcaactgccctgttccgtagccggaagcagcattcactaccgtaggaggcataatttccatataaccggaattacgggcttcatccaggaaaaagttaattaaagcacgttgcaatctggctccctggcctttataaacaggaaagccggcaccggttatcttaacccccaaatcaaaatcaatcaaatcatatttctttgccaattcccaatggggaagcgcatccttaggaagctctgtttccatacctcccattttctctacgacattatcatctgcgccatttccttcaggcacactttcgtgaggcatattaggaaccgtatatagcagatttgttatctcttcctgggcattgtccatagcttcctgcaaatctttattgccttctttcatctcggcaacttttgcacgtgcagcttcagcctcttctttctttccttccttcattaactgaccgatcgacttcgatatacggttcagttctgccagattagcatccagagcggtctggctattacgtcttgtcttatctaactcgataatcttaccgataatctctttcgcatcaaaatgctttttggccaatctgcggattacttcatccggattttccgtaattactttaagcgtcaacatactttcagtctatgttttttaaatgaaatgcaaatgtacgtagaattaaacaaaatagagcaagctatctaaaaaaactatttcacgcgtccgccactcaaccaggttcgcagataatatggttcgctcagactgctcaccatcacaccgcttgaagtactggtatggataaaccgtccattcttcaggtatatacctacatggttaggcgcatttttcttccctcttcctcctgtacgaaaaaagacaagatcaccttcctgcagctttgcccggcttaccttgcggcaatcatactttagcatatcggccgacgaacgagaaagctgctttccatatacctcccgaaagacaatcgctacaaaagcggaacagtctacaccccgctttgtcaagcctcccattcgatgcggaacacccagccatttagctccttcgttatataagtagatattatcatccggtgtaatccgaataccgtaaagacgggacaactctttcggacctttaaaatcagaaggtaaaataactgttgctctcctgcttccgcacgaagataatagaagcaaagccaaaagaatatatagaaattgttgtttattcacagatacgtcttttttacaaaggtaatggttttcttatttctgttatatattaagaaaacaaaaagaggacattcttcaatgaagatgtcctctttttatacttttctatcaagaaaaacttacgcttctgcaaccggttggattgaaacgaaagatctgtcttcttttgttctacggaaagtaacaacaccgtctaccagagcatacaatgtatgatctttaccgatacctacgttttcacccgggtgatgaactgtacctctctggcgaaccaaaatgttaccagctttagcaatttctccaccaaaaagctttacacctaatcttttgctatgtgattcacggccgttcttagaactacccacacctttcttatgtgccatttctttttttctcctttaaacgttaagcaacaatctctttaatactcacttcggtgaactgctgacggtgaccgttcaacttgcggtaaccttttcttcttttcttatggaaaataagaaccttgtcaccttttaccagcggagacagtacttcgcatactacctttgcgccttcaactgtaggaacacctacttttacatcaccatcgttgtcaaccaacaatactttgtcaaactcaacaacagcaccgctttctgcattctgaatgtggtgaacaaataatttctttccttgttcagccttgaactgttgtccgttaatttctacgattacgtacatctgtctttttaatttaaacaggttaggtcccgggggtgggcgtcgtctccgactcctcttgtttaccctctgcagattttcagactgcaaaagtactgcatccgaatttattatgcaaatgtttcatgaatatttttgttaccatacccggcacgcgcatcaaaaaataacgcctgttgcattctgatcttttgacaaaagctccgtcacgtcatatacattataatatatgcctggtgtaactgtcctgtcctcagggcaaacgcattaggattttttctttctttcctgtgttttttgtacttttttctacctttgctttgtatctctaacttatattctttatgactccttcttctgattactctttattattatcttttgctcgtgatgttgaagacttccgtacaggtaatcgtctatactacccttcctgtagcattattttcatggcttttgttggtatcctttgtggaggtaaagactgggatgatatcgttgaaatcgctgaatctagtgaagatttgctctctgagtacttaggttcttgttttgttggtgtgccttcccatgatacttttagtcgctttttctctttggttaatccctcgagtttggaacagtcttttcgcaagactatgtcagcccttcaatctcaattacgcggcgatttggatcattctcaggctagtaaagataaagaaatagtagcctttgatggcaaatatgctgcctctgtaaccgatgtttctggtttgaatgtagttactgcttatgctaccggaaccggattgtgtttaggacaggaggtggcagataaaaagataaacgagcccgagcaacttcgcaaattagttacagacctttatttggcaagtactattattactgcggacgctctacattgtcaaaaagagtctatcaaagctattacagcagctaaagctgattatctgattattgtgaaagccaatcaagagaaattatatgaaggtatattagaagggattcgagtagaaaacaaccgtgataaagctaaatggatagatcatgccgaagaaataacccgaggacatgggagagaagaagtccgtatttgtcattcctgttctcattagggatggatacctgagtgtggaaaagaatgggaaggaatcaaaagctttggtacaattacttcccaaagaacgatactgtctacaggagaaacgaccacagaaacaagatgtttcatatcttccttggagaaagatgcacccatgcaattgaatatcatacgaaatcactggaaaatagagaacaatttgcattggcaactagatgtatcttttaatgaagatgagaccaaaatgaaaaagaaccaagtgttaaacctggctatattaagaaaaatggcaatgccggtactgaaagcctttacatacaaaaaaggagcatccttgaaaaagaaaatgttagcagcagcattaaagcccaatataaagaaagagataatgaaaaaggcaatggtactatatcaaaaatcctaatgcgtttgccctgtttcttccctggcaaaatgaatgttgataatcgtcaaccgaatggtcgacaattatcagccgtacggttgacaattgtcggccgcttggctcacaattgtcaacatgaattttgccagggatattaattacaaaacatatactattatttctatttttccatacgccgaaaatcaaagatatttcgtatatttgtgaataaaacgtcttataccaaaaacgaaaaagatgaattactacgaactcgatttcacatatacttcacccatagaagcatccatactgaacgacgtgcttgccgccgaattaggcgaaataggttttgaaagttttacagaaaacgaatatggattgcttggctacatcccagatacttcatataatgagataatattaacggataaactgaaaaactttccgctggaaaaagttgacatccattatacggcaaagttgattgaaagcaaagattggaacgaagaatgggaaaaaaactattttaaacctatccgtatcggaaacgaatgtataatacgtgcctcattccacaagcccgaaccaggttatgcctataacatcattattgatccgaaaatggctttcggcacgggcaaccatgaaacgacttacctgatgataaatgagatgctaaaattagatctcgaagataaagaaatactggatatgggttgcggaacagccgtccttgccattctagcctgtatgaaaggagccaagcgggtaataggtatagatattgacgaatgggcttacaacaacgcgctcgaaaacatcagactgaataatgcacgaaaaatagaaattgcattaggcggtgcagaacaaattccgaatttcggcctctttgatattgtatttgccaatataaaccgaaatatcctgctcaatgatatacaacgttatacgcaatgtatgaagccgggagctcttttatttatgagcggattttatacagaagatataccagtaattgaggtcgagtgtattaagaacgggcttacactactatcccatgcagaaaaaaacaattgggtagccgtaaaaacaataaaaaacgataacattaattaacctcaaaagttaatacaataataaactatagtctaaataaaaacgttatcttagtagaaacttttaaaaaggaagagttatgaaaaacgtagattctaaattattgctaggcctcgtagtaggcgctgctgtaggtgcagctgtaggttatttagccgcttcggataaaagagaacagctattggaagatctgaaagaagtagcaggcaaggtaaaagacggcttcaactctgctttggctaaggcaaaggaaagcggagctttgaaaagtgtaaaagaaaaagtagctgaaagcgcagaataaaactgatataatggagaacgactcagaaaaattcttcggtaagctaaaaaatgatatctcagcttatgtggagttaaagcttgagctcctgaaattaagcacatacgaaaggaccggaaaggtaattgcggttctttcgtacaacttggtgttattgtttctggccttctttgctatcttatttatctttcttgccctgggatttttcttgggagatttgttcaattcatccggcttgggctttgtcagtgtagcaattctgtatatactgctaattggtatcattgtaataaacaagaacaagattagtaatgccatactgaacgaagtcatcatagcaatgacagcaaatgacgataaaaacaatgcaacagaaaataaacaacaaacagacaccactggagaagctgatttctgataaagagcgcattcggaaacaatgcaaggaacatgaacagaaactcaacgaagacttctcttatatccaagagaatgcagggagtttattgctttcaggcgtatcgtctttattgttcccaaaaacaagatcggcagctaaatccggcgaaaacacaacaacacaaaatgacaacggcgatctacctgctgtcccattaggcttctctgactatctgtctattaccaagagtatgctaccccttgcttgggacattgcccaaccgtttatcatgacctggggcataaaaaaagcaaagaatttacttaggagcgtattctcgaagaaaaagaaataagcccaacaattaatttatgttagaaaacatacttttctgaccttattataaagctcaatacaaaaaacatagttacatttgcagtcgttaaaagcaaggataaaatgaaacactgtatctatttaatagtagtaattgcattaatgcttgcaatgttggtttcatgtgcaacaccttgtggctgttagataagttttggacaatcaatatttttaataaaccataaaagttttattacaatgattaaagtaggtataaacggtttcggccgtatcggacgtatggtgttccgtgctgcagttaagaacttcggcaatgatattcaaatcgtaggtatcaatgacttgttggatgctgattatttggcatacatgttgaaatatgactcagtacacggtcgtttcgacggaacagttgctgtagaaggtaacaatttggttgtaaacggtaacaaaatccgtcttactgcagaaatggatcctgctaacttgaagtggaacgaagttgatgcagacgtagttgttgaatcaacaggtttcttcttgactgacgaaacagctcgcaaacacatccaggctggtgcaaaaaaagtgatcatgtctgcaccttcaaaggatgctactcctatgttcgtttatggcgttaacgacaaaacttacgcaggtcaggacatcatctctaacgcttcttgtacaactaactgtttggctcctatcgctaaagtattgaacgacaagttcggc

SEQ ID NO: 2266 - DNA, 24116 bp, synthetic construct
  misc_feature 1..24116: note = Synthetic
  source 1..24116: mol_type = other DNA
caccgctatacggtcaagtacggtaaaacggggttgcgcctgaaccagtcggcccgggataaactgatggagtaccgctggccgggcaatgtgcgggaactgttgcataccattgagcgggcggtaatcctctcggacggcaacgtgttgaaggccgatgattttcctttaaaggtacatacgcccgttggggcaggtacgggccagggaacgttggaggagatggagttgcgaatgattgcggatgccctggagcggcacggcggaaattataccgcagcggcagaacaactgggtatttccaggcaaacgctctacaacaaactgaaaaaggtacgcgactgatggccagccggaatttttacatacagctgattttgcgggtaaccctgatgagcctgacggctgttgggatggcgctggccctggcaaaatcctggtacctgttgctggtaatggccgtgctgctcctggtggtccaggcctttctgctgatttcgtatatcaacagcaccaaccgtaagatcgcctatttttttgatgcgatcaagaacgaggattttaccctgcgatttccggaaaaggtttccatagaatcgttcaaggagctcaacaggagcctgaaccgggtgaatggactgatacaggaagtacacctgcaactgcagatacgggagcagtattaccaacagatcttaaagcaggccagtattggcatcatgacctacaatgaaaaggggcatatcctgttttccaaccccacgcttgaacagctgttgaattacaggcccctgaaccatatcaagcaactggagcaaatagacccaaaactgtatgcattgtttgccggcttgcagccgtttgaccggaagttgtttcaattgagcaacgaacgcgaaaaaatccagctcgccctcaaagccacctcgctttccctggatggcaagtcgcttttattggttacggtacaggacatacacaaggaactggatgaaaaggaaaccgattcctgggtacggctgatacgggtgctgacgcatgaaatcatgaataccattacccctatcacttctatttcagaatccattttaaagtattaccgggagagggacggggcatcggtgaggggtgatttttcaccaacgcagatagacaatacggtaaaaggcctggaagtcatcaaggagcaggggagtgatctgatgcagttcgtgcaatcgtaccgcagtttccttaaccttcccccgccggacaaggcgttggttcccgcgcacaagttactggaccgattcatgctgatcatggatggggaacataagggaaagaacatacattttgaagccgatacccaaccaccggacctggaattgtttgtggatgagaagcagatttcccaggtattgatcaacctggggaggaatgcgatccaggcgctggaagggcaggggagcgggtgggtaaaaatcatcgcggaagaggatggccagggccggaaacgcatacaggtacgcgacaatggccccgggatacccccggggcgtatcgaggaggtctttgtgccttttttcacgaccaaggaaggggggaccggcatagggttaagcctgtccaaacagatcatgcgcctgcatgggggcaatttgaatgtacattccacccccggagtggagacttcttttacgttattgttttgaatggatggggttccggccccggtatggaagggtattccccggtagaagaagggttgttgccggcggcaggaggcaccacctggcagggtggatgaggctgccacaggatttttgaataattttatttgcggatatgatttgagggcgtatatttgcacacgctttctaaaagcaatgcaacaaggtttgaatctggctgttgccggagtccgccccgggcgggtagaatcattggtctggtagttcagttggttagaatacctgcctgtcacgcagggggtcgcgggttcgagtcccgtccagaccgcagtgaagtagacccttcaagcgctagcttgaggggttttttcgttttttgacgtaaaggagcttgcttcattttagataaaaaacgaaaaaatcccactgccaacgaagttggcattaaagggtcgggtcacttcactgcaggaccacccacttgggcccttttctcccccgcaatgggcgggggagaaaagaatcccgtctttttgttagtgcgcagtaggctgcacatggaatatttccgaagacgggtggacatttgcgaagggctcacttcactgcggccccgcctctttgggccgattacgagcccgcggcagcggggcgcgtaatcaatcccgtccagaccacccacatcaaggctcaaatttcctgttaacgaagatttgagcgtttttcctttaacgttttcccaattgcttcccaacttctttaaaaatagtacgtctattgtggaaatccgtaaccatgaaaatttaatgatcttttattttgggatgtaccaatatcaacgaaaaatatagtaatggagatcgcgactagcctaaaatcactggcaaaaaaagtaggagaactaaagcaaagtattgccaccgaagaggccacaaaaactgcattcatactcccgttcataaatgcgctggggtatgatatatttaatccaactgaagtcgtacctgagtttacggctgacttgggtcttaaaaaaggagaaaaagttgactacgcaatttttcagaacggaaccccaattattattatcgagtgtaaaaagtggtctgaggatttaaatattcacaactcacaattgtttcgatatttccatgttactaaaacccgatttgctcttttaactaatggaatcgaatacagattctatacggatttagaatcaagcaatataatggatgaaaagccatttcttgaatttgatattacaaaactgaaagacaacaccataagcgaaatcggtaagttttgtaaatccaactttgacgtagagaaaatcatcaacaatgctagttcccttaaatatactaaagagataaagaagctattggagtctgaattcactaccccgtcacaggattttgttcgtcattttgccaatccgttatataatggcaggctcacggaaaaagtaatgaatcaatttgaagaacttgtgggacgtgccattaatcaattcattagtgaaaaagtcaatgataggttgacctcagccttaaacgaagaatccaaaaagcaggaagaagagaatacgaatattgaggaagaaatatcaaaggttcaaactactgatgaagaactagagggctttcagatcatactggctattttacgccgctctattccaaaagatagaatatttcacagagacactcaatcgtattttggggtattattcgatgacaataaccgcaagccaatttgccgacttcatttgaatggtggtactaagtacattagtgtatttgatgctgacaaaaatgaaattaaagaaaagattatctctgtagatgatatctacaagtatgaaaaacaattactggatactgccttaaattacatgaagtagatattatatatttggctgtgcttattggaacgggttatcgtacgcacattggtaaaaaagtcggacagcccaacgtcatccttttccagtccacacttcgggccttgaaagggcaagggttcatatgggcttgtttggttttagggctttacattttgatccaggtatgaagggctgcaaaaggtccataggattgaagattcacaggtttaacaaggtcatggtagcggtgaaagaattaaccccaaaacaacaggaacggctcagggccaaaattgctgggatccggaaagccctgaatgcggagaagcgcaaatttggttggtatgacgacagcaggggtttgagatacttgccccctgaactgtatatcaaactacatgattacaaagggggcctaaattacctgaggtggttcaggaagaatttcccggacgacataggattcccgcatttcctgttcgaatggacgctcatcctctttaagaatggcaaggagcacgatgcgcgacagaaggcccttgaaacttggttttccaacacctacctttttgacaagttcttcggaaggcctttagaacctatggataaatatgaaggttccaatctggaggccgcaggatttaccgaaaatttcacatataccgcagggcaggcaggcctggaagacttcgcactttggctggggcaattggagcggtctgaaaaattccgggaccgcacttaccgtttccttgccgtccgaagacaactgaaaacagaagacgaccgtatgaaacgtatggcactgctggcccgggagcgccaattgctgcaagaccactgaagcctgccaatgattttggcagttaccgcaaatacgcatcaattgacaattgtatgggacctaacccccgttacattgaaagcattacatgtagttttggtgaatatgttcaccctatatacgtgtttttggtgattaggtcgaaacaattcccaggctaataacatttgtataacataatgttattttgtatatttaccctaaaggtattcagctatgaaagttcaaaccgcattccgtctcgatcaggagttaattgatcgcatcaaggaaaaagcaaaggctcaaaaaaggagcctgaacaactacgtagagtacttactatataaggaggtgggggacatccccaatgaaactaccaaagccgccatagaagaagcccggaagggaggggaccttgaagctattgaagatttggatgcttttttggaccgcctctaagattagccggggatgtatcaattggttctaaccactcgttttaaaaaggatctcaaaaaaatcaaaaaacggcctaaggattttgaattgaccgctaaagtcttaaaaatccttggacagaagggggtgagaggtattcctgcggtaatgaaaccacaccggctaactggcgattacaaagacaactgggaatgccatattaagcccgatttgttaattatatggatccaaattgaagcaccaaggacgatcaaactggtccggatcggttcgcactcagacttatttatttaatagatagctttttaccgttttgcatgaaaaaagtccgggacagcttcagaattagttcaacttctgttagaaagctcccctccgggtgccgctgaatacaggacctttcggtggccttatatactggtgaaatttcaaaatcccaaatcccaccctgcgtgtttattgcagtgggcgcttgtaacttttgtgtgggatggggttgggaccccgggctgggaactccggtccgggatatcccggactgcagacgcctggtttgctatttagaaaattgcatcgcaatcagcagcaaccaaccacccctggccttttgattggcgcaggggccaagctacgccaccatacccccttacgtatcccttcatcagtttgaataaggacctttaatggcgtttattgggaagtatggttttttaataaatcttttctcccaaagtagtagacgatcaccaaaaaaacggataaatagagcataagccaccaaaatgtattcatgctcccggtaaactctggcaaaacatgcagataattaaacgtggcatttgcactaatgtgggcaagtatagacgtcagcacacttccggtatagtaatatatcgaattgatgaaaagtgttcctaaaactacccatagtagaaacaccaggaaacccatttccaggggaacacctgtttcaatcagatatcctggaaaatgccagaaaccccagatcaaaccaagaatgatgcttgaataaaaaacattgaactttttcatcaatctgggaagtaagaaccccctccacccatattcttccccaagggcaattaaaatgatcacaacaacctggggcagcacttgtgtggttcttaattcaaggctccaaatatcaaaatccaaaaaagtgagccgggctaaggatgcaagcactggaattccaataagggaaataaggatccattttaagcctgtttttttcaatgtttgtttgacaaacaattcaagaacacctttcttaccttgtatcagggatgtaaggaccagtgcaaccagtgagggtgtaaaaacagataatatcgcgacatttgaatcttctattttgtaagagataaaggcgatcaatgaactcagtgccattaccagaaccgagaataacacgattacctttttttccattgaagtcgattttttcataattttttggataagagaattttataaatgggtcccattgacaataatttcagatgtttgttcaattgggtcgcaactttttctttttaaagtcccgccattcacctgtatccatctgtaatatttctttaaggacaagtttcccggaatcataccccggctcatcaggcttttctatctcaaatgacactagaaatccgtctgttttgtcaaaccaaatagtgccgccccgatgatcaagacccggaccatcgatgtcatatttgagtagtttccttgccccacgatcctcctcttgtaaaaacagcatttttaccaccccaaagtctttaagcttgggaggtgactcattcaaatccaggtcaagaacattgaaaataattggctggtcttctttttttagccaggggaaggcgtatcccaggctggcaaaatcaaaatcataactgtgccactgagatggaggatatgggtaatcctgccgatgatcacccaactggacagagatggttttgtcttccgaaacatgcaacacggcagccaggttttcattttcctgttgcgtcattctataaacgtcaaaatgtttgactgtatgattgtgttcatccaattttgcccggacaatcgtggcgtgttgatttccatcatgccatttaaacgactccaattggtcaggtttctcccgataaactgcgattttccctttattgcttccatcccagtttgatttttcatagataagtactttatggacaagttggtctctatgtaccgtgccacatcctatgaagatgagaaataacaggaaacagggctttgataagttcttcatttgctgccggttttaactcgctgacgcgaacattcaattccttgttgtgcttgtttaggtcttttcattgattcgcttcctaatggctgtaatacttatatcatactactatatgctgctccgaaatatccatgccggtagcaggactttgtttacgggtaaaggtgcccatttctgttggatgccgattgggccagagacccccaagcactccggaataaccatacgtgacaaagaatacccgaaaacaagtgctgcgcaatgagatgcacacgcagcagcagaggattcttctaaaatgacgacgttttaaaacatttgttacaggatggagcctatttaccggcaccctgccataatagggagcccaccaaaaaagcccaaaattgagatggatgaataagggctgggacggtcagggcaggcccgcccgatggtgaaatcccaaatttcaaaatcccaaatcccaccctgcatgtttattgcagtgggcgtttataactttaaggtggggcggggttgggaccccggatcgggaagcttcatttcgaccatcaaaaaagtaccccatggcactatgaagcagcttatggagcttgcctggaggaggcattgctgtatgctcgattcatttcctgaaagggccccgatgactgccctggaaatggcctgttgaaaaaatatcggaacgtctggggcgcgcaggaaggtaaaattttccgggaagcgtcaaaaggctgccacaatcagcctgctcatctttcaatttaatttgggggccggaacccacttgtttcaaggcaccaaagagatcaaagcaggtctgtgggttacggtcggcaggaggttattaacgggaactgttgtcctcataaggttttttgagtaataagataccacctccttcgtctaaccgttggtgctttaagtacgctgggaggcaaatctggatttgaccttggctgtttctatcagcccggcaattggatctgtgatgcaatgggcccgggggaacagaagatggcccccccctataagtttcgggggggattggggtaaacggccgttgtcaaaagttgatttaatacgcaataggagggattgctagcattcaagtgtgacgtcacatagtaaatacgatatagatggccattagatttacgcgattaaccgcaattgaaaaatctgagattatggaattgatgaaccacccattggtcaggcgacatctccctttattaaaaggaaattttaccgaaagcgattgtagcaagttcatttcagccaaagaatcactttggaccacctatggctacggtccatgggcattggttgtcaatggcaaatttgccggttggggtgggttgcagcatgaggatggcgaagcagacctggcattggtgttacacccgcattattggggcttaggcaagatactataccaggagattatgcgcagggcttttggtgagatggggttgcaatccgttacagtgctgtttccggctacaaggacaagaatttcaggcctactgcgcctggggtttgagaaagttggggtgttgggaatagataatgtgtgttttattaggtatcgcctgtcgaaacctgtggctaatgaccactaaaaccaacttcaggggaggttcaacaataccctttaatagataggcatacgagcgttatagcagatcacagcttggtcctgtcctttttcacaggggtgatacagggatgcggtgatgtgccccgggggaaaaaggggaagttgggctacgatgggttttgaaggtgggggcttcttaaccccgccccggtttcaagttagcggaccatactgcaggaaacaagcagggagtttgctggtgatggagtgaagttgctatctggcccagggggaaagggggaatttagatgccaatggtattctggtggggccccttacccccgccccggtttcaagttcgtgcctgtaagtgcataaaactagcagggggtgtgcaggtgacgccgcgatacggtgatatactgatgtggtaacgcggtgatcaggggactcagggatgcggcacgcaggtgtggaaaatcagggcttgtggtgggccgatggggcttcttaaccccgccccggtttcaagttagcggaccatactgcaggaaacaagcagggagttggtggctggtgcgttgaacgggaaggaccagcgaaagtgggttaaaggcaaaatgggactatttgttgctcgtgcgcaaactttcaaaaattacgcttctctgccatatgcacaaaagaacatgaattgccaagaaagtcccgcatatttcaaaagtcttaatcttagttttttgtatctaaagtaagaaggcctttttaggcaccatagctattcagtatcccaatggagcttcatctttttgttccttaggtaagtaaggattcagaatgttatgaatgtgattacaaccttcttctgggaggcgaagttcagaacagatcgccacccctttttacggttttccacttttatttctttcaataatattcatacattggggaattctcttacaggatggcctctggatgaaaccaaaaaagcgaccggtaacggccgctttataagttttatttttctttcggtgatatcaattttccatcactcgataaacaagtaggaaaataaaaaagcccccgtagaaaggcgagggcgtccttaaatgttttcacaacggaataatccttattgtgaattgctttcagtgctgtaaatataaaataaacccataaaaaaacaaaagtgaagcgaattttaggattggatttgggaaccaactccattggatgggcgttggtgaacgaagcagagcataaaaacgaagaatcctcaattgttaagctcggcgtaagggtcaaccctttgaccgttgacgaaaaaaccgattttgaaaaaggtcgaccattgtcgaccaatgccaatagaaccctcaaacgtggagcccgtcggaacttacagcggtataaaatgcgaagggaggaactcatcaaaattcttaaagaaaacaggtttatttcagaagaaacaccattgaccgaaattggcaaaaacactacccaccaaacgatgtcacttcgcgcaaaagctgcctctgagaaaatagcgcttgaagattttgcaaaagtactcttggcaatcaataaaaaaagaggctataaaagcagtcgtaaagcaactaacgaggaggaaggacaggccattgacggaatgggcgttgcaaaggtattgtatgatgaaaacctaaccccagggcaatatgtgctgcgtatccttcaaagagatggtaaatatattcccgatttttataagtccgatttacttgaagaatttaaaaggatatggaatgcccagaaacaattttatcctgaagttttaacttcaatactttacaacgagctagaaggaaaaaacaaaagccagacctgggctatctgtcagaatccatttggcattgtgggtatcaaaagagtagggactgccaaagtcaaaaggtttgaaaattatcagtggcgcgtacacggcttgagcaaacagctagaactggaacatttggctactgtgttacaggaaatcaacaacaatattaatcaatccagcggatatctgggagcgatatccgacagaagcaaacagctctatctcaataaagaaaccgtaggccagtatctgtataagcaattggttaggaatccgcatacttccctaaagaatcaagtattttacagacaggattatttagatgaatttgaaaccatatggaatacccaagcaaattatcaccatgaacttactgaagatttaaaaagaacgattcgtgatgttattatcttttaccagcgtaaattgaaatcacaaaaatcgttgattagtttctgtcaatttgaaagttgggaacaggaatatgtggaaaaagaaacaggaaagcacaaaaaaagaacggtagggagacgggttttaccaaaatcatcaccactttttcaggaatttaaaatttggcaaaacctaaatcaccttgttttcacgaatgccgaagcaaagacaagaatagaagtaaaagagttggattccgaaatacgccataccttatttgaagaattgaaccttcgaggcgatttaaatcccaatgttttactaaaagtggtttccaggtttatggtcattggcaaatcaagcttgtggaagtgcaattttgaaaagattgagggcaaccgcaccaatcaagcaatctacaatgtttatcaggctatatcagaaagagaaggctatggcattgactggagtaaggcctcagcatccgtaataaaagaagaacttaaaagcacattcccgacaataggtattgatcgcaacatttttgattttaatgccgatgccgatcattttgacaagcagccttgttatcaattgtggcatttgctttatgccaccgaggaagacgaaaagatttcggaagccgacaggttggtttatggcaattcaagcgttgccttaaagaaaaagttacaggaaaaattcggtttcaagcctgagtatgcatcattgttggcaaatatctccttcacacaagattatggcaacctctctgcaaaggctatacgcaaaattctgccttatctggaagatggccatttatattctgaggcatgccacttggccgggtacaaccattccaatagtttagacagggaagccctcgataatcgagaattgaaaccaaaacttgaaatactaaaaaagaacagtctgcgaaatcctgtagtcgagaaaatcttgaaccaaatggtgaatgtggtcaaccaaattatcgactattatgggaagccagatattattcgcatagaactggcccgtgaattaaaaaaatcggccaaggaacgggccgcaatgaccaagggtattgccgatgccacaaggcgcaatgaagaaatacggaaaatcatcagacaaaaatttagaattccaaaccctacaaaaaacgacgttatacgctaccgtttgtatcaggagcttgcgccaagaaaacacaacgatttattcacgaataaatacataagtcctgacatattgttttctaaagacatagatattgagcacatcatacccaaatcgcttttgttcgacgattcgttttcaaataaaaccctggctttcaaaaaggacaatttgaaaaaaggcaatcgtactgcttatgattttatttgccaagattataactccgaccttgaagcatttgtggaacggatagagggcatgcacaatgacggccatatcaataaagcaaagcgtaataagtttctgatgcccttgtctaaaattcctgacggctttattgagcgcgatcttcgtaacagtcagtatatcgccagaaaggctaaagaaatgctttttgaagtgtttgaggatgttattgtaacctcaggcagtataactgataaattacgtgaagattggggtcttatcaatgtaatgaaagaactcaatcttcctaagtaccgggcattggggctcaccgcatttgaagtacgccttgacaaatccacaggcaagttcaagaaacatgaagtgatcaaagactggtctaaacgcaacgatcatagacatcacgcaatggatgcacttgccgtggcctatacaacaagaaaccatattcaatatatcaacaacctcagtgctcgaaaagacacctcaagggataaccatcccatcataaaaaacattgaagcacgcattacggaacgaagtgaaaaaggcaaacgtatatataaaagcccaatgcctcactttcgggaaaatgccaaagagcagatagaacaaattttggtgagttttaaaaacaaaaacaaggttgttaccaaaaacatcaataaaaccaaaaggaagaacggtgccttgcatactcgagtacagcttaccccaaggggtcaattgcataaagaaaccatttacggtaaggccaaacaaccgatggacaaacttaccaagatcaacaatagactttctgtatctcaggtatttcttatcattaatattaaggaacgtaaagctgtcttaaaccatcttaaaaaatatagaaacaatccagataaggcgtttgatacaaagacactaaaaaacgacccaattttggttaatggcgaacttttgaaagaaataagaacatttgaagagattttcaccattcgaaaagacatcaatcccaataatttcaagacccataagcaccttgataaagttgtagataaaggtgtgagagaaaccttgaaaaaacgattggtagaatatggtgattttaaaacagctttctcagatttggagaaaaatcctatttggctgaataggtccaagggtatatctatcaaacgcgctacgattacaggtgtgagtaatgcagaacctttacattatgcatcaaaccatttaggcaatactattttggatgagcatgaaaagcaaatcccagtagactatgtaagtacgggcaacaaccatcatgttgccatatatgaagatgagaatggaaacatgcgggaagaagtagtttcattttatgaagctgtaatacgaaaaaatcaaggtcacccaattgttcaaaaggaacattcaaatggctggaggtttctattcactatgaagcaaaatgaaatgtttgtatttccctctgaagattttgacccatgtcaagttgatttgttggatgaaaatctttattccataatcagtaaaaatttattcagggttcaaaaatttactaccaaagattacttttttaggcatcaccttgaaactaccgtagagaataacaacaacttgcaggagtatagttggaaacgtataggtattagtgggttaaatggaataaaaaaaattagactaaaccatattggaaaaattgttcaaataggggaattttagtaggatgattaaacgcaccctctttttcggcaacccagcctatctaagtacccgaaatgaacaactggtagtcagttttccggaggaaaacaagaaggaagccaccatacccattgaggatttaggctatgtggtcctggaagacccgcagatcactgtcaccaacggacttatcagaaaactggtcgaaaataaaacggccattattacctgcgaccagcaacacctgccctgttcgctgctgcagccattggtggggcataccgagcaaaccgagcggatgcggcaccagctcaacgccagccaaccacttaaaaaaaacctgtggcagcaaaccgtacaggccaaaattgataatcaggccgggcatctgctcaggcgtggaaaaaatgccctgaagctgaaaaggtggataaaagaggtgagaagcggggatgcccataaccatgaggctatcgcggcggcctattattttcaatccttgttttcggatatagcggggtttagccgcaaccagaagggggtgccccccaacaacctgctcaattatggctatgccatattgcgggcggtgaccgccagggccctggtcagcagcggcatgctgccctctgtgggtatctaccaccgcaacaaatacaatgccttttgcctggctgatgatgtgatggagccctacaggccctttgtggatgctttggtttatgaaatggtggaaaccggtgggcaaatcacagacctgaacaccaaccttaaaagcgaattgctcgggattcctgccatggatgtggtgatagacggcaaacaaagcccgttgatgaatgccatgagtcgcaccaccaatagcctgtacgagtgtttcttgggcagcagccgtaaaatcttatatccggaacttcaatcccagtgattcccttcctaaaagggtaagacgaaaggaggtgtatgatgaaccagggccatttttcccgtttaaaccaataccgctccatgtgggtacttgtactttttgatttgccgaccgaaacccgaaaagaacgacaggccgctacccggttccgcaaaaacctcttagacgatggttttaccatgttccagttcagcatctacctgcggttttgcgccagcagggaaaacgctacggtccatatcaggcgtaccaaagcaaaccttccccagaaaggcaaggtctgtatcatgcagattacagacaaacagtttggcatgattgagctttttcatgggcagaaagaagtggaaccggagtcgcccaaccagcaactggaacttttttaggaaccttaaaagccagaccggaacatggtggggaagatgtgtgagcccccttttttaattcctgcaaccatgcataaaaaacaggataccaactttttagggaaggtatcctgtgaatcatccataaaattatagaactgaaagcaattcacaaccagaggatgaacttaccctgaaagcccgtacctgtgaatcatccataaaattatagaactgaaagcaattcacaacatcagtagccgtggccggggtgatagtctccctgtgaatcatccataaaattatagaactgaaagcaattcacaactccgtcagtcgttggtagaggggttatcaacctgtgaatcatccataaaattatagaactgaaagcaattcacaacacagaaagctaggtacggcaaacatgtacacctgtgaatcatccataaaattatagaactgaaagcaattcacaacttacaatgcaaaaagccctctacggctttacctgtgaatcatccataaaattatagaactgaaagcaattcacaaccttctcggtgcctatatgcagcaattcggtcctgtgaatcatccataaaattatagaactgaaagcaattcacaacagtctaaccccaacttcagggccacatggtcctgtgaatcatccataaaattatagaactgaaagcaattcacaacgatatctgcctttactaactgctgctgatccctgtgaatcatccataaaattatagaactgaaagcaattcacaactgatgttcatccgggtagatcttcttcggccctgtgaatcatccataaaattatagaactgaaagcaattcacaacggtcaacgctaaatccaaagtccatgccgcctgtgaatcatccataaaattatagaactgaaagcaattcacaaccgccttcgcttctttcctccgtagtgaggcctgtgaatcatccataaaattatagaactgaaagcaattcacaactgtcctgcggggtgccgctggtagtcgtcccctgtgaatcatccataaaattatagaactgaaagcaattcacaactgggctgtcgagaatgttgtcccatactacctgtgaatcatccataaaattatagaactgaaagcaattcacaacaaaccccgatggcttcttcaaatgtcttgacctgtgaatcatccataaaattatagaactgaaagcaattcacaacgcctcgaggttcttgattttaagactttcacctgtgaatcatccataaaattatagaactgaaagcaattcacaactccctgccagcacgatacgtcattaccgaacctgtgaatcatccataaaattatagaactgaaagcaattcacaacgtggctgtaatcagcttttgaaatttccctcctgtgaatcatccataaaattatagaactgaaagcaattcacaactgatgacctggaagaaccttcattgataatcctgtgaatcatccataaaattatagaactgaaagcaattcacaacagggtgcctttcccctccttggacctggcacctgtgaatcatccataaaattatagaactgaaagcaattcacaacctgctgcaccacctcaaagacatctatccccctgtgaatcatccataaaattatagaactgaaagcaattcacaacgttagtttgttttgttgtttagtaattccgcctgtgaatcatccataaaattatagaactgaaagcaattcacaacagcttgggcaagaacccgccggaaaacatgcctgtgaatcatccataaaattatagaactgaaagcaattcacaactgtcttccggctcttccagaacgatgccgtcctgtgaatcatccataaaattatagaactgaaagcaattcacaaccacttctgaaagatcaaatccgtaacgggcctgtgaatcatccataaaattatagaactgaaagcaattcacaaccagttcatctacaagcccgggaaataccgtcctgtgaatcatccataaaattatagaactgaaagcaattcacaactttgataggaggtaagaaatataatcctccctgtgaatcatccataaaattatagaactgaaagcaattcacaacgctagttacgtcaatggccgagaatacccccctgtgaatcatccataaaattatagaactgaaagcaattcacaacaggtgcggtatcgtgttaagcagggtagtccctgtgaatcatccataaaattatagaactgaaagcaattcacaacattcgagcgattgattgcaaagatcaagggcctgtgaatcatccataaaattatagaactgaaagcaattcacaactgatctggctttattggtacgagagaacaacctgtgaatcatccataaaattatagaactgaaagcaattcacaaccaaatgttgatgggttgttctcatctatatcctgtgaatcatccataaaattatagaactgaaagcaattcacaactattaacgtttagcgaaaatgaagaaaaaacctgtgaatcatccataaaattatagaactgaaagcaattcacaactgcttttaacgtttaccgggataaggcgcccctgtgaatcatccataaaattatagaactgaaagcaattcacaacggctaggcgcgcggcgatctcacctttatgcctgtgaatcatccataaaattatagaactgaaagcaattcacaaccaaaatgggaactattaacgccccgtatttcctgtgaatcatccataaaattatagaactgaaagcaattcacaacaattggggagtaggcaaggcggggggtatacctgtgaatcatccataaaattatagaactgaaagcaattcacaacacgcttacgacatacattcacggaattggcctgtgaatcatccataaaattatagaactgaaagcaattcacaacctaatgcttgtgttttcggcctttagtgctcctgtgaatcatccataaaattatagaactgaaagcaattcacaacaatatcttcaagtttaacttagcggtatcacctgtgaatcatccataaaattatagaactgaaagcaattcacaacatgatcatatatgcagcctctataagcggccctgtgaatcatccataaaattatagaactgaaagcaattcacaactaatgtcttgtccagttccaaagcgtatgccctgtgaatcatccataaaattatagaactgaaagcaattcacaacatctcattaatatcccccttcagatcagtacctgtgaatcatccataaaattatagaactgaaagcaattcacaacttccggcgctggggtaatattatttttgagcctgtgaatcatccataaaattatagaactgaaagcaattcacaactatatcgatgagcaagaaaaaaacccttagcctgtgaatcatccataaaattatagaactgaaagcaattcacaacccgaggatgaacttaccctgaaagcccgtacctgtgaatcatccataaaattatagaactgaaagcaattcacaactgaaccaaccgctatccattgaatgttgcccctgtgaatcatccataaaattatagaactgaaagcaattcacaacgtgtatatggtctattgttaacttatattgcctgtgaatcatccataaaattatagaactgaaagcaattcacaacactcccccggaggttatgcgaccctgtaacggccgctttatatgttcaattcaatttcggtgatatcaatttgaagcacccttctagatttgctaaattgggatacacccaggccaaagcaggtggcggaagggctcgggtcaaatctctgcaggcacatccccttgggcccttttttcatttctcctgggagcgaaaataaaagaccccgtcttttgtagttggccgtactgaagtggagcaagctcgcttcagtgttcggtggccgttgtagtcgacagttgtatgatatatcctgtacaaaagaaaagagttatggcaggtggcgaaggactcgcttcatccccttttctgaattacccgatattcatgatcagttggttactttaatctctgtaagttccgtattccatgattctttccagtctccctgatttttcaggtattcaattacttctgaccgtgccatgtgggtttctctttttatttcattgaaaagctcacgaaattccggttttgattcaaaggcatggaatttggaactttttaagcttccgaataatccgaaacgatttctgttttcgaaataaatttcgtggacttcatccaaaaatgcttctatattgttttgaagatagaagcattccatgcgttggaattttttatgattaatagtgggtaatccactatcgtaatacttgtgtatcttgaaatgggcacataaatagtcagcatatttgagcgcctgagattcattaccttcttcccttagaatttcaatatatgttctgacgggcgtaatatgcaatgttttaaagtcccttacatttaacagccctttatctattacttcgaacaaatcggagaattcccccagcaatatttctttcgctttatggaattcaccttgcaaatagtaaattctggccatccgggtagcaaccacttctttgttaaggtctttgtccctcgaccatatttcagtaagagcaaaggcatcttcatagcgcttctcaatgaggtgaagatgaagggtaggttcataggtgtacagtgggttgtcaggaaacctcagttttatcaattctacatacccctttgctatgggcaaaaggtctaagtctgtggccaggagtgagccccaatacaaatagccaaattcgtagggattctcaatcaaggctttatgaagaaacttataagcagaaataagactgccatgtggtttgtcagcttgcataatcgcattaaaatacctcgctcctacatggcggggatcgtcctttaaagcctcctctataagcgcaatcccttttttatattctcctttatcccaaaaataatccctggctagaattgtcttgtaaaaagggtttaggggatccaggtcaaccgcattctcaagatgcctgtgcgacaattcgttttgtcggatcttcccaaacaactgatatagtcgataattgcttctcgcatcattgggcttaattttcaaaacttttcgaaatccatcaataatctttgaggaatctttgtccaaatctccgattttgtattcataatcagccatagcgaacaaaacctcagggctttctggactcaactcaaaggctttcaggatgttgatgcgcatcaacttatccctgtcctccctgctcaaagtgccatagtagtgcttctgaccatataagaaagacaattcggaataggcctctgcaaaattgggatccaaactcaccgccgtttcaagaagcttaattgcctcgtcaatggattcgtccttgcgaatctctcccaattgcattgcccttacataaagttcaaaggccttgaaactcaatgttcgttttcgactttccggggattccagattcctggccaacgatatttttaaatgttgcgctaccctttctgcaatgtgcccctgtacgtcaaagaaatcatcaaattgttcttcgaacgcctcggaccatagttgataacccgttgtaatatctattaacttcaccgttgccttgagtctgtttttatcacaccaaagagaaccgtcaatcacataacttacgccaagttttttaccaatttcatcgataccattgttcttatcaactttaaatgacgatgaagccgtgattacctttaaggtgcctagattacttaggttattaattatttcatctgctacggcattggccaggaaggaatttgtggaatccgtacccaaatgatcaaatttcaggacagccagagatttttcatcattcgttttgtgctccttgttcaccgaaagaatccagaaggaagccatcactatcactgccccaatatttaggggtatcagccatttcctggatttattggcgatataatattctttttggacaggttctacaattggttcacttggaggacaaccataatattctttgtaacatgtggaaaaataggttggactattaaatccaaccatataggcaatttctcctatggaataatttttggtacgtagcaatttggccgcctcttccaaccgaatttcacgtataaaccgactgacagaactactcctggatttctttattcttcgatataattcggacctggacattcccagttccttggccagtatggataccccaaattgtgcattctgcaggttgtccaaaaccacctgtttcgctttggaaataaattcttcagaatgcatcgaaaaatgggactttcagggtgttttttaagtgggaataaccattgtaatgatacaaagtactaaaaggagtagcaactggcatttgtaattccagaaccgccttatgttcaaatttgcaccatctaaaatggatattgaaacatagtttaaggaattaaacaatttcttaactcattccaaacatagttgaatgtgaatcccaaacaagatagtgaactttatttaagtgtctaacctttaaagccttaatcatgaaaaagagatcgatcattgtagtattttcactgtttttggttttctcatgttccaagattgaacaagatgagatacctgacttcgaaagccgaaaggaactaacagagcctcaagatgaaaaattacaaacgcccagcccaatcgcacaaattttgtcagatcaggggggaagaaaggcgcttgaaaacttattcacttcaagggaaaccgacaagcataaaaaaaatgggatagttttcataaaaaatggcgctgacccggttgcttgtagtgtaagtggtgactatttggtctgcgtatatgaaatagaggatggtttttacaggtctcctatcgacgttcgcattcttccaaatggtcaagcccaattcattgccaggtcccgggacttcgcagttgaaatatatgagctgccttcctttgaactgatctattccaatctttgtatggatgaatttcaggggtacttgttcattcatgttatgggaacctataaactggtgacagatgacccttactatgattttgagtattatacctatgatgaaccttcgactgacaatatcatgtggttgacagcaaaggtaaccgacggggttcgaaatttggatatagacaatcttacgtttgattgcgtagaacctacttcaaccaagagggtgtgggttacaagtatcatcaagaaaaatggagaggaaatatttaagcttaacggattgtaatttcgaaaagctaatgtaatcaccaacaaaaaaagcatcttcccaagggcaggtgctttttgactttaagacacgtgagccaaattaatttcttctgttaaattatattgaagtaaataggttaaataattccaaatattttgcgccacgctacccttaattatcttttaatccgagcaacgatcttaaagaatacgctttagtcgcacccccccccaataacgagcggctgaatatagaaagacggtatttatcgccttttggcagcttccatcaatctaatgagctcaattcatcgcggctgaaaatatgatatgcctccacatttttttcctccccgttcatcaacataaaataccggctttaaggatttgattgaagatcattttaccaaacacaggtatagtattagcctctaggcagggtcttagcaaggtccaatcatggtttcaatagggtttgaaggcgaattcaattaagagggtcaatggggggctagataggatcttttagaataggctcctaaaatggggctctgaacccctcctgggttttaagttatgttgtttactgcaggaataaagcagggaagttgagaccgtacttaagcgctttttgtatatctgaatcttccatcgaaattgtggttatgattattgataatcgattctcaatacttcttattttccgaatgtatattccgtgtggatgtcccaggtgtccccattgtgttttaatatgtacagacttgaggctgtaaaacttccattaaaattgcgttccctgaacaatggccaggcagcctggaaatcaacttcccccaggtcgcgggtggctatcgtcatatgggggtgaaagggccttgccctgggccgcactggcagcagctgcgttgctgatagtacggctcccaaccgcgcttccaacgtgaccacaggggtgtggtcctcgatcctgataaagaccacccgcgttgaaaagtgatcaaaatccttaagcgttaccatgaaaggatgctgcaggccggcaacatggcgcagggttgcctcaagctcatcacgccggtcccgcgctaggcgaaaaggcccttgcagcgtaatgtgggccggtgctttcagggcatgcccggccccgaatttccgttgcatttcccacttaagggcacgcacctgctcccgcagcggcgggggagggacaagggcgatcaaatacaggtcggtatccacagttttttatccgaaatatagggattatgccataaaattggcccggggaaacctgccttcggccatggct

SEQ ID NO: 2267 - DNA, 24116 bp, synthetic construct
  source 1..24116: mol_type = other DNA
  misc_feature 1..24116: note = Synthetic
gccataaggcaatttcaatataattgaattttttacagtaatgcacttgcattacattttatatttattatatttgattaataataatatatttgcgaaacttctttaagtaaaatattagaagcattcgctttgaatctcgcattgaaaactggtaatttttatacacacgagaggaaaagcaaggatgctcacgacccgggcgtgggctgcttgttgtgtgtaaggtataccagtgcctcaatgcgataagctgagacctgcgcctttttctttttttaataagaacaggccaaaaggcagttaataaagctaaataagttactacttaatgagctgaattacaagacctgtgtttattgttacagtaatcatcttttaaaaactatttgtaaaactttgttcgtaagagaaagtctgggatacttcctagatactccatagataagcccatggaatgtgcacgctgttttttatgaaaaaccaattaaaacacatttacacagcggtttcatttcaatcaatcgcagtaataattataggtatgcataagtgcaagaagagtacctacgcccgggtcgggtaaactgtttaaaacaaaagcttatgaggtaaaattatattcataaaaaagccctctctatactttggcgagacagagaaggcgtgtattaactaaactcaaatatttaactaataacatttcaaaaatatgaaatttttattcagatcctgccttaggctaagtattttcttagttctgagcagctgggctattccctgcacggggcaacagcaaatatcgggtaccgtaaccaataccgataagatgcccatccccggggtaaatattacctttaaaaataaacctggtggtacaagcactaattttgatgggcaatatgagcttaacgcacaagcacaagacagcttggtattcgcttatctaggctatcaaacgcaaacgattgcggtcgccaatcaaacccagatcaatattaccttacaagaagaagaaaattctttaggcgatctggtgatcaatgccggatattataccactaccgagcgggaacgcacgggaaatattgctaaagttaccgccgaagagatcgagctgcaacctttagttagtccgttacaagctttgcaagggcgaatggccggggtagaaatcactccgggtaatgatctgccgggctccgcccctactattcgtattcgcgggcaaaacagcttacgagcagaaggcaattaccccttgtacatcatcgatgggatgcccattaattctgccccggtagagagcaacagtaatctcagctttacaggtatagacccgttaagtacgcttaacctttccaacatagaaagtattgaggtactaaaagatgccgatgccacggctatttatggttctcgaggcgccaatggggtcatcttaattaccactaaaaagggaaccccgggagaaacaacggtacaggcacgtataagcaccggcttttctgaagttcctaaccaaattgaactgcttaacaccaacgactatttaaaagtacgccaaagggcatttgaaaatgacggaatagcacctaatgaaaataatgcctatgatttattggtatgggatcaggagcgggataccgattggcaggaagaattttttggagggcaagctgagtttacccaagccaatttatctattgcaggaggtagctcaaccacccgttatcgtatcaatggctcttacttaaatcaaggtagcgtataccccggcggggctaactaccataaagctacaggaaatgcacaactgaaccataaaggtaaaaatgataaattttctttggatatgtcgcttacctatggtacagaccgtaactatactgtgggcataggcgctgttataccacaagtgttcagtttggctcccaatgccccccgtatttttaatgaggacgggagcctgcactgggaagaatggagccaagtgggaagggaaaacccttttcaggggtaccccaataccagtgaagttaaaacccacaatatggttactaaccttaacctatcttataggttatttgaaaaattagaactttctaccaattttggatatacccatcttaatagtaacgaattgaccaaacgacccaaggagtcttttaatcctgagtatgcagagtttatagaccatgaatctgctcatttagaaggacaacgtgcttcatggattatcgaacctcaattatcctatcaaaaaaacatagggaaattaggaattaaagctttagcagggacaaccctacaagagcaacttaaccgccaaacgggagttacaggtacggggtatgctaccagatcgatgatagggaatcttgcagcagccactaccctatctaggggtataaaccaagagacgaagtaccgttatatggcattttttagcagactggggatagattgggacacaaaatacttcattaatcttaccggaagaagagacggttcatctcgttttgggcctcaagaacgttttgccaattttggagctattggggcagcttggatttttacagaagaaacttggatggctaagcaactcccatggttatcttttgggaaattacggggcagttatggaagcaccgggaacgatcaaattggtgattatggatatttagatatctatgaagccacacaaggccctggagggctttaccccacccgtttagccaatcctttctactcttgggaaatcaataaaaaattggaagcggcaattcaattaggttttttaaaagaccgcttgcaccttaatgtaagttattaccaaaaccgttcttctaaccaattggtaggctacagtttgccaagtattacaggtttttcttctgtacaggccaatttacccgctacggtagaaaacaggggttgggaaatagaagccaatgctaaggtcttaaatacccggcattggaagtggcaaagcgccttaaatttaacgcttcctaaaaatgaattggtaagttacgccaatttagaacagtcttcttatgccaacacctatagggttggagaacctttaaatattgacttgctatatcagtatgaaggcatcgatccagagacgggctattaccaaattgctgatgttaatgaagatggaaggttagattatgaagaccgagtggtcgttaaagaccgaaaccccgagttttatggaggttggcaaaacaccctacaatataaaaattttaatcttcagtttttatttcagtttgccaaaaaagaaggggaatttgcactatttgatgccggaagaattggtgctctgcgacaggaagactatttagagcttgaaggtaatgaatttcaagaaatttcaacgcagcttaatgcgattagaggctataacaatgtaacacaaaccgccctaccctataccgatgcctcttatattcgtcttaaaaccttgtctttaagctactccttacccgttactccgctacaaaaaattggtattaaaaattgtagcgtatttgtgcatgggcaaaacttatttacccttaccaattatcgtggaatggatcccgaaatggctcttggtcaagggactgcatttggtgctttacgcacctttaccaccggtatagaaattaacttttaaacttttactgatgaaactatataaaaaaataagccttttactcttcctctgtttcttgggttcttcttgtgaagattttgtagaagtggaggctccggaccatcaactgcctgttgctgtagtattcgaaaatgaagaaaccgcacgcagtgccatgttaggtatctattatcagctttttagaagtgcagctttcagtaatggccatacgagtagtgttactgccttagcgggattaagtgctggcactttgacccctgtagatgctacgaacacggtttttacagaatttttacagcatgaagtacttccgcaaaatcctaacaacttcaacttatggtcaagtgcctatcagaccgtatatatggtcaattcatttttggaagggcttgaggcctcagacagcatccccgaagaattagctagccaattacggggagaagccttgtttataagagggtttacctatttctacttaaaacagctttatggaaaagttcccttaattttaacaagtgattatcgtcagaatgcctcggccgcttctaatacaccagaagaaatactcactcaaattctaaccgatttgcaaactgcagaaagtcttctttctgaagcttacccgcaacaagaacgtacaactgtaaaccgctacgcggtaaaagccttactggctcgtattgctctttataatgaaaattgggaagctgctttacaatacagtaatgaggtcattgcacaaacttccctttatggtctagaagaaaatgtaaacgacgtgtttctggccaatagccaagaggccatttggcagatttcaccactaggtggagggaatatcaccaccaatacccatgagtggactattttctcatctgcttttccacaattacggcttacagctggttttgaaaccaattttgaaacgggagatctacgaaagacctactggctagagcaacacccagaaaacaacacctaccgcccttataaatataaaacaggtaacaccagtgatgttattacagaatactctatggtgctccgtttggcagaacagtattttatacgagcagaggcacaagcaaaactaggcaatatgtcggctgccatagccgatttagatgatattagagaaagagcaggcatctccctaattgcacaaacccagcctaatgtaacagtagaagatttttcaaccctgcttttagaagagcgccaaagagaactctttgccgaatgggggcaccgttggctagacctgtggcgtacccaaaatgcagcaatggaatttagcggaagtgctttttgggaacctaccgatgaacgctatcccattccagaagacgaacgcataaaaaaccccaacttaactcagaaccccggatactaatgaaaacagatgataatttcctcaaaagcttttgctttatactcctagtagttttaaagtttgtcagttatggtcaagcaccaatgaaagaaaaagtgctgcctgtagacccaagcattctacatgggcaactacccaatggattaacctattatattaaaccgctagatgaacctacttctgatttggtgatgaatttttgggtaaaagcaggaataatgcaacaaggagtaaaccaacctgacctcgctcattttttagaacatatggcatttaaagccagtactcattttccaaaaggattaaaagcagatagtttacatttagccaaagcaggcatccgtaatttaaaagatattcatgcgtccagcgggtattacaatactaattatcactttgctgccacatcaggtaatcccgaggcggtgcacacggccttgctatggtttaaagatattgcccatggcttaaaacttaccgatgaagatattgataatgaacggggcgttttgttacaagagtttaacacacgggtgcaaaatttgtctgagcatcgtgctaaatcaaagatgttgcaacacattaatccctgcttttcctcttcagataatttcttcgactacaatgctcattttcccgcaacagaattacgggagttttataacacttggtatcgtcctgatttgatggcgataggtgttgtcggtaatatagagcatccagaacagctcaaagcaaaaatagaacacatgtttggaggtatcccgatgcctaaaaagccaaaaccactccctgcatgtgagttgacggggcaacctccctcttggattaacatcacccaaggagaaaaaaagactacacaagtcaaaaacaaccgtaaccaattttatttaggctttagagatccatctacccaagaaaaaatacatcgtcttgaaggactaaaacaacttttcctttggcaatccatgacacaacttttgcaaaaccgcttgaataaattacagcagtcttatgacatacattttaattttttaaataagcatacctaccgctcacaagtcgttatgagttttaaagcacataatgccttgatcgatttcgaagagggacacggcgaaaaagctttagagacctttataagttacttacaccaattaaaagaatttggagtgcatcctgaagaatgggaagaggtggtaaaaaaccaacatcttattcttgattaccaagacaccaccagtacgaaatattggtccaaagaaatttaccggcattttgtggcaggagaagccttacctgcccagaaaaaaactttattaaaacaatggtggaacaaaatgagtctcacccaattcaatcaagaactcaaaaaattaatccaattggtaccagaagacattgccgtgattgccacaaaaggaagtgcagcagccaattatacggaagtgcaggtaagaaagcttattcataaaacgcttcaagaacctgtcaagccttacttccctaaaacatgggatgagcccttgataagcaaagagataaaagcttctttacttcctcaaagaattaaagcaaaaggaataaccaaaagcggcgggaagcgattttccttcgagaatggcgcccaattgattttccataaagacaccactgcccgttttaaaggtaaaatagaaatcgaggggtttagtccgtggggtagccattgtttttcctaccccataatctatgccgcacaaaatgcagcaaatattgtacatcagtcgggtatgagctcttgggataaatttgatctagatcgatttatagcaaatcagccacgcccctttgccattaaaccctatatcgaagcgaatgaatcggggattcaaggaaaggcttcggcagaaactttagaggagtggttgcaaatgatgtacctctatatgacccatccccgctatgatgctaaagcatttgattattggaagcggcagaaaaagatagagtattttaaatccccctatgatgtctctttttttaattttaaaaatcgagttgatgagtatatgggtcgcaatagctatgaaaacgtaggcgaaaaactatggacaggaattaaacagaccaatttagatacagccttccaaagctatcaacaactttttgggcaaacccatgattttacttttgtggtgagggggaacatagaagaaccccaacttcttttactagcccaaaaatatataggcaacctccctcaaagcaccgctaaatttacctgtaaacctatttcaaacaaaaaaaataaagctcaaaaataccctatactcaataatataggggatacgatagaaaattcagagaaaactcaatatttaatacgctatgtactgcccgacattccaccgaatagtcaagagtatttaggtttacagatgcttagtcgaatgctaggagaacgtctaatggacttgcgttaccaaaagaatttttctatctatggggtcagcgctccttttaatgccctacctcaatctcaatcgtatgacttttcattttatatgggctgtaaggctaaagaactgtcatcgatacgccaggaagcaaaaaatataatagaggatataaaactgggtaatattgataaagaggagtttaaagccgcccaatcctttgtcatccgcatggcttcaacaaacaccgcataccagaatcgacttctaagttattacaaaggagaaaggccttgggttagctttgaaaggatagaaacaatggtaaataccattaccccaaaattgcttaaaaaaatagccaaacgctatgtaaaagaaaaatacttgtatgaatttgctacttatgaataggtttatagcttaagtccagaaatacatacttgcatatttaaaaaaagaagaaaccggacgtacacccggtttctatttttaaggattagtctaaggttacctctcctaccacatccccactgccgggtttgggatcggagaaattttgtgaatcataaattgggtagttcgtattatcggacaatacccgtaccaagcaactttggttctgattatcacagctcatctctgggatggcatgccaactcccacttgtaaagacaaaatcttctgtaggattggctgaggttcttgccgtggtaaacgacatcgcggttgtaaaaattaccgctaacaacggaattaaaaatttacttttcataatattgaatttttaaatgaataatatgcctactattttatacaggtgttcagcttcctcctggttttgtcgcgcaacaaaacaggtaatattattttatttttaaacctcgtaactgtaataaacctattagaaataaaaataagcttagtgtaaagtataagtgaccataccaacctagtagcggtagaatagtcctacaggtacagggtatttcttcttggaaaaataaaagattgatcaaatatccgctatagaatattaatactatcaaacaggtatacagaccaatatttttcttaggataaaacaaaagagttaaagaggtgattatttctacaataggaatccccaaacttaatccttcaataataagctggttttcgatattgattgaattcagtaaggtatggtaaaaaagatctccttcccataattttcttaaaccggtatagagaaataatatgcctactataaccggagaaatttttaagatgtactttttggtttccataaccctttcttttaatgaggttaaagttaaggaagcaaaaatgttcttaagggataaaaaactgtctataagggattttttcttatttaaccctataaaacactaaatttaattatttctatttcttcacctatcactaacgtagaatgtaattctccagaaaattcaactttagcttataacacaaataccgttactgggatacccggtgtaagccccggattttatttttgggatgcagataattaggtagctcttacttctatagaaactctacgaaccaatgttttagtaaataataatagttcttttttaaacacttctcaagctttcaatgataataattcagacaccggttctacaatgattttgcatacagaatctataactttaatagaagttgcattggcttatataaattttatagtacggactagtattaccacaaatcaaggaaacttgattaccgacggaactccaagagtatatggggcttatattacggtcaatgaaaataattatggaattacatctggagcttacaggagagatacatttaattctacaggagttactaaccctttaattttaaatggctctggttacatacctctttccgcaggtacacatgatatagttattagaggttatgcatttgcaggaacactaaacatgcgggctacttttgggaatagtgcggacgacagactgcaaattgtagtgcaatattaaataaaatacagaaataaaaaaccaatctaaatttaaaatgattttttatgtggtagagattaatatttagacccaaagtttgcataagctgaaagcttcatatcattaaattgcttgataaactagcggaatgttttaaatagaataaaaaagttatatgagcgtttgttggaagctgaaaagaaaagattgcttatttagaaaaattattggataaataatcaaacatctttttaaacagataataaagccattagcagtaaaaagttaatggcttttataatttctaaaactaaaaaaggcgacaataaaattgccgccttgaatgttttcacaacggaataatccttattgtgaattgcttcagaattgtataacaaatatagaaaaacattttaaaaaaaatttacggataaccgtaatctgtctaaaatttttatctctatatttaaaaatgttaaaattttaaaagcatatgaaacgtattttaggattagacttaggaacaacgtctatcgggtgggcttttgtgaatgaagctgaaaaagacaatgaagaatcttctataataaagactggagttagggttgttcccctttcaacagatgaagagaatgactttaaaaagggaaacagcattacgattaatgctgatagaactctaaaaagaggagcgcggagaaacaaatttcgatatcaactcagaagaaaagcacttattaatcagttaaaaaatataggttttatagataaaaactctaagctcactgaaaccggaaataactctacacacgaactattaaggttaagaaaccaagcagtaaccgaaaaagtagaaaaagatgagtttgcacgtattcttctatctataaataaaaaacgtggttataaaagtagccgtaaagctaatagtagcgaagaaggtgaacttatagatgctatgggcatcactaaaaagctctacgaaaaaaatttaacgcccggagaattttcatatcagcttttaaaaaaaggaaaaaaagccatacccgattattaccgatctgatttagaaaatgagtttgataaagtctggaaaaggcaaaaaacattttaccccgatattttaaataaaatattacgtaaagaacttgttggtaaaaataaaaatcaaacttggaaaatatgcgaaaaacctttcgatatagtaggtataaagcttgaaggcaatagagatgaaaaaaaaatagaaaagtttaggcttagaaaaatagctctaactgagcaaattgacttagaacatttagcaattgtactccaagaaattaataatgagatcaataaatcgagtggttatttaagcgaaattagtgaccgaagcaaagagctacattttaataatttaacagtaggacaatacctatacaatcaaattgcacaaaatccacataaaagtttaaaaaaccaagttttttatcgtcaggattatttaattgaatttcaaaaaatttgggataaacaggcagagttttatcctgcattaactgaaaagttgaaagataaaattcaaaatgaaattattttctaccaacgaaggttgaaatcacaaaaaggactcattagttattgtgaattcgaaagttgggagcaaaatgtcactgttgatggtcaggtaaaacataaaactgtaggtcatcgtgttattccaaaatcttctccattatttcaggagtttaaagtttggcaaaatttaaattctatcagaattattcatataaaaaccaatgaggtttttcatatagaagaagattcgaatactgagttatttcaaaaactaaactggacagataaattaacgaataaacaagttttaaaagaatttaatttaaaaccagaggattggaaaataaattttcaacaaatcgaaggcaatagaacgaactacaatcttcttgcagcttataaagaaatattaaagatcgaaggttatgacaatatcaacttctccaatattgaacctgatgaactgcaagaaatcctagagaaatgttttggtgaaattggtatcgataagcaaatattagaatttaatgcaacattagatggaaatgaattttcaaaacaaaaatcctatgaattatggcatctactatattcatatgaagatgatttttcaagaacaggaacagaagccttagaaaataaactcaaaaataactttggctttaaagatgagcatttaccttatttaataaatattcgttttcaggatgattatggcaatttaagtgcaagagctattcgtaaaataatgccgtaccttcaagacggaaaaatctattctgatgcttgtgaattggctggttacaatcattctaattccgtaaccaaaaaacaaaatgaaaggcgagtattaaaaccaaaactcgaaatacttaagaaaaatagtttacgaaatcccgttgtagaaaaaatcttaaatcaatgcatcaacgtgataaatactatcattgaagatgagaaaatggggcgtccagatgaaataaggattgagcttgctcgcgaactcaaaaataccaaagaacaacgcgaccggatgaccaaagccattggcagagctacacgagaacacgagaaataccgtgaggaaataaaatctaaatttggattaccacacgtaagccgaaacgatttaattcgatataaactttataaagaattagaatctaatggttacagaacgctttatacagacgagtacatcaaaccggaagatttattttccaaaaaatatgatattgaacacattatcccaaaatccagattatttgatgactctttttcaaataaaaccttagaaacaagagaaagtaatctagataaaggcgatgaaacggccttagattttgttgaaagaaaattcggtaaagaaggcttagacaactatagaaatcgagttgaagaactttataaagcaggaaaaataaaaggttcaaaacaccaaaaacttttaatgtcattaaaagatattcctgcagactttttaaatcgggatttaggtaattcagcatatattgccaaaaaagcagccgaaatcttacttgatgtaactaaacgagttagcttaacttcagggaaaataaccagtaaattacgagatgattggggtttaattcaaataatgcaagaattgaattgggataaatatgataaagtgggattgacctattataaagaaaataaagaaggaaaaaagctaccgagaattaaagattggtcaaaaagaaatgaccatagacaccacgctatggatgctattacagttgcatttactaaaccaggaatgattcagtatttaaacaatctgaatgcgaaaaccaataaggaaatttacaaacttgaaaatacttatacctataaagatgatagaggcaaacgtaaatttaaagcaccctttcctaaaatcagaaaagcatccaaaaagcaattatcgcaaattttgatttcgcataaagccaaaaataaggttacgacaaaaaataaaaataagattaatgtaaaaggaaaaaatacgtttgtttatcaaactgttgaaacgccacgtggccaactccacaaagaaaccgtttatggtaaatcgaaatattacgaaaccaaatttgaaaaagtcggtggaaagtttgacgaagaacgcattgaacttgtcgctaaccgaagtcataaaaatgctctgttaaaacgattggaagaattcgaaaataatcctaaaaaagcatttacaggcaaaaattcactagctaaaaatccggtttatttaaacggcactcaagaaacccttccggaaaaagtaaagttagcttggttagaagaccgatttaccattagaaaagaaataacacctgacttgaaaatagataaaattttagatcaaggtgtaaaaaaaataatagaagaaagactaaaagaatttaacaacaaacctaaagaagcctttgcagatttagataaaaatcccatttggttaaatgaggaaaagggcataaaaattaaacgcgttaaaattacaggcgtttcaaatgccgaagccttacatcattcaaaaaatcatttaggtaagcaggttttagatgataaaaatagtcctattccaaatgattatgtaagtacaggaaataatcatcacgtcgctatttatgaagacgaaaaaggtaatctacaagaagaagtcgtttcgttttatgaagcagttgcaagaaaaaaagaaggattgcccatcattaataaaaaacatgaaaaaggctggatgtttttatttacgatgaaacaaaatgaaatgtttgtttttccaaacgaagaaaaaggttttaatccaagcgaaattgatttattaaatcctaataataaagttttgattagtgaaaacttgtttcgcgtgcaaaaaatagctactaaaaattactttttcaggcaccatttggagactcaactaatagatcataaaaaaacaagaactattacttgggaaaatattagaagctgtaatggattaaaaaatctagtaaaaatacgattaaaccatctgggagaaatagtacaagtcggagaatattaaaatttttaaaatgattaaacgtaccttatttttcggcaatccagcttatctaagtaccaaaaatgaacaattggtggtaaatttccccgaagaagaagaaaaagaagataaaacaattcctatagaagatttaggctttgtagtattagaaaatccgcaaataaccctcaccaatgggttacttatgaaactagtacaaaataaaactgccgttattacttgcgacaagcaacacctaccctgctcttttttgcagcctttggtaggtcatacagaacaaacggtacgctatcgacatcaattagatgcgagtgtcccacttaaaaaacagttgtggcaacaaactgttatggcaaaaataaataatcaagcgatgcatcttaaacgtttagggaaatatagccttaaactagagcggtgggcaacagaagttaaaagtggggacacgcaaaatcatgaagccgttgctgcggctcattactttcaaaatctatttgatttagaaggattcagcagaaatcaaaagggcgtgccccccaacaatttattaaattacggttatgccattttacgagcgataacagcccgtgccattgtaagtagcgggatgcttccttcggtaggtatttttcatcacaataaatacaatccattttctttagccgatgacgtgatggaaccttaccgaccttatgtagatgctttagttaatgatctggtgcaaagtggttgtaatctagaagaattaacaacgaaaattaaaggagaacttttacagatacctgctatggatgtagatatagatggtaagaaaagcccgttaatgaatgccgttagccgcactaccaatagtttatatgaatgtttttatgggagtagccgaaaaatattatacccggattttcaataaagctttaagaatataaatacgttagttataaaaagaatagagttaaataaaaactcaagtgaaaaccataaaatggattaatactatggaaaactcacgtttttcaagactaaatcaatacagaagcatgtgggtacttgtatttttcgatttaccaaccgaaaccagaaccgagcggaaagctgcaacaagatttcgcaaacaacttctagatgatggttttggaatgtttcaattttctatttacagtaggttctgtgctagccgtgaaaatgcagcagtacatattaaacgaacaaaaaacaatctacccaaaaaaggaaaagtagccgtaatgcaaataaccgacaagcaatttggtatgatcgaactttttcacggaaaaaaagaaatagagcctgaagtacctcaccagcaattggaacttttttaattaaaaaaatagcattaaaaataacttatcaagcaaagcaaaaagcttattaaaaagcctatttttttatttctaattatacatttaaaatacagcataccagctttttatcacgggtatgctgtaaatcatgattaaaaatacaattctgaaagcaattcacaaccctagtgtagcgatatgctgacccattacagctgtaaatcatgattaaaaatacaattctgaaagcaattcacaaccaagagatcacaaaaccctgcaaagtaactgctgtaaatcatgattaaaaatacaattctgaaagcaattcacaacttgttatacgttgttgtgtgccattagggtgctgtaaatcatgattaaaaatacaattctgaaagcaattcacaacctaccgtttaatactaatgataacgaacccgctgtaaatcatgattaaaaatacaattctgaaagcaattcacaacgctctagcttactgacttattgcattgattgctgtaaatcatgattaaaaatacaattctgaaagcaattcacaactataaccgtcttgtaatgcttcccagttttgctgtaaatcatgattaaaaatacaattctgaaagcaattcacaacgggttcaacctttggtattttgttttgttgctgtaaatcatgattaaaaatacaattctgaaagcaattcacaactgtataacagtaatttggctacgtgattatgctgtaaatcatgattaaaaatacaattctgaaagcaattcacaacaaaagcattttgattaccacgacaccgaaagctgtaaatcatgattaaaaatacaattctgaaagcaattcacaacagccgtcacgccctattatttattacttttgctgtaaatcatgattaaaaatacaattctgaaagcaattcacaacaatgaaggcgaagtacttgcgaaacttcaggctgtaaatcatgattaaaaatacaattctgaaagcaattcacaacctctgtaataagacatagttatatttttaagctgtaaatcatgattaaaaatacaattctgaaagcaattcacaacagataaaaaaataaactcattaaagcatagctgtaaatcatgattaaaaatacaattctgaaagcaattcacaacctgtaagcgtacaatttttaacaggcggttgctgtaaatcatgattaaaaatacaattctgaaagcaattcacaacacggaacaggaaacacccaagtgaatgaatgctgtaaatcatgattaaaaatacaattctgaaagcaattcacaacattgcgtatgagtgataattttaaattaacgctgtaaatcatgattaaaaatacaattctgaaagcaattcacaacactaatcacatttccactcttatttactaagctgtaaatcatgattaaaaatacaattctgaaagcaattcacaaccaccgcaaacaagctatctcaatcgagcggctgtaaatcatgattaaaaatacaattctgaaagcaattcacaacaaatataaccgtatcatcaaaaattttaaagctgtaaatcatgattaaaaatacaattctgaaagcaattcacaactgattgataactatattatatcgcatcctaagctgtaaatcatgattaaaaatacaattctgaaagcaattcacaacagtcagggacaccggaaacgactcccataggctgtaaatcatgattaaaaatacaattctgaaagcaattcacaacgtttattattcaggcgaaaaagaatataagctgtaaatcatgattaaaaatacaattctgaaagcaattcacaacgcagaataacggaaacgccaaaaaacttccgctgtaaatcatgattaaaaatacaattctgaaagcaattcacaaccgtggcgatttaatgatctctaaaatttgagctataaatcatgattaaaaatacaattctgaaagcaattcacaacatttaatgtctttcttgaattcttcgattagctgtaaatcatgattaaaaatacaattctgaaagcaattcacaacctgcagtaagatctttaaatcttgttgcttgctgtaaatcatgattaaaaatacaattctgaaagcaattcacaactacatacgtgcgatgtttaggcaattgctcgctgtaaatcatgattaaaaatacaattctgaaagcaattcacaacaactccgagctgtttcatttttccagctctgctgtaaatcatgattaaaaatacaattctgaaagcaattcacaacagggttacagattttataaatggaaaaaagctgtaaatcatgattaaaaatacaattctgaaagcaattcacaaccgtattaagaatgttataattttcttgaaggctgtaaatcatgattaaaaatacaattctgaaagcaattcacaacaaatctaccgggaatgcggtaggctttactgctgtaaatcatgattaaaaatacaattctgaaagcaattcacaacttcaggtttaaaaacaccaattggaatggggctgtaaatcatgattaaaaatacaattctgaaagcaattcacaacggagaaatgtatttcgttatacatgaagacgctgtaaatcatgattaaaaatacaattctgaaagcaattcacaacaatacattaattcgccattgttctccagcagctgtaaatcatgattaaaaatacaattctgaaagcaattcacaacatattgctaccaataaaaaagagcttcagagctgtaaatcatgattaaaaatacaattctgaaagcaattcacaactatttagtttagtttgtgatattactgctagctgtaaatcatgattaaaaatacaattctgaaagcaattcacaacagcagaagaaaaaactagagatcgggattgctgtaaatcatgattaaaaatacaattctgaaagcaattcacaactataatactcatcgtttatagtaccctctagctgtaaatcatgattaaaaatacaattctgaaagcaattcacaacttgtttattgatattagaattactcatactgctgtaaatcatgattaaaaatacaattctgaaagcaattcacaacggggcgttttagtagtatttctatgatatggctgtaaatcatgattaaaaatacaattctgaaagcaattcacaactatagattttcttgtggcgatttcttgatagctgtaaatcatgattaaaaatacaattctgaaagcaattcacaacgcggagcttcaactgtaattttagaagccggctgtaaatcatgattaaaaatacaattctgaaagcaattcacaacgcttgcatcaaatctttccaggtaattaccgctgtaaatcatgattaaaaatacaattctgaaagcaattcacaactatgacaaatataaaatcagacctcaagacgctgtaaatcatgattaaaaatacaattctgaaagcaattcacaactactatttgcataacattggtaatattatagctgtaaatcatgattaaaaatacaattctgaaagcaattcacaacctcaacgataaactgaacaaccgcactggcgctgtaaatcatgattaaaaatacaattctgaaagcaattcacaaccagcgcaaacactactagcagcggaaaagtcgctgtaaatcatgattaaaaatacaattctgaaagcaattcacaaccacaaatcagattataaacaaattgaaatggctgtaaatcatgattaaaaatacaattctgaaagcaattcacaacaatgatgctttcgaccaaggccaaagacgtgctgtaaatcatgattaaaaatacaattctgaaagcaattcacaacgccagcatttctcattacgatcatactttggctgtaaatcatgattaaaaatacaattctgaaagcaattcacaacttctggagttatttctaattgaaattgtttgctgtaaatcatgattaaaaatacaattctgaaagcaattcacaacgaccagaaaataagagagcaaaaaaagtatgctgtaaatcatgattaaaaatacaattctgaaagcaattcacaacaagattttaaactggctttcttcaataacagctgtaaatcatgattaaaaatacaattctgaaagcaattcacaacgcaagtagggcaaaaaaagctttgtatatcgctgtaaatcatgattaagattacaattctgaaagcaattcacaacgggtaacattcgtaggcaagtacgatcgataccgtaaatcataattatacatacaatgttaattaaaattaattataaagtaaataagaatttgtaattatttcttatcttagtataaattaagtcaaataaaatgtgacctattcggttacctctaatttacgaatagacttaaaatactgaaatcactaagactgctgaagtgtattctagttctctcatcccgactgaaactattactataaaatagttttcaaagacaattagttgattttcaaataattgtctttttttataaagtattaagaagtttctgaataggtctaaaacgtgagtaattcgtgagttatacgtgagttcatttttagtttcttatcttcacatcacttaaacaaaagagcattttgtgaatttgcggaatataataagcaaggtaattcaccgtagtgaatataaataaaagactgcaatctaaatactcaaaaatagatcaatcttaattggagtttgcgtaaagattaggtttgattttttccttcctttaaactgatctctaaacacgtttattaattaaagggttttactgaagaatttgtacttctattgataaagtaattcagaatagaaacggaaaaaagttaaagtaaatttcttgtcgcaataaacggaagaaaaattgaagtacggatttgcttcaaagatttaagtagattagtagaaattaaaatcacttcatatcaataaaatataaaaaggcatatcgaaaaatcattccatatgccttttcgtaagaaataaaactttacccctacctatttagaaaacttttaaagcgctctgttgtcagtaccttccaaattcctaaaatcacagctaaaatttttacagcaaatgcaattgtaataattgtatttccgccaggccaatgcattattttaaaaaatgctcctgcaattgtaaaaagtacaccgattaaaaaaattgcaataatatgcttaacttttgttttcatgatcgtttttttgttataaaagcaagataatcaacttatagaaatatctttataaacttttcagaaaaaaacaacaacaaaaacaactaatttttattgtttaatcttttaactaaatttttaaacaaaataagttttcatggtttaattttgattttataattttaagtcatgtcttatatcaagcaacaatttaatataaaagatttagaaacattaagcggtataaaagcgcataccattagaatttgggagaaaagatacaatattttagaccccaaacgcacggaaacaaatattaggttttacgatgttaatgcactacaacgcatgctgaatgttgcttttttaaatgaaaatggctataaaatttcaagaatttctaagcttgatgagaaagaaataaacgatttagtaaaaagcatttctacagtaaatagtaacgaaaatagagctataaaagcactaaaggttgcaatgatcaattttgaccaaaatttattcatcaatacctttaacagcttattagaaaccaaaaattttcgtgaaatttttcaaaaagtattgagtccgcttttagatgaaatcggtttattatggcaaaccgacactataaatcccgctcatgaacattttatttcaaacctaattcgtcaaaaaatttacttaaatattgaacgccttcaagcacaagaaacccaaaaaaaagataaaacttttgtgctctttttaccagaagacgaaattcatgatcttggtttgctctacactacctacgaaattttgagccacggctataaaactatttaccttgggcatagcttacctatagaaaatttgcaatatttagcagaaaattataaaaacatctattttgttagttatttcaccataaaaccagatgatgtagaagatcatattaaaacattcgaaaaggaaatatgtttaaaattaaactctcaatattggattttaggaagaaaagcagctgagatgaaacaattgaattattccaaaagcatacagcagtttgacaatataaatcaactaattttaaaattataatgaagaaaaaaattacaattattggttccggtttttcttcattggcagccgcctcttatttagctcaaaaaaaatatcaggtcgaaatttttgaaaaaaacaacgatgttggtggaagagcacgccagtataaaaatgaaggttttacttttgatatcggtccaacgtggtactggatgcctgacgtttttgaacgtttttttgctgactttaataaaaaaccaagtgaatattatgagcttataaaattgaatcctgcttataaagttttcttcgaaaaaaaggacagcattactattggcgatacgctagagaaaatttgccaagcctttgaagaaattgagcccggtagtgctaaaacactccaaaaatttatagataaagcgcaaagtaattacaatattgctattaaggacctagtctatagacccggtgtctctccgttagaattagtcacaccacaaaccgcaaaaaaaatcaatcagttttttagcaccattgctaaagacgtaagaaaagcctttagcaatcctaaattaattcaggtattagaatttccggttttatttttaggcgctaaacccagtgatacaccggcattttacagttttatgaattttgccgatttcggtttgggaacttggcatccaaaaggcggaatgtatcaagttattttagccatgaaaaatttagccgaatcacttggcgtaaaaattcatactaatgctccggttgaaaaaatcctagttcaacaaaataaagcctgcggaataatttctaacggtaaagaattcgaaacagatattgtgttaagtggggctgattatcatcattctgaaactttattagaagaaaaattccgtcaatattctgaaaattattgggaacgaagaacctttgctccttcctgcctattattttatgtcggttttgataaaaaaattcaaaacgtaaaccatcacaccttattttttgatgtcgattttggcaaacacgccaacgctatttatgataacccaaagtggccagaaaaaccgcttttttacgcaagcttcccttcaaaaactgacgatgatattgctccggaaggaaaagaagccggtatatttttaattccgctagcccccggattaagcgatgaacagtcgttaagagaacgttattttgataaaataatatcacgttttgaaggaataaccgaacaaaaaattagaaaaaacattatatttaaaaagagcttttgcgttaatgattttgtagaagaatataactcctataaaggcaacgcatacggattggcaaataccttatttcaaacagcatttttacgtcctaaattaaaaagtaaaaaagtaaacagcctttattttaccggccaattaaccgtcccaggacccggtgttccgccctcattaatttcagggaaactggttgccgatcttattgaaaaacataattaagaaactatgaaatcactttttgacaacgtatcaagacaatgcagtaaggctgtaacccagtcttacagtacgtctttttctattgccaccaagttgcttgctccttctataaggcaagatatttataacatttacggttttgttcgctttgtcgacgaaattgtagatacctttcacgattacgataaagcttatttactcgataaatttgaagcagatctatatgaagctatcgatcagaaaattagtttaaatcctattttaaacgcatttcaagaaacggttcataaatacaatattcaaccagcattatacaaagcttttttaaaaagcatgcgtttagatttacataaatcggtttacctttctgatgaggaatacaaagagtatatatacggtagcgccgatgttgtggggttaatgtgcttaaaagtctttgtaaagggcgatgaaaaaaaatataccgatttaaagtatgacgcgatgaaattgggttctgcttttcaaaaggtaaatttcttgcgagatttaaaagcagattacgaagaattgagtcgatcctactttccaaatgcaaatattgagcaattagacgaagagactaaacaacaaattatagatgaaattgaagcggattttaagcaagccttacacggaattgctaaacttccggtagaagcaaaattaggggtatacaccgcctatatttattattctaagctattgcataaacttaaaaaaacaccatctttagaaattagaaaaaaaagaattcgagtgccagattatcaaaaggcaggattattgtgtcgctcttatatatcatatcgattaaaattaatttaatatgcaaa

SEQ ID NO: 2268 - DNA, 24113 bp, synthetic construct
  source 1..24113: mol_type = other DNA
  misc_feature 1..24113: note = Synthetic
cgtagatactcagcatggaattcaccatgtcgggcactaactgaggctggataatggtgagtaagggatgaagggtacggtacgtatcccacaatgagaaggtagaatagttagtccaatagtcggccttgtagattttatcatcgtgcccacggaactctccgttcacatcggcatacagtgtcggagcaatgaacatgtgatacaaactggtataaaaaatcttcttgccacgttcgtcaccgctctctacgttcacacacgacagcatgcgattccaacgtttttcggcatccgaacgaaccttctcaaagttccattcaggttgttccgctttcagattagccagagcattggcacaactgacggatgaaagggccaccttgagctgcaccttcttcggattgttccgaaaggtcagtacccctttcaccgcttcaccggaaaggctatctgatccgacagccgcatcatcgtcaaatacggccacactctcaatcggttgatcggacttcagcacaaaaaataccttgtgctgcggactccatcccttggaaaagcggtatccctcaaccgtatattcatccgtccgtttcaacgcagtcgcaaaagcacgatcgccgttgccttccttcaagttcaccaacagccggggtgttccttcggggtaagtatagcgatgaatggcgacacggtcggtagccgtcagttcggcacgcacgccattatccatcagcaacgaataataaccgggagcaacttcttcattctcgtgcgagtaataagtcgaacaggctcccttgatgttatcctgttcgccacgggcagtacggacatcgcctacataaggcatcagaagcacatcgcccaagtcggcacacccagtaccgctgaggtgcgtatgactgaatcctatcagtacactgtccgagtaatgatagcccgaacaccaatcccaacctttatgaatgttctgcggccccacctgcaccatgcccaaggggacactggcacctacaaatacatgtccgtgcccgcccgagccgatataaggatctacgtaacggaggtaatcggcaccagccgtactgttttctttttgcaaaacgcatgcggacggcagcacagccagcagtccacacagcaatatacctgtagtaaatgaaagtattctcatgacattatgtttgtttgaaggttttattcgttacagactgttcaataaatccagcttcccgtcattgattaacttgatgatcaactcaccgaacagtgtgttctgccaggcaaaccatttacgggtgaacttttcaggattgtccttatggaaagattcgtgcatgaaaccggtaccggcatcagttgtcatcagcatacggatacactgtttgatttcctcgtcgtcctgactggtgaaagctttcatcatgatgctcatgggccacaccatatcgtatccgatatgcggtcctccaatgccttcacccgcctttcctctgaagaaataaggattgtcctcgctccagacaaagcggcgtgtattctgatagacaggatcactgatatcgacatctcccagatagggtaaagccaacaggctgggaacattggcatcgtccatcagcatgcagctgccataaccgtctacctcgtaagcatagattgtaccatatttaggatgctcgcaggtggcatattttttcagagcctgctctacttcattggccagatccgtgcattgacgtgccagttccccattcttgttcacttccgtcagaatctcggccgctttccgcaaagaagtcacggcaaagaagttggacggaatgaggaaaggcagggtcgtagcatcgtccgacgggcggaaaatggagactatcaggccaaccggattggcaggggctccccaaccgtcgttaatggtagtatcggtagcacgttcggttttgcgctggaaacggtaaggtcccctatcctccttacgttgctgttccttaaaggtgcggagtacgttaccgatagccttcagccagttttcatcgaaaatactggcatcgcccgtcactttccaatagtgataggcaagccgtaacggatagcataaagagtctatctcccatttgcgctcgtgcagttcgggcttcatgtctgtacggtcggtctcccactgactgcccttgggaccgtcattgaaagcattggcgtaaggatcctgattaatgcacagaaactgacggcgaatgactccttcgagcatcgccttcaattgaggatcatcgttggcaaactgtacgtaaggccatacctgtgcacccgagtcgcgcagccacatggcatggatgtcgcccgtatagacaaaagtgtccggtttaccgtccagcatacggaagtgcacggtggtatccagtgtatttgggaaacagttctcgaacatccaggccagataaggattcttcagcaacgcttttatttccgcaattttcttttcgatgatatccgactgaaacagacgctcctccggcttgggacgttggctgatgtagcggccaacgttatcattcggtgccgtaaaagattcttccggaatttgttcaacggggcgggacatcccgtaacggttttcggctgcagcagtgcccgacaccagtcccgacagcatcagggcagcagccaatagtttttggttcatcatatattctatttacttatcttacttaagtttcgcaagtctcaacttattagttgacgaggcttcagttaacaagtctactaggctggaactcccggtttgacaaagtgctgcttgaaacggcttgctacaaacgccttgttaactcgtcaacttgttgcttatcaactgcaacttgagcttgcgaattgaaaatcgacgaagtcaaagttgaattatcttacttaactacaatttcatcggtaaacagccagcccatcacctcccgattcatgaatccctggaaacggacatatcgtacttttgcattgccttcccaccgatagttgcggaaggtaagccgttcctcggtaacagggacgtcggtcgcaatgcgcttcacctcatcgaagtggagaccatcctcggacaaagaaatcacgacctccttcggaagccatacttcaggaccacgcagttgcagaaagtccgcttccaccagcctgatatccgtcagtctacccagatcaatggttacgtccacatccttgcacaggaagccttgccagcgacggtcgccatacgtccagcctccacgccatccatcagtcagtgtagaatcgcccgaagccggataggccgatgagaaaggttgggcatacgtcaccggacaatgcaaggcaagatgttcgaccggctgcaaagactccggacgctcgcccacttctttctttaagtcgaaaggatgatagtcctgcgactgcaaccattccgtttccgtcaagacggatttccggaaacggatccagtctttccgttccggctctgtccacgccacttcggccaaggccagcaagcgcggataaatcatatattcggcatgttcggcagtgggaatatactcggtccagacattagcctgtactcctttaatgaaccgacgctgctcactgctcagttcggcaggaactggattgtaggaatatactttctccaaagtcagataaccgccaatcgcttcgggctgtgaaacaggagcatcctgataggcgtccaaatagcagaactcgccgggagtcatgacaacatcgtggccagccttggcagccgtaatgcctccctgctcgccccgccacgacattactgtagcactcggagccagcccaccttccagaatctcgtcccatcctatcagtttacggccgtgactgttcaggaacttctctacgcgatgaatcagatagctttgcaattctttctcgtctttcagtccttccttacggatacggttctgacacttcgggcacttctcccaactgcttttggctgcttcatccccaccaatatgaatatactccgaagggaaaagctccatcacttccagcaacacgttctccagaaaagtaaatgtttcttcgttgccaatgcatagttcaccgttctgataaggcttgcccgagcaggacaactgaggaaagacgaccagtacttcttccgagtgtccaggcatctcgatttccggaatgacggtaatgtgcagtttgcgtgcatgttccacaatctcgcgtacgtcgtcttgcgtataatatccaccttcggcatcggcctcatcccgacggcaatatttacgtcctcccctccaccaggctttccagttgggataaggacgataggcagtctgttccgtcagctgaggataacgtttgatttccagacgccagcccgcaccgtcggtcaggtgccagtggaaacggttcagcttgtaacgggccatggcgtcgagctgcttcatcacaaactctttcgaacggaaatgacgagatacgtcaagatgcagaccacggtaatcgaaacggggatagtcactgatgtctacataaggtaaactccaactaccttcttcaggcccttcctctgccagttgcaacagggattgaaaggcatagaaaagtcctgtcgcagtaacagcctcaacatgtaccccgtcgcggcctacagctaaggtatacccttcggcagaagctatacccggaatagaatctgtcagttcgaaacagaaaggtgcctgctcatcctccgacatctgcagcccgaacggggaagctccaagcacagtagccagatcggagcgttcagttcctttcagattggtagtaaactgttcgccaaaagaaaatgtgtacatgccagaatgtaccttatacatctggggttgaggaatgagagctaacggggaagtggacacatgcccacatccggcaaccaatgccatcaagacagtcaaaagggaaatcaaacggattttcatagcctaaaagtattaaatcttcttcggccgcctaaattagcaaaaatatttttaaatcaaagatttaaccgacaaagaaaaacaaagccatcgaaaacagctccgtccccgtctaatacagattacctaactttgtccggtagctggcagcaacgctctgctgaaccgacaatggaaactcatcgttccaaacagatttctgcatagcggtatcggacaactcagcccaatgggaagcgggcaaagaatagttaccatagaccggcaaagccacaggagccttacccgacctgcgggaaatataaagagctccccccacaacaagcaacaacgccatgccggcagccaagatccggtaacgcctcaagaagacagacttttcctgcacactgcgggacacctccagtgccgaagcataacgttctgccggcttacgacgcgtacatctccgcgaaacagcagccaactttttgtccttcaggctttcggccatctcgccaatgattatgcccaacgaataaatatcggcacgcaggtcaagaggctgtccaagtttcagggcttcaggagccaagtaatagcgggtaccggcaggaagcttcaacgcatcgtaatcgtcacagtcggacaagccgaaatcgatcaattttacattatgaccattatgagtcaccagtatattttccggtttcaagtctcggtgtacaatctgtttcccgtgcagataatgaagcgcactgcaaagttcggttataaacttacgcgccagttccggtgtcagcagaccacgctgcataacttccttcagcgtaattccgtcaatgtactccagcacaatgcaatgtcccagctccggtaaggtttcccagcctaaggctctgcagatatgagggtgctccagttgataaccgatatcgaattctttccgcaacgcctgttcatagaaatcgctgccaatgtattcgggcttcaacgctttcaaaatatgcaagcgattataacgctgacaacggaacagacgtgcataacccgacacggacacatacacctccgtcagattcgaaaagctctgttcgcccgactgaacgtcagcatcgataaatccggacgaaacttcattctctgccattggccagcccatttaataatgtcaatccaccgttacgccctgcgatgaaaggcgaaagcttcacaccgtcgcgcaatacgtaaggcaggaaaagcggttgtcccatcaggaaagagactgcttcgaaacggtcacccaccaacaatttagactgccgggcttcctttacttcgaacaaatcgcctccttcgtagtacagacgcagataacgattaggcgaccatccgatctccaactccgaaccgggtgacaactcgcgggtcacgatctgatgagccgagaaaaacgatgaattataaaccggactattcttcagccatgcgcaaaactgcttgaaattggaatgccccacatagcgtgccaaaacatccaatgtacgcatacgaggcaaatgagaatcacccacataaccccacaaacgtttcaaggtagatgtcgagaccaaatcgtccacctgctgcttcagatgtagagaaaactcatcgaaatcggtcgaagtctgcaacggcttctgatatgtcttctccacctgtaataacaattctgcaatttccggtttatatatattcatttttgtcttgcattatttaacgagacaaacttacggaaaaatcttcatttataacacctccacaacaaaaaatgccaattaaaagttgaatgtgcatctgttaaatctgcgtcattgagctgtctttctctgttttgtctcccaaaaaatcttatctttgcacacaccgaaaccgtgcgacaaaggcagttataccgccggtcggcacgaagcccgacgaaatcaaaccaatactataacaatatgaaacatctaaatcttttgcttatggcagcaaccatgacgtgtggagcatgcggaagtatccaaaacagcgatacaccggatgcagaagacctcatccagcgttcggacatccgtatcgaaaaccgccgtatgacacccgaagccctatgggccatgggacgcatcggaagcgtggcaccctcgcccgacggtaagcagatagcctatgccgtcacttactacagcgtaccgcaaaacaagagtaacagcgaactgtttgtcatgaacgccgacggcagcgccaacacgcaaatcacccatagtgccttgcgcgaaaaccaacccgcctggataaaaggcggtcaaaaactggcctacctcagcaccgaaagcggaagcagccaggtatgggaaatgaatcccgacggaagcggaaagcaacaactgaccaactacgatggcgatatagaaggtttctccttcagccccgacggtaaaaagctgcttttcattgcccaggtgaaaacagtgcaaagcaccaaagacaaatatcccgacctggataagacaacaggtatcatcgtcaccgacctcatgtacaagcattgggacgaatgggtaaccactgccccacatcccttcgtagccgacttcgacggttcggccatcagcaacgtgacagacatcctgcaaggcgaaccttacgaaagcccgatgaaaccttttggcggtatcgaacagctcgcctggagccccgacagcaaggaagtggcctatacctgccgtaagaagacaggactggaatatgccatttccaccaactcagacatctacatctacgacctggccagtaaacagacacgtaacatcaccgaagagaacaaaggatacgacaccaatccgcaatactctcccgacggcaaatacattgcctggcaaagcatggagcgcgacggctacgaggccgactggaaccgccttttcgtgatggaccgccagacgggcgagaaacgtttcctgagcaagggcttcccctcgaacgtggatgctttcttatggaacagcgattcgcagagcatcttcttcaccggtgtgtggcacggtatgactcctatctataacgtaagtctgaagccggacggctggatttaccagctgaccaacggcctgtacgactacggcagcatcgccctgtgcggcaaggacctcatcgccacccgccactccatgagcgaaggcgacgaaatctatgccattaccgacctggacagcaagcctttcccagtaagcttcttcatggagggcggcccggagcggttcagcagcacggacagcatccgtcccgactaccccgtcaagcaactcacccacgaaaaccagcacatctacgaccaactggacatgggccgcgtagagggacgctggatgaagaccaccgacggcaaacagatgctgacatgggtcatctatccgcccaagttcgatcctaacaagaaatatcccaccctgctgttctgcgaaggcggaccgcaaagccccgtcagccagttctggagctaccgctggaacttccagatcatggcagccaacgattacatcatcgtagcccccaaccgtcgcggcttgccgggattcggcgtcgaatggaacgaagccatcagcggcgattacggtggtcagtgcatgaaggactactttaccgctatcgacgaaatggccaaagagccgtttgtcgacaaggaccgtttaggatgcgtaggagccagcttcggaggattctccgtctattggttggccggccaccacgacaaacgcttcaaagccttcattgcccacgacggcatcttcaacatggaaatgcaatacctggagacagaagaaaaatggtttgccaactgggatatgggcggcgcatactgggaaaaagacaacgccacagctcagcgcacctttgccaattcgcctcataaatttgttgacaagtgggagacgcctattctctgcatccatggcgaaaaagactaccgcattctggccaatcaggccatggcagccttcgatgccgccaagatgcgtggcgtaccagccgaacttcttatctatcccgacgaaaatcactgggtgctgaaaccacagaacggtgtgctgtggcagcgcgtattcttcgaatggctggatagatggttgaagaaatgataatgaattatgaatatagaattctgttcaaaatccataactaacttttaacatttcaactgctttcttcccttgatgaaagcagacataaaccaataacggttattcaacacacaaagtccctctttagaaagctaaagagggactttacgttcttaaagaaggatattatggctatcaatattgcatagctttttatcctgcatcatattgttttcacaacagcattgctttccctatcacacaatacagcttgtgcttccccctacattttatcctttttcaccgaaaatgccttcacgctttcaactccttgcaaatggctcgttataagggatttccggtgaaagctatgtttcaaaaacaaattcacctttctaattcaggaaaacacaactgtttgcgaatacccaacaattgtgaaaggtatgtttcactatattcttctgtttatcaatgcaatgaaagcaataaagcggtaaaagtaatttcaggaaacaaagttcaaagggcagtgaaacttatacgttctctttcagacaacaactaatcacctttcaccgacatcatatggacattttcactcacttgcaaggctaacgaaccacacaagtgtcccacgcgagaaacacaagtgcggctcgtcttccacactggtgtctctcgcgagccatgcaagtgcggaagagaacgcgtagatgcaatcactatttcaacccaaacaggcagaaataaaaaatcccccgttaaaggacgagggaacctaatgttttcacaacggaataatccttattgtgagttgcttcaaattagtatggcaaatatacaaagaaaaaagcatttagcaagtgatttctcatttatttttgtagatttgtggcagatataaagatttccattaccatgaaaagaatattagggttagatttaggtaccaatagtattggttgggctttggtcaatgaagcagaaaacaccgatgaaaaatcctccattgtaaaattgggagtaagagtcaatccactgacagttgacgaacaaaaaaattttgaaataggaaaaagtattcctaccaatgctgccagaacattaaaacggaatgcacgccgcaatctccagcgatataaattgcgaagagattatcttataaaatgcttgagagaatatggttggatagattcagataccatgctatatgagtggggtaatcatacaacttttgagacctaccgtttgcgagcaaaagctgttactgaagaaatttctttggaagaattagggcgagttctgctcatgatcaacaagaaacgtggctacaaaagttgtaggaaagttaagtcttctgatgagggacaacttattgacagcatggaaatagctatggatttgtatcataatgatatgacacctggcgaatatgtttattccttactttccaaagggaaaaaatatgtgccagccttttatcgttcagatttattaaatgaattcgacagaatatggaattgtcaaagtgtttactatccagacattttaactcctcaattcaaagaacttgtacgtggaaagaacgctcaaggaacatctaaactttttaagcaacaatacaatctctttacagccgacaataaggaaaaagacaaacggctacaggcctatcgcagacgcatcgatgccttaaagaaacgtcttgatatcgaagatgtggcagctgccttatgcgatgtcaataaagatgttaatgcatccagcggttatttaggagccatcagtgaccgcagcaaaaaactgtttttcaacaagcaaactgtagggcagttcttgatgtcagagctggataaagattctcatttcagtgtaaaaaatgaagtattttatcgtcaggattatctaaatgaatttgaggcaatttgggaaaggcaggccctgtatcatcctgaacttacgaaagacaggaagaaaatgttgcgtgatgttattatcttctaccaacgtccgttaaagagccagaaagaattggtagcctgttgtgagttagaaaaacattgtatcgaagtaataaaagatggaaaaacccgctctatagagataggagccaaagtttgtcccaagtcgtctcctttattccaagaattcaaaatttggcatgtcctcaacaatctgaaagtgaaagataagactactggcgacgaacgctttctggagttggatgaaaaggaaactttattttcagaacttacaatcaaaagcaagctatctaagacggaagccttaaagttactttatcaaaaaccgaaaggattagacttaaattatgatagcattgaaggaaatgtaacacaagcaaccttgtttactgcttttcagaccattattgccatgactggtcatggcgaatatgttttctccaaaatgccatcctcggaagtaatgtctattgtcgaaggactgtttgaagggcttggctttaatacttctgttttgcactttgattctggacttgagggtaaagcacttgaaaagcaggatgcttaccgtttatggcacttactctattcgtatgaaggagataattctgtaacaggcacagacggactagtgtcaaaaatagcaaatttattgcattgcgagaaagaatatgctaaagtattgtctggcattactttccagccggattatggtaacctaagtgctaaagccatccgccggattttgccacacatgcgtgcaggaaacgaatatagcttatcttgcgaatatgctgggtacaaacattcaagacgttcgctgactaaagaggaattagaacagaaaatctttaaaaaccatcttgaacttctaccccgcaacagccttcgtaatcccgttgtcgagaaaatccttaatcagatgattaatgtggtcaatgcagtaatcaatgaatatggcaaacccgacgaaatccgtatagaaatggcgcgtgaattgaagaaaagcgctaaggaacgtgaagaaatgacagctgctatcaacaaagctacttcagaacatgaacgaataaaagaaatcctgaataaagagttcggaatccaacatgtaagccgtaatgatattgtacgctacaaactatattgtgaactgaagaacaatggatataaaactttatattcagacacttatattcctcgggaaaaacttttcagcaaggaagtggatattgaacatatactcccacaagcccgtctatttgatgattctttctccaacaaaacattagaataccgctcgattaacattgagaagagcaatcaaacggcttgggattatgtcgtgactaagcgaggggaaaatggagctgcacaatataagaagcgagttgacgaactcttgatagtaggtgctattagtaaatccaagcatgataaactgctaatgaaacaagaagatatccctaaagattttatcaatcgtgatttgcgggacacacaatatattgcccgcaaagcacgtgaaatactagaagatatagtacccatagtcgtttctactacaggtgcagtgaccgaccgcttacgcgaggattggcaactggtggacgtcatgcaagaactaaattggaataaatacgcccaacaaggtctaacagaagaatggaacgataaagacggacgaaaaattcggcgtatcaaggaatggaccaaacgtaacgaccaccgtcaccatgcgatggatgcactaaccatcgcctttaccaaacatagttttattcaatatctgaacaacctgaatgcacgtagcgacaaatcgggaagtatatatgccatcgaacagaaagaactttatagagacagccatggcaaattacgtttcgtaatgccttttgagggatttagaaacgaggctaaacgccagttggaaaatatcttagtttcaatcaaagcaaaaaataaggtggttacccgcaatgtcaacaaggctcgtaggggaagtggacatcaggctaaagtacaacttactccgcgcggacaactgcacaacgagaccatttatggctctatacatcgatatgtgacgaagttggagaaagtgggcggaaactttaatagtgaacaaattgccaaagtggcaaacctccgttatcgggaggcgttacaggcaaggctcgaagcatttggaggcgatgctaagaaagcctttacaggtaagaacgcattggacaaaaatcccctttatttgaagaatactcgaacagaagtacctttaaaagtaaaaacggttgtaacagaaacactctacaccattcgtaaagcggtggcacctgatttaaatgtagataaagtaattgatgcgaaggtacggaaagtattggaaaaacgcctgcaagagtatggaggtgatccgaagaaagcatttgttaatctcgatgagaatcctatttacctgaataaagtcaaaggcattaccatcaaacgtgttgcaattacgggagttagcaatgccattgcactacatgataagaaaaatgtaggtggacatataatgcttgatgcttccggcagaaagcaacctgtcgatttcgtaaataccggcaacaatcatcatgtagccatatatcgcgatacagaaggcaatttacaggaagttgtcgtttctttctacgaagccgtagcaagaacttctttgggattacctgttatagatagggaatatcgtaaggaagatggatggcagttcttgttcacaatgaagcagaatgagtattttgtcttccctaatcctgtgacaggtttcaatcccgaagaaatagatttgactgatgaaagtaattacgccttgataagtccaaacctatttagagtacagaagtttactatcaaagattattttttcagacaccatttggagacaacagttgaagatgcggcctctttacgtgatattacatggaaaagaatacgagctactaactatctaaataacattataaaagtccgtgtcaatcacattggacggattgtatctgtaggtgaatattaaatatgatcaagaaaacattgtattttggcaatccagcctacttatctttacgtaacgagcagcttgttatcaaattacccgaagtagaagtcgattctgacatacccgatacactgaaacgacaggcagaagtaaccaaacctatagaggacatcggtgtagtagtactcgaccatcgccgtataacattgacaacaggtgtactggaagcgttgttggccaattcgtgtgccgtcatcacctgcgaccgacagagcatgcctgtgggattgcttctgcctttgtgcgggcataccacacaaaacgaacgtttccgcaagcaactcgatgcttctctaccattgaaaaaacagttgtggcaacaaactatcagggcaaagatcaacaaccaggcttctgttctgtccagccatgctgccatagaagtaaagtgcatgcgtgtttgggcagaaagcgtaaaaagcggtgataccgacaatatggaagccagagcagctgcctattattggaaaaacctttttcctcaaatcgaaggttttgtaagggcacgcgacggagttcctcccaatcatttgctgaactacggctatgctatattacgcgctatcgtggcgcgttcgctggtgattagcggtttgctgcctacgctgggcattcatcatcacaaccgttacaacgcctattgcttggctgacgacatcatggaaccatatcgtccgtatgtagacgaacttgtgtgtcaattaatagttgaatttggagtacagaccgaattgaccaaaaacctaaagactcgcttgttatccattcccacattggatgtcttcatagaaggcaaacgaagtccgttgatggtagccgtaagtcaaactacctcttcgttatacaagtgcttcgacggtgaattgaggcggataacttatccagagaaatgacaacccgaatcagtgaatatcgagttatgtgggtactggtattgtttgatttgcctaccgaaacgaaaaaagaccgaaaggctgctactgattttcggaacaaattacagaaagatggcttcaccatgtttcagttttctatttatattcgtcattgtgcgagctccgaaaatgcggatgttcacatcaaacgagtaaaatcatttttgccagagtatggtaaagtcggtattctttgtattaccgacaagcagtttggtaatcttgagttgttttttggcaagaaacctcagcctgtaaacactcctggtcagcaattagaacttttttgaaaacaaataatcccactttcggtgggattatttgtttttggagagcttcttttttatttctaaactcctttgcaaatcattgttatacaaacaattgtgaatagtctgttgtctccaatggttcaaagatactaatttgaaagcaaatcacaaccagcgcgcgccgctataccccaatgtcgctgttgtctccaatggttcaaagatactaatttgaaagcaaatcacaactgaaaagaagctcttgctttagatagtttcgttgtctccaatggttcaaagatactaatttgaaagcaaatcacaacaaatgagcgggtccgtattcaccacaggcagttgtctccaatggttcaaagatactaatttgaaagcaaatcacaacgaccttgcatcaggcacgtcttcagcagtgttgtctccaatggttcaaagatactaatttgaaagcaaatcacaacattaagcattacctggttagtcccttttatgttgtctccaatggttcaaagatactaatttgaaagcaaatcacaacgtactgaacgcgtattgtattcgactgatggttgtctccaatggttcaaagatactaatttgaaagcaaatcacaactggctcattacgcctgtgtttattactgttgttgtctccaatggttcaaagatactaatttgaaagcaaatcacaacgacctttctactaaacgcaattttactgcagttgtctccaatggttcaaagatactaatttgaaagcaaatcacaacttcgtgacttctttgcagtcctcgaatatgttgtctccaatggttcaaagatactaatttgaaagcaaatcacaacgatttgtcaacaaaaagaaactttactgcagttgtctccaatggttcaaagatactaatttgaaagcaaatcacaactcacagctttaatgtccaagaaaacagaagttgtctccaatggttcaaagatactaatttgaaagcaaatcacaacactgttgggtgtgttaaagttttattaaagttgtctccaatggttcaaagatactaatttgaaagcaaatcacaacataaaactgagagttgttgaagagaatgaagttgtctccaatggttcaaagatactaatttgaaagcaaatcacaactcttgctccttttcgctgggcactctgccgttgtctccaatggttcaaagatactaatttgaaagcaaatcacaactcggatggcgaatgtacgcccgggacacctgttgtctccaatggttcaaagatactaatttgaaagcaaatcacaacaagggtgtacgcaaaagcgcagcagaagctgttgtctccaatggttcaaagatactaatttgaaagcaaatcacaacttcacttctggtactgtcaatgctgttattgttgtctccaatggttcaaagatactaatttgaaagcaaatcacaacccgagcaggcaggggcgcaaggtcggcgcggttgtctccaatggttcaaagatactaatttgaaagcaaatcacaactcttctgttgccgattgtgaaattacttcagttgtctccaatggttcaaagatactaatttgaaagcaaatcacaacagcagggcgagttattaaacgaatacctgtgttgtctccaatggttcaaagatactaatttgaaagcaaatcacaacaagaaaggttataatcaatgcaacaagatggttgtctccaatggttcaaagatactaatttgaaagcaaatcacaactacaagagaaggagttgaagataaatggtgttgtctccaatggttcaaagatactaatttgaaagcaaatcacaacatttcggagtaacgtgtcattttgtagtaggttgtctccaatggttcaaagatactaatttgaaagcaaatcacaactgtatgatattcattgctattttattaatgttgtctccaatggttcaaagatactaatttgaaagcaaatcacaaccttcttacttctatctgcttttctccggtgttgtctccaatggttcaaagatactaatttgaaagcaaatcacaacgaaatttgctatatgcttgattccagctggttgtctccaatggttcaaagatactaatttgaaagcaaatcacaactgaccgcgtaaattctttaagtgtaaaatgttgtctccaatggttcaaagatactaatttgaaagcaaatcacaacgataataccgaaaagcagattaccaagaaagttgtctccaatggttcaaagatactaatttgaaagcaaatcacaacataggtgacgttacccatgcttttacgtggttgtctccaatggttcaaagatactaatttgaaagcaaatcacaacgttgaacgattcatcaatcgactgaccgtggttgtctccaacggttcaaagatactaatttgaaagcaaatcacaacaaacttttccttccaaaacagcaagaagcgttgtctccaatagctcaaagatactaatttaaaaagcaacaaaaggaaaaaaacgattacccctctttcttataactgttcaaataaaactttttaaaagcttttgcatcttcgattaatccatatccgccacaccagtgacaataacgattaaataaaagagcttttagtgtgatcggtgtatcatccatcatgttaaactctgaaagcccagcagaaatatattcatcaagcatatcaccaagcatatcatctttattaatacttaacgtaatccatttctcttcataaaaccaaaatagatttttatccccatttttgtaagggttctcttcctcacctttataatacctacagaaaggtaaataattatttttttccatgctcaatatctaatgtttgataaagtttaaatataactaatttcattcatctggaagaatattcagacagctgttctttataatccaaaaatactaattcgaaacaattttactaccccaatttcaactaaaaaaacaaaagagattagttttcaattcctcaagccagaactcccccattttaccccttcattaaaatcccccatcctttctccccaccaaccacttcccctactttttcgattcgctcctaaaaaaacaagcgattatttttgcagttccaaataaaacagtacctttgcaccccgtaaaacgaaaagagattgccgatatagctcagttggtagagcaacgcattcgtaacgcgtaggtcgccggttcaagtccggctatcggctcgaaatgtagagaaagagatgtgaccgcatctcttttttttgtttcaagacgaaaagagagaaacgccacacttctttccaaagatttacgaacaaaaaatcgacgtattcagacttaaatgaaaaagaaacagaaaatgcttttgggaggactggcggccctggtcctcattggactggcatgtgccggaactgcttactacctgttactggctccccagtttcatccgtcgaaaaccagctatatctacatcgaccgcgacgacaatatcgactctgtctgccacaagctgaagacacaaggcaaagctgccaacctgtccggcttcaaactactggcacgctatagggaatacggccagcatatccgcaccggacgctatgccattcgccctgccgacaatgcataccacgtattcagccgactgtaccgtggttatcaggagcctatgaacctcaccatcggtagcgtcagaacactggatcgcctggcacgcaacgtaggcaaacaactcatgatagactctgccgaaatagccagtctgctgaacgacacgatgcttatccggcagtggggttatcagaaagagaccctgccctgtcttttcatccccgacacctatcaggtatattgggacatcagtgcggaacagttcgtagagcggatgcaaaaagagcacagccgcttctggaatgaggaaagaaaacaaaaggcgcaagccgcaggcatgacgcccgaagaggtatgcacactggcttccatcgtagaagaagagaccaacaacaacgccgaaaagcctaccgtagcaggactttacatcaaccgcctgcacaaagacatgcctttacaggccgatcctacagtcaaatttgccctgcaagacttccaactgaaacgaatcagcaacaagcacctgaccgtggattcgccgtacaacacgtatcgcaacatcggactgcctcccggaccgatacgcatccctactcctgtcggaatcgatgccgtgctgaattatgagaagcacgactacatctatatgtgtgccaaagaagacttctcggggacacacaacttcgcatccaactacacagaacacatgaaaaatgcacgcaaatactggaaagccctgaacgaaagaaagatttttaagtgattttgtgttcttatgtaaaagcaaaagcttatatttgcggttaactaaccgaaaaaacaaccacacaagtttcgcaagttctgcaaagcttgtagaagttaagaagctaaaggatggcatcgcctgcctgaagcaagacggtttcacagccacccattaacttcaaagactttaaattaatacctaaaaaagacagatatgagcaaacaacttttacttggcgacgaagccatagcacaagctgcactagatgccggactttcgggcgtttacgcctatccgggcactccgtctactgaaatcaccgaatacatacagatgatgcctataacggccgaacggaacatccacaaccggtggtgctccaacgaaaagacggccatggaagctgcactgggcatgtcgtttgccggaaaacggtcgctggtctgcatgaagcatgtaggaatgaacgtggcagccgactgtttcatcaatgcagccatgactggcgttaaaggcggaatgatagtcgtagcagccgacgaccccagcatgcactcttcgcaaaacgaacaggacagccgcttctacggcgactttgcactgatacctatattcgagcctagcagtcagcaggaggcctacgacatggcctacgaaggtttccgcttctccgaacagacgggcgaacctctgctgttgcgcatcgttacccgtctggcccattcgcgctcgggcgtagaacgcaaggaacaacaggctcagaacgaactagctttcagcgacgacccacgccagttcatcctgttgccgggaaatgcccgcaaacgctacaaagccctgctgcaacaacaggacgagtttgtaaaagcatccgaaaattctcccttcaacaaatacattgacggacccaataagaaactgggtatcgtagcttgtggcatcggctacaactacctgatggaaagctatcccgaaggctgcgaatatcccgtgctgaaaataggccagtacccgctgcccaaaaagcaactgacacagctgataaacgaatgcgaagagattctggtgctggaagacggacagccctttgtagaaaagcagctgaaaggttatctgggactgggcgtcaaagtgaaaggaagactggacggtacactgccgaccgacggcgaactgacccccgacagtgtggcacgtgccgtaggcaaggaaaacaaggctgaattcagtgttccgtcactggtagaaatgcgaccacccgcactgtgcgaaggctgcggacaccgcgacatgtacaccgtactgacacaggtgctgaaagaagaatatccttcgcacaaggtattcagcgacatcggttgctatacactgggagccaacgcccccttccacgccatcaactcgtgcgtagacatgggagcttctatcaccatggccaaaggagcggccgatgcaggattatatccatcggtagccgtcatcggtgactcgactttcactcactcgggcatgacaggtctgctggattgtgtcaacgagaatgccaacgtcaccatcgtcatctcggacaacgaaacaaccgccatgacgggtggacaggactctgccggaaccggacgtctggaagccatctgcgccggcattggtgtagcaccggaacacatccgcgtagtagtgcctctgaagaagaactacgaagaaatgaaacaagtgatacgcgaggaaattgaataccacggagtatcggtcatcatcccccgcagagagtgtatacagacattagcacgcaaaaaacgtaacaagtaaagccatgaaaaaagacatcatactttcgggcgtaggaggacaaggcatcctgtctatcgccaccgttatcggtaaagctgccctgaaaaagggcttgtatatgaaacaagccgaagtacacggcatgagccagcgcggaggagacgtacagtcgaacctgcgtatcagcgaccagcccatcgcatccgacctgattccgaccggcaagtgcgacctgatcatctcgctggagcctatggaagccttgcgctatctgccctacctgaatcacgaaggctggctggtgaccaatgcagttccctttgtcaacattcccaattaccccagcgaagaagccctcaaagccgaacttgacaagctgccgcacaaaattgtggtaaacgtcagcgagatagccaaggaagccggttcgccccgtgtggccaacatcgtgctgttgggagccactatccccttcctgggcatcgactacgctaccatgcaggaaagcgtacgcgaaatcttccagcgcaagggcgatgccattgtggaaatgaacctgaaagcactggcagcaggcaaagaaatagcagaaaaacttatacaatagaaccatgaatgacaagtactgggaagaagaaatcgaaaccatgccacgggaaaaactccgtgaattacaactgcaacgactaaagaaaacaataggcatcgcttcccatgccccttattacaagaaagtgttccaggagcacggcatcacgccagacagcattcaaagcctggaagacatacgcaagataccgttcactaccaaagccgatatgcgtgccaactatcctttcggactggtagcaggcaacatgcgcgaagacggagtacgcatccactcgtccagtggtacgaccggtacccctaccgtcatcgtacactcacaacacgatttggattcgtgggccaatctggtagctcgctgcctctacatggtaggcatccgcaaaaccgatgttttccagaacagttcgggctacggcatgtttaccggcggactgggcttccagtacggagccgaacgtttaggagcgctgacagtgccggctgctgcaggaaacagcaagcgtcagatcaagttcattacagacttcaagacaactgccctgcacgccatccccagctatgccatccgtctggccgaagtgttccaggaagaaggcatggatcccacccagacaagcctgaaaacccttgtcattggtgcggagcctcataccgacgaacaacgcaagaaaatagagcgcatgctgggcgtaaaggcctacaacagttttggtatgacggaaatgaacggtccgggcgtagccttcgagtgtaccgagcagaacggtatgcacttttgggaagactgctacctggtagaaattatcaatcccgaaacaggcgaaccagtgcccgatggcgaaattggtgaactggtgctgactaccctcgaccgtgaaatgatgccactgatacgctaccgtacgcgcgacctgacacgcatcctgcccggtacgtgtccctgcggacgtacacacctgcgtattgaccgcatcaaaggacgtagcgatgacatgttcatcatcaagggagtaaacatcttcccgatgcaggtggaaaagattctggtacagttcccgcagctgggaagcaactacctcatcaccctggaaacagtggacaatcaggacgaaatgattgtagaggtagaactcagcgacttgtcgaccgacaattacatcgaactggaaaagatacgcaaggacatcacccgccagctgaaagacgaaatactggtcacccccaaggtgaaactggtaaaaaaaggctcattgcctcagagcgaaggaaaagctgtccgggtaagagacttgcgcgacaacaaagaaaagtaagtaattccccccccaatttttccccagttaggaaaaaattttttcctaactggggaatttttattccctaactgggaaaaaacagagcctagttagggcctatttctacctgaaaaagcgggccagaatgatcctgaaacgaacgaaaagaaaagggaatgcgccaacctgacacattcccttttttataagaaagccgcaccgatgatgtgatgaaactccgaatgacatggtttgagtgctcgtcctctttgtaatccaccgactcaaaggttaccccgaagggcgtggcccgccattgagaagcgaagcttgtctcggtatttcataaaaattgatgagtttcccgatccaatcaatgcggctattttttctataacaaagataagaagtttatgtgaaagaaacaagcaattgaacaaatttgtgcgtttcagcccctcttttctctcgtataggcataaaaaaagatgccagctacatcatctgcagtcagcatcctatcagtttttcaatttatcagagtctttatgcagccttagccttggcaacaatagccttgaatgcttcgggatgattcattgccaaatcggccaacaccttacggttgatttcga

SEQ ID NO: 2269 - DNA, 24113 bp, synthetic construct
  source 1..24113: mol_type = other DNA
  misc_feature 1..24113: note = Synthetic
gacagacaaattacaatattcaaaataaagacgctgaaataatcggatttttctcaactgaacataaaggaattttcacccatcacgactcatttttacatatgcacttgattacaaaagacgaaagtaaaatggtacatttagacaagttagaaatcggaaaaatgaaattatatctaccaaaaaaataaaaactaccaccaacagcgtataaaattaattgctaattctagcctatttacgaactttagtgcttaggtacgcaacgaaataatatgttatgttataacgttagtgtaaattggatgaaaaacctgataatcatattgatttttgtaattagctttaatagtgttaatgcataaacgactgaattaaaagaaagtcttgttaaagaaattgactctatttccttcaatagtaatggtttttataattatcgagaaattattctattaaataatgaagaacttattagaatagaaaattacataagtgactatggaggtaaaagcacttttaaaaaacactatggaaaatatattctcacagattcaattctgacaggcgaaccagagagaattgaattgaaaacctatatagtcaaaagattcgattaaaaagtattattactgacgatttccaaaaataataaaagtcagcaggcaacaataaataacacaaattgcggaatatctttcaaaaacggtatttttgaataccgttaaagtaaagtaattaacggacagattcgagtttacatgccagcaaattgagttattcaagccgttgcaagaagctagatgacaagcattaatagaagactaaaacaaactaccaagatgtacatcattctaaaatccctatttactatttatttggctattgcaataataagtcccttacaggctcaagattgccagtgtattgaagcttatgaaaaagcggtaaatgcatatgaagaaaattattcattgtttatttacaaagtaacaaccgaaaacagagatctatatgaggcacacaagactttacttcgagacaaggcaaatgaaaccacaaatttaagagattgtaaagcggttcttgagcagtatcttcaattcttcagagatgagcataactatattattgattctggcaaccaagccattgacccctatattgagaatgtagagctaactgaaaagcaattcaaaaaaaattataaaaaagagtcgtataatctcaatccgcttttggggatttggaaaagaggtagctatacgattgcaattatgccaagtaataataatagtaaaccgaaaagagattttgttggagttgtattagaaagcagcaatacaaattggcaaaaaggacaagttaaattagaactttattcaaattttggtacctcctatcaaataaattatatgatgggtaatcacagcattcaaaaaacttctggaaatcaaacaagtataggtatacttaatatcgaaaaaataggtgaatgggaaaaactttggcctgaagttaaaaagaagaagcctagtgaaatagaacgtaaattcgatcagtttcatctcagttacatcgatgagataccctatctgagattaccggatttttattctgtagaaccagcttacgtagatagtataatgaaagcaaatcacgacagaattttgaaatctgattttatggtggtcgatatacgtggaaataccggtggaagcgatgcaacgtatttcccggttcttccttaccttttaatgggacctatcaccttacctttcaacgggttttggcttagtgaggaaaacaccgaatatctaataaatgcatttgcagcctctaatgagttgactgtggaagaatacgcggtacaagaaaaagaagaatatgagatgtttataaaaaataaggggaccgcttattttaaaggaacaggaacctggacttttaccacagataccatttacaacggtcctaaaaaagtgattgtgctaattgatgaagaggtatatagctctggtgaaacttttgtatatcgtgtaaatcaaagtgacaaagttgtcgtttatggacaaaatactgccggtgttgtagatggatttaacggctttcatttagacttaggttgttttacagcagtttaccctacctcctaccgcgcacccgatattaaagaaaatcctattgatccttacggtattgcaccggatgtttatgtaagtgagaaagaagatgtactggcttatgcgataaaacatatgactcaattacttaaaaacgttagttcacaacagaaacataattaagtcagttgctaacaatttatataataaataactgcttctgctttaaactgaaaattcaagtatatttagtaagtcatattatgaaagaataattcgtaattcttctctaatcgtcatataaaactgaaccgaaaatgaagaatttacttttaacattattgactattttaaccatttcttgtaattcacaattaaagaaagcagaaaaggttgaaattgaaaatgtaaaagaacaagagaacacttcgcaaatcggacaatatgtagtcgaaacatttcaagactcgaaaggaaatctgtggtttggaacgttagaaaaaggggttgcgaaatatgataataataaattgacttatttaacaacaaaagacggattgccaagtaaccgaatcacaaacattattgaagataaggaaggaaacttatggtttggaacaggttcaggaatatcaaaatttgacggaaaaacgttcaccaattattctgaaacagacggactttgtagcgatatggtaagtaatttatttatcgatagtaaaggaatcttttggattggaacctggagcggagtttgcaagtttgatggaactctatttgaagaattcctaattccttatccaaaaatagaaacaaaaatcaatcctgacaccaaagattggataacatctatcgctgaagatacgaaagggaacatttggtttggaagggatggttacggagcgagtaaatttgacggaaactcatttgttcatttcactataaaagagggtttgaattcaaataatgttcaatccattgcagaagataaagaaggaaatatttggattggaaccagagtggcagagaaagacaacgctaatactgagaaccgaattggaaaaggaggattgaataaaattgaaagcaataccatcgttcatttctctgaaattagcggcctgagtgaaaatgacgtttacacaatttacaaagacagttcaaaccaattatggattagtacaacaagcaacggggtttataattataaaaacaacaagttcgtaaattttgaggttccaacttctacaatgagttttttgaaagatagaacagggaatatatggttgggctgtgctggcggactctataaaattgacaaacaaggaaaaacaatcaacgtaacgacaaatggcccgtggaaataaaaaatagtaggtatgtaaaaggaaaagttatcatttcaattggtgttcttgagtgatttctcctaagatttcaagctttcaaatgataaaaacagctaaagaaatgcctacctttgccaaatgccttttaaaaagttacaccccgaattaacagaaaaattagcgcagctggatatggaaacccctattccactacaacgcaaaagtattccggtgattaaaagcggaatgaatctatattgcacagcgcctaaagatgccggaaaaaccaccacgcttattttaaccaccttacataaattgaaatgtgaagcggttggtgatgccccgcgagcaattgttttagtagaaaacaaagagaaagccctagaaattcaggatcggtttacggtctatacgcggcatacttccatccgaacatatgtagcttacgaaaaaatgcatatcgatttgcagaaatcggaaattttagaaggcatagatattcttatttcgacccctaaaaatctaaataggttatttttattaaacggagtacataccgcacaagtaaaaatcttcagcattgatgatgccgattttttaagtcagcaatcggcttacgcggctttattatcaataactcaaagtatgatgaaatgtcaatatgtaatttatgccgaagaaatgaatgcgagattaaagcgttatgaccgctattttatggaatattctaaaaaaatcagtctttcctaatcctttaggaactggataaattataagatatgttgctggtatgatcgctaaattacattatttaacccaaggaaatgctccacaagaacatctcgaccacctacaaaaagcttgtacttcgggagcggaatggatacaattgcgcttgaaccgctttagtgataaaaaagtattgaagtatgccgaagaagctcgagaaattaccgcacattttcaaacgcggcttattctacaagatcattataaaatcgccaagcaaatcaaagccgatggggtgcatttagaaaataccatcgctagcccaagttcggtaagaaaacacttatatccttggcaattgatgggcgctacggcacaccaactagcggatgtcgaaaatttactgactcaagaattggattacttgtatataggtccgtttaaaaatacgaatcacgatagtccggtaaaacctttagccctcaaaggctataccttgattctagaagctttatctaccgccacgcccctattttcttttggagaaattcagctggaagacgtcaacgaaattttagccaccggaatatcaggacttgcaatagacaaagcgattaccaacgattttaattcgattcggacttttcacgaactgctgcaagcctcttctacccaagaacagcgacatagcttttaaagaacttcgacctccttctaataaaaaccaatgaagaaacttcgaggggttctaaacgatctcgcaggctgtttagcttgataaccccgaaatccaattcttatgcttgttcctgtgtacgtttagattttcggtataaataattcggataaatagcacgttttgcaaaacggtttaatttattgctttggatcatctttagatagataggtttggtcactccaaaaaattcgtaggtagaaccatctaagtaagtcacttctaacaataaacctctatgctgataatcggcaatacccgaggcaatggcggcggtatattccggtaaattggcagctttggtttcgggagcaatacttactaaaaagtgatacccatcaataatcttacgactttgaatttccgcttcggcttgttgtgcatctccttgctgaaatttatcgggatgccattcttttaccaaattacggtaactcttttttaaagctttgagctcaatagcttgatccactccaaacagctttttatattcatgaatacgtttcatatctttattggtgccaccaaagggtttaataccccgaagctttcctcccaggtagtttattttaaatcaaggcgcgaaagtaatactaatttaactattaaagtcgttaaaagaacgaaattgctttttttatagatgacgctatgaataatttgcatagctgcgctaaggaaattgtgaataaggaaatatatggaaaaatgaatgagctatatggtgtcatttgatggttaaattggtataagccttatttccatagcattcacaaaactagtttgatatttatattaatatcatttttagcctccccaagcgcgttaaaaccgacttatcgcttaatggtttttaaataaagctcttctactttggtccttgcccaatcggttctccgtaaaaacttaaggctggattttatggaaggattagatttaaagcaattgatgttgatatgtgctgccaaaccttcccagccataataatcttgcaaatagttcagcatatcggcgagtttaacaccgtgtagtggattgttaggttgtgccatggaattgatgtaagtaaaataatgttgacataaataagtttttggcaaagataatgagacttttatgcagaataccatagtgaagccaggtatttattattggcaagcaagccataatcgaaatgtcatgcagtactgtcacttcgagtgattttaacagagcgacagcaaggctaaaattgtatcgagaagtcgtttagtttacagtgtcatttcgacgaaaggagaaatcttttcaactttaataaagatcaccccttcttttccattgccgaaaagaagtaaacctgcctgccgaaaagaagcaaaagtctaggctgacgaaaaaagcataagaaaatactacggaacccaccgccacgaatgaaaataactcaacctctctttcggtcggtctcaaacaaattttcatcccataccctcgctgcttccttgagttttaatccttttttcgataggccagggttaaaaataaatttgcttgtcattccgggcttgatccgggatctcatcaaattaatagtattgtaaaagatattatttcgaactggcaaaaaggcaaaacaaagaacagatgtaactttgcgtgattttaaataagcggtagtgagggtgaaattgtatcgagaagtcgtttagtttaaagtattcagtaaacagaatttttccagttctagttcaatttgcttttagattatagtaaaaacgtatacgttaatcaattgattccgaatttctaaattgatccaactgatcttgcttaaatactaaggttcggtgtgggaaaggaatttccaccccttccgcatcaaatcgtttttttatactttcgtaaagctcacatttcatcacaaaggcagaagcataatcccaggcccaagcccaagcacgaatagtcaccgaagaatcccccaaattaataacgcgaacaattaccaacggaactccatttttaagttcttgatgggtgcgattatcaaaaaggttggggtgtgcttcgcactcttctttcataatacgcttagccagatcgatatcgctatcgtaggagatccctagttctatccactgacaaatctttttctcttccagatcataattcgtaaccttctccttattaataattgcatttggaataacaatcattttgttctggtaatttctaattaccgtatgccgaagcgtaatatcggtaaccgtacctactaaagtatctgtaattttaatcacattccctacccgaaaaggcttaaatgaaatgatgaatatacctcctataatatttgccagcgcttcttgagaagcaatcccaatcacaacggctaagattcccgctcctccaagcgccgtttgtgccactcctcgtaaggcaggaaaggctaaggtagctagaatagctccaaaaaaataaacgccaaatacacttaagtagcgtaaaaacttatagctggtgggatcaccgtcagcggctatcgttttctttatgattcgtgaaaataaagtttctacaatacttgcgccaataatggtaaaaactaatacaaaaccaacatagactataagttcaaaatttttggtggcgacagcatatttatctttagaaataaatacaaaacttaaagctgctaaacctagaataacccataaggtattgagtatacgtttgaccaatcttattgtagtaggtttctcgtttggatatttttttgctgctttttttaccagccacctgtatagcaatttagtaaaaagcaacagcaacagcacaacgcctattactataagagcgtatataattgcatcgctatacgtattccaaaagttggtcatcataattttatcttgataaagcgaattttgatattcaaattagtttttgcaaagataaccagcccttcccggagaatagcattacctatatataatttctgaaaaaattgaggttaagcgatagtaaaactctaaattgaatgcatacctgtcacttcgagtggttttagctgagcggtagtgaaggtgaaattgtatcgagaaatcatttaatttacagtgttcaataagctgtattttcaatttcgacttcaagtttaaaatcatcaattactattatcctattccctatctactacttcctacttcaccttgtcatttcgacgaaaggagaaatcttttcaacttcaatatatatcatcccttcttttccattgccgaaaagaagcaaaagtctaggctgacgagaaaagcataagaaaatactacggaacccaccgccacgaatgaaaataactcaacctctctttcggtcggtctcaaacagattttcatcccatatcctcgctgcttccttgatttttaatccttttctcgataggccggtttcttcctaatcatataccagttaattaaagatggaaatttaaaatatacgctatgcctctaccacgtaactgataacaaaagtggcacgttaacgctgagcaattaaaatgttttaactgtaaaaaattttgggttaagatcagaaattattcggaagttttctgaaacaattgataagcttcatctaaaaactccccttcttcaaagggtaaaaggtctctggccaattctaagcattttccaatatgctcttttggtactagtttagcacgatcatattcctcctgttgactcgctaaaatacaaactgcaagtaaagaatctataacaattaacaactcccaatacccctttaaatctaagtttgtaggtttaaatctatctccttgtgttttgcgtaaagcgttcagtttactgttagcagataattttagctgtctcaactgtttgtcgttaatttttttcatcatcatcttgttttttgtaatgttcttttataatttattcaagggtttctaatttatctaaaggtaatattggataatatgttctaaggtggtttacacattgagttgatggccggcaatacgaagccaaattctattcttttttgaaaagttctatgatgggaaatttgcggatgttcattaaatactttgagtaggaaaatttgtttaataagaactccactctcagtaaaaattaaaaacagttgtttttttgtttcctttataaagggaattaaatagatggcttttaccgaaagaatctccttaaggttttgcagtatgtgttttactaccggtctcataaaattttactttaaaaattatgtaggctaaaggaacgctcataaactcgtgtaccgaacccaaacgggtagtataaaaccaaaatgaaattgtactttaccaatccataaattcataaaagttagtatctttggaatatgagtacaacagccacaccacatatcggaagaaaaattagccgcattagagagttacgcggaatgaagcaagaagcgctagcgatagaactagggataagccaacaaagcgtttctcatatagaacaaagtgaaaccttagaagatgaaaagctggaacaagtagcaaaggttttaggcgtcactcctgaggcaattaagaatttttcggaagataatattttgaatataatctcaaatacttttaatagcaatgatacttctaccctgaatgctataaatttacaaccaacttttaatcctatagataaggtagctgaattatatgaacgtctattagaagctgaaaaacaaaaagttgcttatttggagaagttatttgataaaaaataaaattagttttcatactttaataaaaaagccattagctgttcaacgttaatggctttttttagttaagatatacgtattaattaaccaagcttttaaattttaaataaaaaaaggtgacagaattagatctgccaccttaaatgttttcacaacggaataatccttattgtgaattgcttcagaattataatccaatatacatgttttttttaaaacaagcatactcaagcccgttactattttaactttttttacatatatttaagaactgactaaaatttattcgaatgaaaaaaatattaggactggatttggggactacatccattggttgggcatacgtaaatgaagccgaaaacgaaaatgaagagtcatcaattattaaaagcggggttagagttgttccactttcaactgatgaagaaaatgattttaaaaaaggaaacagcatcactattaatgcagatagaacattaaaaagaggtgcaagacgaaataagtttagataccaactgagaagaaaagcgttgatcaatgagttaaaaagcataggttttattgatgataaaacaaaactgactgaaactggaaatggctctacgcacgaactcctgaagttgagaaataaagctgtatccgataaagtggaaaaagaagagtttgcacgcatccttctatctatcaataaaaaaagggggtataaaagtagtcgaaaagcaaataataacgaagaaggagaactcattgattctatgggaatcacaaaaaaactctatgagaataatctaactccaggtgaattttcttatcagcttttaaaaagtggcaaaaaatccttacccgactactatcgctctgatttggaaaatgagtttagtcgtatttggaaaaaacaaaaggagttttacagtgaaattttagacgaaaatttatttactgaattagcagataaaaacaaaaatcaaacttggaaaatttgcgaacagccttttaaaatacaaggaataaaactcgaaggcaatagagatgaaaaaaaattagaaaaatttagacttcgaaaaatagcgttaactgaaaaaattgatttagaatacttagctattgtattacaagaaatcaataacgaaattaatcaatcaagtggttatttaagcgaaattagcgaccgaagtaaagaattacattttaaagatttaacagtcggtcagtatctctacgatcaaatttctaaaaacccacatacaagtttaaaaaaccaagttttttaccgccaggattatttaaatgaatttcaaaaaatatggaataaacaagtagaattttatcctgaattaactaacaaagtaaaagataaaattcagaatgaaattattttctatcaaagaagattaaaatcacaaaaagggctcatcagctattgtgagtttgaaagctgggaacaggaagttagtattgatagagagaaaaagcgaaaaactgttggtcaccgcgttataccaaaatcctcccctttatttcaagaatttaaagtttggcaaaacttaaactccatcagagtaacaaatataaagaccaatgaagtctttcatattgaagaagattccaatgttgaactgtttcaaaaactaaactggacagctcaattaactgataaacaagttttaaaagagtttggtttaaaaccagaagattggaaaataaattttcagaaaattgaaggcaacaaaaccaaccataatcttctggaaacgtataaagaaattttaaaaatcgaaggctacgataatatcaatttctcaaaaattgaacctgatgtattgcaacaaacgctagaacaatgttttaatgaaattggcatcgataaaaatatacttgaatttgatgccactctaagcggaaataaatttgcaaaacaaaaatcctatgagttatggcatttgctgtattcctacgaagatgatttttctcgtacaggaacaaaatctttagaaaacaagttaaaatctaattttggttttaaggatgaacatttaccttatttaataaacatacgttttcaagatgattatggtaatttaagtgccagagctattcgtaaaatcatgcctcaccttcaagagggcaaaatctattctgatgcttgtgaattggctggttataaccactcaaattcagtaaccaaaaagcaaaatgaagatcgaaaattaaaacccaaacttgatattcttaagaagaatagtttacgaaatcctgttgtagaaaaaatattaaatcaatgtattaacgtggttaatgctattattgaagaccccaaaatggggcgtccagatgaaataagaatagaactggcccgagaactcaaaaacacaaaagaacagcgagatcaaataaccaaagctattggcaaagctactcgagatcacgaaaaatatcgcgatgagattaaatctaaatttgggttaccacacgtaagcagaaatgatttaatcaggtataaattgtataaagaattagaatccaacggacatagaactctttacacaaacacctatatcaaacccgaagacttgttttctaaaaaatatgatattgaacatatcattcctaaatcaaggctatttgatgattcatattcaaacaaaacgctggaaacaaaagaaagtaacttagacaaaggagatgaaacggccttagattttatagaaagaaagtttggaaaagaagacttagaaaaatatataaatcgtgtagaagaactttataaagcaggaaaaattaaaggctcaaaacataggaaactcttaatgtctataaaggatattcctgaagattttctaaatcgagatttaggtacttctgcctatattgccaaaaaagcagctgaaattttacttgatgtcactaaacgggtaagcttaacttctggaaaaataacaagcaaattaagagatgattggggcttaataaaagtgatgcaagagttaaattgggataaatatgaaaaagttggattaacatattacaaagaaaacaaagaaggcaagaggttacccagaatcaaaaactggacaaagcgtaacgaccacaggcatcacgctatggatgctattactgtagctttcaccaaaccgggaatgattcagtatttaaacaatttaaacgcaaaaactaataaagaaatttttaaacttgaaaacaagtatacttataaagatgagaaaggcaagcgtaagtttattgcaccattccctcatattagaaaaacttcaaaagaaaatttatctcaaattttaatttcccataaagcaaaaaataaagttacaacaaagaataaaaacaagataaacttaaaaggtaaaaactcattcaaataccaaactgttgaaactccaagaggtcagcttcataaagaaaccgtatacggtaagtcaaaatattatgagactaaaacagagaaaattggtggtaaatttaataaagagcatattaattttgtggcaaaaaaaagtcacagaaatgcattgctaaaaagacttgaagagtttgaaaatacccctaaaaaagcattcactggtaaaaacgcattggctaaaaacccaatatttttaaatggaactcaagaaacagttcctgaaaaagtaaagttagcttggttagaagataggtttacgataagaaaagaaataacacccgacataaaaattgataaggttgtagatgaaggggtcaagaaaattctccgaaaaagactgaaaaactttaataacaaacccaaagaagcatttgcagacttagacaaaaatcccatctggcttaataaagaaaaaggaataaaagttaagcgagttaaaataacaggaatttctaatgcagaaccgcttcaacatgctaaaaatcattttggagaagaagtcttgggtaaaaacaataataatattcctactgattatgtgagtacgggtaataatcatcatgtggctatttataaagatgaaaaaggaaatttacaagaagaagtagtttcattttacgaagcagtagcaagaaaaaatgctgatttacccatcatcaataaagaacatgaaaaaggctgggagtttttatttaccatgaaacaaaacgaaatgtttgtatttccaaacgaagaaaaagccttcaatcctagtgaaatagacttattgaatcctaataataaagctttaatcagtgagaatttgtttcgggtgcaaaagtttactcataaagattatttttttagacatcatttagaaactaacgtcgataatacaaaagaaacacataaattatcttgggtcagaacagggttatcaggtattaaaaatattcaaaaactgagattgaatcatttgggtgatattgttgaagttggagaatattaaaaaagtaataaaatgataaaatttacctcagtaaaaaataattcacagcccttgcaggttttcaaaccctgctagggctcaattcaacaactaaaagttaaaaatgcaagacaaacaagctatattaatcccaggaaacacctaccatatctacaatagagcaaacgggaatgagcgcttgtttctatcagatgaaaactatcggttcttccttaaaaaatacaccacgtatattagtccaatagccgatacgttttgttattgtctgatgcccaatcattttcattttttattgaggattaaagagaaaaacaaactacttgagttttacaagcataagaataagaaagcaaaccttcaaggttttgaaaaccttgaaggtttaatatcccaccaattcagtaatttctttaatgcatattctaaagcctttaacaaacaacaacacagaaagggaagcctatttatgcatactttcaaaagaaagataataactgatcaagattatttcagaaaagttatgcattatattcattacaatcctatagaagcaggattggttcaatttacgaaaaactggaaatattcatcttatcgcacaattatttccaaaggcaaaacaaagttagaaagagaagaaagcatcagctattttaacgatcttaaaaactttattcactgtcatcaagaacctcctaagttaacaggaatagagtgagtttacactatcgctattaagcttttttaaagttttaatctttaaaaaagctaactactaaaaattaaattatgataaaacgcagtcttttttttactaatccagcctacttaagtacacgaaacgagcaattggtagttaactttccagaggaaagtaagaaagaaaaaactgtcccaattgaagatttaggttttgttattttagaaaatcaacaaatcaccttaaccaatgcgctgttaatgaaattggttcaaaacaaaacagctgtaattacctgcgatcaacagcacctcccctgctctcttttgcaacccttagtggggcataccgaacaaaccgtacgctatcggcatcagctcgatgccagtgtacccctaaaaaagcagctctggcaacaaaccgtaatggctaaaataagcaatcaagcccagcatttaaaacgtttagataagtatagcctaaagttagaacgctgggctggcgaagttaaaagtggcgacacccaaaatcacgaagccattgccgcagcacattactttcagaatttgtttactattgaaaatttcagtcgcaatcaaaaaggcattcctcccaacaatttattaaattacggctatgcaattttacgggcaattaccgcccgtgctattgtaagtagcggcatgcttccttcggtgggtatatttcaccacaataaatacaatgcattttctttagccgatgacatcatggaaccttaccgaccttttgtagatgctttggtttttaatatagttgaaagtggctgtaatatagaagaactaaacaccaacatcaaagtagaactcttgcaaattccggcaatggatgtagaaattgatggaaaaaagagtccgctaatgaatgccatgagcagaaccacgaatagtttgtatgaatgtttttatggcagtagccgaaaaatattataccctgaatttgggtagtaatgattgattgaataactagataagtaagatacttatatcaaaagtcgcgactatgaacaaataaataaattactatggaaaattcacatttttcccgattaaaccagtatagaagcatgtgggtacttgtattttttgatttaccaaccgaaaccagagttgaacggaaagcagccactcgatttcgaaaacaattaatagacgatggttttgggatgtttcaattttctatttacagtcggttttgtgccagtcgtgaaaatgcagcggtacacattaaacgaactaaaaataatttacctaaaaaaggaaaagtagcggtgatgcaaataaccgacaagcaatttgggatgattgaattatttcatggaaaaaaagaagttgaacctgaaacaccagatcaacaattagaactcttctaataaatagaatcaaaaatgttaggcaaagcagagtaaatacctaattttcaacgcacattttttattcctaaaaacagccttaaaaaacaacataccagacggttacgactggtatgttgtaaatcatgattaaaaatacaattctgaaagcaattcacaactggaatgcagcattaaacgccaatcctatagttgtaaatcatgattaaaaatacaattctgaaagcaattcacaactacgcaaatattaccctcgcgtgcctttatgttgtaaatcatgattaaaaatacaattctgaaagcaattcacaacgaagcaaataacgagcgtaagcatagtaaggttgtaaatcatgattaaaaatacaattctgaaagcaattcacaacagtggaagccaatgattcttactatgtttcgttgtaaatcatgattaaaaatacaattctgaaagcaattcacaaccacaaagcacgggaacaaaaaacacattcgttgtaaatcatgattaaaaatacaattctgaaagcaattcacaacggaggttttgagtgttggcgcaagtagcaagttgtaaatcatgattaaaaatacaattctgaaagcaattcacaacgcattgcttttttaaagcctacaggattgtgttgtaaatcatgattaaaaatacaattctgaaagcaattcacaaccagcaccttcttgataataaccaacaaaaggctgtaaatcatgattaaaaatacaattctgaaaaaaattaaataatcacaccacttaagaacaagctttacaaaagccggaaataaccaaattatgcaccttagcgacataaccttccggcaggggtaccgaaagcgcttgttttaaacactctaccgttccgcattgtaaacacctaaaatgaatatgattatgcgagtggagctgctttttttcatcacagttagcacacatggcaaaatattgttttccattatctcctactactttatgtactttgccatcttcacaaaacctatttaaaactcgataaatagtagccctgtccatagcagaactaacccgatcctgaatcatctcatgacttaaggcattgcccgatgcggcaagtacttctaatatttcctctttagaggcggtgcttcttcgtttcataattttattgcgacaaagttgcaatattacaaaattatagtacatttgtcaagtaactaatgcgacttaatcgcactataaatataaggctatgaaaaataacacaatagtggacgtcatcatcatggggggaagttatgcggggctttcggctgcattggccttggggaggtctatgcgacaggtattaattatcgatagcgctagcccctgtaacaagcaaacgccgcattcgcataattttatcacacaagatggggcaacaccgcatgaaattagtgaattagctaaagaacaggttctccactataatacgataagctatatagaagacctggcgcttagtgctcataaatccgattcaggatttagcgttcacacaaaatccggcaaagagttttcttcaaaaaagttaattctggctaccggtattaccgatattatgccgtcaataaaaggattttcagcttgttgggggatatccattgtgcattgtccctattgtcacggctacgaaattagaaataagaaaacagcggtctatgcagatactcctactgcattgcatcttgcacctttagtgaaaaaccttacggatgatttaagcttaattattcctgatcaagcggaagctaatatggaagaaatacaactacttaataaatatgacattcaagttatgcatactgagatttcagcgatagagcatcagcatggtcatttgcaaaatatagtatttgcagatggaaccaaacacacatttgaagcgctatacgcacctttagcctttaaacagcattcttatatccctgaagaattaggctgcaagtttaccgaaaaagggcatatagaagtcgacgcatttcaaaaaactactgtagaaggggtttatgcatgtggagataattcgtctatgatgcgttcactagctcaggctgtacagagtgggaatgttgccggtgcaatggtgaatgctgcattggcacaggaacactttagcttatagcaaggggcgtttagcgctgggctaagctgctaaaatggacaaagctttaaaaaataacactgaaattttaaactcaaaacacctatgatagaagtatttactaccactattccaacaccgaaaaaagcaaggattgtaattaaaaaactaaaaactgaatttcctgattcaaaaattcatgtggatatagaagaagaaataaagaattacccctgtacccacagtattttgcgatttgaaggcaaatacacgtcttccaatagtattcgacaagtcgtattgaaggaaggctatcaatgtgatgtgttagaagataaagtctgtcattcataagaagataccatgactaatttttgggaagaaagttttcagaaaaaccacaagatgtggggagaagaacccgctgtatccgcagcgatggtagcgaatgattttatgcagaaaggataccgtgaaattttaataccgggttgtggttatggaagaaataccctcccttttattgacctgggaatgaatgtaaccggaattgagatttctgaaaccgctattaaaatggccactaaacaaataccggataagctgaagatctacaaaggcgatgtgactaaaatgccttttgacgagaaaagctatgagggaatcttttgttattccttacttcacctgttaaatagcgcggaaagaataaaacttattaaaaattgctactcccggctccgtcaaggagtaagcatggtttttgtgacacttgccagcaacgatcatcaatttgggaaagggctagaaatttcgcccaaccggtttttatcaaaacatcaggtgaaattgtattttcatgatagaactgctgtgcaggaagcctttggcgattttggattaacaggtgctaaagaaattctagaaccgattaaaaatacaactcctacgcgttttcaatcattatggttaataagctgcaaaaaataagcgctccctcttctctactcgctaacgcaatacaggaatagctatagacatgagttcttctttatactctaacagttctttttgaatctgtttataggctgaggattgagcgggttgaaacagttgttgataataggcaattccatccattaaattggctttaaaccgctcccatttcttaagctgttgggcactgatttcttctgaagtcgtttcgatttcagtacggaggtagtttacatacattttcaattcactgataaacatatgagaacgagctgtcggactgagcacagaagcattgccgtaaatatgctgtatcatcttaaccaacgagacttccttatcaaaataagccatattaggtccgggacaaataaccactccctgagcttgacctttaatcgggaggtcgtgttccatataagaggcattggctaaaccgacacataaacaggctttttcgtttatttttgtttgctcttttttatattgagccgcagagacctgctcttttttttctgctaaggcttgtaatttagccgtttgatattttttagaagcggtacaaactccctcaggtccaaattctttgcttaaagcaaggtattttttaggacatgagcttccggctttatgggcagcgatgcgtttttgcttataatactcattcgtagttcctgtaagcgtattaaaaggcacgcctaaaggtgaaatcccacttaaatataaatccttttcttttgctttaacgagtaaggctctagtttctttatcgaccgaagtagcctcgggaaccaataaaaacggactcccccagcctaccgaatctactcggtagtgttcctgcaaaaatgcatgttccgaagcggtgcccacccctccttgaacacttatttttaacgctaaaactttgttgggaaccggaagccctttttgatgcaaagcttttaccaaaatctcgtgtgtctcttctagtaaggcttcttttttggttttaaactcttctaaaatgaggcctaataaaaaaccttcggttgcaaacgcatgacccccacaatttaaacccgattcaattcgatattcggaaacccaaagtcctttctttgcaaaaaatttaccctgaataatcgccgaacgataatcacttacttttagcgtgattttcttttttaggcgtccattgcgatccggaaaaaagtcattgaaattttcaaaataactatataaacgcggattcattcccgcggaaagaactacggaagaacttagattgcttttagcaaatccacgaagggaggcatgggcatcattaaactctaccggcaattgcttgcccttagaaaagttatctttatctactttagtcataatgttaacatcaatcgctcccggtaccaaatacttttctaaataggcttcgaccgtagccttcggtacattcccttgttttaaaaatgtagaaaatctcgctttaatcgtagagttattgggcaacatagcaacaaaaccttctaaagctttagtactgtgtatgagttcttttttaaatgctgaaaacttatgcttaacaatgcttgctaccaagtttaaatacgaagtaatacgtttagcgcgatagtcgtgttcttttatactaactttttgatacgggagattgaatttcttagcgtacaaggcattcattttttccataagctcatcgtcaataatggagattacggaagaaatcccatagtgagccactcgaatcggactatcgatggtataggctaaacccataaccggaatatgaaaactgtgtacagcttgcgatgaaatcatcatgtgggcattttaataatttaatagctgcaaatatgccctttactatgcttttaaaaactgacatttatcatatttcggtttttcaataagcccatatgcctattaatcaacttctatggaggtattgaaaactcaaaagaaataataattgtacaatgcaatttcctgttagcattaaagcttattacttctaatccgtagcagtactttcttttaaggcttactgatgctatgtatatagtaaagccgtattaaacatatattgaattaaatcctaagaaatagtgagtccacagtgaaaacacggtattgtggtgaagtgtagttaggccctaagcgcagtgtggactcagtatggattcaatagggcgtatccaggaagtatccatatattaaatgtccttagtttaaacttataaaagctatacttattgcggatattattcatgatgtattcgatttgcgaatatgaatttactacaaccgccggaagtatcttataagccctttttttagcagtatattttcttacattatcccgtaacaagttatgagaaatagatatatttgttaggatgttatgaattggcattaatttatgaaaaaccttgtctttttactattgttattgccaagcggaatttgtgcacaaacaaaaaaggatgttgaacctaaaaatgagagttatatcacaactgatttattttcaccattttattttcagggaaatacaaacggatttagtaataacggaacacctcgttggcgaattggatatattaaaaacttgaatactaaaacaaaagtcggaatagatattggttacggaaatgctaacaattctcttattcaaacatttgataattattcgctttgggaaatacgacctgaatattaccacatacttaaccccaacagaaaaactttaaaatatttttctttcgagttattttatttaaatcaaaacgaagtatttaaagatcaatcatttatatctaaaaaaaacgaatatctgacttttaacaaagcagattataagaggcaaaaatttggattaatcccaaaatttggaatgtttgtaaatttatccaacaaaattggattgaattggtatactggtgcgggcataaattatagaataaatagttataacaattttgtgaatttaatgccaagacaatttaatgaagaacatttctcaccttattacagaaaagaaggaaataaaattggagtggaatttactcttggcttaaaattatattatacaataaaaaactaatggcaataactagcgttcgtgtggtcggtacgacccaacatgaacgccttgttgactgaaccggttgccggtcggttagcctactatggggattagtctggttataaagtgttttgagtatggttttactaggctattggaagttggttttagcctaatggagttttatttagttgttttttttacattttaattttcgataacacttatttcttttggttttatgctaatttttggttcaatcttaaatttgagcaaataatgtcctgttacgtgcttagcaacgttactttatttgggacttatctaacttttctaaccagtattttggtggtcctctagcggtaaaaatacttagggttattaaattaccttttttgcattttgaacattttcgatgtaatattggtggtctttcttttaaacgaacaggcgctagagtggcctttaaattgcttaaacttacgcgcttatggtaactgcttaacaaaccgtaatgtcggatgcgcacaaaaccctttggtaaaatatgtaatgcaaagcgtcttataaattctgcttggcttaattctagcacatagggttttccgccatgccgataatctttagcagaaaagctaaccttatctttctctattgctaataagcgatggttgctaatggctattttatgggtgtatcgacctaagtattccaccacttgttctgggcctaaaaaaggacgcttacaatacactacccaatctttggtaaatagtgtattataaaaatttggagttgtatcttctaacactttccgtaattctgcaacaaaacgtgccctaaaaaccttactcatcgcttttactgggaacaggtagcgtgccctgcggcagccagtttttccttgctgtttggtaggttgccatttaccagatttgctaagccctccaccgggaacaatacaatgtaaatgaggatgtaaagataaattctgtccccaagtatgcagtatagcaatcatacctgtttgtgctcccaaaaacttggggttgttcccaaaaccttggatgacctgccaagccactttaaacagtagcccataaagtactcttggtttatataggcataaacgatttagggtgtgtggcagtgtaaaaaccacgaaaatatggtacaggtaaaagctcggcttctcgggcttggatccaccgttctctttgatgtccctggcacttgggacaatgccggttgcggcagctattatagctcaggtgtaagctttggcaatcgggattatcacattggtctatatggccgcccaaagctgccgtacgacatttacgaatgttgtgtagggttcggtattgccagctattactgcaataatcctttaaattgttgttatgctgttgtaaaacctgagctacttcgtaggtagcagttctcatcttcctttaagaatacagcttatctaaaggagaaaagggcttttgtctacctagctgtgccacgtgtaggtaaactaaggttgtttgaatatcggcatgtcccaatagctctttaatgctcatgatatccaaacccatttctagtaaatgggtggcataactatgcctaaaactatgagtggtaatttcttttgggataccactatgttttcgagcc

SEQ ID NO: 2270 - DNA, 24113 bp, synthetic construct
  variation 15504..16603: note = n is a, c, g, or t
  misc_feature 1..24113: note = Synthetic
  source 1..24113: mol_type = other DNA
ctgctccccaatacacattgcttgctggttcccaggtatcttcacgtccgccgctaaaaccaacaatatcaagtcccatatcttcataagctacggttcctgccaaaatcattaaatctgcccaggatagacttcgaccgtatttttgtttgataggccatagtaaacgtctggccttatccaaattggcattatctggccaggaattgatcggtgcaaaacgctgctgaccgtcacgagaacctccgcgtccatcggcggtacggtaagttcctgcactatgccaggacatacggataaaaaatggaccataatgaccgtaatctgcaggccaccagtctttagaatctttcatgacggctaccaagtcagcttttaattgctcgtaatccagcgcggcaaacgcagctctgtaatcaaaatcgtcatccatcggattcgatttggatgagtgctgtctcaagacgctaaggtctaagttatttggccaccaatcccgaccgccagttcttcttactgctgtagatgcatcagttttagtctcttcggctttcgcctgaatcttagcgtgtggattttctccatctttcaccttaattctgatgccggtaaccgggcatgttttgtattcagcttctgcgctttgctgagcaaagcttgccattgcaaataagctaaaagctacgattaataattttttcataggtttatgttattgaatttatttgtaaacaaatttagtctcaacccctttttaaaactcattttgtaaattgaagtttataatgtaagcatagagttttattatagttgttatatttttgatttaaattacttataaatcaaattattagagctcttatctcgttaatgttgacttactaattccagcataaaagataatcaaaaattggtttacaaatcttataacagattcaaaatcattaaacagagtattcatttttaactcataaatgcactatgactccttctatcgtttttcaaattgtcaatactatcgttttaccggcctggttaattttaattttctttcctggcaaatcctggcgaaatcctgtgatttatacttttgctgccgtaatggctatcgtatatgctgtttatgtggttcaaggcctaggtgagtttgatatggagtcctttagtcagctggagggcattaaagccatgtttacttcagacgaagcggtggttactggctgggttcattatttggtattcgatttattggtggggaactggatcttaaatctgtcacggaagcatcagatcaaccacttcctgatcatcccctgccttctactttgttttatgtttggtccggtggggtatttagtatacttcctcataaaaacaattaagacgaaaaagttgagttagtttattgtaaatcgttgacggtcgatggttatctgttatcatttcaggcctgcacgattaagtcattcaggcgggtgattttatggaaaagaatgaattaaaatcgtgtagagaagcctgtcacttcgagtgattcctttgcttcctaaaagcaaaggaattgtatcgagaagtcagacagtctaagttaaattctaatttaaaattgtctacgttgagtctagttctcgacctgcttgccagaggaacgaaaaacaggtataattcgcctaaggtcgaatcactcgaactgacaagtgctttcggaatgtcacttcgagtgattcatttgcttcctaaaaagcaaaggaattgtatcgagaagtcgtttcagttcatagtatcactttttataatgcaagttaacttccagcttggttaagttctcgatacaatcccgatattcatcgggatcactcgaattgacagtgttcgaacatatatagatgtataagtttgaaatactttttcttaattttagaattaattatctaatatcatgtattgcgtttatatcctactttgttcagataacactttttacacaggaattacatctaatttagataaacgtttgaatgagcatcaaagcggaaaatattttggtagttatacgtttgacagaaggcctgtcgagttaaaattttatgcagagttcaccgaagtcgaaagagctatagcgatggaaaaacaaatcaaaaaatggtcaaaagccaaaaaacaggcattaattgatggttattatgaagccttacccaatcttgctaaaaagaaattttaataaatagcttttgtcacttcgagtgattcatttgcttcctaaaagcaaaggaattgtatcgagaagtcgtttcagttcatagcatcactctttataattcaatttgactttcagttgagtcaagttctcgatacaatcccgatattcatcgggatcactcgaactgacaagtgctttcggaatgtcacttcgagtgttttgttggtttttcttaaaaccgataaaatgtatcgaaaagtcgtttcagttcatagcatcactctttataattcaatttgactttcagttgagtcaagttctcgatacaatcccgatattcatcgggatcactcgaactgacaagtgctttcggaatgtcacttcgagtgttttgtttttttttcttaaagccgatgaattgtatcgagaagtcgtttcagttcatagcgtcactttttataattcaagttaacttccagtttggtcaagttctcgatacaatcccgatattcatcgggatcactcgaactgacattacgttctacctctacttcattataaagccatgcgattattcatttacaagatttcacgagagacaataaactaaaaactggaaacgactcacaactaacaaactcagaaactatttttctacaacccctccaaaatctcaatcatctttccattaaggtcgaggatggcttcggcataggtcatatcccaggcttttaagctatctttatctttcattgcaatctgatactgtaatcccggtaaaatccaggacgcgtagccgctaaacggatcggaagaggcgtacagcgatttataccagtcgccgtaaggcataccttcgggattcaaaaagcttttttcgagcgctagcagctgagcattcagtcgtttcgcttgctttttgctcatcttgccgctttcaagttgttccttaagggccttcgccactaagttagctgactcgtttaagctggatatcgctgaagatgaagctttgaacccagcaaaatcagcataaaaccctttgacctgcttttcggcattttgaaagtgcatctccaggtcggtggcatacttcaccacatcgtaagggatgaattgagcattggccaggcgcaagctcaaggtgcccatcaccgcttctaccataggtcccatttgaaattcgggatcgacgaagttttcgtaaaagtaaaagtcgtcgtaattggtgtggtataaagtggggccgctggctcctccactcaaagatggcacgccggcgtgcatgtagaaggctatatgatctgagccgcctcccaaattgccgatgctaggctgttcgtttcctcgcgaccagtgttcataaaccgtttcctcggtatagggatagtcgacttgcctggtcgcttcagccaaaatggtcttcaaactaggggctgaggaagccctgaagtttttaccagagaccgccgcatcgaggttgatataggccacggctttggcctggagttcgtctttaaactgctccacccattcgctggacccgatcaccccatgctcctcggcatcccagtgagcgataaggatagaacggtcggggcgattgccgtctttagcgagtttgccaagcgtttcggataaactaagtaacatggccgttcccgagttcgggtcggtggccccaaaagcccaggcatcataatggcaacccagaatgatccactcttcgggataagttttacctttcaaggtccctacgatattaaagactttagtcagttgtttgggctgatcgaccttaaggtgaactttgagatcggagcccccttgaaggcgataggtatatggtaaaccgccttgccattttctaggcacgacctcgcctcgcatttgtttaaaaatatgatctgccgcgccataggaaatcggcgtgacagggatggtatgcaacccgacttctgatgggtcgagtcggtctggtgagtttttatcgtcttgtggtagggctggctcgtaaggcgttaacggatctccggtccagtcggcggtgagtaaggatccccgctgtatcccgctgtcgttgtaataaacgccttccggaaagacaaggcctctggtaaagccagagtctttgggatcggtatagatgatcagaccggcagcgccatgagcttcggcaaatttggctttgtagccgcggaagttcccaccgtaacgcgcgatgacgattttacctttgacggaaactcccaactcttccagcttctcaaaatcagctttggtgccgtaattggcgtacaccacctcagcggtgacttctccactgccggaataggcgttccagccttttttaagctctggatgatcggaatacgggtcttcttccagggcccgctcctgctgatcgagaacaatttcttctggggtgatcacttccaccagcgactcacccggactgctgctcataaacacctcatagggataggtctctacgtcgagtcctgctgcatccatacttttgacgatatagtctttgactttttcgttggcaggtgtcccggcaatatgtgggttttcggtcagcgttttcagatgggttttgaagcggcttttattgatgctagatctgaaatcagcttcgagttgcacttgagttttggcgtcatcagaactataaccggtgaggttttgggcttgaagcgccaaaccggcaagtagacttaaactggtaagaactattttcatgtgttttaaaaattagaattgagttgctgaatttacggaaaattttgttttggttaggagtggatagtggttccaaaaagcgagaagtgaaaagtgatttctattttgagttaagagttaaagattattgaatgattaaatgtaaatgcttaaccttgtttgaagttccattcgtggaaacaatatcataatgaaatagaccaggagagctgttgagaaccagttatcggttgggttttcaacatcattcataggtttaatactttttgtcatcgcctcaaaaagtattcaaaaaggtctaggctgatttttaggtctttgaaaactacaaaaatgtttcctcaacgcaaaggaaatcgtttcactagtcctttgctccacagcctgtcctcaccacttttttgttttctacctccctaaaaagtaggccgttttataaattagacgtaactaataacataattgccctaaaacaaaaattactgaatatgattttagaaagattgttttttgactacaattcagagtaaaacctcatggtgagattagatatttagaacttttaagaattagttttcggttggattttggacatcattcataggtttaatactttttgtcattgccgcaatccaaacggaataaagaataacttaaacttatggcgctaagtctaaaagccctcttttaaactgttcccaatctgagaaaatagtaaaagcgatgataaagactattataaacgctatgatctgacaaaaattaaatctagtgtttttcataaagtattcgttttgttgttttagaattgagatggatatttactctgaatttgatatagttataagtaatgttttagatagtaagcttttaattagacttatgcgaattctttaacaatctgaaaattgaccagagaatcaaaccaatgaagaaaatgatattagagtacccaatgatttgagataaaagcgaatctgaatctgataggataaagtaaccaagccatataaaggcaaaggccagagtataaccgataactagacttctgatgttttagttttcattccaccgccttaaggtctgcttcatatgctcggctttgaccaggtaaaaattggaccagagtaagacaatgaaaataaacacgacaagcataatcaagggagttatgtgatcctgctggtaaaacccaatgaatatcaaacctgaaatcacaaaggtcgctataaaattgaatataattccccggttaaggctcatatccaaggtgccagttaaaaaattccaggtggtgagctcctctttgatgatgactttctcaggttgtgaaaaatcgacagtaatgcgcaagcctagacctaatttgatctcgatgtgttcagatgttctttcatacgcataatcaaatcggttaagcagggattcagtggtttcaatagacataagtgatgggttaaggatgataattgatttcaaatttaaagcttaaaagtttatattttacaaacggtttgcattaaaatacaactttgttttcaagaaaaaaatgctccttttaaactttaaggagtcaaccaattgtactcattaaattttaaatgattaaaattcctcctgaccccctcagctgggctttaaaactggagatctggtcttctaagacctgaagcaaactcgggtttttaatattaggaaactgctgcatctgcactatgatggttttaggatgatggtctctaactcacaaaaaaaagcccaacactatgtcatcacagcgttgagccaatataatctaaagcaacttgcgcctagcctttagtgacctcttgaacccaggaagccccgctgatgtcagtcagttttatagtgtaagtgcctgctggtaattccttcaggactggatctttaagcgacaatctggctttggcacccagcggaaccaacagactgtgctgaccaggcttgactttagccacgtagtaattggaaatactttcttccttcatagtggataaatcggctggggtgtaactcatgatactttgcccttgcgcatccaggacctcaagacctatgatccaggcgccgtagacatcgacgccctcggtcctaaagatatcaaaacttacggtttcgtcggtcaatttcgtttcggtgatttccagcttgggctttacggatttattatgcaaagtaccccaaaggcctccgtgaaagacctgattggtcattagcgtcataccaaaaatcagcagcgatcctatcagcacaacccttggaaacaaacgctcacgaatcggcagtatgccagaacctaaccaggcaaaggctttagttgtagtcagactatacttgtttttcataaggtaattgtccagagaatatttaccgcttcccgttagaaataaaacaaaaccggtggcaatgcccagcacaccaatctgccattcgtccaaacaggtggtaccaatccagcccgaacccaaaagtatgcccatggccagaccaaaaacaccaatgctcatgagacgagtgaatagcccaaacatgatgaacaggcctacaataccttctatgatggtgaagatgagcatattgatatacagaatatctggattttcgaccaaatattgaatgattggttttatgcccaacgcattaggtaaaaagtggttaaatttctctccaatatagcccgcctgttccgggtcgagtttatcggctaaaatcgtgcgcctccagagggcagaaaagtaggtccagcccaccaccagtcggatggcgagcgtaagtaatcctgagtcgtttttaagtgatatcgatgtcataaggtttggtttaaatggtgagacttataaatccttgcttcttgagttgaaatccatgtaaaatggcattgtctaccacctccagaggttgtggcaactcctctggactcactccaaatgctcgtaatgacaggccacagacataaacttcaatgttttgaagagctgcttgttttaaaagggcttgaagcttgggattagctttaatatcagtgacggtttttccacaaaacaacaccttaaattcgccgtaggcctcaccatcttctttagccaatgcagtggctgtcatcaggatgggtttcagttgtttgatgttcttggacagcacaacatagtcgttttgacctgaaattgaagtttgtgctttgagttgagctgttcccaaaatgagaacaagaaaagcggtgatgtatgtgattgaatgtttcattgtttgtaatttaagttagaatttatacttaagaataagagtccgcccagtagggtgatgcttttagaaggtgagccaaggcgtggcattcatttctgttttagtattaaaattttcgtatcatcgagtcactggatagccatgagtcgtgggtcaaagactcgagaggaaagaatacaattatgaattcttaatttttaattataaattagattcaacctcctttttgactcactagctcatagactactgtttcttttaaaagcatccatttggacctgggcaagagttagtatttcactatagttcgccaacgaatagttctaggtcaaagagtcgagagaaaagaatagaattatgaattattaattgctaattgctttcaacctcgtatttgactcacaaactcagagacttctgttttacgatttgaaattgtacagaaataagccttggaacaaagacctacagatacaccttaagttggctgtacagaatatagaagggaacggatgaggccaaaggtggactccggtaagcattttgatcaggcgattgaaagcttgatctttcaatatcgtcagtgaaagtaagagttgcagcagagggcttttggtcaaagtctagcttgctcgttaaagctttagcttgagcaatgtcttgagtttgacaattgaaatacggaacataggattggcttttactagacacctgggtctgttcaacgccaagttcagcctgaataaaattcctgaccttgcagggtgaaaacaatagcaaaaggccaaagcctaaaaccgtataaatagaggctatgtttttcaatctgttcacggtgtaaaactaaggattcttaacacccaccgatgccgtgaagtactaaagtataattaagactttcttaaatagagatagttttgtcgattgacggttttcagtacccgacaattgatattcagtgaatggttaatagtgaatagtacttagaacaaaggctcaagactattggaatcacgactctttgaaatatgaagacctgatctattttgataaggcctaagtgtcctattaaaagacttctgatgttttagttttcattccaccgccttaaggtctgcttcatctgctcggctttggtgaagtaaaaaccagaccagagtaagacaaagaaaataaacactaaaagtattatcgaggatgttatataatcatcctgattaaatcccatgaagaataaacctgtcaaaacaaaggtcgctataaaattgaatataattcccctgtgaaggctcatatccagggtgccagttaaaaaattccaggtggtgagtgattctttaatcacgactttttcgctgttggaaaagtctgcagtcactcttaggccaagtcctaacttgatctcaagttgattgtttgtcttttcataagtataatcaaatcgattgagcagggattcggtaatttcaatggacataagtgatgggttaggataaatttaaaattaacactattgattgaaaatttaaaatttgattataaaaaagttatagcaatgaatcaatttaatttttagtgaattgactttcagtgcattaaaaattaaaattcttatactaaactgaagggcttgttaatttttaaagaattccttagtttaggagagttaaaataaaaaaaagcgacccgtaaaggccgctttaaatgttttcacaacggaataatccttattgtgaattgcttcaaaattgtgaagtaaagatataaattttattaaacgaccaacaaattatgaaaagaattttaggattggatttgggaactacctcgattggctgggcttatgttaatgaagctgaaaacgaaaaagaagaatcattaattattaaaactggtgtgagagttgttcctctttcaacagatgaagaaaacgattttaaaaaaggaaatagcattacaattaatgctgatagaacacttaaacgaggagcgagaagaaataaatttcggtatcagttaagaagaaaagcactaattgacgaattaaaaggcataggttttattgatgataaaacaaaactcacagaaactggaaataattctacgcacgatctactccatttaagaaataaggcagttaccgagaaggttgaaaaagaagagttagcacgtattcttttgtccattaataaaaaacgtggctacaaaagcagccgaaaagctaacaacagtgaagaaggagagcttattgattctatgggagtaaccaaaaaactctacgaagataacttaacacccggagaattttcttatcaacttttgaaagaaggtaaaaaagtcttaccaaattactaccgctcagatttagaaaatgaatttgataaagtatgggtgaaacaaaaagaattttactctgatattttagatgataatttaaaaaaagagttatctggtaagaataaaaatcaaacttggaaaatatgcgaaaagcctttcgacataaaaggcataaaactagaaggaaatagggatgaaaagaagttagagacatttagacttcgcaaaatagctcttactgaacaggttgaattggaacatttagcaattgtttttcaagaaatcaataatgaaattaaccaatccagtggttatttgagtgaaataagtgacagaagtaaggaattgcattttaatgatttaacagttggtcaatatctctacaatcaaatttctaaaaatcctcataccagccttaaaaatcaagttttttaccgccaagattatttgaatgaatttcaaagtatctggaataagcaagcaaaattttaccccgaattaactgaagacttaaaagataaaattcaaaatgaaatcattttctttcaaagaagattaaaatcacaaaaaggtcttatcagttattgtgagtttgagagttgggaacaagacgtgagtattgatggagagaataagagaaaaattgttggtcatcgcgttgtaccaaaatcgtcccttctttttcaggaatttaaagtttggcaaaatctaaattcaatcagaatcacaaacattaaaactaatgaagtatatcatattgaagaagattcaaatactgaattgtttcaaaagcttaattggacagataagttaactgataaacaaacgttgaaagagtttggtttaaaacctgaagaatggaaaattaattttcaaaaaattgaaggtaatagaaccaaccataatctacttgaagcctataaagaaattttaaaaatagaaggatacgacaatatcaactttacaaaaattggagctgatgaattgcaaaaaattttagaacaatgttttgatgagattggcattgataaagaaattttaaaatttaatgccactttaagtggtaatgaattttcaaaacaaaagtcctacgaattatggcatttgctctattcttacgaagatgatttttctaggacaggaactacttctttagaagaaaaactaaaattaaattttggttttaaaaatgagcatctgccctacttgataaatatacgttttcaggatgattacgggaacttaagcgctagagctattcgtaaaataatgcctcaccttcaagatggtaaaatttattctgatgcttgtgaattggctggctataaccactcaaattcggtaactaaaaagcaaaatgaaaaacgagatttaaaaccaaaattagaaattcttaagaaaaatagcttacgaaacccagttgtcgaaaaaatcttgaatcaatgcatcaacgttgtaaatgccattattgaagatgagaaaatgggccgaccagatgaaattagaattgagctagcaagggagttaaaaaatactaaagaacaacgtgaccgcatgaccaaagccattggaagagctacaagggatcatgagcaataccgtgaggaaattaaaactaagtttggtttacctcacgtaagcagaaacgatttaattagatataagctttacaaagagctagaatctaacggatataagacactgtataccgacgagtatattaaacccgaagatttattctctaagaaatatgatattgaacacattatccctaaatcaagattatttgatgactctttttcaaacaaaacattagaaactagagaaagtaatttagacaaaggagatgagaccgccttagattttgtagaacgaaagtatggtaaagaaggtttagataagtatagaaatcgagttgaagaactttataaagctggaaaaattaaaggctcaaagcatagaaagttactcatgtcattaaaagatatcccagaagactttctgaatagagatttaggaaattccgcctatatagctaaaaaagctgctgaaattttattagaggtaacaagacgagttagtttaacttctggaaccataaccagtaaattaagagaggattggggtttaattcaagttatgcaagaattgaattgggacaaatatgaaaaagtaggtttaacctatttcaaagaaaacaaagaaggcaagaaactaccgagaatcaaagactggacaaaacgaaatgaccatagacaccacgctatggatgctattactgtcgcttttacaaaaccgggaatgattcagtacttaaacaatttgaatgctaaaagcaataaagatatttataaacttgaaaacgcttatacttttaaagacgaaagaggtaaacggaaatttaaagctcctttttctaacatccgtaaagcttcaaaagagcatctgtctaagattttaatttcgcacaagactaaaaataaggtcacgactaagaataaaaacaagattaatataaaaggcaaaaatagttacaaataccaaactgttgaaacgccaagaggacagcttcacaaagagaccatttatggaaagtctaactattatgagaccaaaatagaaaaagttggaggcaaatttgataaggattatatcaacctagttgctaaccaaagctttagaactgcgctattaaaaagattagaagaatttcaaaacaaccctaaaaaagcatttactggtaaaaattcactggctaaaaaccctgtttatttaaatggtacgcaagaaaccgttcctgaaaaagtgaagcttgcttggctagaaaatcgatttaccattagaaaagaaataacacctgatttaaagattgataaggttatagatcatggtgtaaagaaaatactcaaaaaaagaatagatgattttaatggtaagaaaaaggaagctttttctgatttagaaaaaaatccaatttggctcaataaagataaaggtatcaagattaaacgagttaaaattacaggggtttctaatgcaaagccactacaccattctaaaaatcatttgggagaagaaattttggataaaaacgacaattccattcctactgattatgtgagtactggcaacaaccatcatgtagcgatttacagggatgaaaaaggaaacctacacgaagaagtggtttctttttatgaagctgttgcgagaaaaaatacaggtatacccatcatcaacaaagaccatgaaaaaggctgggagtttctattcaccatgaaacaaaacgaaatgtttgtgtttcctaatcaagaaaaaggatttgatcctagtgaaattgatttactgaatcctgataacaaagcattgattagtgagaatttgtttagagttcaaaaatttactaacaaagactatttttttaggcatcacatagaaacaaatgtagataatacaaaagaaactcataagttatcttggattagaactggtttatcgggtgttctttatattacaaaaattagaattaatcatttaggtgatattgttcaaattggtgaatattaatatttgaaatatgatcaaaagaactttattcttctcaaatcctgcctatctcagcacaaagcaaaaccaactagtcattaaatttcctgaagatgataaaatagatagaagtgtccccatcgaagacctaggtatggtgattttagagaatcagcaaatcactttaactaatggattaatcacgaagttgattcaaaataagactgccatcgttaattgtaatcaacagcatttacctatcagcttacttcaaccgctaagcggacatagtgaacagatggagcgcctccgttaccaacttgatgccagtgtccctttaaagaaaaatctttggcaacaaactatagtacagaaaatacaaaatcaggctaatcatttcaaaaaaagacaaaaaaatggtttaaaactaacgaactggagtaagcatgtaaaaagcggtgattctaaaaatcatgaaggagtctccgctgcttattactggcaaaacctatttgacatccctttgttcacaagaaaccctaagggtatatccccgaaccacttactaaattacggctatgctattttgagagcatcaacagcaagagcaattataggaagtggattgctaccaaaccttggtatttttcatagaaataaatacaacgcctattgtttagctgatgatctcatggaaccttaccgaatttttgtggatgatctggtatttgacatctcaaaagaacacgatcatcaggacattgaactcacaaccgacatcaaaatgaaacttttacaaattccagctttagatgtcttcattgatggacaaaaaagccccctcatgaatgcgttaagcagaactacttctagcttatttttttgttttgaaggaagctccagacgtttgttatttccagaatttatataaagtgagccttagaaattaaaacgataaccaatacaattatgaaagatgaaagatgaaagacagattatcacgtttaaatcaatacagagttatgtgggtgatggtgttttttgatttacctacagaaaccaaagtagaacgaagtgcggctacacgttttagaaaatctttgctggacgatggatttgggatgtttcaattttcaatctacaccaggttttgcgccagtagagaaaatatgcaagtccacattaaccgcgtgcaaaaatcactacctaaaaaaggaaaagtggggattatgcagattaccgataagcaatttggtatgatcgaactttttcacggtaaaaaagaagccgatatggagcccccgtctcaacaactagaattgttttaatgcataggatttatggaaataaaatcaaaaactcttgttttttgtattctatttcgtacttaaaaaacagggcatcaatctatnnnnnnnnnnnnnnnnnnnnnnnnnnnnnnnnnnnnnnnnnnnnnnnnnnnnnnnnnnnnnnnnnnnnnnnnnnnnnnnnnnnnnnnnnnnnnnnnnnnnnnnnnnnnnnnnnnnnnnnnnnnnnnnnnnnnnnnnnnnnnnnnnnnnnnnnnnnnnnnnnnnnnnnnnnnnnnnnnnnnnnnnnnnnnnnnnnnnnnnnnnnnnnnnnnnnnnnnnnnnnnnnnnnnnnnnnnnnnnnnnnnnnnnnnnnnnnnnnnnnnnnnnnnnnnnnnnnnnnnnnnnnnnnnnnnnnnnnnnnnnnnnnnnnnnnnnnnnnnnnnnnnnnnnnnnnnnnnnnnnnnnnnnnnnnnnnnnnnnnnnnnnnnnnnnnnnnnnnnnnnnnnnnnnnnnnnnnnnnnnnnnnnnnnnnnnnnnnnnnnnnnnnnnnnnnnnnnnnnnnnnnnnnnnnnnnnnnnnnnnnnnnnnnnnnnnnnnnnnnnnnnnnnnnnnnnnnnnnnnnnnnnnnnnnnnnnnnnnnnnnnnnnnnnnnnnnnnnnnnnnnnnnnnnnnnnnnnnnnnnnnnnnnnnnnnnnnnnnnnnnnnnnnnnnnnnnnnnnnnnnnnnnnnnnnnnnnnnnnnnnnnnnnnnnnnnnnnnnnnnnnnnnnnnnnnnnnnnnnnnnnnnnnnnnnnnnnnnnnnnnnnnnnnnnnnnnnnnnnnnnnnnnnnnnnnnnnnnnnnnnnnnnnnnnnnnnnnnnnnnnnnnnnnnnnnnnnnnnnnnnnnnnnnnnnnnnnnnnnnnnnnnnnnnnnnnnnnnnnnnnnnnnnnnnnnnnnnnnnnnnnnnnnnnnnnnnnnnnnnnnnnnnnnnnnnnnnnnnnnnnnnnnnnnnnnnnnnnnnnnnnnnnnnnnnnnnnnnnnnnnnnnnnnnnnnnnnnnnnnnnnnnnnnnnnnnnnnnnnnnnnnnnnnnnnnnnnnnnnnnnnnnnnnnnnnnnnnnnnnnnnnnnnnnnnnnnnnnnnnnnnnnnnnnnnnnnnnnnnnnnnnnnnnnnnnnnnnnnnnnnnnnnnnnnnnnnnnnnnnnnnnnnnnnnnnnnnnnnnnnnnnnnnnnnnnnnnnnnnnntctgtaccattagtttcctgtgaatcctcagtgaaaatactcccgaggcttcgggattgaaaacgaccgagcgataataaatgtgattgagcatttgagcgaaggtgcaagactgccatatggttttacttacgttccccaatttttgattgtcaactaattgtttacgacaaatcaaaactggtcactcagaaatctaagatccccttagctgggctttaaaactggagatctggtcttctaagtcctgaggcaaacccgggttttgaatgttggtataagtttgcatccactgtttaaaaaattagcatcaacagaaaacagaatataaattaaagtcctaaaactttgtatctggcttttatcaactttaagagtccgtaaatcaacaagcctgaggcgataaatgccaggacgctatatccaactttactttgaaaaaaattattaatgttttcggagcctagtccaagtgctgaggcaatttaccctcattttttttccagtgcttggcaattttatgtttagttagtagtttaactcctgtacttaccaaagccagacccactgaaaacataaggacgtctttaaggttgtgctgagccgaagacggatggtctggcgcaggcgtgtcggttgttttttcataagtcgtttttaggacttctttagcgagtaagctcatcccaaacgcagccacaaggcttacgacttcaaagtttttttcggtgaggtaggttttggttttcataggtgagtttttaattctttaaattaaagaaagcaggagatgtgccgcctggctttaagcctattttatcatttttctggagttaaatctgatgccaggttaaggtcaggaagtagataaaaatacagtcttaagtttgtgacaataatttttaaacggtttgtatttataagagtgtaacacaacttagtcagtaaaaaatacgtagctaagcctttggtccaatgcatattcctccaggtttttttcctatcacctatgatttcaggagttgttgtttataagagtcgatttgattttgaagttcttcgggtaaactcgggttttggatatcggtataggtttgcatccgtgctttgatcgtttgcgcaaccagcagtcgggcctggtgcttggagtcggctggaatcacataccagggcgcatgaggtttagacgtagcagataaagccttttcataagcttgggtaaactcctcccaaagatctcggtctttgagatcctccggcgaaaacttccagtgtttacttggagtgtttaggcgacgtaagagtcggtgtttttgttcgtctttagagatatgaaggaaaaacttaaagatgatacagccattctggtgaatggtatcctcaaaggcattgatctgctccagccgctgagtccaaaactctggagtaatgtcctccaatttattaatgtggggcaggttttcattgagcacaatttctggcttcactctggagatcagcacattctcgtaatgcgaccggttaaacaccgcgtactttccccgggcaggtaacgccttttgatgccgccacagaaaatgatgctgcagctccttgtgtgaaggttttttaaaactattggaaatgactcctctaacgttaaagtctttgaacacctctcgaatcaaactgtccttccctgaggtatccattccctgtatacaaaccaaaaccgaatatttaccgtgagcatataaggtattttgcatttctcctaatgctctgcgttcttttttgagcttctttttgagggctttatcacttaggtgagtttccaactgcgttggatattcactcaattggactttgccgttaacttggagatcggatagtttcatgatgttggattgtaaagtaaaggtataactcacaaattaaataaatgatttgatatggaggccctattgctcatctgaaacaaaaaatctcatgaatttagtctctgatactggtatgggatttattgcaaatttgctcatcgttaccctatcaagtaacggtgaggacctaattaaatctgctcttttttttactagtgtttcttgagcctgcctgtcgcctgcctgtcgtgccttagcaggcaggtgcctctggcaggcagggaatctttgctttacgataagacagattcttcattccgctgtgctccttcccgccagaggtcgggcaggcagaatgacaaattgaaaaatttattagccaaccgaatatacctctgaacgacagcgtgttgtcattccgacgataggagcctgcctgcgtttgtctgtcttacttctgccagacatttttacttggcaaaggcagggaatcttttcattattttagattaattaatatttaaataagtctattgaaaacactcggaacacacaactattacgtttacattttaacaaacaaaaataaaactgttttatatacaggtgtgactaacgatttgaaatcaagacttcattttcataaaaaaccaactgcgccttcaaaagcttttactactaaatacaagtgttattttttgatttattatgagcactttcccgatattaatcaggccattgatcgggagaaacagattaaagggtatagaagattgaaaaaagaaaacttaataaatgaattcaatcctgaatggaaatttttgaatgacgaaatctaattaacacttgaccattagatggaatctttattttgcgataagagagattcttcacttcgttgctcttcgttcagaatgacattctcgtttgtcattccaacagagaagtttttttgcttcgacgaggaatctcattgtcattccgacgataggagcctgcctctcgcctgcctctggcaggcaggtcgaactcaatctctaaaaattcttattctcgatacaaatttcactcatttcaatcgtgaaattcactagaattgacagaattttttaaatgcataacgggttataacacaaaaatcagagtaattaatgtcaagcaaacttgacattatcgttttttcgattatatttgtaaagtcttatttacataatgtctaatcttaattactttttaaaatgaaaaacacgagaaaacaaactttaaaattagccggttggacctggtcctgggtggctactctggcagtagctacctttgggccgatcttgatctgggatgatcaccaactccttacggtccttgctgttactgtgaattttaccaacggcgtggccatgctggtggccaatcgacaattttttaacagcctggatgaactgcagcgtaaaattcatttggaagctctggcctttaccattggcttaagcatgatcgtaggcatcacctattctgtgttggacattaccaatctcattccgatggatgcagaaataggtttactggtcggttttatgggtatcacttacctggttactttgttggttaacagaaatcgctacgtatgaaaaataaactcaaagtcttacgtgcggaacataactacacccaggatcaactggctaaagctgtagaggtctccagacagaccatcaatgcgattgaaaaggagaagtttgatcccagtttggttttggcgattaagttagcgcgcttattcaacactgaaatagaggagatttttatttatagtgaatagtgattcgcgactcgttagtagtgagcagtgattcgtgagcctgcctgcgtttccttggcaaaggcaggtcgtgattggtgattggtggagttaagttattaattttccattatagaatctatgatttccacaagtcttataagattaacaaaaaataaaagacagtaaactgaggtgtttcgtttttcatagtttgattctatgaaaaatattaattatacaacgattgctttaatcattgggtttgtgctcttttggaactcaggttttgtgggagcagaatacggattaccctacgcccagccttttactcaattattttggcgttattttggagtgagtgctttgctattggcctttcttcttattagtagacgatttcgatggctaacctggaaggaagcctatcctcaatttattattggaattttagcccatggcgtatggttgtcctgctctttgtttgctatcactgaaggagttccagctggcattgtagcgcttatcgtgtccttacaacccatcaccacgggtgcgatggaaggagttgtgactggacaacatacgaccaaacagcaatggcttgggctagtgattggatttttgggagtcgccttgcccataattttcagaatagaaggtaatggagcttccttcgtgaagtacttgattcctcttggctcggttgtggctatcacattcgccagtctttaccagcggcaacggcaatatgataaaagcattcaaacagtgaatctagatctatcgcttttctaccaggctttgggaaccctaatcgtgcttataggcccggcgctgatttttgaagattttaaaaccgagtggacttcagaatttgtagtgaccatttcctggttaagtgtttttgtttctctgggcgcctattatatgatgtggatgttgattgagcgcattagcgcaactcgtgtggccagtctcttctatttaggtccgcctgtcaccatgctgatggcttggatcctatttggagatcaaatagaaacctgggatattgttggcctcttaatcattgtgataggcctgggagtcacccaagttgatttcaaaaaatattttcctaacctgagtcttaagttgaaatagctcttgtcgacccattacttaagccatctctgtaaccgcttctacttcctgccagtttaagtccttttgatacctgtagacctgattatgggctgttgggtcgattaccaataaatgaatccaacggttctctatcagttgttgaaggtgtggattagaagttaataattgatctagcctggccttaggggcatgaacaaaaaccgaaagccgctgaggctggtggtaattttcttcatcgctcatattcaccgactgcagtggtaatccaaatttgaggtctccaccgtttccttgtaccactccaaatttgcctaccacattatgagtgattttggatcctccgccataggtcaagttatcaacggttgaaaagtaataatggttgttgatccactgggttaccaccatggggccgttcaaaatcgcgttaagcgcttccccttctggatcagcttcccagttgtaagaatgtaaaaaacattcaccatctaagtcaacatgttgagtcagatctctggaaccgataataaagccggcatttttggctagcccccactctggtcgggtctccgaccaatcggttgcttttaagatggctttatctaaagattgactttcacccaaacgctcagccgtggccgtttcctgagcagaatataagtcagcttttagttggtcgatttgagctctgaaagtctccggagcatcggcatcaaacaaggtgatctcctcggtggtcgtattatgctcggcagccagaaataaagtatcctcgggaatttctaaatcatgcttctctttaagctgggtttttaccgcttcagaattggccagtctggcgatcatacgggcattatgacgacccggactcgccgcacaggctccacaatccagactggaagcaaaaggattattagtagtatggctaccatgaccagaaaacacgaccaaaggcgcaaaggttttccaacccattaagtcgaaggcagatttaacaattagtgtttgctcttctagaggcagtgattcatttccttcagctgttttgatatcggtttcacaaaccgtttctagagatgatggcgtctgactatcgatttcatttttagataaattaaaacttcgcttaagcaattggtataagtagaccagacctgcaccttctacaaacccaaaggctgaaggtaataggtttttcatcctattaagaaaataggttttaaattttttctgtctatactgtttttccagctcatcttttccagatgcagtcgctttttctgcttcggttactctataagctgaatccagaattggtggacaggattttttgatcagtccggagaaaggaacttcatagtccatagcaatgccaaaaaagccagcatagccataggtctgatagtttccctttacttcgatatttctccggattaattcggaacgggtatcgatacagaacaccagttgcgcatcgggacgaacctttttcacttcgggtttatcgctcaaactaaggctgctgaggagattggactgccaggattgctcaatttgtgataaggctttgtccagaaccttcagcatctctaactggtggtctggtttcacttcagaaggagagagtggaaaaccaagtccttttgaaatgagcaatctcacagcgatataatcttctaaatgaagcggataagtttcctgccaaggactttgctggatacggtattttataaatcctacccagccaggtaaggctgcaaaataagattcaaataaagctttttgttcattctgagaaagttcggcagttaattctgtgatgacttctagtgatgattcaggtaaggatttacccctgggcatgttcaaatctttgtcataaatggctaaacttttccaggcctgatagaagcctttctgcttattcggcatatcccaggccgcaaccccctcatctagaaaagcactcaaccatttcaccaggagttgatctaccttatgagtagggttgagttgtaatttggttttgaggtgatccagttcttcaaaaaaagcagacaaatcctctgatacatgatgatctagcaacagatttttaaaatcagcctcggttaaatagcccttatctatagccgatttaaaaaaagaagcgtcgggataagctaaattacccatcttggtaaaggcgttttcacaagcttctcgaaatgaagaagcctcataaccagatagtggattggaagtcacaaaggcatacaatggccaggtggtacctacgactttagacgcttcagtgatttgagtttgaagtgctttagaatccatgctaattattttttaaattttaaaactgtggtttgatgtggctgtgtaatattcaataatttgacatatagccagggtgttttcctgtatataccgatacgcatgagtaggaaccctaccaggaagagtactccaaaaataatttcagcataggttaacttatgtggaaacagggagtaactcacatcttgaagaatataactgattccattataaaccaaggcatacatcgcgataccagcaataaacaaggctagagataacccgatacgctttgcataattcatgctgggttctttgatgatgttgagagaggtttgtcctactgtaatggctaccacaatggtgagaaatatgcttgtactggtgagagaggttt

SEQ ID NO: 2271 - DNA, 24110 bp, synthetic construct
  source 1..24110: mol_type = other DNA
  misc_feature 1..24110: note = Synthetic
gcgaggccagattctcgataggtagcaagtgggctggggcagtgttaagtagatgggcataccactgcttgatgttggtgagcaacagggcgtcgaggtcgatgccgtcgtcccactccaccgtgcagtcgcgtcgtggtatctcgagatgcatcacctgcttccacaggttgagcatatcactctcggttaagttgtagaactgattggtgttttccatgagtaaagtaaatttagcgttatagtcatcgcaaaattattccattcaatttctcgaaaacaatattaaaatagtacaaataaaaatgcagcacttctattatgaggtgctgcatattgtgcattatgtattacgaattattttagtgcatcaactgctgctttgagctgatgcatagcctgctcaaggcgttgacgtggagttcccacgttcagtcgcatgtggcagtagcccggaacgccataaatttcgccattgttgagcgcaagatgggcatcgttggcaaagaacttcaccagttgtgagtggtcaagacccaatcgcctgcagtcgagccacatcaggaacgacgcttgtggcttgatggcatagatgtcgggtatgttttctttgcagaaatcagcaacatagagtacattctgctcaatgtatttcttgcactcttcgagccacggctcaccataacgatagcccacctcggtggcaagcaatgaagggatattggcattacacagctcattaacctctacccagcgatagaattcactgcgcaattcggggttcttgattaccagccatgtactttttaatcctggaatattgaacgtcttaccaggagagccacaggtaatggtcactgctgccgcatcctcgctcacggttgccagtgggatgtgcttgtggccaaagagagtaatgtcgccaaacacctcgtcgctgaaaagaatcacattgtggcggcgagccagtgcggcaacttgttgcagctcttcttttttccacacgatgccaatagggttctgtgggttgcacacaatcatgagttttggtttctgctcaatgaacacacgctccaggtcgtcaagatccatacgatagaagtgatcgccagtgggcacaaggttgttgcgcaccgccaagcggcggttaccctcaatcacgtccttgaagtcgtagtacacaggctcttgcagcacaacgcggtcaccgggttgagtatagaagttgaggaccattcccaaggcaggcattccgccaggcatgaatgtcatctcttcacgactaatctcgaagccattgcggcgacgctgccagtcgataatcgattgccaatattcgtcatagggaagtgtgtatccgtagatggggtggtcaccaaatcgtgacactaatgcattactgatttcggggcaaacagcgaagtccatatcggcaatccacagggggagcaagtcgtcacgaccaaatagcggtgtaagctggtcattttttttgcagtgcgtacctttcctgtcgatgatagtatcaaaattgtattgattcattctaatttctgttttaggtttaggatttagttgtgcaaatgtactacttttttcaacgcgcgcaagccctagaaatcttttttaacctcttgataatagtaattcaactaccaaaaattgtggaaactcaaagtaaatgcctatctttgtgggcacaacaccatacattatttattgtttagaaatatggataacggcaagaaaaagatacattttgtgaaaatgcatggcttgggcaacgactatatctatgtcgacaccgagttcaatactatccccgaccccagcagggcgtcaatcgcgtggagcaagccccacacaggaattggaagcgacggactaatcctgataggacgctcacccgaggccgacttcacaatgcgcattatcaatgccgatggcctagaggggcagatgtgcggcaacgccagtcgctgcttgggcaagtacgtgtatgagcgcggcctcacacgcaaaactaccatcagtatgctcacgcgtgctggcatcaagatgctttatcttgacgttgatgacaacgacatggtacaaagcgttactgtcgacctcatggagccagtgctcgccgacaccacccaattcctcaccgagggcgaacagctccccgacggcgtgtttgtgtcgataggtaatcctaattatgtgatttttgtcgacgacataaacgatattgatcttgccaaggtggggcctgtgctggagttccactcccgcttcccgcagcgctgcaacatagagtttgctcaagtgttaggtcccaatgagataagaatgagagtgtgggagcgtggtagcggcatcacaatggcttgcggcactggagcctgtgctacacttgtggccgcagtagtttctggccgaactgagcgctcgtcaaagataataatggatggtggcacactcaacatcgagtggcgcgagagcgacaaccacctctacatgacaggccctgctaccacagtctttgagggcgacatagagttgccgtaatcaatgaatagttttgctcacaaaaaatgggactcagaatttaattttgagtcccatttctattttgtatcgtgcatttttaagtcattgatagcttaaaatcctttatcatctgagcaaattgtgggttacggtcgcgcatgtcctctactatctcgcggtcggtcttcgccattgtcgacactcccttgggagagagtttgatgtcgagagccaccatgtcgttacccacctcatcacgcaagaactgtagcaatttggtcatgttgctactgatagtttcgacttgcacagtattctctacctcaacctgataggtggtgtcgttgagacgctgtggcaccgagttacgcatagcactgagtaatatgatttcaccaggattctgctcgatgtagtgatgccaggcttgggtaaactgttcgggcgtgaatgccgcggtgcgcgctgtgtggcgctcggcaggagcatcgctagtggttgcgccagtgggttgcttgttgatgaggatgcgacgtgaagctactgatgcagggcgtgtaggggcagcgggctgtggagcaacagctctaggggctgttggttgtggagcagctggctgctgtggagtcgttgacgccggttgcactggagcagcagtggcttgtggtgctggttgagctggagccgactgttgaggcgccggttgcgccggagtgggtgccgccattaccttctgcactcgtggttgaggaggctgttgaactggagtgccacccatgatttggcacagcttgatgagcgtgagctcaaccacaaactgcttgttgctcgtttcgcgatactgtaggtcgcaagtgttgcacaggtccatcgccaagtagaagaatctagtgttgaatctcgatgcctgagtgatgtgctgctgagcgatgtcattattcatttcaagcagacccaccgtttgcggtgtgctggcaaccatcaggtcgcgcaagtgctgtgcaaggccgttcacaaaatatagcgagtcgaaacccttgtccctgatttctttgtagataagcagagcctgtggcacatcgcccgtctggaatgcctcgtcgaggcggaagtagtagtcatagtcaagaacattcaggttctcgatggcgctctgataagtgatattgccctcgctcgaggcgagaacttggtcatagattgacagggcgtcgcgcatggcgccgtcggccttctgcgctatcacgttgagggcggctgtttcggcagtcacgcccttgtcctgactaatgcgctgcagttgctccacgatgtcgggcactgtgatgcgtgcaaagtcatagatttggcagcgcgacaggatggtgggaataatcttttgtttctcggttgtggcgaggatgaagatggcatactcgggtggctcctcaagggtcttgaggaaggcgttgaaagctgcttgcgagagcatgtgcacctcatcgatgatgaacacgcggtagcggcccacttgtggcggcacgcgcacctggtcggtgagggtgcggatatcttctaccgagttgttgctcgcggcatcaagctccatgatattgtaggagcgctgctcgttgaatgcctggcacgactcgcactcgttgcagggctcgccatcggcacccagatgctcacagttgattgccttggcaaagatgcgtgcacaagtggtctttcccacgccacgaggtccacagaacaggtaggcgtgtgccagctgctcattcttgatggccgtcttgagggtgtgggtcagcgccttttgtcccactactgtcgaaaagcttgagggacgatacttgcgcgccgatacaatgtagttctcgctcatgagatacagtgattaattgttacagtctacaaagatacaacttttccacaacatttcactgctcttgagcaatttttagttggtgataatcaaaaaatagggtagaggttgccctcggcaactatggctatgttgccacctgcccagatgcttccgtcggattctaatcgagtactcactaccgaggggcgacccatcgtctcgccttgcaggaagcggcattcggtaacgcctttcagcaggtcattgtggtgcaggtagtgggtgagggcagcgttggcggtgcctgtagcgctttcctcggggatgccgtatagagggccaaagttgcgcacgtgggcagtgtaatcatcgttgccaatggcaaaggcatgcactcctgtcactcccagttctttgcttatttgtgccagcgcatccatgtcgggggtgagggcattcagttcgtccacacttgccacgggcatcatgatgtcgggcaggccagtgctcaccacttgtactggcaggttgatatctccagtaactcccatgatgcggtgcagtcgctccacatcgactgttgctggcagcacttgcggtgtagccatctccatcatcacctttggtccaactttcaccctgaggtcgccagcaagcgtatgattcaagcactcggtgccgttggctatcattcctaattgatgcattgctccaaaggttgctatcgttgcgtgaccgcacaggtcgacttcggcagctggagtgaaatagcgcacggtgaattccgtctcgctgtgacgttgcacaaatgccgtttccgaataacggaactcggctgcgactagccgcatctgttcgtcttgtggaaaatcttgattcttttcaagaagcaccactccggctggatttccaccgaatgccacttcactaaatgcgtcaactatcaaatatttcatcttctcaattatagtttattttatttggtcctcaggaaggagtgaggggtcgaacataactcgcgaacgattgtcccactgcagtttgcgctccagcacctcaccgctgttgcgatccagagtctcaagatatatcttcgatatgcggtagtagtggccattgtcttccttgtggaagtggtgaccctcttcggtgatgcgatattcccaggggaactcctgagtggtgcgcagttcggtctttaattcgtcgccgtcgcaccaggcgcacagctgcactggctgctcggtgtcgttgcggaagcggtagtccacaaagttgtagttcaccgatgttcctgcgctgtagggcacgcgcttgccatttgggtcgggtgccagggcatcgctgtggtgatgcagctcggttatggtcaaggggctgtgcattaccagcaggttgatggtattggcaaggttgcacaggccaccgcccacaccagctacgagttgcccgttcactatcacgcgaccaggcgcaaaaccgttcttgatagaggtctttcccacgcgtttccaaaacgagaacgtctcgcccggattgatgatgaggccattcatgcggctgcatgccagcctgatgttgtcggccttgttgagctgcagttgcaggtcgataccagggccacgctttatcatgttgttgctactgctgtagacaaccactggtagtttctcctcttgtctatgcttggcccatcgctccttgcccagccagttcttgatgtggcgggtgatgatttgcttttgcagcgctatggcataggtggttgggctaatctcgcaaaacagttttcgtttcttttccatgatggtcgggtgatatggttattgtgtcaacgtggttttcaaagtgatgtcgtgagctttcttgcatcggcgactgtggctgtagaaccacagcaccactttctcgaggttgcgcctgatgcctttcttctccttcttgtagtagccaatgtacttgactaggatgcttgctagacctgcgcggttggctccaaagatgtcggtaaacagctggtcgccaatcactattacctcacttggtttcacctcaagcatctccacggcatggtggtagcacgcaggactgggtttgccagcctcctcgatgtagagggtgtcgaagttttccttgaagcgctcgattcgtgcgcggttgttgttgctcagcagcagggttttccaccccatggcgtgaaggcggttgaagagggcgtcaacggcaggtgtcgaaccctcgccgtggggcacaagagtgttgtcgatgtcgagaatcagcgctttgaagcccatcgacatgagtttctcgtagtcgattgagaacacgtcctcaacgtagttgacggggtagaaaatgcctaacatagctctatttttgtgtcatgtagtcgcacaccttgtttatctgctctgggaaggtgccgtcaaatttattttcaaagaatgcgctgcctatggtgaacgaccaaggagcggcacgtttcacctcgtcgaggcgggcataactgtcgatgctgccggcaaggcacacgggtgcgtcaactccagcaacaagtgcattgttgagcgccacagcgtcgccagtgtagcgatagcccagcaaatcgatgccataggctccacgggcgatgtagtcgcgggcctcggctatcatgccctcgatggtgccctcgagcaccgacggacggcctgtgacgtcgcccacaaagggcatatacttgatgccgtgctcacggcagtagtcgtttatcgagtcaaagaacttggtgcccatgaggatgtcgcagccacattcagcggcaatcttggctccttccagtccttcttgctcgctataggcgaccacctcgaggaaggtggtcttgccacactgcctcatgcggtcatagagtttcttcatctcttcgagaggcagtgggtgctctttgaagccccaatatcgggccttggagtcgcggcactgctcgaagatgagtgctgcatcctcaacggtgtagtcgtgccacgtgagcatgacgatgagttcgggatgctgtagtttagttttcaatgtgttatatagtttttggttgtagtcggggttttacaaaatgctggagtcttcactcattttcagcagtgtgaagattccttcgcggccttcgttcatgagcaggtcgaggatgctgagtgctggagtgaaactgccgcggcgctgcgaccacatttggtagtagggcacgttagccagggctaatcggtcgccacgcttgagtcccaccttgccgcgcaggtcgagggcgccatgttgcagtgcctcgtcaacctcttgctcggtagtgacaatggtagttgtaatgggcaagtccataaagtcgacaatgaggcggtgaagctccatgttgaggtcgagcaggctcttttgctcgccgtcggcaatgatgtgctgcaagtcatgggctatgtagtcgaagaacgggctcttgccgtaggacgagaaaagtgcgccccagtgcaggtgacgccagttgccatgctcactcacgagcacatctttcatcatcactggcatggcattggtgctaccctcgagggggacagtgagtttgacggctccgttgggcgcgtcaatcacatagcgatggtggctgtggcgcagcggcagcgagcgctcggtggcgtcaatcaccacctcacctgccttgaccatggcggcatagcaccgcacatcgcccgcacacatgctgcccattaacaatgcatgattcataatgcacaattaaatggtaagtgttaacctctgcactctccactctgcactctcacctacttatcgggatttgcgtcgatgaaaacgcggtcccagcgaatcttgccgcttgtccagccacgatccttgtcaaacgagatgatcacaaacattggagttcccacgatgtggtcctcgggaacgaagccccagaatcgtgagtcgagtgagttgtcgcggttgtcgcccatcatccagtagtagtccatcttgaaggtatacttcgctgctggcttgccgtcgatataggccttgccgcccttgatctctagattggcgcgctcatagtccttgatgcagcgagcatagagctgcaagttcttctcgttgaggtcgatgctggcacccttctttggaatccagatggggccgtagtcgttatgcgtccagccgtagtccacgcccacgggataggtgagcatgccctcagttggactatattgaaccctagtgacgccagtcacccatttgcatttctcgagttcagccttggctgcagcggtgagcggcaagtaaatctcgggcgagataaactgctgacctgtcaatgggtcaacgctcacgttgcggcctatatcctcgttgctgatgcccagttcttcggtaaggaagtcatagtcgggggcattgccgttgcatttcaccgcgtagttatactgaacgttcttgggttcaggcattgccttgccattgatgtgcaccacgccattcacaatcttgagagtctcgccgggcaggcccacgcagcgcttcacatagttgtcgcgacggtcaacggggcgataaattaccttgtggttggcccacactgcatcgcggccctgctcccacacctgggtgtagtagtcggggtttggctcatcgacgcacacagtgtcgccagctgggaagttgaacaccacgatgtcgccgtgctcaacgttgcgcacgcccttgaggcggtgataggggagttggggcttctcgatgtagctcttgcagccgaacagctcattctgcgccagtgggaagtggagtggagtctgtggcacgcgaggaccgtacaccatcttgttaacccacaggaagtcgccagtgagcaatgtcttctcgagcgacgatgatggaatctggtaattctggccgacaaagaggaacaggaagtaaacgagtaccagagcatagacaatggcgtcaacccagctcatcacggtgcgaagcagcttgttgtcgctgaatttccaccagttccatgggatgaactgagtgaggtagatgtcggcaagcaggaaccacgcgagggctacccaccagttgcctagccacgccacccaggcaaagaagatgacgctaacaatgccgaagcgtatccagcgggtcttcttcacccttgacaggcgctctttcagcgagccggtttgtctaactttcttctcctcgttattctcttcaagattcatgtctttctgttttaccattttcgcgaacctaaaaacggtccactactgaattaacgtgcaaagatacgaaatagtttttagttggcagttattagttgttagtttttcataaaacatcaaaaacccacaaccacacaccaacatttcaaacaaaaacaaccaagtcatacaatgacaacaaaaagataataaaaaagaacgaggcccgaaggtcccgctcttgatgtcttcacaacggaataatccttattgtgaattgcttcaaatttgttctgcaaatttagcgtaaagtgtttatacatgcaaattttttatcagaaaaatgtgataacttgcctatattttttctatatttgcaaaaaataggaatttaaactaattaaacatgaaaaaggtattaggactagacttgggaactagcagcataggctgggcagttgttaaccaagcagagagcgacaaagagaaaagcagtattgtaaagcttggtgttagggtaaatccattaactgtcgatgaaaaaggaaattttgaaaaaggaaagagtatcacaaccacagccgacagaactttaaagcgtggtatgcgtcgtaacttgcaacgcttcaaactgcgtcgtgacaagttgattgaggttttgaaagaaaacggtataatatcaaacgatagcgtgcttactgaggatggtgcctcatcaacctttgaaactcttttactgcgtgctaaggctgcaaaagaagagattaaccttgaagaatttgctcgagtgctcctttccataaacaagaagcgtggctacaagagcaaccgtaaagccaacaacgaagaagaaggtgagctaattgacggtatgacagtagcaagggaactttataataaaggcattactccaggtgaatatgtttatgaactactaaaggcacaaaagcgatataaaccctcattctatcgctcagacttgcaagctgaactagatacagtgtggaataaacaagccaaatattatcccacattgcttgatgaagaaacaagacataaaattgaaggcaaaggcaagactgacaccaggaaattgttctatgccgcccataatattagtgccgctgaggaaaaagaccgcaagttacgccaaatcacctattaccaatggcgcgccaatgcagcaaagactaaaatagagcccgagcaacttgttactgtgcttagtgagattaatggtgacattgctacatcgagtggttatcttggcgcaataggtgaccacagtaaggaacttgaaatcaacaagatgacagtgggcgagtatctttttgacctaatcaagaagaatcctcacaatagcctgaagaacattgtgttttatcgcaatgactatatacatgagttcaacaccatttgggaaacacagtctagattccataaagaactaacaccagaactaaaagaaaaaattgccaatgagaccattttcttccaacgcaggctaaaatcacaaaagggactgatatcgttttgtgaattggaaggaaaagagattactcttgccaatggtaaaaaggttatgacaggtccaagagtgtgccctaagagttctcccctatttcaagaattcaagatttggcaagatctcaacaatctattgcttgagaacaaaaccatcaagaatggtgataagacagtattgaccattgagcagaaacaatgcttatataatgaactatattgcactaaagaactgactgctaaagaagcactcaaagtgcttagtctcagtgataaagaatattcactcaacttcaagaaattgcaaggcaacatcactcaagtgactttgctcaacgcttataaaaatattgttgagatgacaggtcatgatgttgataaatttgacaaaatggatgccgaaaacaagttgcaccttgtgaaagcggtgtttgaaatgctaggtgcaaaaaacaatttcttgacatttgactgtggttctactgccgatgaaatgcagaaaaatgcaatgtttaaattgtggcacttgctatattcttatgaggacgacaacactccaacaggcaatggcaagcttattgaccacatagcagagttgacaggtctccctcatgaatatgcatcaatactcgctcgagtgaccttcgttcaagactttggctcgttgagcagcaaggcaataatgaaaatcttgcctcacatgaagaatgagggaatgatttactcagatgcttgcgaagcagcaggatacaaacattcaaaacaatctctaacaaaagaggagaaagagtcccgcaaacttgagaaacatcttgaactgttgccaaaaaacgcacttcgcaatcctgttgtcgagaaaataattaaccagatggttcatgtggtgaatggatgcatcgatgagtttggagattttgatgaaatccacattgaaatggcccgtgaacttaagcagaatcagaaacagcgagaagatgccacaaagcgacttaacgccaagaccaaagaaatagagaatatcaagaaaatcttaaatgtagcacctttcaacattacaaacccaagtaggaatgatgtgctaagatatcaactctatgaggaacttgcacctaacggctataagacactttactctaacacctatataagtaaagaaaaactatttagtcgagattttgatatagagcacattattccccaggccaaggtctttgatgactcctactccaacaagacacttgaggcacgtgatgtaaatattgagaaatcaaacatgacagccattgactatgtgaagatgaagagtggcgaagatggtgttgagaactacaaaaaacgcattgcattcctcaacaaagaaggcagtagaaaaaagtataagaacttaacaaccgaagaagataagattgaaagcgatttcttgaatcgagatttaagtgactcgcaatatattgcaaggaaggcaaaagaactgctcttgcaagtggctcgtgacgtgattacaacaacgggatcaatcactgccagattgcgtgaagactggcaactcgttgatgtaatgaaagagttgaattggagcaagtatgataaattgggtctaaccacagtagagcgcaaccgtgatggacatgaggtgagaagaatcacagactggaccaagcgcaatgaccaccgtcatcatgccatggatgctctcactattgctttcacacgccactctcacattcagtatcttaacaacttgagtgcgaaagacgatggagaaaagaaagattcaaacatctatggcattgagaaaaaagaactactgcaaaatcgacgtttcgttcctcctattccacttgatgagttaagggccgaggctttaaaacatcttggtgagatactggtatcgataaaagccaaaaataaagtagtcaccaagaatgtgaacaagataaaaggttcaaggtcgcagaacacattaacccctcgaggccaacttcataacgagacagtatatggtcgtcgtcaacgctatgccactcgtgaggaaaaagtgggagcaggattcacactagagaaaattaatacagtgtgccgtaaggcttaccgcgatgctctcatgaagcggcttgaagataatggtggtgatgccaagaaggcattcacaggcaaaaaagcccttagcaaagccccactctacattgacaacaatcacagagcaaaagtgccagagaaagttaagatagtagttcttgagaccttctacacaataagaaaaccaataaacaaagacctcaagattgagaaagtggttgatgagggcatcaagcgcatattgcagcagcgcctgaatgaatatggtgatgccgccaaagcattctccaatctcgacgaaaatcctatctggctcaataaggagaaaggaaacgccatcaagagcgtaacaattaaaggcgttaatgtagcaacaccattaaggactaagaaagataaatatggtaatatcatagttgacagcaacggcaataaagagtttaccgactatgtgagcacttcgaacaatcaccacatagcaatctttgaggatgccgacggcaatcttcaggagcatgttgtttcgctatttgaggctacagcaagaaagtcgcaaggcatgccagttgttgatagagaatatcataaagaacttggatggaaattcctgttcacaatgaagcagaatgagtacttcgtctttccagatgaggaaagtggatttgaccccaatgacattgacttgacaaatccaaagaattataacttgataagtccgcatcttttcagggtgcagaaactgtcaacatgctattatgttttcagacaccatcttgagactaatgtgattgaagataaaaaacttagagatacaacttggattagaattcagacaacaaattacttaaagggtgttgttaaagtccgagttaatcatataggccaaatagtaaaagtcggtgagtacctatgattaagcgtacattgtattttggcaacccagcctatctgagcaccaagaatgcccagatggtgttgcgattgcctgggaaagatgatgaggaagaacaaactcgcacctttcctattgaagacctgggcgtggtaatacttgacaacaagcagattactattacccaaggcctgatggaacggctgcttgaaaacaactgcgccgtgataacttgcgactcaacccatatgcccactggattgctattaccacttgatggtcactcaaggcagagtgagcgattcaaggctcaacttgcttgcagtaaacccttgaagaaaaacttgtggcaacagactgttcaggcgaaaattgccaatcaggcatcggcattggaaaagtgtgtgcctggctgcaaaacggggaatctacgagcttgggttgatgaggtgcgcagcgatgataacttaaaccttgaaggtcgtgctgctgtgtattattggagtaatttctttccagagattaaaggttttaaacgtgaccgcgagggattctttcctaataatttgctcaactatggatatgctatattgcgtggtgtgatagctcgcaatcttgttggctcaggattgttacccaccatgggtattcatcatcgcaataactataatgcctattgtttagccgatgacattatggaaccttaccgaccatttgttgatgtgcatgttaagcacatcatgaaagattgtgatgatccttgggaattgacaccctcaataaaacgagaattgctcaccattccaactcttgatgtgaagatagatggaaagcgacgtccgctgatgattgctgccgagataacgacagcttcgcttgctagatgttttactggtgaatctcgaaagatttcttatccatatttttaagaacatttaactgggaatgacgagttgtcagcgctttagcgaatatagaattatgtgggtccttgtgttttttgacttgccaaccgacactcgaaagcatcgcaaagcttatgcaatgtttagaaaaggactaatgcaggatggatttacaatgattcaattctcaatctatgctaggcattgtgctagtgcgcaaaatgctgtagttcacgtacaaagagtaaaaaatatccttccacttgaaggaaatgtgtgtataatgaccatcactgacaaacaatttggtaaaatggaaatattcaatggcaagagtccggatattcctagatgtggaggtcaacagcttgaactcttttaaaaaagtaaatccaccttttgtgaggtggatttattgttatagtaatacaacttttttaaattctaatacaacccataaatatctgataattaacaaaatactattatcgggttgtattaactgatacaaagatacaaatttgaaagcaattcacaactcccgttttgctctttacctcatcaagcggttgtattaactgatacaaagatacaaatttgaaagcaattcacaacactcgtttaggtcaaacaattcgtttccggttgtattaactgatacaaagatacaaatttgaaagcaattcacaactgactacaacgagggcattgccgaggcaaagttgtattaactgatacaaagatacaaatttgaaagcaattcacaacgtacatgaatgagagtaccgacttttaaggttgtattaactgatacaaagatacaaatttgaaagcaattcacaactacctcatggttgccaatcgcaaagagcatgttgtattaactgatacaaagatacaaatttgaaagcaattcacaaccaatttggtgaagttttacaaacatctgaggttgtattaactgatacaaagatacaaatttgaaagcaattcacaacctttggatgtggaaaccaatccggcaatcatgttgtattaactgatacaaagatacaaatttgaaagcaattcacaacacattcggagtaaggaacgaaaaaggtgaagttgtattaactgatacaaagatacaaatttgaaagcaattcacaacggttcttggtgggtgtggttctggaggttagttgtattaactgatacaaagatacaaatttgaaagcaattcacaacctcatggcaattatcatgctatgcgttcagttgtattaactgatacaaagatacaaatttgaaagcaattcacaacaatagagtagattgggtaaaaatcgcctgagttgtattaactgatacaaagatacaaatttgaaagcaattcacaacagtcccgaaagcgtggtcaaaggagtcatgttgtattaactgatacaaagatacaaatttgaaagcaattcacaacgtagatggtgttctgctgccagtattcgctgttgtattaactgatacaaagatacaaatttgaaagcaattcacaacagaacggcgggttatcgaccaccacgcaccgttgtattaactgatacaaagatacaaatttgaaagcaattcacaacttgttcacttatgcaaccaattcagcatccgttgtattaactgatacaaagatacaaatttgaaagcaattcacaacgggtgtttcatctcgcagagcatgacgagggttgtattaactgatacaaagatacaaatttgaaagcaattcacaaccaacggctgcagctggtactaatccaattagttgtattaactgatacaaagatacaaatttgaaagcaattcacaacgtctcgtatgcggatgagcctggcgacagtgttgtattaactgatacaaagatacaaatttgaaagcaattcacaacaccctctgctcttgtctatacgcttacctggttgtattaactgatacaaagatacaaatttgaaagcaattcacaacaaggattgcttatatgaaagtgacaacatagttgtattaactgatacaaagatacaaatttgaaagcaattcacaacattttttgcaatacattatctttgtatttgttgtattaactgatacaaagatacaaatttgaaagcaattcacaacatttgctttatctaccgctttttgattcagttgtattaactgatacaaagatacaaatttgaaagcaattcacaaccaacttgcgctcatattcaatgatgtcgaggttgtattaactgatacaaagatacaaatttgaaagcaattcacaacatgctcactcgcacatgagaagagaatgacgttgtattaactgatacaaagatacaaatttttcacgagatttgaaaattcaccaaattcgccattttaatattgttttcccttcccacttgcacgtacctttgaaataaaaaaagcgtatgtgcaacttaaattatatttttacccatccagcctcaaggaatatttcctgcgcaagcaggctttttgacgagctccgttcgccactttgtgagattaataaagtatctgcgcgcagccctctctctcacatctccactctccactgcaaatgcattgtgcattgttaagaaatcatgttatttttgcgcatgtaaacaattgtcacttagccgcttccacaaaatatgcacaaataagtgagtcaactgagtcaactgagtcaggtgaaccaggtgagtcaggtgaaccaagtgattccatgtttccatcgattccatgcgcagccccattgtgcattgtgcactatgcattgtgcatttttcaaggcgaagcgccccaccccccccacgcgcagcccaaatattcctgcgcaagctggctttgcgacaccgtcaggtgccactttgtgagattaataaagtctccgcgcgcagccaaattgtgcattgtgcattatgcattgtgcactgaaaaactctcccctctctccttcttagttctgttgttgcgattgctaatattcatgaaaagtggtaaaaaagcacttaattaaggaaatttttctttaattgtacatttgatacaaaataaatgtgtaactttgcgttctaaaaataaaggagggtttttaattggtgaaatatcactcctttgtgaggtttttaaatcaatagggaaaaacttttaaaaaacacattataaatcatttacagctatggcaaaatttgataagtcagtattagcgaagtatggtatcaccgacgtacaggaggtgctctacaaccccacctatgaggtattgttcaacgaagagaccaaagaaggcctcgagggttttgacgtaggccaggagactgagcttggcgccatcaacgtgatgaccggtatctacaccggccgctcgcctaaggacaagttcattgttatggacgagaacagcaaggacaccgtttggtggacaactcccgagtatcccaacgacaaccaccctgcaagccttgagacttgggcagccgttaaaggcatggctcaaaagcaattgagcggcaagcgcctgtttgttgtcgatggtttctgcggtacccacaaggacacccgcatgaaagttcgtttcatcatggaggttgcatggcaggctcacttcgtgaccaacatgttcatccgtccacagaacgaggaggagtttgaccaggagcccgacttcatcgtttacaccgccagcaaggctaaggtagagaactacaaggagcttggcttgaacagcgagacagctgttgtgttcaacgtgtcgagcaaggaacaggttatcctcaacacctggtacggtggcgagatgaagaaaggcctcttctcgatgatgaactactacctgccactgaagggcatcgcagctatgcactgcagcgccaacaccgacatgaacggcgagaacaccgccatcttcttcggcttgagcggcactggcaagactacattgtcgaccgatcctaagcgcaaactcatcggtgacgacgagcacggctgggacgatgagggtatcttcaacttcgagggcggctgctatgccaaggttatcaaccttgacaaggagagcgagcccgacatctacaacgctatccaccgcgacgcactgctcgagaacgttaccgttgacgccgagggcaagattgacttcgccgacaagagcgttactgagaacactcgcgtttcttacccaatctaccacatcaagaacatcgtgcgcccattcagccacggacccgctgccaagcaggttatcttcttgagcgccgacgcatttggcgtgctgcctccagtgtcaatccttactccagagcagaccaagtactacttcctgagcggcttcaccgctaagctagctggtaccgagcgcggcatcactgagcctaccccaaccttcagcgcatgcttcggccaggcattccttgagttgcatccaaccaagtatgccgaggagctcgttaagcgcatgcaggttagtggtgccaaggcttacttggtgaacactggctggaatggaactggcaagcgcatctcgattcgcgacactcgcggtatcatcgacgctatcctgaaccacagcatcgacaacgctccaaccaaggagattccattcttcaacttcaccgttcctactcagctcgagggcgtagatccagctatccttgatccacgcgacacctatgctaaccccgccgagtgggaagagaaggctaaggacctggcaagccgcttcatcaagaactttgccaagtatgagagcaacgaggctggtaaggctctcgtagccgctggtccacagctctaatagttcaaagctttgagctagctggactattattgaagctattcaaagaacaatcgccgcaagccattcgggctgcggcgattgctgtttttatctatcacgccttatctcaagcgggtgaggtggtaggtgacggttgcgcccgattcgggggcggtagtggtgagcaccatgtcgtcggcgttgagtgtcaccacgttaaagagcgtcactgtagagaggtagttggcagggagatattcgcccacttgcggcgaaaagcggttgtcgatgaagttgactgtcatggtcttgccgtcgtcactttcctgccacttggcaaagctctcgatgtactcgtgctgttgctcgttgacccacctgatgcagaatatcttaccttggaacatgaagtagtagttgccgtcgtagccgtcgtcgggcaccccatcgacctcaatcgcgtcgaggtgccagaggccaaaccaatagccaatgtcgccattgttgtgggagcaactgctcaatgccaatagggtggtgagcactagggcaatgtgtgtgacagatcgtttcatttaaaggagaaattgccgttataggtgattgataagagcgctccggtgttgttgccgccgtagagcttgccatggtcgtgcgccagttgagcgcggaactgcaggccattgagccagcgtggtgtgtaggttgcctcaagcatcatagaggtgcaagtcattggctctagcctaggaatgaaggaagtgccaaacgatttgcgccacgacagcaacgcgcgatagctcacttggctgcccaggtcgcccatgagtcccaagtggaatcctcgcaggcggttgtcggtgaagcgcatgtagccgtcggtgttatacaatggcgactttgccataggggagcctatcgacatacctcggttctggtagccgttgtagcagtagttgttgtagtagtcgtcgccaccagtggcattaacgcctatttcgctaccagcagggtggttgtcgtcggagagatctttgtaggcaaaatggatgggaccgctctggttcatcaggtcgataaactcggcaacaaagccagttacaatgcctcgattgccactgcggtattcaacaccccaaagcccgtcaaggccgttctgcttgccaattcctgaaccatcttcccacagcgattgatagtaggcgcgcagggttgttccgctgggcatgcggtagtcgattgcgatgtcccatgaacccacatggttgccttgcacgtagatttggtcgcccaagttttcgcctccaccgcccgcaaagagggctcgccagaaagccttgagcgtgggtttcatctccacggtcttgactatctcaccgttagcataataagtggcggtgccagcaaactggcatgccgcctgagctccaatagttagcatcagagactttgagggattggtgcggaaatggatgttcttgtaattgaaccagtagtgagtggtgatgaagctgttgtaatagttgtaatgattcttgagccatggtgagctgttgtgcctgtagtaaccatactcgcccttgatttgcacccacccgcgtgtgaaaggcacattttggaagttgatgaatcctgcacgggtgccaaatgccgctcgggcattgtcgctcatcacaaggtcaccgctgctcaggtcgcggttcaccagcccagggtcgatgtttttttggccaatggtgaggaacacgccacgatgctttccctcaatccatagctgctgaatccacagtcgagcaggatgctgaggattggtaatcatcgtcttgctctcacagtcgtagcgctgatagtcgacgctcgacgaccagccgccccacacctcggctccagcgccccacgacaggcgccgagtggtgtccatgtcgtgcttaagggatgctgagagcagtgtagagtgccgctgcgtgactgtgccgtggcggttgctggcgatgtagtagggggcaaactcgcggctgccggtgttgagtgtaatagcggcgctatagtcaacagcaatactgtcggccgcgcacggcagtgcacaccccacaatcattgccaccatcaggcaccatatttcctttttaagtcttgtcaataaatgatattcatttactaaaataactattattataacgtatattttactgtttttgttgtatcaaaaaatggcaatcaaccactacaatttgcgtaagtgaagtattttgccgaactttgcattccagttaagccttaccgtttaatgagcataaagtcgttatatcaagaaataaagcaatggaatgccaagctaaaggtgaaaagaaaagagccgatagcaattcctgctgtcgaccacacttatcacgtgtgccagcattgcgaatatggctttagtggccgcatctgcccgcagtgtggcatgcctgccgagcatgtgcgcttcactttcaagcggttgattcacaattttctcgacatttggggtatgggcaatcgtcccatgttccgcaccatgcgtgacttgatttggcgtcctggttacatgataaatgactacttgagtggccatcacttgagctactttccaccattcaagatgctagcggtgctcaccattttcatcgtgttgttgtcgatagctctaaagcttgtgccatttgacttcagtgatcatttagccaatattatagcaccttttgaggccaatggagtgagccggcccaccaggttgctgcttgactacataaccaggcttgtcgattatcttgacgataatgacctgtcgcgcattatggttcagaacatctttgtcgtgcttgcggcttggataacgtttcgcaagaagggttacaaccttgtagagacctttttcgctcaaatctacatcaactgccaattccacctgattaccatcgtgtggattcttgttacctttaacctgccaccaacctacttcttgccctatacggtgcctctaggcatagcagtgctagttctcatctacgacttcaagcagctatatgggttgagactaataagcgccattgggcacacatttttgttcctgctatgtgtggctgtcctttacatagcattcttggctctgctattcacaatcactctaggagttgagtcattctcggacggcaataatgccatcaaaatgatcaaatccaccaaaattgtagtgccttaatagcgtgctacttcagtcgctccttcagtcgcaagatgcgctcgctcgactcgtgaatgcgctggtagggcactttccctgtcttgactagattgacgatgatgtcgaccagcttgaaaggcctgtcggcctcaaaacctgtgtcaatgttgttgcccacgagcaggatatcggctccagcgttgatagcaagggcaaacgcctcgggtattgagtgctggctcaagatgccctccatatacatgtcgtcggtaaccaccacgccgtcgtagtgcagattgttgcgcagcagttcggtgatggttttgtgcgacagtgttgctgggtaatcggggtcgatgcggcggttatagatgtgtgcggtcatcaccacgtcaaccttgttcttggcgataagtttctcaaatggagtaagctcgcttgggctccagtaggaggtaacgtcgaccattccctcgtgcgagtcgcccagggcactgccgtggcctgggaaatgcttcacggcgcacaggatgccgtacttgtagtgagcatcgataaaccagccggcattgcgggtgattgcgtcgacgtcggtcgagaagcagcgcttgaagtggcccaggtggggaccgtcgtcacggtggatgtcgagcaccggcgccaggttaaggttcacgccactctctttcatctcctgagcgatgcgcatcgcgtagtagagcgtggtgtcgcggttgtcctgagtgcccagatagagagcgttgacagtgggcttgaagccatactctggcttgaggcggcacaccatgccaccctcttggtcggcagcgatgatgagaggctcgtcggcatagctttgcagctggtgtgtgagcttgatgagtcgctccttggtggtgatgttgcgggtgcctatcttgcgcggaccgtcgctagtgaggtcaacgtcgaagagcacgatgctgcccacgtgcaagtcgcgcacgtagcgtgcagcgtcgctgttgtcgtcgatttggtcgccacggaagcccaccatgagcatgcgggctgcctcacggcgcagcatcgagtcgctgggcagtgactcttgcgccattaatg

SEQ ID NO: 2272 - DNA, 24107 bp, synthetic construct
  source 1..24107: mol_type = other DNA
  misc_feature 1..24107: note = Synthetic
aaatcacttttatcttttatgaattcatcttctgataaatccggattattcaatcgctcttccataattactcaattcttttctgttaaataagttttcttctgtaagtgcaaatcaggtttgattattattaaccgaattcaaccctgtgggaattatcaaccggaaaaaacttctgttgtaaatagcagtgcagactttctggttaggctaaatgaaagctgtctaataaacatctgactgatagcgttttgatatttgaagatactttatatattcttccgctttttcaggtgttactcctccctgttgctggataatttgctttaaagctatatccacgtccttggccatttttttagcatcgccacaaacgtaaaaatgagctccattttccagccactcataaagctctttccccttttccatcatcctgtgctgcacataatatctttgctcctgatcccgggaaaaagccacatctgcttttgttagcacaccttctttaagatattgctgccattcggtttgataaagaaaatcggtagtgaaattgcgatctccgaaaaacagccaggacggaccttttttctctgagacctcgcgatgttgcataaaagcacgaaaaggggcaactcctgtgccaggaccgaccataataaccggggcctcaggatcggtagggagtttaaaccgactgtttttatctacaaaaacttttactttatcatccacctgaagcctgtccgcaagggtcgcagaacaatgtccttctttttccctgccaaaggcagaataacgcacgaccgatacaagcaggtgcacttcatcttccacagcatcctgcgaggaggctatggaatacatacgaggcgtgttttttcttaaaacagaaagcagttcgttaggctcaaatttatgcggctcctcttccagtaaatccagaaaatcacgtcccgccagatattcaagaattttcatattatctgaaagaacctcctttagctttctacttcccgttaattcctcatatttcgataagtttatcctcgaaagtggggtaagctcataatcataagtgagagcttccatcaggcttttttcacccttatggcttttcaccatttcattaccggaaagatttgtaacactcaaaaccttttctataagcgaaggcggattggctccaaaaactcccaaagcatcacccggttcatattgcaagccggaaccctcgagatccagctccaagtgtatggtttctttagatgatcctcgcccattcagtcttaccttttccagaatggttgcctcaaatggattttttctggagtatttttgttcctttaccccggcagcagtattattctttactttaacactagatcctgaatcggaaaactttataagcgcctggagaaaagactgttgccatgcttcggcctcttcttcataatctacatcacaatcctgtcgggagctaatacgttgagcaccaagtttttctaatgcaatatcaaaatccttccctgtctggcaaaaatcaacatagctggtgtcgcccaaggccagaaccgaaaatcgcacatgggaaagatcaggtgcttttttgctgtgcagaaaattataaagatcttcagcctgtatgggaggttctcccaaaccgtgagtgcttacaataaccgcaagattggtgattttctttaggtttcgaggtttaaacgatgccatatcagaaacttccgtttctatgcccttctctttcgctattgaagccaggttaaatgctaaagcctcactatttcccgtgtgactaccaaataaaatgttcaacttttcaggctcgcttacaaaggcagtatttctagacgcagccggttcttgttgatcagccgttgctattgttgcaggagaaacctgaccaatacctgaaaaatatccacttagccactgaagctgtcctgaatctaaccccgacagcgcttcatttaatttttccgcctgcttatcgttgaagggtcctctttccaatccgttttttatatccatggccacaaatttttcttttctatgtatgagtagggggctacacagggtttaataatcatcaacactaacagcaagtacttttatctctctcagtaaaatctcaatttaagggagctgtatggccaaattcagctgtacacctgcggtataatcagcaggattaaaataaatcatgccccaactgttaactagctattgatgaaaatctatttaccctttcgtagtttgcgctttaaaattcgatgcatcatctccaaattttaagctcatcttctttagttcctcagtgtaaaattaatatcgattcctgactaaaagtaaattacaatttttgctttcgttattaagtccaaaaataactttgatgaaactaaaataccaattgcaattattaatattggataaccagaagttatgagggagtggaggccttgaatgactgaaaaaagctcgtgagcgtataactaacttaaatacaaagggaaataatcttaattcgaattcttctagaaaagtgataggctgttaatcctgtttttatttatgaatctttattatcaaaaattatggttcctgatcaaaaattcgattattaacgaagggagaccaccttctggtccctgcggggtaatgaagtagaaatcccgatgaatcggtaactttttaatctcaattattttcagaagcccacttttaagctcttttaggatggcatgtaaagacacaaaggccatgcaatcagaatgctgcaggtaagatttaatagcttcagtgcttcccagttgcatttcgacctgaagttctcccaggcttattcctttttgtttcaaggcatcagcagttacttctaaagttcccgagcctggttctctcaacagcaggggaatctttttaagatcttcaggcattatttcatcttttttagccagagggtttttactactacacaccattacaatttcgtctttcagaaatggtgtataatgaatttcccggcgtttggatttaccttcaataaccccaacttcaatttttttatcaagcagggcctgctcaatttgctcagaatttccactgagaagttctacttttacctcctggtgaaccttgtgaaaacgggcaagaagagggggtaaaatatattgtgtaatagatgtactggatcctatatgaagaatacctttaaaggtttgattgagctgatttaggtcaaattctatctgtctgtaaatttcttttatctcttcggtatgtttcagtagtacctctcctgcaggagaaagctgtactttatttcctctcctgtcgaaaagtgcaagatcaaactggttttccagctctttgatatgtttggtcactgcaggctgcgtaatatgtaactcttcggcagctttcgtgaaacttaatcttctggcaacagtattgaatacttttaggcgaaaatcgaacatatacaataatactcataaatgccattaccggctaattgtaaaaggtttttatgaaggttattcggccttctgaacatactaatttccggatattaatttgaaagagactctttttggtcttccgatttgtaaagtgtttttgcttaatgagcgagatcatatcctatgggacggtatggggaaaattttccgattttaataatatcttgccattaccttgtagttaagaaatggctttctttgatttatggaatcaaaatcattttctcacaaatattatgttaaacagtaaacagtgatgacactggcaaaaaattcgttccggtatcacctaaattacttcaggaactaaaaatatgagcttattatcgatttcccattagccacaaaggagttcactcttggaattttccagatttaaaaccttaacttttcaaaaaatcaacaagatttatctaatttctgaacaagtacctggcccaactgatccattttaaaaaattaccaaattaggcatctgtttcgttccctccctttaacaaaagaaagagagagaaagctcctatagacatgacaagatctcttactgcgatatcaaaatattctccagaaataagaaggtttaagataattccaagaagccaaagacttacaacaagcgatccgatttttggttttaatagtaccagaattccggcgattatctcgatgatacccaccccatacataaaagagtattctgagaatggtaatatctgttttatagctggagccagatacttgtgccattcggtgagaaggttagcaaatttatccagacctgcgataattggaaccagtccataggtccatttaagaagtgtaactacgtggtttactttattgttgagttccatttaaatgagtttaaaaatgccgctttaaagaatagagttcatgaaccttcaaaaggttacaaattcaaaaggggaaatggagaagattcaaaaattgagccttgagcgcacttattttttaccctttcccgaaggagctagctttaagaaattccatttctaaacctgggaagttttcaggtgtcgatattttttcaataaactatttttaggttaactttttatctttaagactaagaaagtattgaaatttaatgtgctatcaaaaatccctcaatcagtcggaaggcaatttaacccggtatatggaccgcccgccttatacttcaggtgagttaaaccgtattttctgaccgaccgcttttctaatagcaatatcaaaattattgccccgtatgaaccaacaaattggttttctgcagaccctgatcttaaggaggtttttaagggttgagtgaaactttaacaatataataattaattatagcacagagtcaaagtgatttggtatatatttaatttaggtatggaggataaaagtacacttaaggcatagtatcgcccaacgataatgcaaaggccgaactgtacccctaaacactcaattaaacttcagaaaaaatccgttccccccaggaatgggttaaatgagggaaattcaggtaacagcgaatttcccttttttgtttataattataaatgggaagaatcactattttgaaaattttcggactaaaaaataagttagggattttcaacacgccttaaaggttaagatttggatgagttttaaactggacctattgggctcttagaaaagtataaaacctgcgaaaattatagaagacataattaattctataaatagatattcaaaaagatatttggtcacttacaatggctttcatatatcagttaaaagttaggaaactataataaatgattttaggatgatacatgccgttaaaattgcaaatctctttaagattaagacatatgcaacatgggcatattagataatgagccgaataaagagcctattcggttcatttttttattatatttgagccgattatttattctattcggctcatgcaatataattggcagcaaaaagactggcccaattttaaatattctaccaatgaagtagagaagaacctatatgctttttccgaaagagccggtaggttgagtggagccatggaagttctgccagaagagctccaatttgaatctatcgttgatttattagtggcagaggctttgaagacctcagagatagaaggagaatacttaagtagaaaagatataatgtcttccattcggaataatcttggacttaatattaagcgagtacaggtgaaagatcagcgggtccaggggatttcccagatgatggtagatgcacaaaaaaattttcaaaagccgttatcaaaaagggttttgttcaattggcataccatgttaatgaaaggtagttcaggtttgaacgcgggagcctggagagaacactctgaaccaatgcaggttatttcaggtgctatgggaagagaaattgttcattatgaggctccaccttcttccaaggtgccgaatgcgatggcacaatttattgattggtttaataatacttccccgggttcgaatgaagaaataaagcaacctgtaattcgtgctgcgctggcacatctctattttgaaagtatacaccccttcgaagatggtaatggaaggatagggcgcgcaatctcagagaaagcattatctcaatatctttatcgtccggtattacttagtttatctcaggcaatagaagcaaaaaagaaagattattatcaggctttgaaaactgcccaaagatctaatgagatcacgccctggataaattattttgtaaaaacaactcttgaggctcaactggatgctgaacagcttatcaacttttcagtgaagaaagctaaatttttcgataggttcgagggtaagtttaatgagcggcagcttaaaaccataaaaagaatgctggaagaaggacaccagggttttgaaggggggatgaatgccagaaaatatatttcccttaataaaacctccaaatctactgctacccgtgatcttcaggacctcttggatatgggtgcattcataaaaaaaggaggaggaaggagcactagctatgagcttaatctataaatagacaggtagaaattatggtcttaaatgcagtttcattcattgccagtttttattttgatatttaaactggaatgatgttctttaaaagttcagccttattcttttaaaaccggctcctcttccaaatccaggatcatagaatggatttcgatgcttttcaatattatatagtgttgggattttttaccttttattttaagagttgatgaactcaacctttgctatgataactattacttttctattcagtatattgtttattctttttggagtacaagaaattctttttttcaaaaaagtaagaagtgtgaatacgaaccataaccgttgccaaagttactggaatatccaattaattattgaaaataggaaattatgaaaattagacttatagcaatttctttatcgtttttaattttggcctgtagcgaaggtgagaattgtacaaacagagaattgaatataaccagtttagaaaatgaatatggttgtacaaatactaaaaattcagacatagaaatttcagaaggttataagattattagaaaccagacggaatttgaagcacttaattttgggaattgtgatcctgaaattgatttttctaaatatgatctcataattggtaaatatcaactcacaactggcaataattctattgattatgatctcgttgaaaattgtcaaacaaaaaatctgatattaaaaatcgcgtttaatcaaaatgaaactgcagaagctcccaatgttacctatcatgctctaattcccaaattagaaattggtcaaagtatttctattgaatatgcagtacagtaaaatttgcaacaagaatgctatctcaaatgccaggtttttcaaaaaagaattagattgggccacaaagaacaaaaccgttaagcaacaaatctgcgtctctgctcccgcaattgcgatgcccattatgtagtgaataattttttattatgagtgaacaatctacctacccgggatggttaagaatcctgtttttaatttttccatatatttttatagttggaattttccaaatggttggaggaactttagttggtttctcatatactgatttagaaattgataaaacaccctttcaaagattaattatacaacttttttcatttttgggaacaagttcgattgtatggatattcttaaaatttatagataaagaaaagtttatcgacattggatttagagttaaaaataacttcaaaaggttctgggcaggttttttaattggagctataattatgctttttggattcggattgttagaagttttaggtgaaataaaaattcaaaatatcaatttcgattttaatcaaattttgatttcattttttgtatttattctggtatcccttacagaagaaatattatttcgaggttatatattaagaaatcttatgtactcatttaacaagtatgttgcactaattatatcagcaattttattctcattaatgcacgcattaaatccgaatattgatttcatggggttttcaaatatatttctagcaggcatattattaggaattacctatatacatacaaaaacctatggtttccaattgcgcttcatttaagctggaatttttttcagacaattttaggtttcaatgtaagcggccagaatacttattctgtaataaaacttagtattgataatgaaagtctcttaaatggaggagcttttggatttgaaggttccatattatctatcatttcaatgataattaccattattgccattactatatattatcgtagaaaactactcaccccagcggttcatcgcaaataatggggtattgaataaaaattgtaattttaaaaaacccattagaaaacagtcaagcctacaaatttggcccctactccgtgaaatttgtctgttatacgcagccgttagcaccatttatacgcaaccttttgcaaaaaactacatcttataggaaataggaaaattctaaaaaaatgaaaaaactaatatttcttttcctgctatattttgtgttttacaataattatgctcaagaatcgaatacaaaaacaagattaggattagatctttttttggaaaatactatcagctccgaaagaattcaaactggagaaaatgtgggatattttgcagattatgataaaaccaactttcaaattggcctacaggttgaaagatatttaaataataagataacattgaattccggtctcaattattctaaccgagatttcaccggaacatatttttgtcaggtttgtgattttagcttacctcctgaacctgaagaaataaaatttcaatttttagaaattccgttaagtcttaaatactattttttccgaaataattttcgtccctttatagatttgggactaataaaccagtttgccatcaaaaatgaaattacagaaaaaaaatatgtgatcctgggaaaaacaggtgtaggattagattataattttaattctaatgcatcaattcaggtcctctttaactataatagagctataactaaaatgtttgaagaatctgatttcaaaccggaagttttatcaataggtataggatttaggagacgtttataatttttagggtttaaatatagcgttgtagcaattcctcttccagaacttgccagcttttatattgaaatctaaacttgaatgatgttgttccttaaaagttcagccttattcttttaaaaccggctcctcttccaaatccaggatcatagaatggatttcgatgttgaaccattctttaaataatttataagtcctttgtgcgggccattcatcttcgtttgtacaccagtcatttaattcattggtgaaaatagattcgaaatttttggagacccatttttccacatcttcattactggccatttcccgtaccaggtagagattattttcttccatcgaagtaacaggggcctcgtctttaaaaacttcattaagccacttaaagaaaggttttctgggctttacaagaattgcattgcggttgatcgattcgtaataataggggataggttccataagttgtctaaaatttgcgaacggtaaatgatagctataataaacatatgcaattaaacacttaaaaaatttctcaagaattaattattgctatttttcttaaaattttctgccggtttagagttgctaaatggatatttgataggaagaatgatttttttttattatctatgtatatacctctgcagccctacactccggggaaaatttaaattgccgaaaagatgatgatgaaaaaagcgacccgttaaggccgctttgaatgttttcacaacggaataatccttattgtgaattgcttcagaattgtaaaacgaatataacaaaattttttaaatgaaaagaattttaggtttggaccttggaaccacctccataggatgggcgttaatcaatgaggctgaaaacgatcaagagaaatcttcaattattaaaactggcgttcgtgtcgttccactttctacagatgaacaacaaagcttcgaaaaaggacaaagcattaccattaatgccgatcgtaccttaaaaagaggaatgcgcagaaaccttcaccggtataaaatgcgtcgagcagccgttatcgaaatattaaagaggatcaatttcatcacagaagatacgccccttgccgaaacagaaaataattctactttttcgacctacgaagccagggcaaaagctccgaaagaaaaaatttctaaagaagactttgcccgtgtcctattaatgataaacaaaaaaagaggatacaaaagcagtagaaaagctaacaatgaagaagaagggcagttaattgatggaatggcggttgccaaaacactttatcatcaaaacttaactccaggacaatattcttttctgcttttaaaagaaggcaaaaagattttacctgattattatcgttcagacctacaggatgagtttgacaaaatctggaaatttcaaaaacagttttataatgaaattttaacagataaacacaaggaagaaataaaaggaaaaaataaaaatgctacttcaaattattttgaaaaggtcctgggaattgcaagagctgaaaataacggatctgataaaaagcttcagcattacgaatggcgaactaaagccgtttcagaacaaatcgacattacagaaatagcatttattctcactgaaattaataaccaaatcaatcagtccagcggctaccttggtgcgataagtgaccgcagtaaggaactcttctttaatgatcttaccgttggacaatatttatatcatcaacttaaagaaaacccgcacgcttctttaaaaaatctggtattctatcgccaggattatatggatgaatttgatgctatctggaaagaacaggccaagcataatcccgaattaactgaaaaagtacgtcaagaattacgggacataaccatttttttccaacgccgtttaaaatctcaaaaaggtctaattaatatttgcgaatttgaaggagtggaacgtatagtcaaaattgatggagaaatgaagaaaaaactggtcgggccgcgtgtggctcccaaatcttctcctgtatttcaaagatttaagatttggcaaaacatcaacgccattcgagtgaccagaaaaaataatgacttgcaggtttatgaattggatgaagatacaaagcatttactttttgaagaactgacctgggtcgataaaatgaccgataagcaatttttaaaatggctttttaaagattctgaaaataatccaaaagactggaaacttaactttaaacatcttgaaggcaaccgaaccaatgcagccttattggaagtttataaaaagatcgtaaaaattgaaggttatgaacttaattttaaaaagccttcttcagaaattattcaaaatataaaagcctgttttaaaactatcggaattgatgagcatcttttggattttaatagtgaactgagcggaaacgattttgttaaacagacatcttatgaactttggcatttgctctattcttatgaagatgataaatctctaaccggtacagattctttattaaaaaagcttcaggaaaaatttggatttcaggaagcccaggctcgtttactggcttcaataacttttcaaaaagattacggaagccttagtgtccgggcaatgaggaaaatacttcctcatttaagggacggagctttgtatgatgaagcctgctcaaaagccggatataatcattccaattccattacaaaagctgagaatgctgatcgggaattaaaatcggagttagaaatacttaaaaagaatagcctacgcaatccggtagttgagaagattttaaaccagatgatcaatgtggtaaatgcaatcttaaatgattcaaatcttggacgacctgatgaaattcgtattgaactggcgcgtgagttaaaaaagacagctcagcagcgcagcgaaatgaccaaacaaataagtaaagtcactaaggaatatgaagcaataagaactttacttaaaaaagaatttggactcccttatgtaagccgtaaagatttaattaaatacaggttgtataaagaattaaaagcaaccggttataaaacgctgtattcaggtacatatgtaaaacctgaagaacttttcaccaataaatttgatgtggaacatatcattccacaggcactattatttgatgattccttttcaaataagactcttgaactacgggatgttaatctggaaaaaggtaacgaaaccgcctacgactattgcgaacgcaaaggttggctggaaggttttaagcagcgagtagaagaggtttatgctgccggtgatattaaatatatgaatcggaaaaagcttctgatgaccaggaaagaaatacctgaagggtttttaaatcgcgacttgggaaatgcagcttatatcgcccgaaaatctgcacaaatcctattggaaatcacaagaaatgtggcgttaacctcaggaaccattacctcaaaacttcgggaagactgggaattgattgatgttcttaaagaactgaactttgagaaatataaagcattagggcttacctataccatacaaaatcgtcacgggaaagaactgacacgtattgcagaatggacaaaaaggaatgaccatcgccatcacgctatggatgcaattactgttgcatttacccgcccggcatttattcaatatctaaacaatatgaattcggagagtataaaaaatggttccttttatggcattaaagaaaagtatacttatcggagcaaagaaggaggaagacgttttgtaaagccttttgaaactattcgagaagaggctaagagacatttagaatctatactgatttctcataaggcaaaaaataaagtcgttactaaaaacaagaataagatcagggttaaaggaaaaggccattttaggaccaaaacagaacttactccaaggggacaattacataaagaaactatttacgggagtgccaaaaaatatgacacaaaatttgaaaaaataggaggaagttttgatctggataaaatttctacggttgctaagaaaaaatatcgggaagcattacaacaacgtttggcagaatttgagaatgatcctaagaaagcctttacgggaaaaaatagtttagcaaaaaatcctatatcacttaacggtaacggagctgtattacctgaaaaagtaaaaacagttcgactggagaatcaatataccattcgaaaagaattaactcctgatataaaaattgataaagtgatggatataggagtacaaaggattcttcaaaagcgactagatgactttgaaggaaaggctaaagaggccttctcaaaccttgatgaaaatccagtctggttaaatgaaggcaagaaaattcctttaaaaagggttaccatttcaggaataaataacgcggaggcattacacaatgcaaaagatcatttaggcaatgaaattaaagatgatagagggaatactattccggttgattatgtaagtactggaaataatcatcatgtggccatttatcaggatgaaaagggaaatctgcaggaagaagttgtgtcattctatgaagcggtaattcgcaaaaaccagagccttcctattatccaaaaggaacatccaaaaggatggaaatttttgtttacgatgaagcagaatgaaatgtttgtttttccttcagaagacttcaatcctgatgaaattgatctaatggatcccaataataaaactgaaataagcaggcatttattcagggtacagaaatttactatccgggattatttctttagacatcaccttgagacaaatgtggagctaaaaaaagaattaaaagatgtgacttggataagaacaggattatctggtatagaaggaattatcaaagtaagattaaatcatttaggcgatattgttcaggtaagagaatactaaagtttaaaattatgatcaagcgcaccctctttttcggcaatccggcttacctcagcactaaaaatgagcaactggttatctcctttccggaggaggaaaaagaggataagaccgtgccgatagaagatgtgggaatgcttgtgttggaaaatccgcagatcactcttaccaatggtttgctcacaaagcttattcagaacaaagcggcagtcgtgaattgcgataagcaacacctcccctcctctttgctgcaaccgctgaatgggcatacggagcaaaccgaaagaataagacaccaattaagtgctagccttccactcaaaaaaaatttatggcaacaaactgttagtgctaaaattgaaaaccaggcaagacatttgtaccgcagaggaaagaatcaccggaaattggagcgctggagccgggaagtaaaaagcggagatacggaaaaccatgaagctgtagctgccgctcattactggcagaacctgtttgagatagaagatttcaacaggtatcagaaaggaattccgcccaacaacctgctaaactatggctatgcgatcttaagagcagtgacggcacgcgcccttatcagtagtggaatgctgccaggagtgggcatctttcaccgaaataaatacaatgctttttgtctggccgacgatattatggaaccctaccggccgttcgtagatgacctggtttatgaaatagtggctacaggcgaagatattaaaaccctgaatatgtttttaaagacacagcttctacagatcccggttttagatgtaatgatagatggaaaactgagccccctgatggttgcgatgagccggactaccaattcgttgtatgaatgtttttcaggattaagtagaaaaatactgtatccggtgtatgaataggactcgactcatttcgatctgacaaagttactatggattaccgattttcaagattaaatcaatacagaagcatgtgggtactcgtattttttgaccttcctactgaaaccaggaaagaacgaaaggcggcaaacaggtttagaaaagatcttctggatgatggttttggaatgtttcaattctctatctaccttcgattttgtgccagtagggaaaatgctgaagttcatattaaaaggacaaagagagccttacctaaaaaagggaaagttggcattatgcagataactgataaacaatttgggatgatcgaactttttcagggacaagaagaagctgaaactgaacaacctacccaacagcttgaactattttagaatcataaaagacggctcgggccaaatcaaaacctacttttaccatttcattttaaaatcctaacatacaggttaaaaatcaggataccagacgtttacgccgggtaccctgtgaatcctgattaaaaatacaattctgaaagcaattcacaacttaattacattaatagcatcttcgggaattcctgtgaatcctgattaaaaatacaattctgaaagcaattcacaacatttctctattcatctttaattcttttttacctgtgaatcctgattaaaaatacaattctgaaagcaattcacaactaattatgggtgtagtcgcttccatagtaacctgtgaatcctgattaaaaatacaattctgaaagcaattcacaactttctggaagtcatttatttccagtttccgcctgtgaatcctgattaaaaatacaattctgaaagcaattcacaactataatctgggccgggggcgggaatcatacctgtgaatcctgattaaaaatacaattctgaaagcaattcacaactttccggcgttcatagttcgcgcccgttctcctgtgaatcctgattaaaaatacaattctgaaagcaattcacaactccttttctgggataagctcaaacctgttacctgtgaatcctgattaaaaatacaattctgaaagcaattcacaacggaaaggccttccagcaccatctttttctccctgtgaatcctgattaaaaatacaattctgaaagcaattcacaactgaggcttttgaaccctatactttacttttcctgtgaatcctgattaaaaatacaattctgaaagcaattcacaactaggtttgaacaagatcatcatgtatgaagcctgtgaatcctgattaaaaatacaattctgaaagcaattcacaactggaatataccgagtataaggcttcccgtgcctgtgaatcctgattaaaaatacaattctgaaagcaattcacaacaggtttctacttcggccaaaaatttactaacctgtgaatcctgattaaaaatacaattctgaaagcaattcacaactcaaaaacggttgtcccgtctttttctaaacctgtgaatcctgattaaaaatacaattctgaaagcaattcacaacggcagcagctcgaaatagtattgaaaaaatcctgtgaatcctgattaaaaatacaattctgaaagcaattcacaacacaacaactagcattactgcaaactcttttcctgtgaatcctgattaaaaatacaattctgaaagcaattcacaacataaatcttttcctcaatgccattttcagacctgtgaatcctgattaaaaatacaattctgaaagcaattcacaacaccaaaacagatagccttatgaatagacacctgtgaatcctgattaaaaatacaattctgaaagcaattcacaacttaggcaggttgtttgttttcttttataagcctgtgaatcctgattaaaaatacaattctgaaagcaattcacaacgggtcggcggctggtaattccctaacattcctgtgaatcctgattaaaaatacaattctgaaagcaattcacaacaggccataagaggcgatatgtcgcaggatgcctgtgaatcctgattaaaaatacaattctgaaagcaattcacaaccgccatcctgtatggctttgaatacggtatcctgtgaatcctgattaaaaatacaattctgaaagcaattcacaacagttctaattatgattgatgccgggttaagcctgtgaatcctgattaaaaatacaattctgaaagcaattcacaaccttttttcctgcctttctgttacctggtgacctgtgaatcctgattaaaaatacaattctgaaagcaattcacaacatgaaatgaataatatatgttgggacttacctgtgaatcctgattaaaaatacaattctgaaagcaattcacaactgaaaaggcatctatcctataggtaccacacctgtgaatcctgattaaaaatacaattctgaaagcaattcacaaccgtcaatgtttgaaagcttcgatatttcaacctgtgaatcctgattaaaaatacaattctgaaagcaattcacaacttaacaggctgactaagtaaatccctttgacctgtgaatcctgattaaaaatacaattctgaaagcaattcacaacttaggtgacagcagattccaccgttgctttcctgtgaatcctgattaaaaatacaattctgaaagcaattcacaactggataggtgatggcaagcagcaggaaaaacctgtgaatcctgattaaaaatacaattctgaaagcaattcacaactcggtgagggtcgcaccgtcaaaatgctctcctgtgaatcctgattaaaaatacaattctgaaagcaattcacaacttacatactttgcaccggccatagaagtgtcctgtgaatcctgattaaaaatacaattctgaaagcaattcacaacctggctgaagcgaggaattttttaagtgatcctgtgaatcctgattaaaaatacaattctgaaagcaattcacaacttccaatacacccgtttgtccaagtccgtacctgtgaatcctgattaaaaatacaattctgaaagcaattcacaactagttaatagatgttatttgatcttggattcctgtgaatcctgattaaaaatacaattctgaaagcaattcacaactttaccgttcggctaccgttaatatgaaggcctgtgaatcctgattaaaaatacaattctgaaagcaattcacaacttcgatattatcgatggtaaagttcacaccctgtgaatcctgattaaaaatacaattctgaaagcaattcacaacctgaaagtttggtacctacaaatttgaaacctgtgaatcctgattaaaaatacaattctgaaagcaattcacaactaatgacttagacactatgtatgcagatcacctgtgaatcctgattaaaaatacaattctgaaagcaattcacaactattgaaagagcagaacgttttttatctgcctgtgaatcctgattaaaaatacaattctgaaagcaattcacaacccaattagccatagaacaattaagccttgccctgtgaatcctgattaaaaatacaattctgaaagcaattcacaactagtaggtaagagaagaattgaaaccaaaacctgtgaatcctgattaaaaatacaattctgaaagcaattcacaacagccctggaactgatggccgaaaatttctcctgtgaatcctgattaaaaatacaattctgaaagcaattcacaacggattgccgataatatgaatgtggagagccctgtgaatcctgattaaaaatacaattctgaaagcaattcacaacggtattttcattagggtaaaaccacgctgacctgtgaatcctgattaaaaatacaattctgaaagcaattcacaacaatcgtctgtagggttaacaggagtaggggcctgtgaatcctgattaaaaatacaattctgaaagcaattcacaacgacctttcggcattgtcttttaaaaattgccctgtgaatcctgattaaaaatacaattctgaaagcaattcacaactaagctttacgttaccattctttttggcttcctgtgaatcctgattaaaaatacaattctgaaagcaattcacaacacatcaacagctacccctattaaagcaaaacctgtgaatcctgattaaaaatacaattctgaaagcaattcacaactatcggcctgtatttcttcctgggttctgtcctgtgaatcctgattaaaaatacaattctgaaagcaattcacaacggcttttgactgcgggagcgcgaactgatccctgtgaatcctgattaaaaatacaattctgaaagcaattcacaacatgtttcgagcaggtctttattgtacttcacctgtgaatcctgattaaaaatacaattctgaaagcaattcacaactgtagttgtcagttctttcaaaaacatttccctgtgaatcctgattaaaaatacaattctgaaagcaattcacaacaaactgaacataacgccaccgttacgcttccctgtgaatcctgattaaaaatacaattctgaaagcaattcacaactatcggttgccttttctcttttaatacctccctgtgaatcctgattaaaaatacaattctgaaagcaattcacaacaagagcaacgattagcattaagacaggtagcctgtgaatcctgattaaaaatacaattctgaaagcaattcacaaccaggaagaagggaataatatctcattctttcctgtgaatcctgattaaaaatacaattctgaaagcaattcacaacaaagcttgtcatatacttcgttattcttctcctgtgaatcctgattaaaaatacaattctgaaagcaattcacaacttttcggcttgtggtgttgtagtttccatacctgtgaatcctgattaaaaatacaattctgaaagcaattcacaacccaaaccttacgactttatgacaagcagtacctgaagatcctgatccattacaatttgtgacatttgaaaaatgaaaatcccaacagatcaggattgaattaattaaaaaacagctatccatattaaataaattcggatttattaaaagaaataatccagctaaccatacttgtgccaacggctcatctcatatttcgggtgattgtagaaaaagcgtaattttagaaaccaggaaaaaatggtcaagtcgacaagtccgcgtcccactcccgcaacttgcgaaccgccaacggttgagaattacaaagaacctagataatttttttggaatattggtaactcaatgataaaatcctgattttgaaacacaaataaggttatcccaaaattctttaaaaaattaaaataaaagaatagagtttaaattgacgcaacttttgggacttattcgcatcttttaaaaaagagagtatggaactaaaaaaattaattttcatcggaattttaataattgctgcttcgtgtagcaaggaagaagacaataataacgaacgtttattgggaatttatactgagactttaccattttccgaaactcatactttaaattttattgataataacaggttaattttaaatgctagaaattcgacagaagaagaatttatctacgtattgagagataatattatagaacttactccaactcgtgatttatctcaacaatgggatttacaaattaatattataagcagtaagaaatttgagatacaaaatatcttttatgcaagcatacctgaagatcctgatccattaaaatttgtgacctttgaaaaatgaaaatcctaacagatcaggattgatttaattaaataatagctatccaatttaaataaattcagatttattaaaagtaataatacaactaaccatatttctgccaacagctcatctcaaattacgggtaattgtagaaaaagtgtaattttagataccaggaaagaaaatgggtaagccgactaatcttggctcctactccgcaacttgtaaccgcgaaccattataagcaagtgctcctgaactgatatctttacaaattttaattaaatggctaaaatttcaaaatcccaaaaacaaattaccacgcttacaaataattaaattcctcgaattttaatttatatgaagaaaattatctcattattacttttggtaacatccttaagtttaaatgcgcaaataactaaaaataactggcttgtaggaggtggtatttctttttcttattcaaaaagtaaaccagaaggtgcagttgattcggaggcatttaatattaacttatcacctgatataggttatttcatttgggataaattcgcatttggtagtaggttggatttcgaccttaatcattacaaatcagataatggaaattcaaattttaaaaggctcttggtatcaccttttttaaggttttattttttagatgaagaaaaaatggtaaacccttttatagagggttcttatcgttttagtttaattaatgaaaataattcacaagaattttcggctaaaggtgggattgctatatttctaaataatagtgtagcttatgaaatattccttaactacttaaattctacgactcaaaatcaatatattggaagccatacccttttattaggaattggaatccaggtccatctaaagaagaactaaaaacttatagtaagaaattttattgtaactcgaattttgtattcttaaaaactaaggttgacatagatgtcgcaccagcttataacatcgtttaccgcaaatggcgggttttagagaaaagaactaaattatttccatgacaaataaaatcggttagccgacaaatccgcgtcccattactctgccaactggcgaggcggttccaaccaataactcccaatgaaattatttaaactaaatctaaaatatattttgaataacttaatcccggaatttctttaacaaaatcattatgaaatttaaaaaaaaactaacctggtttttttctgctgccgcaatttcattggcagtgctgggactttatgctttcaaagctgctcataatcccgacaaaggatacgttgtaactcaaagtcggtggaaaaaccttaaagttcttccgcaggatattacaaaagacagcctcatggggcttatgaagaattatgaaacctcccttagtgtacactgcaattattgtcatacaccaagtaaagaagatcccaccaaattagattttcccagtgatgaaaaactcgagaaggtaattgcacgtggaatgattaaaatgaccaatgaggtaaacgccaattattttcaaccctactttcccgatccaaaacccaaacaggtgcaggtggtaaactgtgtattgtgccatcgcggcgcacctaatcctgaaaaatatttgtcgcaaatgggaaaaatgtataagacctatgatcctgatagggacaatagaaaagagaaagaacaggaaaaggagagaaaaaaaagcgaataaatccttaaagtggcaccatcactccgaaatagccaaactcaatatgctctggttttcaccattggagattttggaacaaccggcaggaggtaggccgtcgttttgctttttatgccttttatagattttttgtagaaatagaataagatgtggagagcaacaagattgtatgaaaaagaagttttattactggtgatattttagataaatacagtgatccaaattctgatttaatctaaattaacctcaaaattaaataattctttcggatgaatttctaatcctttcgccagctcaaagacggtaggtaattgtatttttacttgccctttttcaattttagctattttgctatgttccacatcacacctttttgccaatccccttaaactgagttttttttccttagttctataatatttaacctttttcccaaaggccactaaatttctatctaaattgttccctaccattgtaataacatgaaagggaaagtttgataaaatttgaaaaaataatgtagcctaaatgaactacaattaaaatcttttcttatatttgattttagaatattaaatttgcgattcttctttagataatattagaagcattcgcttagagtctcgccaattaaaactggtaattttagcaacgagatgataggtgaaatgctcacgacccgggcgtgggcttacttattgttgcacggtataccagtaccttattggcataagtatagtttcgcgcccattttttatgcgcttacttttcttctcaaagcttatgtttcttcaccaaagatttcgcattagcattattccctacataataggccagggtggccggcacttttttaagtgtagtttctaattcctgtttgcgggaacaggtcaaatcacaacaatcccgtgggttgccaatgcaaatccctactgtattggtagtttgggtgggaagcttttcatcgcaataagggaagatgaaggctgggatttttgtaggaaccaggatgctttttttgctccaaatagtttgaattagtcagttaaaaaaatgcttatgaagcccataaggggcatttaaaaaagaaagatgaacactcgtttgtgcgggtaaaagcaaaaagccttccctcgagattggcgtcgtacagggaaggcctaagcttaaataaaactaatgtttcattttaaccagtgtaaaattatgaaaaatttttacaggagggccatgttaatcatcatgttcctacttgccatgggatttttggtgtttttagccatgatccaggcaaaggcggcaacgcctaaattttataaatctgcatttcagcaagaggtaaccgggcaggttaccggcccaacaggagaaccactcctgggagttaccgtactcgtaaagaataaacaatacggtactaccaccaataaagaaggtatctataaactacaggcagcggccagcgataccctcgttttttcatctattggttttaaaaaacttgaagtccccttacagggaaggaccagtgtagatgtacaattacaggaagatatcgcctctcttggtgaggtagagattaatgcaggatactataacaccactaaaagagaaagtac

SEQ ID NO: 2273 - DNA, 24095 bp, synthetic construct
  source 1..24095: mol_type = other DNA
  misc_feature 1..24095: note = Synthetic
ctgaaataaaagtaattgaagaagtcatagagactactccaataaaaatagagaaaaaagttgaagagcctaaaatggaaattcgtgaggcttttgactttgctcttaattataaaaaacaggtcgtaagtgtgacaacttttagaggatataaaaaccgtattgatgtttttttaaaatggattaacacgactcatccatccataaaaaacattgatgaattaacaaaaaagatcacttttgagtttttaaatagcgttttagaaaatacaagcgcaagaaatagaaacaattatagaacagaattaagtagtattattcaagttttagaggataacgaattaattaagtcaaattttgtcaaaaaaattccaacattaaagacaactcctaatagaaataaaacttatactcaagaaactcaagaggctatttttaaacacttagaggacaatgatcatgtcttattgctatttataaaatttatatcctataattttttacgtccaatagaagtttgtcgactgcaaataaaggatataaatattgctaataaaacgatacagtttaaagcaaaaaacagtcccctaaaaactaaaatcattcctgagttgctttggaaagagctaccagatcttacacaatttaatcctgatgatttattgtttgcaggagaccaaattggaggtcattgggatgccaaactaaataacagacgtgatttttactctaaacgatttaaaaaaaatgtcaagcaaaaatttgatttgggtatagattatgggctttatagttttaggcatacttatatcactaaattgtatagagctttagtaaaggagtcttctccttttgaagcaaaaagtaaattaatgttaattacaggtcatttaagtatgtcggctttagaaaaatatttacgtgatattgatgcggaactacctactgattattctgatatgctaaaaaacaaatgagtaaattagatttacataaaacatacactgagttgtcatttaaaacatggaataacctagtgttttttgtgcctaatattttctttgaattagaaactttagacgaaagcactaaagaaatgttgaaaaacacctttgatcaaaaattgctaatcgtgggtgaacctatgaacatttttgaatatgactttgatactgatggtacaaagtacatcaaccaaatgactaatttaggtaaaatcatttttgatcttttacaattaaaaagccagttaaatgagtttgaattctcctacctattagatcaatattatgtacaagcggaatgttgtctttctgttactaattggattaaaaataacaccaatcaaattaagaatttagacaataaagtcagaggtatttttaatattcagttcaacacttacagaaaacattttgaagatttaattaaacaattttatcctaatccagaattaatgcctgaagatagattaaatgtcttacagctaattaaaactaactttaaaaacattaaatcaaatatagacgaaactgtaagcgaaaaattatcaggacttgttataaataaagagcatcctatttataacaaagcatttattgataatttattagaaaaaacagcagaatacaaggctagtaaaactgtaaaaccaaaacaaaaaatattagttacagagcaacaagcggaaaaagctatattaaatcaaatttttaatattcaggaataatttataatttagcgtaaaacaaacgtttgttttacgctaaattataaaaatgaaacattatacttgtgattattgccataatgagtttgaaccaacacgcagacgtgtgcaaaaatattgcagtaatacctgtcgatcaaaagcataccattatagaaaaactgcatcgaatacactaccatcttctcaactaaaaaatgacaatataagcgcaactactactccaccacaaccaaaaagtgaatctattagtgctgctggaattggaaatgctgctgctggtaatatactagcagatggtttaaaagctttacttacctcatctgaaaataaacctgcaaccaaaaaagatattgcagatttaaaagcgctattcactagacgttattttcctataaacaatttagcaaaaaatcaatttggtcaatctccattttatgatatggacacaaaaaatgtggtgtatttaaatacgaattaaaactatatatttctaggatctttgatgataatgataatgaaaatttaattgaaatcgtatctgctaaaacttcggttggatgtttagcaggctatgatgatcctgaatatattgagtaacttccaaaacaaaactaccttttctacctaaaggaaaacatcgtgcatttcctataaaaggagactcaatgttaccaatgatggatggctcgtgtagtaataatgcattttttgtctgagttcaaatttagtttacacttgtaagttgctactgcttcgtcttggttactatatgttatgtagtagatctgggtgttagataatttacattaattaaccatttctaatttatattctttaaaaatcgccttccatttttcattcactttcttaggaattaaaatactttcttcatttgctattttttgaccttcttctttattaaaagatagaaaattaaaacttccttgtatgtaataatcatcatcttttattatcaatttcctgtgcgttcctgtcattttatagtttccttgctcttcaaaatgagtaggtaaatgtataagatgaaagttctttttgaatgttttttttaaatttcgtaatttttcaattgttccgtaatgatgttcgtcattactttctattccataaagtataaccacatttacatttctttgtaaagcgttttcaatactattgatatattttagtgttgcacgttttatccaaggactttctattaaaatctttgaattaaccgtctttaatgcttctgaaaattgctcttgcgtttcccaaaccgaaagtgtttgcgtttcagttatcattttttcgttttcagttactttaaactcttctataagttcactgttattttcttcttgaattcttgcaaaacttgttctgtcggaagttgtaaattgatatataacatttggatatttttcagataatgattttgaaaggcgtttttctttcgaaacatctttatctgtatttctaacttcaatatatggttctaattcactttctttttcttttattggaatatattcaatcaaataataatcgtgattttcctttttatcaaacttaatgtttgacttgtcgtaatctactaaatatgcttttccattattctctcttttataaatgtcagaaagttgttcgtttttgtttttaagtaattcaggattttttattgaataatcaatctctggatttaatctgttttcaatgtttttatcgctaaataatctgaaattcttttcaatcgcttgatttgatattgcatcaattaaaaattcaaattcttcttcttcaagaatttttaatatactattatcttttacaaattcttctccttgttcggttactaaccaaatacctgaaacaaaatctaaaaaacctctttcacgtagaaagtataattctcttaatataaaatcctctttattaagacctaaaaatttaattatttgttcttctttattatagcccgcttttattgttcttaaaaaaactgaatatacttgttgtattgatttttcaggcgatttatttacagttgcgtttactcgaactcgtctataaggatatgcaaattggataatttcatttatcttataattgcttggacattgtttgtctaactttttatgtatttcttgtaagtccattaaaatatttgttttacgtttttaacaatccagtctttcttcaattcacttaaatatttttgtaatgctggtttttgatttgtgttttctaaatcttttggcggttttgcacttaatatgctatctaaatttccaacaataattaatagttttttctgccttgataaagcaacatttatacgatttgcattagataaaaatcctaatgtttgttgctgacttcttactaaatcaaaaatgataatatccttttctaaaccttgaaacttatctacaacagatataactacattgttaggttttacattttttagtttacgataatcaatttcatttcttacaacttttcttatttctcttacttgtgcagaataacctgtgataacaccaattgtataattctttactttatcaaacctatctaatccatttagaagttctggaattaattcagcacttaatttatttcttgacgaaccatttccgtcaatttcacttttataagaatttccaatatcaagaaatatgattgagctatcaatctttaaatcaagattatgttctttttcttttggtctttcaactggtttgattgcttcatctccaaaaggttcgtaaaaacattttgaagttagtaaaacttggtcttttgaacttcttctgcattcttctaactgacttttataatcatcatcaatttttgtaattacctgttcaaacaaacttgctctattaaagtaatcatcccaactatcaaattcgtctgtatcagttttgaatttttccctcaaccatttttcaacttcacgatttgcagttagcattggtcttaattgtctgtggtcgccaacaaggattaatttttgggctaaaactgttggtattaatgcttctgctgtggttgcttttccactttcgtccattattacatagtcaaattcaaaattatatttttgatatttttttgatgcgatatgattagttgttgcaccaattactctaatgctatctattaatttttggtttatattactattttcatctaacgaactaattgttgctaaccaatctttaaatatttgttgaataatcaaattttcgtttttaagttctttcttaaattcagacttatataaattccaatttgatttcgcttttttcttaacctcagttttccaaccctcaatttttctgtctaaagtatgtttttgcaaacttacttttggttttctaataccacttaatcgaacaattggaatctctttttccaatagattatctaacacgttatcaactgcatcatttgtttgagaagtgattaaaattttagcatcaggatttttatttaatatttgaaatactatttctgttataacagttgtttttcctgttcctggtggaccttgaataattgttaaaggttctctattaattgcatttagtattgctttttgttgattaaaactatatacaaagtcattacctttttcgtctgtttgataaacatttgttagttcttgaaattcaagatttttgccctgcaagtcagtaggattaaaaacgtaatgtattaaatctctattttgaacttcattatattctacttttcgtattgcttctaattgtcttttcttttcctcttcttgtttactgatattttcaaatatgtaaccatttttggggattttttcaaaatctaatccttcacaatccttaaattttagaattcttgtttttgtattgaaatcataagcaactcccgaaaattccattgggtctttcatttgttttttatcggcagtttcacttacgataaattcaaaatcttctgggtttggtggcgttgccttgtcaatgtgagagaagattaagccgttcttgctgtatttctcattgtcttgaattttaaatgaaatttcataatttccttttttctcaaaacctacataacgtaaccttaatgagtttttttctaaaacttgcatttctctggttagtaagtctttaaagaattttaattctttagtaatttctttttttccttttctatactcgctctcgtgttgtttttctttttgtattttttttaaaaatggcgttaggttatgataatcaatttggtggtattgagaagtaaaagttaatggaacattaaacttctttccatattttgaaactcgtgaatatttgttttcatcttctatcttgttacagaaattacgaattgttaattcattttcatctattatccataaacaatgcgcgataaaagaattagtaattatatcaagaagaataatgttttcatttttagaattactccaaacttcaattttattgttattgtcatttaactcattaattagttgttcattattttctcctgaagtatagatgtagtaatcggaattaaataaattattttgagtgattttaataagatcttcaataaattgaatataattaagtcgctcattaggttgtttttcgcaagatttatctattaactgtttaatttcttcaaattcgttgatatcattttttgcaaaataccattcaataactttaccaatagaataaatgtcagattgataggaaaatccctttgggatttttctatcccatttttcaggtgacgcaaattcttttgcgaaaatttctagttcttgtgattgacttaatgttgcagaaatatctgaaattccaaaatcaattaagtaaaaatcaaagttttcatctacaagtatatttgctggtgttatatctccgtgagttagtttatgtttttgttgcaattgctgtaaacaatttgcaatttgttcaattccttttaaaaaatgcgttggtttgatttcaaaaacattttcctctaaagaagttgcgtttttgttttcaaatatgatgcaataagcactttggatttcgtcccattcatattcaataattttcggaagagaagagtgggctgctttttttaagtgtcgtaatttattgttaagaattttactcggttgtgaatttttatcaattcctttaatccatttgataaaataaatttctccactttcatctgttactttggcggttgatgaataacctctgttttggatttctccatatagttggtatttgtctaaaatcattgttttatttttatttaacagttaatccctgtatctccaaacttagcaaaagctgttattaatatattttgtctagtcactactgttaaacttgtcaaaccaagacaatctctagctaacagatatccttgttctatggcttgcataattctttctttatgaagcacatactctactttgtttctcgccattgttttcatatctcctttaataagacacatagaaactagaaaaggatctatttgtcgctgtgttaagcgctgttgaaaatgagggctttgtttataatttagtattttcatgatttttggttttaatctcatccttaacaaaaggatgagatttggttagttttacttcttagaattttgatttgggtttaactgttttcctctgttaccatgcactttactataagccttgttacttccagatgttcctttgtttgaatttgcttgatttgatttgtgattgttttgttttgaattactcataatttttggttttaattagatttataaaagctcagcaccttgctaaacccttgttattactgtaaatatctagatgtttacaattaaattttctaatttgtgacagaccaactatatttgggatattgacctacttatttgggatataatatcaaccaaagcaccaactgtaattaaatgaatcgctattcagtactttataatcaatacgcattaaccgagcaaatagaattactaagaagcgcatttttaatattactatgcgtattaattttagttataataagaaattggtacaatctttataagaagcgttcttttagaaaaaacaatagattattaaaagaaaaactagatgctcagcaattaaacatctcgaaatttgatcaacaactcagaaaaacagaatctttagaaagaaaactgaataaaaaggttactgaaatttttcagttagaaaaagaaatggaagattacaagcaaaaattctattcttatttaagtgaaaaagaaaaagagatagcacaacataaagaaacaaataactatcaaaaaagagcttatgagcgttttgtcgactataaaaacgttgaagctaacaatacacgacttggtgctcattttattaaaaatgtaattagccagatttacaaagacattgaggaaacagacaatagctacaaatcctttttaggtataaattataaaagaggtgagaaaaaaagtaaagtaccaccaataaaagcactaaaaaatatttttaaattattagattataatgtgtcggctttaaataaagaacacactacccttgaagaagaactggcacatattaatatgtttttagatcttattaaataccttaaaccaaataccaatatcaattttagtaacaagttaaactcagaacaaaatagtagtatcaagattaaaccaacgcttttctttccgtttgttgagaacgctttaaaacatggcgccttaaataatgtagattcgtttattagtattattttaaaagaaaatgacgacaaacaattaagttattgcttggttaatagtgcagaacaacgcttagattatgacagtaaagtttctcaatcttctaactttggtttgaatgctttacagcagttacttaatgcctattatccaaaaagcaaattggaacataaaacattaccaaacaatcaatatttatctgaattaaccttaagcttaaactaaatgatacgatatatattggttgatgatgatcctaatactttaaaaggtgttaaaactaaaattgataatctatcaaaagattatgagttaaaacatatagcaagttatgacagctctaaaaaggcttatcaaaatataaatgaagacgactttgatttacttattgtagattttgacatgcctgtttataatggtatagaattagctcaaaaaattgcgacaaacaaaaaaataatatttttaacctcaacaactaataatgagaaacaaatcataaatagtttagatatttctggatacttaagcaaaccttttgaggttgaagaatttgaggtcatccttaaaaataaggtgattggaaaagtaagcagtaaaaaaacatttaaaaaaggtgagagattaacactcgcaattggagttaatcaggatattggtttttaccctgataaaacatactacatttccacatcacgaaacataaaaaaatatcagtctaataaaaactgtgtccatttttttggagctcaagatgatgtcattgtaactaatgttagaattagcattaacgacctatcgaaaaaattagaaccttatggttttgaaaaaattaatcaaagcactattgttaatctatctaaaattgataatagaaataacaaaaaaattgagttattggattgtgaagaaacacttttcattggagacaaggaaaaaaaaggaatcgtatataaaatacgatctatatttggtatttaaaactcacttactacctcatcaactcatctaacgctttaccgtttttatctttccccaatgtccaacaattcgatactattttataagaatcgatactgtagttgtgtagttaaaaatttagtcctcttgcatcaacatactttccattaattaccttttatatcaatttaatttttaaatcgtttctgagaagtacaacccaaggtttaaatgatttaatctcatttcatacactatgacatcctttagaaactaaaaatcaatcatttaccaaccgtcatactaaaataaattctatccataacataataaaaaaagcgacattttcatgccgctttaaatgttttcacaacggaataatccttattgtgaattgatttcaaattgttatacaaatatatattaaaaaaaataaatttaattacggttttccgtaaagtggctaattattaattttttatttttagttaaaattaaaactcttttcaaatgagaaaaatattaggattggatttaggtactacatcaatcggttgggctttagtaaatgaagctgaaaatgaaagtgaaaattcagaaatcattaaacttggagttagagttaatccgctttctattgatgaaaaaacaaactttgataaaggaaaaccaatttctacaaatgcagatagaaccctaaacagaggtgctagaagaaacttacaacgttataaacaaagacgtgaaaacttatttgaggtattattaaaaaataaaataatcgagaaagaaacagttttaacggagacaggatataacacgactcatgaaactttaagattaagagctaaagcacctaaccaacaaatagaattaaaagaattagcaagggtgttattttcaattaacaaaaaaagaggttataaaagtagtagaaaatcaaaaagcgaagatgagggaaatgctattgatggtatgtcaattgctaaagaattatatgaaaataaaattacacctggacaatatgtatatcaacaacttttaaataaaaaaaaatatattcctgatttttatcgctctgatttacagaatgaatttaatacaatctgggattttcaaaaacagttttatcctaatattttaaatgatgaaatgtacaagaaacttgaaggacaaggacaacaaagctctaggaagagatttcttgctattcatggtatttataccgctgagaacaaaggaaaaagagatgccatcaaattacaacattataaatggagatcagaagcaacaactaatcaattaccaatagatcaggtttcttatgttttagtggagataaataatgatttaaataaatctagtggataccttggtgctataagcgacagaagtaaagaattatattttaaaaaggaaactgttggccaaaatctatacaggcaaataaaagagaacaatcatatttctttaaggaatcaagttttttatagacaagattatttagatgaatttgaacaaatttgggaagaacaagctaaatattactcagaattaacttcagaattaaaaaatgaaattcgtgatgtcgtaattttttatcaacgaaaattaaaatctcaaaaacatcttatttctgattgtcaatttgaaaaacgacataaagctattcctaaatcttctccattatttcaagagttcaaaatttggcaaaatttaaataatttagaatttaaaaacacaaaaacaaaagaaaaaattgttttagatgaagacttaagaatttctctttttgaagaattaaatttgagaggaaatctaacagaaaaagacatattaaaattttgtgatttagacaccacttggaagagcaattttacaacaggactagaaggcaataatacaaacaaggcattatataacatttaccaatatatcgctacagaagaaggctatggttttgattgggaaaagaaaaatgcaaaagaaatacaagaagagttaaaatccattttacctcaaataaatattgatgctactattttaaattttgacgccaatttagaaggccaaacatttgacaaacaaaccagttatcaattatggcacttactatactcagctgaagatgacacaaaaatattagagaaagacagattaatttatggaaactcaaatgtagctctaaaaaagaaacttcatactaaatatggttttaaaccagaatatgctgccatgatagctaatatttctttacaagaagattacggtagtttgtcctctagagctattcgtaaaattattccttttttacaagaaggtaatgactattcagagtcttgtgcattagcaggatacaaccattctagtagcctaaccaaagaagaattagaaaaaagaattttaaaaccaaaattagaaatactacataaaaacagtttaagaaacccagttgtagagaaaattttaaatcaaatggtaaatgtagtaaatcaaattattgatgaatacggaaagcctgatgaaataagaattgaactagctagagatttaaaaaaatctgcaaaagaaagagaagaaactacaaaatttataaactctgcaaccaaagtaaacgacgacataaaatttttaattaaaaaagaatttgggtttactcccactaaaaatgatttagtacgatataagctgtggcttgaacttaaaaacaatggacataagagcttatttacaaacaaatacattccaaaagaaaatatcttttcaaaagacatagatattgaacatattataccaaaagctattttatttgacgattccttttccaacaaaacacttgcctacagagctgttaatctaaaaaaagcagatagaacagctttagattttatagaacaagaatataataatgaagaaattaataattataaattaagggtagaaaatttatataaaaatggagatataagcaaaggaaaatacaggaagcttttaatgagcatcgctaatttaccaacagattttattgcgcgagatttagttaacacccagtatatttctaaaaaagcaaaaagtatgctatttgaagtgtttcaaaatgtagttccaacatctggtagaattacagataaattacgtggtgactgggatttaataaacgtaatgaaagagcttaatttacctaaatatagaagtttaggactaacagaaattcaagaaagaaaaggtaataaaaaaattgaggtgataaaagattggacaaaaaggaatgaccataggcatcatgcaatggacgcacttacagttgcttttactacacataatcatattaactacattaataatcttaatgcatctagaagcaaagaaagtgtattgtatgccattaaaaatactattactaaaatttacgaagatccaattggaaataaaaagagaaaatttatacctccaatggttaattttagggttgaagctaaaaagcatatagagtctgttttaatttcgtataaaaataaaaacaaggttgtaactaaaaacgttaataaatctaagttaaaaggtaaagataatttcaatatcaaatcacagcttacacctagagggcaactacataaagaaacagtatatggcacctctaaaagagaaatggaaaaaccaataaaactgaataaaagctttaacctagacactttaaatctaattattaaccataacttaaaaactcttgtagcaaagcatttacataaatataataataacccaaaaattgcttttgactctaaaacaataaaaaaagaccctattctttataacgatttaccgttaacagaagttttttgtttcgaaaaaatctatactattcgtaaagttgtttcaccagacaattttaaaacggaaaaagatttaaataaaatagtggataaaaaaacacgagaaatattaaagtttagactagcagaatatggagcaaatccaaaagaagcttttgctgatttggacaaaaatcccatctggttaaataaagaaagaggaattactattaaaaaagtcactataacaggtgttgctaatgcagaacctttacattataaaaaagatcattttggaaatgaaatgttagatgaaaatggtaataaacaagctgtagattttgtaagtacagggaataaccatcatgtcgcaatttataaagataacaaaggtaaattacacgaaaaagtggtatcgttttatgaggctgtcgctagagtaaatcaagggttacctataattgataaagaatacaatacaagtttaggctgggaattcttgtttactatgaaacaaaacgaaatgtttgtgtttccaagtgatgatttaaatttagatgaaatagatctactagataagaaaaactacactttagtaagtccatatttatttagagtccaaaaattaactactaaagattatttttttagacatcatctagaaacaactattcaagataataaagaattaaaaggaatatcttttattagaactggcttaaataatatagagaatataataaaaataagaactaatcatctaggaatgattgttcaaataggagaattttaaaagatgataaaacaaacgatatatattggtaatccatcctatttaaaattaaaacaaaaacaattggtcgttcaggaacctgaaactaaggagataaaaggaactataccaattgaagatattgctataataatgttagaccattatcaaataacaatttctaaccagcttttaataaagttgcaagggaataatatagttgtagttacttgtgatgaacatcatttacctttaggcatgatgttgcctatttttggacattcagaatattctgaacgagtaaaatatcaaatagcagcatcagagcctttaaaaaaacaattatggaaacaaaccgttgaacagaaaataaaaaaccaaaaagcactcctaacattacataataaaaattcagaaccattaacaacatatttattaacaattaaaagtggggatacaacaaatagagaaggtatagcagctcagtattattggaaacacctatttagcaacttttctagacatcgttttggagacgcaccaaataatttattaaattttggttatgctgttttaagaagtatagtggctagagctttagttagtagtggattattgcctgttttaggaatttttcataaaaacaagtataatccatactgtttagcagatgacattatggagccttacagaccttttgttgataaattagtttacaattatatttcaaacaataatactacagatctaaacaaaactgcaaaagcaaccattttaaccattgctactcaagacgtgtccattaatggcttaataaggcctttatttatcgctgtaactacaacgactgcaagcttatataaatgttttacgggagagctaagacacatcaaatatcctgaactagattaaaaatgtccacaattaaatatagtgcatataaagttatgtggatatacgttttttttgatttgccaaccgaaactaaaaaggaaagaaaagctgcaaacttgtttagaaaaaaattaatagatgatggttttacaatgtttcaattttcaatttatcttagacattgcccaagtcgagaaaatgcaaaagtgcatattaaaagagtaaaacttagcttacctgaacatggtaaagtatgtattttagaaattactgacaagcaatttggtaacatggaattatttcatggcattaaacaggttggtttaccaaaaccgacccaacaattacaattgttttaaaatagaataattaaaacctaataagcttttatttttatactcataaaagtaattttttgaattctaaaaagtaatcccaacctattgagtttactcaacaaattgggattgaccttgtgattgctcacgtaaaaatacaatttgaaaccaattcacaactgtttttcaatcattaattcagataagtcacttgtgattgctcacgtaaaaatacaatttgaaaccaattcacaacacccattcgcctgaaccatcttttttagttcttgtgattgctcacgtaaaaatacaatttgaaaccaattcacaacataagttgcattatggtataaatggtattgcttgtgattgctcacgtaaaaatacaatttgaaaccaattcacaactattctattgaaagccctattgatttaaagcttgtgattgctcacgtaaaaatacaatttgaaaccaattcacaacatcgttgtagaagataacgtgttaacagaccttgtgattgctcacgtaaaaatacaatttgaaaccaattcacaactatcagacaataatactgattcaatagtaacttgtgattgctcacgtaaaaatacaatttgaaaccaattcacaactgacttgttgacgtactgcttttcgtgcttcttgtgattgctcacgtaaaaatacaatttgaaaccaattcacaacaagttgcacctgtttggtccttaatgtattcttgtgattgctcacgtaaaaatacaatttgaaaccaattcacaactatttaacagttttggcttctttaaacagacttgtgattgctcacgtaaaaatacaatttgaaaccaattcacaactatagtgattttataatctttattgctatccttgtgattgctcacgtaaaaatacaatttgaaaccaattcacaactgtatcttcttttgatacccattgtttattcttgtgattgctcacgtaaaaatacaatttgaaaccaattcacaactagtttaattgaaacgtactaacaaatgctcttgtgattgctcacgtaaaaatacaatttgaaaccaattcacaacatcatgttaccactaaaagcaaataggttgcttgtgattgctcacgtaaaaatacaatttgaaaccaattcacaacacatatgtagagcgtaaaagcggtgttaatcttgtgattgctcacgtaaaaatacaatttgaaaccaattcacaacacatctgactttgcactttaaccaatttatcttgtgattgctcacgtaaaaatacaatttgaaaccaattcacaactaacgatctgttaagtcattatggatatgacttgtgattgctcacgtaaaaatacaatttgaaaccaattcacaacagacgataccagatatatatttttgttcatcttgtgattgctcgcgtaaaaatacaatttgaaaccaattcacaacgtatttatacttttttacccatttagccatcttgtgattgctcacgtaaaaatacaatttgaaaccaattcacaacaatgcgttttacactatgttaaaaatatatcttgtgattgctcacgtaaaaatacaatttgaaaccaattcacaactatataccaagaaaggacagtagcttatttcttgtgattgctcacataataatacaatttaaaacctatttctagtgctaatcatatatcaataatcattcatgttttcaatttaattgtaattatgagttctggctagagattcctttaatttaattaaaaatattgtattatttattttataatactttacaattccctgtcaaaatatttaataactaaacaattactgtcctttacagaaactttataaacaatagaatgttcgtaatctttccagaccattgcgtcaattttgacgtaattttcattattaaaatattttatccaattattagtttctgaacttggctcaatcattaaagctttatagcacatttgttcttcaccttctttcttttctgtcaaataacaagctacaaattgattgtaagtatcaaattcaagagtataagtaatatattctataccatcatctgtaatatccattttataatctttatgcgattcaataagtttagtttttgtaaaaccaatttgcgcagtaactgttgtcgttataaaaattaacaaaataaaagtaaaagcatttttcataaaataaagtgttttaagtttaatcgtagtgtttgattttttaaaccactataaaactaaattattaaattattttatttttacggaaaaccgtaattgaagtaaattgtgtttaaaatataggattttgaatactttaataagtggaattaagcatacaaacttaatattaaaaatatagatactgacgtcttaaacttcaagtattaatgctgataacacctaccatttgcatttttagtcatccgcttacaacgcttaccagctttggttttgcctgtgcattgcgaagcagtactcaccttactttgtgtattgttgttgtccgttttagcattactactacttaaagctgtctttgatgttttatataatggtttacatactttgcaagcttcatagccataagctaacgcatcttccagagtaattgcgaatttggagtactttaaataattacagctttctttatgatacttttctcctgttttagttttataaactgtttgaccaattgaactaaaagaataagcaaaggatataagaaaaaatataatttttaaagacttcattttggcaagatttaattattagcttgttgttttttcaactttcttaatcttgatgcttcttttttatccgctctccattgccaaggagaaattgcattaggatcttgccataaacctagttttttatttttagcttgatcctctaatttttgcaaaacagagtctttagagtacttaacataatgccatgccagcccatgtttaactaattgatgattgaggtttattgaatctccataatacacatttgcaattaatcgtcgatacctatcttttttcaatacttgaacggttacatttttactaaaaatagcattagacacaaattgcttcgctttagtagagtaagcttgctttttttctggacaatctatattggctaaccttacttttacagttgttgagtctttagtcaaaagcttaaaggtatcaccatccataatactgactactttaccagtaatgatagtgggtttaacagctgtatacttactattagagcttaaaaaaaacgtaaaaaataatattgacaataataatttaggcatgttttatttgatttggtaaagcaaaatacattaaactaattatttaaaataaaatctttgataattttatccatgttagatggtaatgctgatgttttaatttgataacgtcccactttcatcgcatcaaaccaatcactccaatattttttaattaaatcctcttcgtaagggtttttattatcaggatttatacccaaaacaagaatttctagatttgacaaattatgagctgctggaataaaaccaaaatgctgatcatttattttagcctcccaatttttgctatttagttttacttctcttataaaacttggtgttagataagtagttaaattgtcttctttaattttagtgtttttgtgatagatataaccatccgttaaaacaactaaaatattcctgtaattttcttctatacagtaatcgttaactttagacttaaaaaatcgccaagtatcagatccaacatacttattatctgctatcgccaaatcatatatagctttaggacttgtcgcatagttatttttaatttcatccaatacggataaggttacattttttctatttatattatatttcaaattattagaaatggtattaatattttgattgcttggttctggatcaaaatataactgaattttatcattcatagctctaaccttttttcctcttaaatgtatgtcaaaagcttcagacacggatttaatataagctacatctctttgataatattccattgcactattaggatgttcgtcaggacttatcctatctgataggtctaataaaaagctgatatttaaattatcgttagagttacgctttagcgttttatccgttcgttcttcaatatcaacgctatattctttactgtcttctttacaggctgtaagaatcacaagaagcactaaaaaaattgtatttatttgtttcatcatggcactattttttttcaaatattatattctgaacttctataccttttagatttaacacatcaaggtgtttagaagcaacagcttcacaattttctctaatctcatctaactgttttattggaaattgcaattctgaattaattgcttgataccagccttcaacatattgataatgataaagaaggtactccttaacaggaaagataaaaccatctatttttgattgtaattctgttatttttccttttatagccgtaagctcttgctgcactgtatcaataagaatagctaattcatctttcttttttatagaattttttattgtttccttctgatttaaaataaacacctttattttatctacattttcatgctctttcattacaaagtcaaataccaacccccaaataatataaactacaaatccagcaaaaataattccccaaaaattaacactacttaaagcatcctgaggcgaaaattgttgaccaaggacagcatcatataaaaatattttcttttctattaagtacgctaaaataacatcaaaaatgaatgttaaaatatacagtgatccaattttaacagatgcttgccatcctttaattttatgaaacatatgcactaaataacctagtcccataaaaacaaaaggcagagtcccaacaaagacagcttctaaccatccatcatttatagctttacccaatgcgtttgcatcaaaaattgcagcagataaactatcagtttcaaaattcttaaaaaaagcagaatatgttgctgatatataaaaaacaaaaagatatattgttattggcaccaagagaaataacccaatataaaattgagcttttggtcgtttatcagaatcaataccatatttatcaggatgttgctttacgtcaataatctcaaatttagatttatcaatcaaactttcaataacttttatttgatcttcataaatagatttggctgtttctctttttttaagttccgtacgttcgcgttcctgagactccaaataaggttgtttcaaaatcctctgttcattaagttgctttctacaaaggttttcaaaagtgttaaataagttatgtaaacctactccaaatgttactggattaccctccgctttcttagacgctccataaccactttgataatatgttatcctcacttgctctctagcctcttctgtactttctgccacagaattgactggctcactattttttaatttaaatatatttttgattacttccataattatgaatttatgtcccttattatttcttctttactaataccttcttttgctgatttcaataaaaaatctgctaattcagttatattttcatctaaaaattcaaattttttacaatacttttttaaagttatgtattcatcatctgttacttctccatctgcccaaatcataaaagccaaatcatataagtattctactcttaattctagtgtttctggtattgtagaatcatgagatggattcaataaaatttcatttaattgttctttagttaatcctcgctcctccgcaaacttatatagcatttgcatttctagtacgtcaaaattatcatcagaaaatgcaatttggtagagtctcaaaaaatgactctttaattcagtagatattatcataatttttgcagtttaattttttgtttaacctatgcttctattaactcatcaaacttatggtaaataaatactagatctttacggtttcccgtaaaccaaaatttttaggcactttttaccaatatttggtttccataaatgtcatttaattagctatgtaaatagaaaaaaaggaatgaaattttaaatactttcattcctttcttgtaactgtacttataagattcattaatcttcttcctctgttggtggtggcggtggaggtggtggatcaatatttccatcttgtccacaacatagttgagtggtattaatttcatcagacaaattctctggcgtgcaagaaaataaaacgcaattgaggaaaaccgtaagcgtgattatatatatttttttcatttttgtattattaaaattagacataggtattgctgtccgagatttgatcgaatagatattatcgcatagcaacacattaaaatttgaagagaatgctcttcaatagttggaaagtgtggagcatattacttaagtaaaattgttactttccaaatggcaattttagcttagtagagtactccactttagaattaaaatatctcgtaagccttattacgagaaggcaattttaattctgactcaaagaaatgtctaaaaaaaaatattgaatggaaaagctatggaaatgtcatggaaaagaatttccactacttaaaaacactaaaaaccaaacataaattgacacacaaaaaattacttcttgacgcttttaataaagcaaaaattgaaaatggttttaacagtaaaagtcacgttacgcagtttttatctgattacatccaagaagactgtggtgaaccttatggagaaagaattttaagaaacaaatacaatgacattatttcaaacaaaaatgaagtaatagaattaagacagtttgctgctgaaagtttaagaaactatttaggttatgaaaaggatgtaatagtaattgataaaaaagaattgaaaccagaatactctagcttttttgtaaaccataaaatgaaattattatcagtttttggtattataattatccttttgattttaattccaataacgataaacacacaacgttggatggtttggaatgataatcattatacagaagtagaatttgatttaaagaagtataacgcaaatcaaattaaagcatttaacgaagctcgtatcttgaacttcacgaaaatcaatccagattgtgaaacacaattttttaaagaaaatggtttagaaaatttatggtatggaaaaaatcataataaaactttagacttttttacttctgcagggttacatcctcacactggtaagacactaaaaccaattactgtatatatgataaagaaatatatttgtcctgattataaataaaatttggaataaaaaaagccagacacgatagtgtctggcttttttttatttaacaatcatgctaaaatcttactcttcatcaaaaaagaaatcatgaattttaataatatctcctcttccaatttgaacaagatcactagtttcttttaaaaatattcctaaagaacgttcgttatatagtagtttcatttttgaagaatagtctgtaacaacatacatatcacctgttaatttgaaaaaaggaataaccaacttacttttaacttttactcctttgttaactacttttccttcttttaaagtagcctctaaattaacctcgtcactttctcctgaagacactttaacgtaagctaccatcatattaagccactctgagtcatcaattaaataccaacttactttttcaaaatcaataccatattcacttatccaaccactactagtaaaaccaaaaagcacttgtttttttccatttaattctggcttatcttctggcgtaaactcttgtattttaaatgttattacagatactgctgacatatcttttagttttttaccattaaaatctaatgtttttaatgaaaaactagttaattcaggtctgtttgttaatatccattgtgtagctgttaactcagctttttccttcatttgttctactgctgctactcctgctccgatagctaaaagtccacctgcaatacctgcaattgcttctcctttattttgcgcataagattgctttggtattattgtgataataagaattaaaattaaaagcgattttttcatttaataaaaagtttaattaggtttcacctacttcggtttatagtcttttttcggtataattccgacttgaaaacacaaacttaaatgattggaatttttattttttacgggaatcctcaattgaattaaaaaatataagcatgaaaaaaaaatacgcagttttttcttgcctattgcgcaaaaattgcgcaaattcgtattaaataattttattaatcacaagattaaactgcatacgattttaacaattgcagcttgaaaagcctattaaactggtatttatgtgttttttttcgaaattcataacccagaggtcaggggatcgtgcccccttctcgctacaaatgtaaaacgattgtaaataagcggtttagtcttctaaaccgtttttttatgcttaattttaaacagattattacatttgcgtacgaaagtgaatacgataatgcatacgatttgaacacaaaaaattaaacatctaaaatttacgacgctaactatacgcttctagaatctttaagtattgctagctttttactccaaactacactcatactgtaaaaaccaaatctatctgttatttttccataacatctataaacacctagaccgttaacaggaaact

SEQ ID NO: 2274 - DNA, 24071 bp, synthetic construct
  source 1..24071: mol_type = other DNA
  misc_feature 1..24071: note = Synthetic
ccaaaaagaccgaagtcaaggccgagccggcctcagctccggttttggaacctgtcgtttcaaaaccaaaacccgcagaaccgcagccggaagaaacggtttccccttccatcgtaacggctcctgctccgaaaccagtttctcccaagcagcctgccacgtctaaacctgcaatcacggcacctgaaacaggtacattctacgataaggtttacgcaatagtcaaggacaactacaccaacgctgaattcggcgtggaggatgtcgccgccgcccttggaatcagccgggtgcatctcaaccgtaagctgaaggcggaaaacagtccatccccatcggatatgataaaaacgatgaggatggaacttgcgtctgaaatgctgaaggccgggggcaagaccatcgccgaagtggcggaagcaagcggcttctcgtcggcatcctatttctccagcgccttcaaggagtatttcggggtagcccctgcggtctacaaataactatttgtaaatctgcttgacagggcgtcctctccaatcttcgggaatcttcagcccgagaatgtcggcgatgatggcgggggtgtcgtactgcattatcaccatggggaattcgtaattctgactgatcttccgtccgctcacgatgaagggagtttcaagctcgagcatggtgaatttcccgtgtcccttgccggtgccgccatgatcggcggacatcactattacagtgtcgtcgtagatgccggcatccttcagggcttggataatcattcccacgcccttgtcaaggtctttctggcacgccatgtattcggggctgtaccagcctttggtgtgtcctgtgtgatccagcacgccgtagtagaaggtgaaaaagaagggcttcttctcttttatgtagttgatagccagttcggtatatttctccgtcgggatgtcgttctttccgtaggtcccgatatagtaccagtaattcaccgcgttggtgtcgcatacggcacctatgccgttccagtcgtatacgattcccgtttcggcgtcggggtgctgctcgcgtatgatcgtgaagatggtgggaggtatgccgtgaccgttgtcggaggtggatggaatggtgcccttcgtggagttccatttgtcgaatccgtgcatttcggtggggagtccgttgaacatggaggcccagttgatggcggatgcggaaggcatgacggaacgtttggacagggtccaggccccatgctccatcaggtaatggatattgggcagatcttcggcgggagcccggcgtacagcctcggcagcccatccgtcgataccgatcaatacgacgtgtttggcttttttcttcgcatctgcgggattgagcgctgaaacacagcaggcgagagtaatgagaatgagtatccttttcatgaaaagtgttattggttgtaatgacaaaaatagcaaaaatactttgtatatttgtagactgtatgagaagaatcgtaggaatcactttggtttgggctatgcttgtttcctgcggcggcaacgtcgaaggtgaacagtcatcgctatactccgccgtcccctccaggtcggttgccgtaatgcatttcgattcctgcgaggacgccctctctctcctgctggattccacttccgtattccgcagtctggactacggccgtctcggcggcacggaggccgtgctctcatacgactacagcgccggcctcatcccccttctcgtgctggatgcaggccgctcttcggccgacacatccgccgcagtgcgaaatctgctggggcaggccgtggagaacaagctcttctgcctgtacaccggagagatgctccccaagcggagcgcgctgctgatgagcccttcccgggccttgatttccgaggcggaggagcacatcctctccggcacttccatcatggatgccgaaggcttccgcggggctctcgcgctttcaggcggcagcaaaggcagcgtaatccttcgaaatggcagcgccacgaggcttctccccaagaacatgctgaaggattactttactcacaaggacctggcgcgattcttctccggcctctgcgagtggaccgtgctgaatttcagcgcctattcccgcgaggggatttccgtcgccttccgcgaaccggggagtgcccgatatcttagccgtctgcttgacgggctggaggcgggggagtgcagagcttcatccgccgtgcccgacagcgccgatttcatcctcgggctgtgtctggaggattccaaggcctatatccagcactgggaggagtgtctggacgtgcgtgcggatctctcgcgctacaaggggcgtctcgtatccttgaggaagaattacggaaagtcgccgtccgtatggtgggcggaaagggccccgaaagagattgtccgtgccgtatggaacgggcaggagatacttctgctcagaccgggaaagaaacccaaggccgcaggcctttccgagaatccctgtcccggtttcatcccagcccttctgggaggagccttccgcatcgcggacgacagcatgtgcgcatctgccggaggatggaccgccttcggatccgcggaggctgtggcggcctggctggaagctcccaagggtgcagcccttcccgggattccgcgcaaggcgaagtattatttgatcaatcccgagttcagcgtagtagccgactcgaaaaatactgttttgaatgtcaactgagttagagtacaaatccgtaaacaagctcttcgagaaaagcttcaaggagcattgggaccgccccgccctgtcgaactatcagggtcgcacgctcacataccgcgaggtttgcgaacgcatcgcgatgctccacatctgttttgaacaatgcggcctgcagaaaggcgacaaagtcgccctctgctcgcgcaaccaggcgaactggggcgtgtgcttcctcgccgcccttacctacggcgccgttccggtgcccatcctgcacgaattcaagtccggcaacgtccattacctcgtgaatcactccgagtccaaggtcctcttcgtcggcgagactgaatgggaggggctcagcgagtccgagatgcccggtctggaggtcgtggtcctgatgaacaacttcacctacctctattcccgcagcgaatcccttacggcagtccgagagaatatcaccaagactttcaacgagaaataccccgaaggcttcaagccggaggacatcaattactatgaggacagccccgaggagctggccctgatcaattatacatccggcacttccggcttctccaaaggcgtcatgctgccctacaggtcgctctacaccaatatcaacctcgcctatttcgccgagccccagatgacctgcgcatcggaagtggtggccatgctcccttccgcccatatgtacggtctgatgttcgaactgatatacgagatgatcatcggtgcccatgtgcacttcctgacccgtgtgccgagccccaagatcataatgaaggccttccaggagattcatccggacataatcatcgccgtgcccctcatcatggaaaaggtctacaagacccagctcaagccggtcgccgaccgcaccaagcccatgatgtacgtgcctctgcttgcacaggccatacagaagaagatacgcgacgggctcatcaccgccttcggcggccgtttcgaggaggtcatccttggcggcgccgccttcaatcccgaggttgaggccttcctgcgcaagattcacttccccttcaccgtaggctacggcatgaccgaatgcggccccatcatcacctacgaaaaatggttccgcacccgcaagggctcctgcggcaaggcgattcccggttgcgaaatacgcatcgattccgccaacccccacaagattccgggagaggtgcagattaagggcggaaatgtcttcctcggttactacaagaacaaggaagagaccaaaaagtgcttcaccaacgacggctggttcaagaccggcgacatgggaatactcgatatggacggatacctctacctgcgcggccgttccaagtgcatgatcctcggatccaacgggcagaacgtgtatcccgaagaactcgaggcggtcatcaacaatgcctcgtacgtggtggaatccctggtgatagaagacggaggcggacttaccgccctgatctatcccgattatcagcagggcgccaacgacggcatggaccacgaccagctcgacgagcgcctgacctccagcctgcccgagttcaacaaactccttccttcctacgcccagctgcgcaagatagaactgatgcctgaggacttcgagcgcacgcccaagaagagtatcaaacgctacctgtatcagagaaacaaataatgaacaaattcgacgacaagtacatccggatggccaggatatgggccaccaactcctactgcaagcgccgtcaggtcggcgccttgctggtaaaggacaagatgatcatctccgacggatacaacggcacgccttcgggtttcgaaaacgaatgcgaagacgggaatgttacaaaaccttacgtgctgcacgccgaggcgaatgccatttccaaggttgccaagtccggaaattcgtccgaaggcgccaccctgtacgtcacggcttccccttgcatcgaatgctccaaacttatcatccaggccggaatccgccgtgtggtctacagtgaggattatcgtctggacgacggcatccagctgcttcgccgcgccggtatcgaggtggaaaaagtagaagttgaatgaaaaagtattcctccgtgctcgtggcagtactgggtgtccttgtgggcgtcctggcagtgcttacatatcagaaggccacagaaaacaagcgcttgatccgcacagaattccgcgactggcgcaagctgaatctcgtgcttcaggcgcttgacgagaactacgtcgacaccatcgaccgcaagaccgtcaccgatgcggccataagcgccgcgctcggagccctcgatccccattcggtatatatgcccccggcaatactcgaagagtccgagaccgaactcgccggcaacttcgacggcataggcatccagttcaacgtgcccaacgacaccgccatcgttttggaggttattcccggtggcccttccgagaagataggcctccagcccggcgaccgcatcctaaaagtggacgagaaatccatcgccggcgtgaaattcccccaggacagcatggtccgcaagatgcgcggcccgtccgggaccaaggtcaagctgaccgtcctccgcgacggggaaaccgtccccttcgaaatcacccgcggcaaaattcccgtgaacagcctggacgccgccttcatggtgagcgataccaccggctacatgaggttgggcaaattcgcccgtacgacctatctcgaagtcgcacaggcagcggacaaacttgtcaagcaggggatgaaacgcctgatcttcgacctccgcgacaatggcggcggtttcttcgaccaggcctttctcctagcggatctattcctccccaaaggcgccggtatcgtctatctcgaaggccgcgcgcatccacggcaggactataacgccaccggcaagggccctctgcaggacatagacctggacgtcctcataaacgagaactccgcatcttccagcgagatcttcgccggggccatacaggataacgaccgcgggctaatctgcggccggcgctccttcggcaagggtctggtgcaggaacccctctacttcaacgacggcagcggcctgcgcatcaccgtagcccgctatcacaccccctccggccgttgcatccagaagccttactccagcagtgaagactatgcctacgatctttactaccgctatcgcgacggcgagatgttcaatgccgacagcgtcaaggtcgacaaaaatgcggcctacaagactgtaggaggccgtaccgtgtatggcggtggcggtatcgtgccggacgtgttcgtgcccatcgacaccacccgcgcctccgaattctaccaggcctgcaacaggaaggcgacagccatgcgcttcgcatcctggtacttcgacggccacaaggcggaacttcagaagatagacgactactccaaactcggacgctacctcgactccgccggccttgagcagaaattcctcgccttcgccgcctccaaggacggcctcaaaccctcaacgccctcggaatgggcgcaggagagaggttatatgatgacatccgtacgggccctggttgggcgctactcccgcctcggcgacgaagccttctaccatatttacctggacatagacaatgtttatcaaaccgcaataaagttatgaaactggacggaagacgcgaaagcagcaacgtagaagaccgcaggcgcctcagcggcggtgcggcaaccggtctcggactcggcggagtcctcatagtcggtctcatcaccctcctcatgggaggcgatctcggcgacgtgatgcagaatgtggcgggtgcaggcggcctgggcggcggcaccgaaacggtgcagacgcgcgaattcaccgccgaagaagaagcccttgcaaaattctcgagacagattctcgccagcacggaagacgtctggagcgcctatttcaaggccgcgaagatcggcgcctaccgcaaccccactctggtactttacaccgatgccaccgccaccggctgcggcaccgggcaggccgccatgggccccttctactgctcttccgaccagaaactatacatcgacctcagtttcttctcatcgatgaagaaatcgctcggcgccgacggtgacttcgcctacgcttatgtgatcgcccacgaggtagggcaccacgtgcagaacctcctcggcaccctcggtcaggcgcatcagcagatggcccgcatgaacaaggcggatgccaaccgcgtcagcgtgcggatcgagctccagaccgacttctacgccggcgtctgggcccactacgaaaaggagatgttcggatccctcgactccggcgacctgcaggaagccatcaactgcgcctccgtcatcggcgacgactacctccagaagaaagcccatggatatgctgtagaggaatccttcacccacggcacagccgcccagcgcatgcgttggctgaagaaaggcttcgacaccggcgacatctcccagggcgacaccttctccctccgggaaagtcagttgtagggtcttttcacaacgccctgtgcccctgtggactggccggcggcctctccggtaactcctgtcttgcaaggtctcattttatggccgagctccaggtctgagttgtttgtgcccttggtttgttcccgtttttagcggtttttcggaacaaaaatggatttttgaaagctttgttcccgatttgaccgttttttcggaacaaagtgatggattcttgaccctcgcaatgcccactgtcagacgttccctggtgaccactgctgccattccggtaactcctgccgtacatggtctgatcatacggccgggaccttgtacgcatccataccccatttgtcaagtcatagtattcgatatacaaaaatgaccggtttgctatacgaattagataatgaaagactgtctatatacaaaaaaatcctggatgcactccaggattttttattcctaatcatttgactaaatctttgacggacagttatttatgagaaatctgctgtgctttatatgtcaaagatagtaattcgaaagcaattcacaaccaaaagtagaaaaacaaacacacaaatacaagctgtgctttatatgtcaaagatagtaattcgaaagcaattcacaacgtgatgaattccgcgcctggcaatgacctggctgtgctttatatgtcaaagatagtaattcgaaagcaattcacaactatgaccttgttgttccaaaaggggatattgctgtgctttatatgtcaaagatagtaattcgaaagcaattcacaacacgatggttccgcagttgtaccgcaacaacgctgtgctttatatgtcaaagatagtaattcgaaagcaattcacaacgttggtgagttcggccttatcggtaaggcggctgtgctttatatgtcaaagatagtaattcgaaagcaattcacaacggattgaatcaaagggttacacggtcccgtgctgtgctttatatgtcaaagatagtaattcgaaagcaattcacaaccgaattaaaaacagggctatatttgcagtgaatcctggcttctattttacagtcatgatatactttttaattacatatcatttatggacaaaatgccggattggattatacttcgcttggcattgttctcttttgaacaaaagtgagttaatttctcatcaaaggtagagtaactgaccttctctgcattacgtttgacctcatatacctctattatttttttatccagacgttgggcgactatatccagttcgcattgctgatgatgcccctttgaatcggtgtaccctttaggatcccaccatccgccgatgtctctgtattccatgctttcaaccagttttgttttgaaatagcgctcaagaacacccccggagtatgtctgatagtcttccgttattatttttttgagtgcttggaactgtcctatttctataaggcgctggtatttctctatatatctgaaccagaaacgcaggaaaatgtcgcttatctcatagcggacattctgcgttttgggtttcgaccatatcggacgcacttttcgaataaggtcaaatgtctgctcaagcttggcgagttgacctccaatgctcttgcctccaaggaagtcctctatggctgcctgggtgttaatcccgttggaaatagcctgaagtattgaaaaatacgtagaatacttttttccgaattcctgagcaagcaacttccgaccttcttcaatcagcggtgagtcctcccggcaaatgcggttgattattgcaggtgcagtcgttgccttgagatcaataaaatactctacatactttggaatgccacccgtatatgtgtagagtgccaaaagatcatccttcgtatatcctggagcgttatcttccattatttctttaagaatacctgttgggaaggcgctcaactttataatggcgtcatgtctgccatacagcggctcttttctgtctttgaatagtttctccatgagagaatagacagaaccgcaaacaaccatgttcacgtggctgtctttctgcagacggtcccaccaattctggatgtctccatatatggaaggattgacctggaggaaattctggaactcgtcgaagaataaagtaaacttcctgcgagtcccttcttccatgaaaaagcggaagacatcccggaaagtattaatcggtggaacatatacgccggtcttttcccggaactcctggcagaactctgagcataggacggattcactctttttcccgacaaacagatatatgtacggttcatctgcgtaggctgttttaaccagtgtggttttcccgatacggcgtcgtccggtaacaacggtcatccttgaatagccgttgtaagacaagtcccgcatttctttcagtgattgaagctgatcttctctgtcgtagaatttcataatacaaattttacggctgtaaaatttaccgctgttgcaaaattaggaataataattgaaaaaccaataatcctctaaaaaaaaggcccccggacttctccggaggccgtggccgcctctccactgtagcggccgtgcaatcaaaaagcaagatttatatcgttgccgtggagattatattgtaaaataaaatataattgctaaattcgttgcaggcgacacaaaaagcgagtcgtgaaacccgctttgaatgttctcacaacggaataatccttattgtgaattgcttcgaattaccgcaaatataacatttttttaaataattatccccatgaggaaagttttaggtctggatcttggaacgaccagtatagggtgggccctggtaaatcaggctgaatcgcctgaggaaaagtcttcaatcatacgggccggagtccgtgtcaatccgctttcaagcgatgaaaagactcaattcgagcagggtaaagacgccaccaccaatgccggcagaaggataaagcgcagcatgagaaggaatctccagcgttacaaacttcgcagagacaccctcatcgggattttgaaaagagaaggatggattgatgataagaccatccttgcagagcatgcaaacggctcgacattcgaaacatacaggcttcgttccgaagctttggatagggaagtggatctcagccaattcgcccgtatactcctgatgatcaacaagaagcgagggtacaagagcaaccggaaaataaagagtcaggaggacggccgcctttatgacgggatggatcttgccagggaactgaatgagacgggaaagacaccgggtgagtactgctatcatatacttaaaaacggggcgaaatatgttccggaattctaccgttccgatttggcgtccgagttcgacaggatatgggagttccagaagcaatactatcctgagtatctgacagacaaagccaaagacggtatcaaggataagacaaaaagtgttactgcatcgttcttcaaggcgaactatggcattctcacggctgataataaaggcaaagacaaaaaaatacagtcgtacgaatggaggatgaaggcgttgcagacgaaattgcccattgaagaactggtgtacgtgctcgcagatatcaatggcaagatttccgatgcgtccgggctgctcgggaagatcagcgacagaagcaaggaactggcattcaataacgagaccgtggggcagtttttatggaggcagatatgctcgaatcccaacgtcagcctgaagaacattacattctacaggcaggactatctcgatgaattcgagaaactctgggccagccagtccaggttccatggtgaacttacggaagatcttaaaaaggaaatacgtgatgtcgtcatcttctaccaaagacgcctgaaatcgcagaaggggctcgtcagcaagtgcgagtttgaaaagaatcacagggtaattccccggtcatcacctttgttccaggaattcaagatctggcagaacctgaataatataatcctcactgatgtggataccggtgagcagcgcgctctgtctcaagacgaaaaggacaggcttgccgcagaactgcaattcaagcccaaactacagtcaagcaccgccctgaaactgctcttcgggaagaagagcaagtcgctcactgccaatttcaaagcagtggagggaaacacgacgatcgcttcatttgccaaagtgctgctcgacattgccggaatcgaagatgacagagagtacgaagcggagaaactggatgcggaacttatactcgaaacagtgaacggcacgttgaaaaacgaaaaactgacgggcttgctttccttcgattcctcacttgaccgggattcttcggaaggccaggtttcttggaaactatggcatctgctctactcctacgaaggcgataattcaaggaccgggaatgattccctgatcagcaagatttcagaaatttgcggcctgcagcgcgattatgccgcaatgctgtccaatgtgtcttttgagagcgattatggctcattgagcagcagggccatcaaaagaatcctgccttatcttaaagaggggaacaggtacgacgaggcttgtgtcctggcaggatacaatcattcccactccaagacaaaagatgaactcgaagcaagggaacttgaagaaaccctgtctccgatacccaagaacagccttcgcaaccccgtcgtggaaaagattctaaaccagatgatcaatgtcatcaatgccatatcagaggaatatggcaaaccggacgagatacatctggaaatggcgagggaactgaagatggacaaggaatcccggaagcgcaaatatgaaagtatcagtgcaaatgaaaaggagaacgaagagataagagaaaaactgataaaggaattcggtttctctcacgtcagaaagtcagatattgtcagatacaagctgtatgaagaactgaaaccaaggggatacaagacattctattcaaaccaatacatcccgcgggaaaaactgttttcgaaagagatagatatcgagcacattattccgcagtcggttttcttcgacgattcttttgcgaacaagactctcgaatacagggcggtcaacatagagaaggctaatgaaacggcctacgactatgtttgctcaaaatatggcaaggaggaggcggaacagtacaaatccggcatccaggacatggtcggcaaggggcagataagcaggacgaagggccggtacctgctgatgcgcggcagtgagattccggaagatttcctgaacagggatctgaccaatacccagtatattgcaaggaaggcgaaagaaatgcttgaaagctatgtaaggacagtagtccctacgacaggcagcattacggccaggctgagggaggattggcagttggtagatgtcatcaaggaaatcgacttcccgaagtatgaaaaagcaggtcttacattcatcgattacgacaatgatgggcgcgtggtcaagaggataaaagactggtcgaaacgggaagatcacaggcatcatgcgatggacgcccttacgatcgcatttacgaaaccggctcacatccagtatctcaacaacatgaaggcgaagagcgacaaatcctcttccatctatgcgatttggcagaaagagacggtaaaaacgggggacaaacgcatctttatgccccctatgcccctggatgaactcagggccgcattccgcaaggaattggaatcggttctcgtttctatcaaggcaaagaacaaagttgcgacacgcaacgtaaacaagaccagaagcagtcaaggagataatcgacaactggccttgactccgaggggtgaactgcacaaggaaaccgtctatggaaggtcgaagaagtatgaaacatacgaagcgacggtaggcggacgtttgacccgggaagaaatccttaatgtcgcgtcgaagaaagaaagggaggcgctcctgcagaggctcgaagcgaatggaggcgaccccaaaaaggccttctgcggaaagaatgcaccggataagaaccctatatggctcgatgctgtccacggcgagcagatcggctcgaaggtgaagtgcgtaatactgaaggatgtgttcaccatccgcaagactgtcgatccgaatctcaaggtggacaaggtccttgatgccggcatcaggaatttgcttaatgaaagactccaggaatatggcggcaatgcccagaaggcattctccaatctcgatgacaaccctatctggttgaataaggaggcagggattgcggtcaaacgtgtagtgattgaggagaatgttcctgccgtagcgataagaaacaaacgcgaccatgtcggaaaagtaatgaaagatgctgatggaaacagccttccggcagactatgtcaacctgcggaacaatcatcatattgccatttaccgtgatgccgaagggaatcttcaggagaaagtcgtttcattcttcgaggcgatggaccgcgtatccaacggtctgaagccggttgacaagggctacaggaaaacggagggctggcagttccttttcagcatgaaaatcaacgagatgtttgtcttccccaatccgcagacaggctttgatccgtctgaaatagacctgacggaccagaagaactacggcaggataagcccgaacctttaccgggtgcagaaactgagcaagaaagattattatttccgccaccatctggagacatccatcgaggatacaaaagaacttcaggaaattacatggaaaagaattcgtaacctggacaatcttaaaggcgcagtcaaggtgcggataaatcacatcggcgaaattgtagccgtcggcgagtatgattaagcggacattatatttcggcaaccctgcctatctttctctggcaaacggtcagctggtgattactaagccggatgatggagatctgccgctggatgacgctcccaggcaggtcaggaccattccaatcgaggatatcggagtcgtcgtcctggacaaccggcaactcaccgtcacatctggtctgatggagcatcttttggagaataatgtcgcggtcattacctgcgacgcccattcaatgccctccggtctgttgctgccactggaaggcaacactcttcagcaggaacgctttaccgatcagttggaggcctcgctcccgttgcgaaagcaactgtggcagcagaccgtatcggcaaagatagagaatcaggccgggatgctcaaatatgccaatggggaagatgcacgcaatatgattatctgggcgaatcaggtcaagagcggagattctgaaaacatggaagcccgtgccgcttctttctattggaagaatgtattcagggaactgccctttttcgtgcgcgggagatacgaggctccgcccaacaacctcctaaactacgggtatgccattctccgaggcataatggcacggtcgctggtggcttccggcttgctcccgacgatgggaattcatcatcataacaggtataatgcctattgccttgcagatgacatcatggaaccataccgtccgttcgtggacaaacttgtcttcgattattgttccgacaacgaaaactgggctccgacgctgtcgctggaagcgaagtcggccctgctgaaattgccggttgcagacgtcttcatagatggacataaaagcccgttgatgatagctgccactgcaacgacatcttctctggccaagtgtttctccggagaaaaacgccaactggtttatcctgaattctgatgtccagattcgaagaatatcgggttatgtgggtccttgtcttttttgatttgccgactgagacaaaaaaggacaggaagattgctgctaatttcaggaagcagctgatgggcgacggattcaccatgtttcagttctctatctacctcaggcattgcgcgtcatacgagaatgcgcaggtgcatatctcgagagtgaaaaccatacttcccccaataggcaaagtgggaattctttatataacggacaagcagttcggcagtatggagctgttcaatggcaagaaactctccgacaagccggaagtggagcaacaacttgaattgttttaagctatgcgacacacattcctcatcctttcgattatcctcctctcctgcacccctaagccgcaggaggcggagtactggcagatgcgtgggctggtgctgtccaccaaggagcttgcggaggtggactggccggcgcttgcggcgcgcagcggcatcaataccataggcacgcacattacgccctccgaggtcctggcgttcctggagagcccggaaggccgcaggttcacgaaggactgccggcgttatggcatcacggtcgagcaccagctgcatgcgatggcggaactccttccgcgcgaactctttgcggaagattccaccatgttccgcatggatacgaacggccgccgcactccggacgcgaacctctgcgtgcactccgaaaaggcgttggacatagtcgcctggaacgcggcagcactcgcgaagaagctgaagcccgacaatcaccgctactacttctggctcgacgacaacctccccgtctgcgcctgccctttttgccgggagtatctgcccagcgaacaggccctgattgcagagaatgccatgctgcgtgagatacgcaaggtcgatccccgggcgagactcgctcatctggcctactcctccttcctggaacccccgcgcaaggtggcgccggacgaaggcatcttcctcgaattcgcgcccatctaccgatcctgggacgcgcctctctatcatgaggatgtgctctgcccgaggggatatccggtgagcaacggcgacaatctgcgcgcactggaagccaatctggaggtttttcctgccgaagatgctatggtgctggagtactggctggacgcttcgcttttcagcagatggaaacgaccttcggtggagctgccgtggcgcgaggatgtctgccgctcggacctcgccacatacgcctcctacggcctgcggaacgttacatccttcgcggtctacatggacgcggagtacttcagccgtttcccgtcgaccgctccggtagaggagtacggcaggcttctgggcggccagaagaatatccgcggcctgcatgaatggtggcagggccttgtcgattccacctccgtgtccatcttccgggattcctcgcagatacacttcatctttgatgtccgcgactccacccccgttttcaacgacgacccggacgaaatgtccgtaaacccctgtgaccgtgcggaggttttcatcagctgcgacccgcagatgcagcgctactactgcttcgagatcgaccctcaggggaagaccatggactactcctgttcattctaccgcaagtacgactacgcctggagcggagagcagaacgtgcaggcgcgtcccgtcgagggcggataccacgtcgaggcggcattcagctgcgattacctgcgccggctgggattgctgcaggacgacggcagcctgctcataggcttctatcgcggagatgccgtccggcccggggagatcacctggtactccgccgtcaaccccggcacccccgaacccgacttccacgtcccggaaagccttttcatactgaaataactgcaacgagtgctcccggtcgtacaaaaattgtaggaccgggagcattttcggccttttttgctcccggtcggtcattttctgtaggaccgggagcacctgaaggaatcactttaggtgcggtacagcgtgatattgacgattggaaaggtcagacacctggaagcttgaatccgtgtctgccatcgcgaaaaagccgtcgcagacacctggaggcttgaatccgtgtctgccatcgcgaaaaagccatcgcagacacctggaggcttgaatccgtgtctgccatcgcgaaaaagccatcgcagacacctggaggcttgaaacaaaagggattgtggacaaaggagtggataattgttatttcaactttattttgcatctttgcgttacatgaaacttatcaggaggaatatggatcaaataattgccctgtgtgagaagcacaaggtgaaccaattatttgtatttggatctattcttactaaaaagttcaacaaagacagtgatgtggatttcgtggttgtctttaatcgggactcccttcctttaatggtttatggggagaattatttcgagttcaaattcgctctcgaggatcttctcaaacgttctgttgatctggtggagtatagtgctgtaaggaatccatattttaaggaagaattggacgagacaaaacagctgatatatggaaaggcatcttaaggcacatctttcttttttgatcaggtcccgaagagattcgatgaatatcaaaaaaacttgatgcttcggcgtgccgttgagcgtaatatcggtataatcggtgaggctaccaacaagatagataaagagtatccggaaactcagatatccaatgttcgcgctatcgttgcgacgcgcaacagggtcatacatgattacgcagctgttacagatgatgtgaaaaggtattacaatccttgcttgcatcgtgccgcatagcttttgtcgtcctcattgttttagcttgcataactgattcctgagaatcaagcatttacacgaaaacgtctggtacatttgcaccggacgttttcgtgtaacttgttgataatcaatattgctttataattgccatcgtgctcactttttctttttcccttttttcttttggccaacaccttgttgaatctgtttcacaaaatcatattcatgggtggccggaatctggaatgagaaaacagtcttaccttctcgatgagtcagcgcaaaatccccaagattgataatatccattccaatgagcaccccaaagccatttaaatggccttccgtaacacggatatcgcgaatcaacaggtgattgggaaggagcatatcaaccagatagacattgacaatactttctccttgggcatggtatgtccggcactgagaaatgggggaaaggccgagtttattaactacctcggttgagatgacagaagcagttgctccggtgtcccataacgcggagtactgctgaatatctgccggggaaaacggcgttgttgaatctttagaagctccaacgccgcaaggggtcatcaattcagaagtaagatgttcagtcctggaagtaaaccggatccattaaaaagaaactcttgaagtggagaaacgttgtgaataggctccatctccctcagtacaaagttggagcataaaattgcctttaccgaagttgttcaatgcagtatcatacccctctttaagggagtcaaaagcccccttcaccccatcggcagtagtgatgatatacttaccgttgtactgtttcacaagttcatcttgattctcaagatagtatttgaagagttcctgtatcatactcatctccttagagcagcagagttacaaacaatttggtaattgtaaacaattcattcaaaaatcattccctattcttttcattttctgtaggaccgggagcacctgtcaatccaaattatacgaaatgcaaagcggattgtatgaaataaaatatgacattgtcataaaataaaatatatttgtggcacaacaataaactgataatcaatatgaaaacctttaagagaatccttctggcaatgattccctcgcttcttttcgtgtcctgcggcgaaacgaacccggatgatcccgacaacggggacaacggtgggaacggcggaaaagacaagaccgtcatccgcgttgtagaagcgctgccgctctacgagctggcggccgacaaggacaccgctctgataagcttcagtgccactctcgatgaaaaagatgctgactggaccatctctacctcagccgactggtgcaaggtcgagcccgcatccggcacaggcttgggagaagtgaacatcatagtggccgacaatcccacagcgagcgagcgcaaggcggacatcgtgatcaaatccggcaagaaggagcagactctgaaagtctcccagagcctctatgccggcgccttgccggacgagccttggttcagcaagtcttatatcgaacgcaccgacagggagaaagcaggcttccgcggtccggtaaagagctggtgcgaagtcacttacgccacatactacaaaaacttctacgacgaggccgggcaccttgtgaaggaagaataccacgatacttccaataacagcgtcgaactccgctgggtgcacagctacgacgcgcagggccgccgcatcaagtccgagcagagttacggctccgaggtccagggcggcagagtgttcacctacgagtacaacaatcccggcaaactcgtggccacgaatgcattcaactggattgaatatgaagacggatggatcaacggcaaagacttccctatgtctgtatggaaagacctgtccgccatccattatgtcgacgattctccaggctattatgaacgcagcgacattgacttcgagttccagtccgacggcagcctgacgatgaccgagacatacaaccgtgaacgtgacggcagcaatcccaatgtgtccgtctatcatattgtctatgagaacggactccctgtttcctgcccggagagcaaagttgccgtcacatacgatgcaaagagcctgcccgccacgcttagtaccgaggacggcgccaagacctggaccttcctggggcatccccgcgtactgcttgcggccacaatgaaagagcccaaggcacagggaatggtcgcctgcttctgggcgaattacagctacaactccaacggcgacaaaacccgcttcgagcgcgcatatttctccgccgaccaggtctacaacgactatttcggcaagtatttctacgactcgcacggcaactggattcagcgcgaagaaatcaccgagcccgccttccagcacggccagcatttccctgagaccataaatcgcgagatagaatactactagttcatcctctttccgaacagatagtacttctggtcgccgaaccacaggactccttctccattcagcgcagtgtagctggtgtagaaggagtttcccgtatctctcggagagaacagcgacggctccccgaaccataccggctgacgggctcccggcacgaaacgcccgtcccgcttgtagagcgggcccctgttctgatacgaggttatgccgttgaagtcgaaggtgtcgtgcaccatcaggaagtatctgccgctgccggcctcgggccctgcataatcgtaaatcgggcagggggagcatggctgcagtatcgcaggtccgtcgtcgctcgtgcgaagtatctccgggcgggcccagctgcggccgctgtcgctgctcaccgaccagataggatgcccgatggaagtgcgcatcaccgcgaaaagccgtccgtccggaagctttacgatgcaggcctcttcggtgtggaagccttcgcgcgacttgtactcgtggtcgttcttcaccttgcccgaatcgaaggcctgctcttccgtattgaagaatgatatccttatatcgcgcacctcggggtcttcatcgatgttgtcgtactgccagatttccaccctcgcgacgccggaagagtcgtagcgggaacatcccgcaagatagcgtccatcctgcccgaggcgcagcggcctctgccacatgcaccacctgggaggcaggttgggatccgccgggtcggcggagaatcttcgagggaaggggacgatttcggggtccgaccaggtggccccgccgtcgtcggaatagcggcccatcatgattccgcagagatgcttcttgactgtcgtttcttggttccacaggcagtagagcctgccgctgcggctcagcatcggctgctgccatgctgcgacgggcttcgggtccgagagagtctccgatccggctatcaccaccggctccgtccagcttttccctccgtccgcgctcttcgagaacaccacatgctcgtcgtccgccgcctcgtaggtcccttgcgtccagaaggcgtaaagcatccccttcgcgctgtcttccagcacatggaaatgatcgttgaaagagtctcctatcctgcgcggatcgcgatccttgtcggtgcgtccctgccgggggatgaacacttcgaaatcgtgcgggatcaggttgcggttcagcgacgggtcgagatagtgccagtagaaatggcccggccagcgctgccggtagttccccgtgtcgctgaagtgcctggccatcgcttcgtcggcggtggcatagcggtggcagacctcgggcgatttcgtgaaaatcgtccactggctctggttggctgcgtcctgaccggggagccctacccaaatcaccgatccctttgcgggcggataggcggggttgagggtgaagatggtggtcagagcggtgtgttcgttgcagatgggctccaccgtcagcagtttcgagagatccctgcgatggaatttcctgaccggcctgcgcgagaaggcggtcttgtcgcccaggatggcgttgccgaaaaagaactcctgcgctatcctgtgacgcctgaggttatgcaggtccttgagggttgagggatccgagtaggccaggcggaagttgaaagctccgtccttcagcggcctgtaccatccgcgcttgcgggcgtacttgattatgtccttgctgcccaggaagttgaggctgtctttcagattgatcttccctatggtgtagtagttcgggatggtggcgatctggtcgtccggcacgcgttgcgccacccagtgccggcccttcaccaccgccactatccatccctcgttccggtcggccaccagatacgaacgccccgagtcggcgtagccgtaagtctctaccagtctgcctattatgtgcaccgcctcccgcgcgctgcgggccttctgaatggcggtggtgcggatttcgtacaccaggctgccttccgcgctgtcttcgcgagagaggcaccggtcggaactgatgcagaccccgtattcatttatgaaactgtcgcccgacttctgccccgggaactcgaaccagaggcaggcgctgcggtcctcgttcgcggggacgttgtagatgttgagcatctgttcgccccactggtcttcgttgtggccgagataaacatagccgtcggtcgtggcgttccgcccggcgatgatgccgaagcagaggatggtgctgagtagtccgctgagcatgattatatggttttgaggccgagtccgggcctgtccggaaggatcaggcgcccgtcctcgaccgttactccttcaaacaagtcgttgctgatcagcagattgccgtcgaggtcggcaaaatccgcgataggggagagatgcgccgcggcgctcaccgcgcaggaggtctccgtcatgcagccgagcatcacccgcatcccttcggcgcgggcgtaatccgccatcttccttgcttcgcgcattccggtgcacttcatgagtttgatgttgatgccgtggtaggcccccttgatggcggggatgtccttcagtctctggatggcttcgtcggcatagatggggaggggagagcgttcgctgatccaggcgttgtcgtcgaggcgctctttcgccatgggctgctccaccatcaccacgccctgctccttgagccagaagatttcgtccagggccttctgcctgtctttccagccttggttggcatctaccgctatcggcaggtcggtgatgctgcgtatggcgcggatcatctgctcgtcgttgtcgaggccgacttttactttgagaatcttgaagcggtttgcacattcctcggtcttctgccggacgacttccggggtgtcgattcctatggtgaaggtcgtgcagggggccttcgcggggtcgtaaccccagatgcggaaccatggctggccgaggagtttgcccacgaggtcgtgcagggcgatgtccaccgccgccttcgccgccgaatctccctcggatagggaatccacgtaagataggatgtcttccagctggaaaggatcagtgaactgttcgagatgcactttctgcaggaaggcgcagacgctttcggtagtttggccgagatagggtggcatggaggcctcgccgtagccggtgaagccgtcgtagtagattcggacctgcacgtcgggggttgtcttgcgggaatagcttgccacggtgaaggtgtggcggagttgcagttcgtacggctcgaaactcaggcgcatcctctccctgcccccgaccttgtatggcctgggggtggggctgccgtttgcggtgctggtcgcggcgctgccgttgcccttcgcggcgctggcgctgccggcttcggagccttccgctccgcctttcgctccgccgcaggcctggatcccgccggtcagcgcaattccggcaagccccgccgtccggagaaatgccctgcgcttcattgtccggaagtctcgctcagcagctgcacggccgcatcatagtcctcttcgttcaccttgacctccaccggacacacgaatcccagcgaagggtaggaagaatccgcaccgaacacacctgcgggaatgccattctcgcgcagcatgccggcagtgatttcggcctgaagcctgtcgttgaaagtggcgactgccttgaatttttgggtatctgttttcataacgtggtttattccccgctgtggggtatccgcgaataaagataggaatttttttcggaacaaatcaacgatttctcagccattgcaacgccctcgcaccctgccgtccgtac

SEQ ID NO: 2275 - DNA, 24062 bp, synthetic construct
  misc_feature 1..24062: note = Synthetic
  source 1..24062: mol_type = other DNA
cgataatcaacttcttattatggttgtactcgccaatttcaatccatacccgccattttccactctccacttccttgaccttccaacggctcgttatccgcacctcatgacccgcgccatagacctgatagacgtatggcttcgactccacgatatagcgcacggaggtctcgatgataagagcgccggtcttgccgctcacgtgcatgtcgtcgactccctcatactccatcactatctgcgaagcatcggcgccaggctctacaataaagttgtatttcaacaccttctggccgccaaagagttcaaacgacacgccgggccatatctcgtcgtaacgcaccgcggcatagctgctcaccttcgagcgccaccgcgccgggtcgtcaccaaggtagtagttgctgtagccttcctgacgctcgctgcccacaggcacaacagaagtcccgccaacgaagcgcatcctataggcatgtccgcggtctccggcgccgtcacctgctcccattccgggatggccatgacgctccctcagcgccaccatcacaccctcctcctcgaggaataaggcaccgtcgtgcagctgcgcttcgaatctcaccctcgaatcccactggcccaggttctccacaaaatccaccatccggccaatccacaacgtatcaccctctacacgggctaacgccgtgagactgacggctagaaacaacattattatggtaataccctttttcatgtccccatgatttgatttgcaaaaatacatactttgccccacatggccaaattttttttaaataaaaaagagagaacatcgctgttctctcttccttgtgactcctgcaggattcaaacctgcaaccttctgatccgtagtcagatgctctattcagttgagctaaggagccatcttcgatttctactctttttctctcgaaatcgggtgcaaaagtacgaactttttagatactgaccaaattttttttcaaatattttttcggcaatcctacaccttactatctttcaatcgattgtacagaataaattttcaactttccattctcaattttcaatttattccgtacacttccctatataaaaggtccctaatttcacaaaattcgtcatcgtcaagctcatatttcgacataataatcatcgggacctctttaccgccctcacgataaggaggttgcacatattcttggggattctggaagaaacccatgctggcatagaattcgacacggtggtcagcctcctcggtgttggggtgctccacctcgagcaccacctgctcctgctgctgcgagaggaagttgaggaacgccgccttgccaagtccctggttacgcagttcttccgctatggcgaaatgctctatatagataaggtcttcgaaagtccagtaggtcaggatgcccaccgggtcgtcgccgttctcggccacgaggaaatggaatttgccggcatctctatgccggagactagagaagggcgggcgctcctgctcgggaaacgcctcttcgaacaactcttgcgcaaaatgcgaatggtcgctttctgctaatttggtaaaggttatcatttataaaaaactaaagttattgatttcaaatcttactgtcagacaatgcacccatcccatggcggtatagccttcgagggtgattttcgagtgatggcaagtgtagcccgccttgatggcgcctacaccctccatctcgtagccgatgaaaccactcatgaagacaccccagcccaggcctccctggttgacatattcataagtgcccgtataggagctgggcgactgtcctccccagatgtcgaggatgctgtagttcgccccggcaatctccatcaggttctcccgcaccttggtattgttcaggctgacaccgaggtccacctccagactgaggttgttgccgaggtaggcagtgcgcgacaacgcgaagtctatgttgatacggtcctcgttgcccagaatgccacaacggatatagcggccgttgttggtgaggatacccgtaccattggtactgctgaggttgaaggcgccgatggcttgggcgcgtgctatgtcgaaacgcagcaaccagccgaaaccactctcataatcataacggaaacccagaccatactgcagagacgtacggtagtacatctcggggtactcgaccacctgaagctcgttcttgctgccgatggccgacgagatgaacccggcagtcttcaggtctgcccatattttgttgccgtaggtttcactgtaaagaacacggttgatggtatttgcattttcaggacgaccggaatagaaattggcattgacgtcgtcggcccagaaggcaccggcgttggcgaagactgaaagtccggtcgtccgacgcctcggaacaccgtcgtcggcagcagaggcctccgacgacgtcttcaacccgtcggccatcgcagccgacgatatcaacaaagtccctatgatcatcaatacccgtttcataatttaatattcatcactcctcactcataactcataattcatcattcatcactcatcactcataattcatcactcataattcataattcatcactcctcactcctcactaaatttcccctcctcttttctccactatactggtcagcagtgccttggctctcatcagtcgcaccttcaccgtgcccagcggcaacttgagccgctcggcaatctcctcgtaggagaggtcctcatagtagcgcagttccacaatctggcgatagggcgctttcagctgcgacactatctctttcagcgcggcatcgcgctgcatgcggatcatcatttcctcgggattcggctgcgacgacggtatctggtattcgataaaatcgttctcaccggtacgcgtgatgctgttcagcgacaccgtgtcgatcttgcgcttgcgcagatggtcgatataggtgttcacgccgatggaaaaaagccacgaactgaaggtccccgtgggggcgtagcgattcagctgaaggaaagccttgctgaaggtctccaccgtcagatccgacgccgtggtggtgttcctcgtcatgcgaagcaacaacaagtacaacggctcacgataagacgccatcaagtcggcatacgcccgatggctgcccttgtcgcgggcctcgcaaactaactgatagtcacgctgcagacgactattttgttcgcaattggcttccattgttgcaacgattcgataaccaacaacctgtattcaagaaactttatttcccgaattttctattgttatctaacggcgttaagaccaaaatagtatttgcaatgataaaataaatttctaaaaaaggtgccgccaagtaggtcagaccaccgtcaaaccgtttgcacagctgggcaaacgagaatatctgccatccccatttcaacaacaccgcgatggccaccaccgtccatgggagggtgcccgccaagagcaaaagcaccgccatggcatagaaggccacgttggccagcggcagcacatcctccatcagacggctcttcacactgtggcggttgcgcgtcgacacacggtccagacgctgacgatgccactggccgaagctcttcttgggctccgtgctcagacaggcgtcgctgcctatacacaccgccgtattgcccttctcagcattctgatacacaaagagatcgtccgagccgccggcgacattgtagtggttgatgaaggcgccttgcttgaagaagaaattgcgtcgataactcaggttacgcccgctgccggtatagggatgacccaagagggcacatccaaggtaattggagctgtagcagaggttgtcatactgctgcatgaggctgagtagacccttggtgcgcttcaacccgcagaagcccagcacaatttgcgtttccttgttaaggtatcctttagccatgccacgcagccactgcatgttcttcggcgtgcagtcggggtcggccagcagcaagatgtcgttcttggcactcttgataccaatcgacagcggatatttcttcccctggaagaggttgacatcctccttgaatggcacaaccttcaggtggggatagtagtctttcagcaacttaaggacaaactgggtgtcgtcgtggctcaggtagtccaccaccaccacctcgaagtcgggatagtcctgctcgagcagatacaccagattctccttcagccaggaggcatcattgcgggccgtaagaaccacggagacaggaggaagggcctccttcgagaggtttccggagccctcgccggcaggcacagtgcggtgccagcgacccacacggaaataaatcagcccatagtagaggcagcaaataatcattgccaacaccatgaggatagcaaaaccaatagattgtttatcagtcagaaacaaagaaaagtcaaacatttgtgcacatgttttttagtgtacaaaaatacaaataatacgtgcgcgccagtcccccgcgaaagtataaatatcaacaactattcaacaccaccacccaactccctcatttccacctacgaagaccctaccaacaccgtaccaactcctacccaactcctactatggtaggagatgatacggtgttggtacggtgttgatacggatttgataggttataggcggcggccaagcttctgtaccatagagcctttccaggtggcatagtcaccggtaaggatatggcggcgggcttcgccgacgagccataaataaaatcgtaggttgtggatggaacaaatctgcagtccgagtatctcctcggcacggataagatgatgcagataggcgagggtatatacccggtcggcctcggcagaggaggtggggtcgatgggttcaaagcagctctcccacttcttgttcttgatattgatggtgccttcggcggtgaacaacaggccattgcggccgttgcgggtgggcatcacacagtcgaacatgtccacgccgcgctcgatggcctcaaggaggttctgtggggtgccgacacccatcaggtagcgcggacggtccttgggaaggatggcgttgacaatctctatcatctggtacatcacctcggtgggctcgcccacggcaagaccgccgatggcgcagccctcggggtccttgctggcgatatactcggcagagatttttctcaaatcctcatactggcatccctgcacgatggggaagagcgcctggtggtgtccgtagagaggttccgtctcgttgaaacgcttaatgcaacggtcgagccaacgatgcgtaagttccattgaacgtttggcatagcggtggtcactgtcgcccggggcacactcgtcgaaggccatcatgatatcggctccgatgatgcgctcgatgtccatcacgctctcgggcgtgaagaggtgtttgctgccgtcgatatgacttctgaacgtgcagccttcctccttgattttgcggttgtcggccaacgaaaagacctgaaagcctccgctgtcggtgagcaacggacgctcccatccattgaacttatgcagtcctccagcctgtcgcagcaggtcgcatcccggacgcagatagaggtgataggtattgcctagaataatctgagcaccaatatcattacgcaactcatgttgatgcactgctttaactgaaccgacggtaccgacgggcatgaagataggggtctcaatgtcgccgtggtcggtatggatgacgcccgcacgggcatcgctgcaggtggctttgaggtcgaaggtcaatggcataacggttcccggctccttagaggactatcttctcgattttggcgcgggcttcgagcacggccttgtagtcgttcatggcacggagctgcaggtcgtagatgctgcgggggcagtcaggagtgaagggcagcttgccgctgtcccatagcttgatgacggcttcaagattctccttgcggttcatcagatgatagtactcggctttcattctgtccttgtagtcggacgaaagcatcaggcttgtgatggtctgtaaatccatagtattgttgttttaaaggttttcgttattcgttatttcgtaatcacgttattacgttattacgcctcaattaaggtttttgcaagtgccagggccttgtcgaggccgtcggggttcttgccgccagcggtggcgaaatggggctgtccgccgccaccaccctgtatctccttaccgagggtgcgcaccatctgtccggcattcaggccgccatccacacggctctttcccagcacgataagcagggcgggcttgccgtcggtgacactgcccagcaccatggccatgttggggttgtcgttgcggagggccatcatggcatccttgacggtgttgacgtcgaaatcgacacgctcgacgaggatgggggaggccttcagcctgtcgccaaagcccttagctacaccagcggccttttcctctttcaatttaccattttcaattttcaattttccattctcttcctgcagcttggcgatggaagcggccaggtctttggtacccttgaacatgtcggtgagcgacgctatcatctcctgctgctcgtcggcataacgctcggcagcggcagcggtgacggcctcgatacggcgcatgccggcggcgatggcgccctcagcgacgatacggaaggaaccaatcatgccggtgttggccacatgggtaccgccgcagaactcgatgctggggccgtacttcaccacacgcaccttgtcgccgtatttctcgccgaagagggccatggcgcccagcttctgggcctcggcgataggcatggcgcggtgctcctcgaggggcagacactgacgtatcatcgcgttgacgcggcgctccacgtcgcggatctcctcatggctgagcttggcgaagtggctgaagtcgaaacgcagacggtcggcgtcgacactcgagcccttctgctccacatggtcgcccaggacttggcgcagagcatagtgcatcaggtgcgtagccgagtggttgcaggccgtcgcctgacgcttatatgcatccacggatgctttgaattgagaattgagaattgagaattgagaattgagggcagagaactcttctgcgtcaacaatgtgaacaatcagcccgttctcttttttcgtattgacaattttcaattttaaattttcaattttcaattcgccggtgtcgcctgcctgtccaccgctctcgccatagaagggggtgcggtcgaagaccagctggtagaactctttgtctttggctttcaccctgcggtagcgggcgatgcgcacgtcggcctcgagcatgtcgtagcccacgaactcctcctccacacccggcagcagctcctgccagtcgtcactctccactttcgcggcaccgcgcgagcgctctttctgctcctgcagacctctctcgaagcccgccatatccaccgtccagcctttctcgccggccatcagctgcgtgaggtcgatggggaagccataggtgtcgaagagctcgaaggcgaaggcaccgtctattgttttattgcctgattgcttgattgtttgagtgaggtagtcgttgaagcgcttgatgccgccggccagcgtgcgcaggaaggcctgctcctcttcgaggatgatgcgctggatgagctcctgctgcttcttgagttcggggaactggtgacccatctgacccacgagggtagggacgagggtgttgatgaaaggctcggtgaagccgaggaaggtgtagccgtagcgcacggcacggcgcaggatgcggcggatgacgtagccggccttcacgttggagggcagctggccgtcggcgatgctgaaactcacggcacgcaggtggtcggcgcagacacgcatggcgatgtcggcatcctcgttgtcaccgtatttcttgccacatttggcggcaatctcctggatgaggggctggaacacgtcggtgtcatagttgctgcgcttgccctgcatcaccatgcagaggcgctcgaagcccataccggtatcgatatgcttggccttcagcggctccagggtaccgtcggctttgcggttgaactgcatgaagacgaggttccatatctcgatgacctgggggttgtccttgttcacgaggtctttgccgggcactttggccttctcctcgtcgggacggatgtccacatgtatctcggagcagggaccgcagggaccttggtcgcccatctcccagaagttgtccttcttcgagccgcgcaggatacggtcctcgctgatatgctctttccagaaattgtaggcctccatatccatctcgagaccctccttctcgtcgccgccgaagacggtgacgtagagccagtccttgttgatcttcatcacctcggtgaggaactcccagccgtaggcgatggcctctttcttgaagtagtcgccaaacgaccaattacccagcatctcgaacatcgtgtggtggtaggtgtcgtggcccacctcttcgaggtcgttgtgcttgccgctgacgcggaggcacttctggctgtcggtggcgcggggccactggcgctgctggttgcccaggaagatatccttgaactggttcatgccggcgttggtgaacatcagcgtcgggtcgttcttgatgaccatgggggcgctgggcaccacatggtgatccttactctcaaaatagtctaaaaaggcttttcttatctcgttagatgtcatatcttttttttgtttccccgcttcgcggaaatccgtaaatccattttctgatttatagattacgccgaaggcgggaggttttcaaaattcttcgcgttccaccatcagtatgccgttctgcggcacgatgaagtatttcttgccgtcgtattttatctccacggcgttcttcagcaggaagatagccatgtcgccgggacgcacctgcagcggcaggtagcgcggctcgcggtcggcggggttccagtcctcgccgtccgaggaagagggtagggggtagccgggaccgcacttgaggatatagcccgtctgcacctcctctttctcctgatagccggcaggcagcagcagtccccctttggtcttcttcgtggccatcgaaggctctatcagcaccctatcgccaatgactatcagattgtcaatgttgttcttcgccatcttttatacgtacaatataaaatgcaaagataggaaaagaaagcgacatagcaaaaatttttttcattgattcgtcccgtagggacgtactttcaatctgcctgaccgtaagtaatggcattgagcaccgctgattcaaatccagcaaaaaaccacgccatgcgtatacccatcctcttattcgtcccgtagggacgttccctcagtaaccccacacggaagtgtggggtaccaagcaccacctcctcctctccgcgtctcggagagacgccaccacgctcattccacctagtggtatcaacctactaaagaacttattttcatcatattaccatttattatgttcattattattacttttataataattacaaagataataaaagaaagcgatgtgtcaaaacttatttacaccctaccttttgaaagggttttccctattacgtattttttcgtaacgaactttttcgtagtagatacggtgggaatatacataaaatattttacactgacacactttctgaatagaattctttgtaaatataaataaattagcaatatatgagatgtattttatttataggacaacattatatagatggaatatatcattcaaaaaagtgtccaagatgacacttttataaaaaaaggcgacggaagatcgagtctcccgcccccttgatagttttcacaacggaataatccttattgtgaattgcttgaaaagtgatgcaaaaatacgacttatttttgaactggcaaaataaattttgtcaacacacagaaaaaacgtatctttgcaccatcaaaatagacatctatgaaaaaaatcttaggactcgatcttggcacgaccagtatcggttgggcaatggtaaatgaacgtgagagcaacgatgagacttcgtcaatcatacgtcttggtgttcgtgtaaacccacttactgtagacgagcagacaaattttgggaaaggcgctcccatcacaacaactgctgacagaacgcagaagcgtagtatgcggcgtaatttacaacgatacaaactccgtagagacaatttaattgcattactgaaagagcaagggtggataactgatgccacaatcctttcggagagcaccaacaatagtactttcgaaacatacagacttcgggcaaaggcagcatcagaagaaataacgctcgagcaattcgcccgggtgctgctgatgctcaacaaaaagagaggttacaaaagtaaccgaaagatgaagaacgacgaaggaggccattttgtcagcagccttgatgtggcaaaagagatttatgactccaacctaactcccggacaatacgcctaccaactcattaaagaaggaaaacataatattccagacttttatcgttcggacttggaagcagaacttgaccaagtatgggcatttcaatacaagcaacacaagtctatcttaactaacgagtttagaacagccattgccaaccaaagcaagaccggaacatcgaacatgttccgtaagaaatacaatatctttgccgccgacatcaagggcaatagaattgaaaaagcagaaaagatatacaaactccgaaacgaggctctcgaacgggcgctgacggaagaagaactggccacggtaataagtgaaataaatggtcagattaatggcagtagcggttatcttggagccataagcgatagaagtaaaatactatatattaataagcaaaccatagggcaatggttaatgcggcaattggacagcaatcccaatgccagcttgaaaaacaaacctttctatcgccaagattatttggacgaatttgagcagttatgggagacgcaggcgaaacaccatgcagaattgaccccagaaatcaaacacgagataagagacatcatcatcttctatcaacgacggctgaaatcccagaaatggcttgttgccaattgttcttttgagaaaaggaaagtatgtcctaagtcatccccactctttcagcgcttcaagatatggcaaatgcttaacaatgttgtcataactattgacaacgaagagtacgtactcaatgaagatcagaaagcgttgttagcgcaagagctacaatacaaagaaaaactcagcaaaagcgacgctcttaaactgctgtttgcaaaaacaagagggatagacatgaattttgcggctcttgaaggagaccgcacaatggcacgcttgctgtctgccgcacaggagatagtatcggttagcggacacggggaatatgatttcgcaaaactatcggccaaagaaaccgtggaaattgtacggatggtattcggcggattgggatttgccaccgattggcttactttcaataccgacgccagcgataccgaacaagagcctctgatgcgtttatggcatcttatttattcttttgaaagcgacaattccgccaccggcgacgagaaactggtgaagcgcatcatgcagatgctcaacatgcctaaagaatatgcccgcctattcgccaacattcattttgaagacaactattgcaacctctccagcaaagccataaaaaacatccttcccttcatgaccgcagggcatgtatatagcgaagcatgctctcttgccggttacaatcactccgagcagtcgatcactaaggaggagaacgaaaagcgacaactaaaagaccatcttgaaagtgttcctaaaaacagtttgcgcaatcctgttgtggaaaaaatattaaaccagatggtcaatgtcgtaaacgaggtaatagacacctacggccgtcccgacgaggttagaatcgaacttgcccgcgaactcaagaagaatgcccttgagcgcaaaacaatgacggacgccataaatcgcaacacgcacgaaactgagcaataccgcgaaatccttcaaaaggaattcggcctaatccacgtaagtcgaaacgacataatacgttatcggttatacaaggagttggccagcaatggctacaagacactctattcaaaccaatacatcccacaagagaaactattcagcaaggaaatagacatcgagcacatcataccacaggctcgtttgttcgatgattcctactccaataagactttggaataccgtagcatcaacatagagaaaggcaactctacggccatcgactttgtcaggcagaaatatggggaagagggtatggctggctataatgacagagtaagcaatctgctcaagtgcggagccatctctatggcaaaggcacgaaagctgaagatgtcagaacccgatataccagaagactttatcgaccgcgacttgaggaacacacaatacatctccagaaaagcacaagagatgttgcacgaagtggtccggattgttacagcgacaacaggtagcgtgaccgaccgcctccgtcaggattggcagttggtcgatgtcatgcaagagctcaactgggacaagtataaacagctagggctcacaaccattatcaaaggaagagacggccagcaaatacgacgaatcaccgattggaccaaacgcaacgaccatcgccaccatgcaatggacgcactaacaattgcattcaccaaacccatatacatcaactatcttaaccacctcaacgctcgcggcagcagcgaagaaataaaactgatagaatacaaatatcttgaacgcgacgcgaacaaccacctgcgcttcaaatcaccaatccccggcaatttccgctcagaagcccaacggcatcttgatatgatacttgtatctaccaaagcaaagaacaaagtggtgacccgcaacacaaacatcactaagaagaaatgcggatataacaagaagattcagttgacccctagagggcaactgcacatggagaatgtctatggcagcgccctgcatcctattaccaaagagattgccgttggtagcaagatgacggccgaaatgatagcattggtaaaaaatccaatatatcaggatttgttatatgagcgtctctctcaacatggcggcgacccccaaaaagcttttaccggaaagaacagcctcgcaaagaacccaatctggattaataaagaacaaactgaatgcatcccagaaaaggtgaccatacaagaattcgaaagacaattcaccatccgcaaacctgtagacaaaagtctgaatcttgagaaagtaaaagacgagggaatccgccggatacttgaagcacgtctcaaagagtttggtggtgacgcaggcaaagcatttgccaacctcgacagcaattccatctggcttaatcgagacaagggcatcgacatcaaacgtgtgactatcgtggagagcatacctggcgagcctttgcattacaaacatgacaaagacggtaaactcatacttgatgctaatggcaatcccttgcctgcagactacgtcaatcttaggaataaccaccatattgcaatatttcgcgatgccgacggtaacctgcaagaacacattgtatcgttctacgaggctgtcgcacgtgttgtcgagttaggtttgcctgccatagacaaagaatacaacaaagacaaagggtggcagtttttgttcacaatgaaacaaaacgagtactttgtgtttcccaatccctcacaaggctttgaccccaacgagattgacctcacagatgagcgcaactacagccaaataagccccaacttattccgagtgcagaaactttccagcaaggattactggttccgtcatcatctggagacaaccattgacacaaagaatgaactaaaagatataacctggaaaagaatcaatagtattaatgctttgaatggcattgttaaagtacgaataaaccatattggccgtatagtacaaacaggagaatactaaataataatgatcaagcgcgccctctgtttttcgcatcctgcatatctctcgctacgcaacgggcagctggtggtcaaactggaaaagcacgatgacgagccagagaagcaggcaacgatacccatcgaggacatcggcgtcgtggtgctcgaccaccgacagattaccctcacccacggcgtaatggccgccctgctcgacaacaacgccgcagttaaatgccgacgtgcacctcaagcgcgtcaaggccgctctccccgccttcggacaggttggctgcctgaccatcacagacaaacagtttcggagattgaactcttcgttgccaaaaaggaggtcgagcccaacgctcctggacaacagttggagttattctagaattgaaaaatcaatcaccacaaacaaaaaatcccgccccgaagagcgggattttttagcctttgacagctaacagaacattgattatcattatattgctgacatcgtgatgtcaaagagctaatatcaatgtttacttttcaagcaattcacaacagcagcagaggaattttgtttcttctcttgatgtcaaagagctaatatcaatgtttacttttcaagcaattcacaactgcctttttgggcaccagggcgcccgactggatgtcaaagagctaatatcaatgtttacttttcaagcaattcacaacccacctcggtggctttggctgctacagcctgatgtcaaagagctaatatcaatgtttacttttcaagcaattcacaacttgtacttcttgttaatctcatcgatagcggatgtcaaagagctaatatcaatgtttacttttcaagcaattcacaacacaaagaacttcgtcacctccgcggctgctgatgtcaaagagctaatatcaatgtttacttttcaagcaattcacaactccttgaacttcatgcctccggcacagccggatgtcaaagagctaatatcaatgtttacttttcaagcaattcacaactggcggtatatttgaacaccttgccgtgtagatgtcaaagagctaatatcaatgtttacttttcaagcaattcacaactagatacgatttcgatttttccgtgaacctgatgtcaaagagctaatatcaatgtttacttttcaagcaattcacaactcttcatagctccaatggtggccgtgtggagatgtcaaagagctaatatcaatgtttacttttcaagcaattcacaactaagaaaataacattttggaaacaactaagatgtcaaagagctaatatcacgataagtgctgcaccgccctgatgtcaaagagctaatatcaatgttttcaagcaattcacaacaaccccggcgcccaggaaacactgttcccgccccgccacccctactacaaggttccacaggcagacaaagaaaccatcaccgccgccgtcgaaaaggttgcagccaacaaaactctgcgcaaaacggctgtcgagaaccttaaggtgttccagtccaagccgcctgtctccaaaattatcaacggggaaaaggtggatgtgctgttcgactccaagacaacaagccacatcgccaacgatatagccaacaacaggaacttcgtctggaaggatctctcggcaaagcttcagcatattctcaagcaggcccctcttgtggcccacgagccaaacacaaaaaccctcgagaaaccttcggccagacactactattattttgaatgtaaagaaggaaacgaggtgttttatttggctgttgaagagaacctcgtcgagaaaaccggacgtcatttcttccgcctttactcaataactaaaacactgagaaacaccgcaatcccatataaataaacaactgagaacaggcggccacgggctgaagcttgcgtgggttgttctcagctgattcggactgcaaaaatacaactattttttaaactgacaaaaaaaacttgtttttttttcaaaccaccacgcccattaaacccagatgtcaaagagctaatatcaatgtttacttttcaagcaattcacaactaagaaaataacattttggaaacaactaagatgtcaaagagctaatatcacgcacgggatgtcaaagagctaatatcaatgtttacttttcaagcaattcacaacgttcaactcgtcccgcaacgctcggaacctgatgtcaaagagctaatatcaatgtttacttcaaaacgcttcaatatgtcttttaaactattctatccttcgtatacatcataagctatcaaagtattgctgcatttcttcgggtgagctgcacccgacagtttcgcctcgagcagattcttcacgcgcctttttgattttggtgcgcaacgcaggagtaaccacattgtggcgtgaattcccctcagcataatgtatctttgcacctgcagccaacatagcctcaatgagatatttcatcacgttgctacgtccatcataattgagtgttatcgttgccatgattatctttatttcacggtgcaaagatacaaataaaaactgattccaccaaaaaaagtttttgccagagtgaagtggggaaaatatttttcgcgcgcgaataaaatatttcgcgcgctatcgcgttaaatagaagtaatgaagaataaagaattaagaatgaagcatccggccaccgctgtacggctacgcaaaatcttatgcgccagcctattttcatttttcatttttcatttttcattttgctcggcacaagacaaagcgctgatgcagagctaccagagccgcctgtcggcactgatcgagcgcgtggccgcggcacccaccgacaacgagcgctacctggcctcggaagaggccatccagctgctgtccaaagccctcgacgaggaagactcggagaagtggaaatggcagctgccatcctacgcctcggtgctgacatcgcccgacggactcctccgcatcttcacctgggcggtaatccgcgacaacggcgagttcgaatgcttcggcgccatacagttctacaacgagcgcgaggaggagtacgaatacctgctgctccacgacaaatccgacgagatcatgaaccgcgaggagacggtgctctcggccgaccaatggctcggggccgtctaccaggagatcatccagaccaccgccagcggccacacctactacacactcctcggatggaacggcgtggacaacatcaccgagcgcaaaatcatcgagcccgtgacgttccgcaacggcatacctcagttcggcgccccgctgttccgccgcatgcgcaaccaacgacgcatcgtcctcgaatacaccaacgacgccatggtcaacctctcctacgagacacagtacgtccagcaggtggagaaaaaacgcgagaaggtgaagggcaccaaccgctaccagaccgtcgacgtggtgaaggaacacaaggagaagatgatcatcttcgacgaggtggaagcccaagtccccggcatggaagggctcttccaatactatgtgccgtcgggcgtcgagctggcctacgcctggagcgacggcaaatgggaactgcgcaacggcgcccagggtcgcctgaaagacaagaaactcaacaaagacttctccccgctgcccaaaacagccccggcttataaattctaatctaaatatggaagttaatgaagttatagaagttaaagaagttatagccactagcacctgctgggacatttggctttaacttctagcgcaaggcgcgataacttctttaattctttaacttcccaaagaaaagattaatgaaactgaccgatatcaatactcccgccgacctcaaacaactgcaacccggcgaactgcaagccgtcgcagacgaactgcgctcctatatcgttaacaccctgtcgacacaccccggccacctggcctcgagcctcggcaccgtcgagctcaccgtggcactccattatgtcttcaacacccccgacgacaaactcatctgggacgtgggacaccaggcctacgcccacaagattctcaccggcaggcgagaggcgttctccaccgtacgcacctacggcggcatcagcggcttccccaagatgagcgagagcccctacgacgccttcggcaccggccacagctccacctccatctccgcagccctcggcatggccgtagcttcgcgcatgcagggcaacacctcacgcaagcatatcgccgtcatcggcgacggctcgctcaccggcggcgaggccttcgaggccctcaacaacgtgggactctccaaggccaatatcctggtgatcctcaacgacaacggcatctccatcgacaaggccgtgggaggactgaacaactacctcatgcgcatcacctcgtcgcctcgctacaaccgcctcaaagagcaggtgtggcagcgcctcgactccggcgagggcctgcgccagcgctcgaaaggggtcttccaacggatgaccaaggtggccaagaccatagccctcggcagcaccaacctcttcgaggctctcggcatccgctatttcggacccgtcgacggacacgatatcgtccacctcaccgagatactctcccgactgaaggatatgaacggcccagtgctgctccacgtggtgacacgcaagggtaggggactcaagcaggccgagcagaaccccatcgtctaccacgcccccggcctcttcgacgccgagaccggcgagcgcacactcatcactcatcactcatcactcactcacccattgaagtatcaggaggtcttcggccgcaccatcatcgagctggccgagaagaaccccgccatcgtgggcatcacgccggccatggctacgggctgttcgctgaacctcatgatggagcagatgcccgaccgcgtcttcgacgtgggcatctccgagcagcatgccgtgaccttcgccgccggcctggcggcacagggcatggtgccgttctgcaacatctattcctccttcgcccagcgcgcctacgaccagatcatccacgacgtggcactgcagcagctgcccgtggtgctgtgcctcgacagggcaggactcgtgggcgacgacggccccacacaccacggcgtcttcgacctcgcagccctcagacccatcccgaacctcaccatctgcgcacctatggacgaccacgagctgcgcaatatgatgtacaccgcacagctgcccaaccacggtcccgtagtcatccgatacccccgtggttcaagcgtttacagcgactggcagtcgcccatgcaggaactcacaataggggagggtcgctgcgtcagagaggggagcgacgtggctttcctcagcctcggacaccccggcaacgataccgtcgccgccgcagaagagctccaaaaacaaggcctctcggccgccgtctacgacatgcggttcctcaagccgctggacacccgtttgctcgacgaggttgcctcaaaaggtttccgcagaatcatcacaatcgaggacggcacgaaattaggaggctttggcgaagccgtggagagctacttcacggagcatcatcccgaacaggcggcacacatcaccgtgctggccatcccagacgaattcgtcacccacggcagcgtcccacaactcaaagccgactgccacatcgacaaagattcccttataagatcagcattattataggagaacaatctgtgtcgaagacacaagccctcagtaaccccgcacgctagtgtggggacaaaccccgcacgctagtgtgaggacaaccccgcacgctagtgtggggacaacctcgcacaccagtgtggggtatactccagtatatcctacttaacataaccccgatattagttaaaaatatataaaagaaaaactggcgcaaaaccccgtccgcgccagccataactattatctattatctatctgcctgacctctggtcacggcctgcgacgcaagcaaggaattgattaccctcgcattcacgctaactccacgagaattcaatatttggaaccaggtcgcatcattgtcctgtttacgcaaaactgagagcgtatcgtcaggttgtgtttcgtgctgataatttatctccacactgaacggcttgtccagatcgaaatctgtctgcatcagactgtcgaacagcagcctgacatattcagcgttgttgacatgctgtgcgtggtctatcatcgaatagcgtgccggctgctcgaagcgtccgtcgggattgctcatgtccggcagtctcagacgctccaggacactgtggtccgtggcctcgtccgtgcagcactcgtagttggccataatctccttcagccggagtggcttgcgagtagtaaaatctatcatcggccagtatgtggtgccggtgagcagcgtctcgccggcctcgttggtcatccggtagtcgcggaacgcgaacaagccgtcggtgccacgcgaccacgtacttaacataaccttttcgaaggccgcaggcctcttatatatattatagtacgcgcgcgagagtatccagatgctgttcctctgcataagttcctcgtagccaacgcccatggcgcgactgtgggcctcggaaatctcctgacagagcctcaccgccgcccacggctgcaggcggtccttgcggtcacaaagatacgccgccgtctcctgtttccaactaaaagttttcaattttcaattctcaattttcaattcaacttacattctttccggcacctcgataccgaggatattcatcgtgttcttcaaagcgttggccaccatggcgcagagctgcacacggaaatgcttcagctcggcattctcctctttcaggatgggcgtatcctgatagaagctgttgaaggccttggccagctcataggcatagttcgccaccatggcgggactgtaggctgcggcggcagcggcaacggtctcaggcagcgcatgcaaaaccttcaccactcccctctccttctcattcaactgaacactaaacactgaacactgaccactttctcccgctttgcgcacgatgctcttgattctagcatgggtgtactggataaacggaccggtgttgccgttgaagtcgatactctcggcgggattgaacagcatgttcttggtcggatccaccttgaggatgaagtatttcagggcgcccagggcgaggatatgatacagatgcttctgctcctcggcactcagctcgtcgttcttgcctttctcacggctcatctcctcggcggtcttctccatctcgtcgatgaggtcgtcggcgtccaccaccgtaccctcgcggctcttcatcttgccgttgggcagctccaccatgccgtagctgaggtggtacaccttgtcggcccactcaaagcccagcttgccgaggatgagtttcaagaccttgaagtggtagtcctgctcgttgcccacgacatagatgaggcgctcggcgccgaagtccttgtggcgaagcagcgcggtgccgaggtcctgcgtcatgtagacgctggtgccatccttgcggagcaagagcttctggtcgaggccgtcacccgtcaggtcgcaccacaccgagccatcctccttgcggaacagcacacccagctccaagcctttgttgacgagctccttgccgagcagataagtatttgattcatagtatatcttgtcgaagccgacacccagacggcggtaggtctcgtcgaagccggcatacacccagccgttcatcttctcccacaggtcgcgcacctccttgtcaccctcttcccagcgcttgagcatgctctgggcctccaccatcagcggagcctcacgcttggcctgctcctcctctaccccactctccatcaactgcttgacctcgtccttgtagtgcttgtcgaactccacatagtatttgcccaccaggtggtcgcccttcatgccgctgctctcgggggtctcgccattgccatagcgcatccaggccagcatgctcttgcagatgtggatgccacggtcgttcaccaggttcaccttcttcacgttggcaccgttggccgccaacagctggctcaccgaccaacccaacaggttgttgcggatatgacctaagtgcaacggcttattagtgttaggactgctatattcaaccactactggagactcatcaggattagccttggctatgccaaaggaggtgtcggcagccttctcggccacgaaggaggtccagtaggaatcagccacctcgaagttgaggaaacccttgatgacgttatagccctcgacctcgggcagcgcggccttcacggcctcgccaatctcgccagccaccgcctcgggtgacttgcgggcctgtttcacataagggaacacgacgagcgtgtagtcgcccttgaactccttgcgggtgtcctgcaggacgatggttttggcatcggcatcgatgccgtagagactcttcagagcgtcggcaacagcctgagtgagagtggttgtgatattcataataggtacattattatttacgaaaacaggatgcaaaaatacacaaaaaaaatgaatcaaaaacccctattttaacacttttcgcaactgcctgataattaacaccaagaccgtatcaacaccgtaccaacaccgtaccaactcctaccaaagtccgactacagtcggagatgatacggtgttggtaggtggatggtaggtcgacggtacctcgatggcaggatggcgacgcgaaaagagttgaaaaaaatattttgtggggtcgatttttttatctatttttgtacgattgtagccgacataatgtcggtggttaaattattgacaataataataatataaaaatagtacgatatggaaattacaggcaaattgattcagcttctgcccgaggtgtcgggtgaatcggcccgcggtccctggatccgcggcggttttgttatcgaaaccgacggcgactatccccgcaaggtggccttcaccgctttcggtgaggagcgcgtggccatggccaagagcctcccgatgggttcgctggtgcaggtgaccttctcgcccgagagccgcgagttcaacgacaagtggtacaccgacttacgcgcttcgcgcatccagcccttcgtccccggacagatgcccgcagctcccgccggctacaactgggccggtgccgctcccgccgcagcagcagctcctgccgctgcccccgcagctcccgcacagcccgccgagcagccggcgaacttcgccgccgctccccagatggcttcgaaccccgacgacgacctgcccttctaagatttaaagacaagaaaaaacaagaaaaacaataacatacactatcctgtttgtcttttgttgtctttcttgtcttcaaaacgacactggtctagatggaataacccttctaagttgtaatttgtcttttttgtctttcttgtcttcaaagtaaaatgatggaattgtcttctaaatccgaagtcaggaaacagattcgcgagctgaagcgtgcggtgtcgctggaggagaaactccggcggtcggaaggcatcatgcgtcaggtggaggtcctgcccgacttcctgtcggcaaagacggtgctgctctactggtcgatgaccgacgaggtgcagacccacgactttgtcaacaagtggtacaacgagaaggtgctactactcccctgcgtggatggcgacgacctggtgctgcgccaatacaccggtcccgagtgcatggtggccggcgagcagttcggcatcggcgagcccgacgccagcctgcccgccttcacggcactggagcgcatcgacctcatcatcgtgccgggcgtggccttcgacagcgaaggcaaccgcatgggccgcggacgcggcttctacgaccgcctgctcaagacgacacccaacgccaagaagataggcgtggccttcgacttccagatgatcgagcacgtgcccgtcgaacccttcgacgtcaaaatggaccacgtaatcaccgaatcc

SEQ ID NO: 2276 - DNA, 24056 bp, synthetic construct
  source 1..24056: mol_type = other DNA
  misc_feature 1..24056: note = Synthetic
ccgctttccaccgtcaggtgggcggctacagcgccgtcaagatgcgccgctaccaggacatcatcgacttctacctctcgcgccacatcaacatgggcatcctcaacatgctcaacgcccgctacatcgtcgtccagaacggacaggtgcagcgcaaccccgaggccctcggcaacgcatggttcgtacaggatgtcaaatgcgtcagcgacgccaacggcgagatactggccctcaacgacttcaaccctgccaccacggcagtcatcaacaccgaggagtttactctgcctgaaaacaagagcctcctcgacagcaccgaccacatcgaaatggtgcaccagaaaccctacaaccccgactacctgaaatacacctcccacaccagcgacgaacagatagccgtcttcagcgaaatctactacgcccccgactggcgtgcctacatcgacggcaaacccgccgaatatatccgcgccaactatatcctccgcgccatggttatccccgccggcgaccacgtcatcgagttccgcaacgaggcacccctcttctacaagatgaacatcgtcaccatcctcggctccatcctcctcgtagccatcgctggcggagcgatattccttgtctaccgcaagaagaagaaatgaagatactgataatacgctacaagaagactcgcggcgtccccgaaggcggcgaacaaggcagcgagaagaacctcaccgtgctgcgacagattgcaggccacgacaatgtcgacacctacttcatccacgacgaggcacaccgccgcaccccctgggagtacctgcaaggcatcctctatatgccgctgggctattacttcggcctcactcccaaacgcgtgcgcgaaatcatatcactggcacaagcctacgatgttgtcttcgtcgaccgctcggtcttcggtattgtcgccaaacggctcaaagaaactagctaccgcggccgtgtggtcgccttcttccacaacgtcgaggtagtctacttctcagccaaatatgccaaccgcctcaacccgctgcgctggctcgtggtgccctgcgccgaccgcaacgaccgctggagctgccgctatgccgaccgcaccatcgccctcagcacccgcgacgacgacgaactcttccgccgctatggccgtcacgccgacgtgctgatacccgtggcgttcgtcgaccgcttgaacaactctccactctccgctctccactctccactcacttcggttcctccgaagtgcatgttcctcggcgcctacttccccgccaatgtcgagggcatcgagtggttcaccaagaacgtactgccccatgtcgacatacgcatgcagatcgtgggcaaagacatggacaagctgaaagatgccgactggatgcgccccgacatcgaggtgctatccagcgtgcccgacctggaccccctcttcgaagctgccgacatcatggtgctgcccatcttcaaaggcagcggcatgaaagtaaagacctgcgaaagcatgatgttcggcaagaacatcatcggcacccccgaagcctggagcggctacgaactcgactattccaaagccggcgccagctgcttcacagccgacgaattcatcgccgcactcaccgacttctgccaacacccccgtcctcgcttcaacacctacagccgcaacgtcttcgtcacgcaatactcagccgaccgcatggtcgacaaattccgcaaggtacttgagggttaagcattggggtcgttgccctcaatcaagctctcaatgactttaatgatattttccgatggcagcgcgccattgtaagggccgaggtactgctcgaagaactgctctctgcccgccttcttcgggtcgttgccggcgagcaccacatcctctatgaaatgctctatctcctcccgcgtgcggccatgatagtgctgctcgaacgacattatgccgaaatcgttgaacacctcctgtgggttattcttcagcaggtacatcacaggcttgcgctggtacagatactccgtagtaaagctgcagctgtcgtgcatcatggcgtccgagcctataaatagatccttatagtcatcctccaccagctggcagtttggcatctccttccagcgacgatagtattcctctgtgcgctcggctccccacatctctatcaacttgaacttcaaaaactgatggggcttgaaggcaaactgcaccctgtcggcgtatttctccgccacctcaaccatcgtgtcgcatacatccaggaacgtagacacgctgaatgttccctcgatggtgtggtgcggagcccagataatgcgcttcttctccacctcctgcttccgccatacctccacggggcgatagtcctcatgcaggtacacctcgcatcccggatagcccgtcacatagcagttcctaccctttgcgtggctatactgctcagcgaaacgcttgtgtatcggtgtctccaggaaataacatccagccatgttgatggccagtttgtcgaaattgttcttgaagagcttcatcgacgtgaaaccatacgacacatagcacgtcagcctgtcaacaaaatggtacgcatggtacttcctctccatatccttgtacggacaggtgaagaagactatgtcggggttcagcgtcttctttatgtctatccacttccccgtcttctcgtcgcgcggtatcacatattcgaaccccctctccttcgcaaactccgcagtcctgcggatagtcttctcattctcctcttccgagtagttcttgaacaccgtgtacggtataatcactatatatgggtggtacctctcgctctcctgcatcgccttgaacacatagtccagcttccacatccccggcaccgccagtatgaaagccacctccagacgctccttgccctgcagctttctcgtaccccgcagggttcgttttctcgcacactttatccaccatcggtacagaaacggcacatgcgtccgtataacgtctggataatgaaacaatatgcggaactcgtatatcaacggcgactccacattcatcttcttcaatgtatccagcagcttcatctttcccccaaaaaacaatgttttaattcttcttcatttgcttcctgataatgatattctgaccatcgaggcaacgctcctctggattcatcaggttgcatatcacttccgccacctcggctggctgcatgatagtcgtcgggtcctcgtccggagccaagcgcttcctcaacttcgtggcacaacgtcccggcgacacacagtacaccattatgccgtactccgacaactcggccgtcaacgtctccgacatcgatatcacagccgccttcgacgaggcatagctcaaccagccgggccgtggagtcattcctgccgtcgaggcaacattcaatatcttgccacccctctggcgcatatacttcacacactccctcatgaacatgaacggagcaaagacattcactttgtacgtcaactcgaaactctccagcgtcgtcgtcagcaacggctgtgggtccgtatagcctgctatgttcagcaacgcgtcaatccctcccatgtcggcgtccactgccttcacaacctcgggtatctgctctggatttgagagatcgatatgatacacctttgtgctgccctcgggcaggtgcttctgcatctcctcctgtgtgacgcgcatctccgcatcgtttcttcctatcagtgcatagctgtcataatagcccctctcggcaagcatgatggccgtagccttgccgatgcccgatcctattcctgtaatgatacaagtcctcataaacgataatctgtaatccgtaaactacttcctcccgctgaacacctctctgtatatctgctcaccagccaacatgtctattctggtggtcagcttcagatcatagtccatgccctcaacaacctttataggaacctcgggatgatagaggtaaatcatgcccgcatcctccgtaaactcgcgtccctccgcggcggccttctcgtgagcctccttcagcaggcgcgtctcaaacttctgcggcagctgcacattcaccagctccgacctctcagtcaaaccctccacatactcgtgacccttcaacaccgaaaaaggtatgctgtatcctagcgtcgcgttcctctccttcacggcaatcaaccgctcgaaatcctctgtcttgacaaacggacgtgccgcctcgtgcactatcacatcttcctcttccaccaacgccaatccgttgcgtaccgattcctgtcgtgtggcgccggcgggggcgaacctcaccggtttcttcactccatactggctcagcatcagccctatcggagcctcatactccttggcgcacaccactaccacgtcttttatggcatctatcaaatccaccctctccagaatatgcataatcacaggctttccagccaacagcaggtactgcttcggagttgcattatgcattcggctcccagtaccacccgaaaggaacaacaaagtatacataatctctgatttctaaattctaaattctgatttccaagtctttttcaactctcacgtctcacctttcacgtctcacattgagcgcagcgaacaccccaccccacagcaccacggcgcccagctgcatccaccaggcggtgccaatgagcacagcgggggcaatcaccacggccttcagggcgtagtagacgaccttggcggccaatatggagaccaacacactcggcaataccgcccaacggcgcgacagcaggtggaacaagcccgccacagtggccaactcggccaccatgcacaccatcttggcggctgtaggcataccggccacaaggcagttcactgccggcatcagcaccgccagcaccagcgcattgcgccagtctttgccgagcagcatacccgccagcagcagcgccagcatcgggttcagcatatacagcggcagcgccgtcaggtgcgacacagcaggtatcagacacgccgctgctatcagcgcggcatccataatggcatatcggccaatggcccttgttttcaccatagtattcatcttctgtatttattaaaacaattgcaaaaatacatctttttttccacatactaaaataaattatataaaacctcgttactcaaacaaataatagcacgttttcttgcattcaagcattcaaacatccaagcaatgaaaagaactcttttcctcctcgccgccaccttgttgctgaactctgtcggcgctgtggcacagaacaaaatcgacaagcagggccgccgccagggccactgggtgcgcaccgacaaggacggctccaagatctacgagggcaacttcgtcgacggcctcgagaccggcaccttcacctactattactccgacggcaccgtccgcatccgcaacacctacaccacccccggccgcatctgcaaccacgaagcctacgacgagcagggccacctcctggcccgcggcatctacaaccagcgcaatcgcgacggccagtgggagttcttcgccgaagacggccgcctcgtgaaaaaggccgaatataagatgggcgtcaagcacggcacccacgtcatcttcacctccaagggcgacaccgccgaagtggccacctgggccaacaaccaccgccacggccgctggtggaaacgcatcggcgaaaaaggctacatcaccggcacctacgtcaacggcggcctcgaaggacgcctcgttgaatacgatgacaacggcctcctagtccgcgacggccactacaccgacggcttcaagaacggctcctaccagtacttcgaagaccgtaaactcaccatcgacgagacctggaaccacggcaccctcgccgaccgccgcatacgcctcctcacccccaacgaggagttcgtctccatcttcgacatcgcctgcctcgccccgcagggcaaggccaaagtggtcatcttcctcaaggacggcaccaagaaggtcaccaacgagaactccgaggtcgtctacgaccgtctcggcaacgagctcttcgactatgccaaccgcaaaggccgcgtcctcgtgtcgcgccactgcgtgcagggcatcggcaaagaccgcgaaggccgcgagatactgctcctcgagccccagcccgacttcgccatctaccccgacgaggacggcatcaagatggtccgcagccgcaagttcgaagacgactccccgctcgacaagatgttaggcgactgacctatgaccatcgccgcccacaccctcgggtgcaaactcaacttcgctgaaacctccgaccttctgcggcgtctcgccgcagaaggcaataccattgtcgactggaaccagcaggccgacctctacatcgtcaacacctgcaccgtcaccgccgtcgccgagaaaaaatgccgcacggccatccaccaggcccaccgcaagaaccccgatgcacagatagctgtcataggctgcttcgcacaagtcgccgccaaggaaatcgaagccatccccggcgtcaccctcgtcctcggcaacgaccgcaagcacctgctccccgacattgtccgcaacggcttccgccccgatttcaacgttcaacctccaactttcaacttacaatactcctcctccggcgaccgcacccgcaccttcttcaagatacaggacggctgcgactacttctgcacctactgcgccatccccttcgcccgcggccgttcgcgttccgccaccatcgaggagaccctctgcgccgcccgccgcatcgccgactcgggttccaaggaggtgatactcaccggcgtcaacacaggcaccttcggccagcaccacggcgagtcgttcctcgacctgctgcgcggtctcgaccaggtcgagggcatcctgcgctaccgcatctccagcatcgaacccaacctgctcaccgacgagataatagacttcgtggcccacagccgcgccttcctgccccacttccacatacccctgcaggctggctccgaccatgtgctgcagctcatgcaccgccgctacgacaccgccctctaccgcgccaaactcgagcgcatcaagtccgtcatgcccgacgcctgcatcgccgccgacgtcatggcaggcttcaacggcgagaacgaggatgaattcgccaaggtgctctccttcatcgactcgctgcccatctcctacctccacgtcttcacctacagcgaccgccccggcaccgcagcattgcgtctgggcgagaagatccccgtcgccgtgcgccgcgagcacaccgcccgcctcctcgagctcagcgagcgcaaacataaagaattcatatcctcccagctcggcaagacccgccccgtcctctgggaatccacaccccactcaagcaatcaagcattgtcggccgagccgacggcacaccacaagcaatcaagcaatcaaaccatgcaaggctggaccgacaactacatacgtctctgccgtccctacgacgaaaccctcgtcaacaccatcgaagagataaccctcacccccgacaacatcgtcaaagagacagccgacgtgtaaactaaaaactaaaaactaaaaactaaaaagtaaaaagtaaaaaccaaaaactaaagaggccgcctcgtatcgagacggcctctttcactcttcactcttcattcttcacttttcacttttcactcttcactcttcacttccgtcagtctttcttgcacttcttgcagcagcagtcgccgcagacgcacttgtagaacagaccggccacagcggcacccacaagcggggcgacgatgaagagccacagctggctgcaggcgctccaggtggcgcagtcgctgaagatggcctggctgatggagcgggcggggttgacactggtgttggtcagcgggatgctgacgaggtggatgagcgtcaacgtgaggccgatggcaaggccggcggccttggtgttgctgcgctcgtcggtggcgccgaggatcaccatcaggaagatgaaggtcaggacagcttcgacggcgaaggcgccccacatcgagacgttgaggtagtcaggattgccggtagcggcctggaaggcctcgccatagccgttggcggcgaagacacccgtggcgccgagaccggcggctttatagatgccgaaaaggacagcgccggcgatgatggcgccgacaatctggctcacccagtagaggagcatgtctttcaagctcatgcggccgttgacccacacgccgaacgacacggcggggttcagatgggcgccgctcacgtggccgatgccataggccatggcgatcaccgtgaggccgaaggcaatggcaacgccgaggaagcccacatggccgaacagtgcggtaccgcagccgcccagcacgagaacgaaggtgccgaagcactcagcaagcattttgtttgtaatcttcatagttttatagtttttggttaaacattttccatcgaccttttaacgaatatttagaaatattattgttcgtgaaaaaagaaaaaaggaaattaattcgtacttttgccgccattatgaaacacaactttccacatttcacagcagccatagcgctcaccatcagccttttgacagcctgcgcccaaaagggcgccaaccccgtcccctacgtgcccaccatgggcgacgacggcgcggtggtctatttcaccgacgaaatcagccccgaggccctggtgcgcatctacgaagcccttggcgtcgaagcctcaggccgcgtggccgtgaagataagcaccggcgagtcgagccacagcaaccacctcgaccccgccctcatcatgcccctggtgcagcgcgtcgacggcacccttgtcgagtgcaacaccgcctatccactctcccgccgtgccaagaccaagagccacagcaaggccatcgccaagcgcggctacggcaacgtggacatcatggactccgaaggcaccatgcgcctgccggtgcaggacaccacctatatcaattacgacgaggtgggcagccacctggccaactacgacttcatgatcgatctctcgcacttcaaaggccacgccatgggcggcttcggcggcgcgctgaagaacctctccatcggcgttgcctcgcgcagcggcaagttctacatccattccgccggcgcgaccgacagccgctggaaacccgccgagcaggacgccttcctcgaatgcatggccaccgctgccgacgccgtgcagcgctacttcaaacaagagggacgcaacatcgtctacatcaatgtcatgaacaacctctcggtcgactgcgactgcatgggccgccctgcctcgcccaagatgaaagacgtgggcatcctggcctccaccgaccccgtggccctcgacaaggcctgtctcgacctcgtcttcacccacagcgacaccgagggcgacgatgccgcccccctgcaggagcgcgtcaacaagaaacacggcacccacatcatcacccatgccgagcgtctcggcaccggcaccacccgctaccgcctggtcaagctgtaaccccgcgcaacctgcgcaaccagagcgaccagggtgcaaccagacctcgtgaaaacaccgtctgattttcaatcacttcccgctatttcttcagtgtttcttcagtcatccactgaagaaacactgaagaaatactgaagaaatactgtcgaaataggccacctatatgggtgtttaccctatggccaaaccatctggattgaaatattaaggaaaaatgggttaatattaccgccaaacctcccaagcattcttttcaatcaaaacagacgacgggagcattgctgctcccgccctccgaaatgttttcacaacggaataatccttattgtgaattgcttaaaaagtgatgcaaaaatacaacttttccacaatatagcaaaatatttttttctattcgctgaaaaacatgtatctttgcaccattgaaaacatctataactatggctaaagtattaggattagaccttggtaccaccagtattggttgggcggttgtcaacgaagctgatatgccaaaagactcttctatagtacgtcttggtgttcgcgttaatccgctaaccaccgacgagcaaaccaactttgagaaaggtgctcccatcaccactacagccgacagaaccctaaaaaggagtatgcgacgcaatctgcaacgatacaaactgcgacgcgaaaaccttatatccctcctcaaagaaaaccaatggatatctgacaatactattctatcagagaatggcaacaatagtacttttgagacctatcgtctgcgagccaaagccgcctcacaagagattaccctggagcagttcgcacgtgtattgctcatgcttaacaagaagagaggctataagagcagccgaaagatgaacaataacgaggatggtagctttatcaacaatctcgatatggctcgccaactctacgattcgggcatgactccaggccaatatgggcacctgttgataagcgaaggcaagcactacattcctgacttctatcgttccgacctgctggccgaacttgacaaaatatgggcataccagcatcagtatcatagcacaatactatcgacagatttccgaaattccatagaagggcaaagcaagaaaggaaccagcgttgtcttttcgaagacatacggcatttatactgccgacatcaagggaaatcggttcgagagaaacaagcaactgttttctctccgtaacgatgcactcaacagggctctgacaccagaggagctcgcaacagtaatctgcgaggtcaacggacagataaacagcagtagcggctacctcggtgccatcagcgaccgtagcaaaatactatatatcaaccaccaaacagttgggcagtatctcatgcagcaactggacagcaaccccaacgcaagcctcaagaacaaacccttctaccgccaagattacttggatgaatttgaacaactatgggaaacgcaggctcgataccatacagaactgacaccggagctaaagcacgaaatacgcgacataatcatcttctaccaacgcaggctgaagtcgcaaaaatggcttgtcgccaactgcccgtttgaacatcgcaaagtatgccctaaatcatcgccgcttttccaacgcttcagaatatggcaaacactaaacaatgtaactataataaaagacgacgaagaatatgtgcttaatgacgaacagaaagcaacactctgcacagagctgctccttaaggagaaactcagcaagaaagacgcactaaaagcactcttcacaaaaacccgcggacttgacctcaattttgcatcgctcgatggcgaccgcacaatggccaatatcctctcggccacacaagagattatctctttaagcggacacggggaatacgacttctccaaaatgcctgccgaccaaatactcgacattatcaagtcagtattccatggtctcggatatgccaccgactggctcaacctcaacaccgacgccgaaaaaatagaagacgagccgcagatgagactctggcaccttctttattctttcgaaggcgacaacacaacaacaggcgacgagaagctgaccaaacacattatggagctgactcacttgccatatgaatatgccaggctatatgccaaactgcatttcgaggatgactattgcagcatttccacaaaagccatcaaacgcattctgccctacatggccgcaggacacgaatacagcgaggcatgcgctctggctggctataggcattccgagcagtctcttacccgcgaagagaacgacagccgtccactcaaagagcatcttgagccgctggccaaaaacagtcttcgcaacccagtggtggagaaaatattaaaccagatggttaacgtagtcaacggaatcattgacgcatacggtcgtcctgacgaagtgcgcatcgaacttgcacgcgagttgaagaggaacgccgcacagcgcaaggctatgactgaagccatcaaccgcaccacacgcgaaacagaacaataccgcaccatcctgcagaaagactttggccttacgcatgtcagccgcaacgacatcatccgataccgactttatcaagaactggcaccaaacggctataaaacattatactccaaccaatacattcctaaagaaaagcttttcagcaaggatatagacatcgagcatatcataccgcagtcacgcctcttcgacgactctttctcaaacaagactctcgaataccgagatataaatatagaaaagagcaacgccaccgccatcgactatgtcaaaaacaaatatggcgactccggcgtttctgattacaaaagccgcatcgacagccttcttagcaatggtgccatctcgcctgtcaaagcgcgtaaactcaagatgactgaagccgagatacctgaagacttcatagagcgcgacctacgcaacactcagtatatctcacgcaaagcccaggaaatgttgcacgacattgctcgcatcgtaaccgccaccaccggcagcgtcaccgaccgcctgcgacaagactggcaactggtcgacatcatgcaggaactcaactggagcaaataccaacaacaaggactcacctctgtcataacaggacgcgacgggcagcagatacgccgaatcgaagactggacaaagcgcaacgaccaccgccatcacgctatggatgcactcaccatcgcctttacccgcccggcgtacatcaactacctcaatcatcttaatgcccgcgatattgatgacattcgttctattgagcgccacttcctggagcgcgatgcaaacggccacctacgtttcgtcatgcctattgctggcaacttccgtgcagaagccaaacgacacctcgagatgatactggtatctatcaaggcaaaaaacaaagtggcaacacgcaacaccaacatcaccaaaaccaaaggtggcaataaacagaagacacagctcacccctcgcgggcaactgcacaaggaaacagtatacggctctgctctcataccgtccacatgtgaggtgcctgtcggcagcaaaatgacagccaaactaatagcacaagtgcagaataccacctaccgcaaggcgctgcaacaacgcctcgatgagtttgacggcgacaccaagaaagctttcactggcaaaaacagccccgccaagagccccatctggcttgacgccgaacataccgtccaagtgccggaaaaagtactcatacgccagtatgacaaacaattcacaatccgcaaaagcgtagacaaagacctcaacgtagacaaagtgcttgacaatggggtacgtcgcctgttgcaagcacgcttggccgaatatggcggcgatgcaggcaaagcattctccaatctcgacagcaacccgatatggctcaatcgtgagcgtggcatcgacatcaagcgagttacgatcgtcgagagcattccaggtgaaccattgcaccacaagcacgataaagagggccatccgatactcgacgcagatggcaatctgcaacctgccgattatgtcaacctcaaaaacaaccatcatgtagccatcttccgcgatgccgacggcaacctgcaagagcatatagtttccttctacgaagctgtggcacgcgtaacacaactcgacatgcccgttgtcgacaaagaatataacaaagacaaaggttggcagttcctattcaccatgaagcaaaacgaatacttcgtttttcccaatcctacacagggcttcgaccccacagaaatagaccttaccgacgaacgcaactacagccagattagccccaacctattccgcgtacaaaagctgtcgagcaaagactattggttccgtcaccaccttgagacaaccatagatgacaaaaaagcccttcaaaacataacctggaagaggataacatcgctcaacaaccttaaaggcattgtgaaagtacgcattgaccatatcggccgaatagttcatgtaggagagtattaatatttcttatgatcaagcgcaccatctgtttttctcacccagcttatctctcgctgcgcaatgggcaactggttgtcaaactggagaagcacgacgacgagccggaaaaacaggcaacaataccaatagaagacatcggcgttgtggtgctcgaccatcgacaaataacactcacccacggcgtgatggcagcattgctcgacaacaacgcggcagtcgtcacctgcgacaattcgcacatgcccgtagggctcatgctgcctttggaaggacatacggtgcagcaggagcgcttccaagaccagcttggttcctcgctaccactacgcaaacaattatggcaacagacggtgcagcaaaagattctaaaccaagcagccttgctgaaggaactgcacgacatagagacaggcaacatgcgccaatgggccaaagaagtactctccggcgacagcaccaatcttgaaggacgtgccgctgccttctattggagcaaaatgttccccaccatccccgacttcacccgcagccgcgacggtgcttaccccaacgccctgctgaactacggctatgccatactgcgtgccgtcatagctcgcgcccttgtcggcagcggactactccctacccttggaatccatcaccacaaccgctacaatgcctattgtctggccgacgatatcatggagccctaccgcccttatgtcgaccgcctcgtggtggagacaatggctgtatgctgcgacgtagaagtcacaacagcaatcaaaagccatctgctcaccattccaactctcgaagtgtacatcggcggacaacgtagcccgctgatggtcgctgccagccagacaacagcctcgttggctcgttgcttctctggcgaaggccgccgggtcgtttacccagaaatgtaaaatggaccgtttcagcgaataccgcatcatgtggcttcttgtgttcttcgacctgcctaccgacaccaagaaagagcgcaaggctgctgccgacttccgcaagaagcttatcggcgacggattcacgatgttccaattctcgatatatgtgcgtcattgcgccagccgtgagaatgccgacgtacaccttaaacgtgtaaaggccagcctgccagaatacggacaagttggatgcctcactatcaccgacaaacagttttcggagattgagttgtatgtctgcaagaaagaggtagaacccaacgccccaggacaacaactggaattgttttagaattgaaaaaacaattacaacaaacaaaaaatcccgcctataatggcgggatttttttagtctttgacaactaatagtacattgtatatcacccgattattgacatcgtgatgtcaaagatctattatcaatgtttacttttcaagcaattcacaacttacgttgatttcgacaatgttcaaacgtggatgtcaaagatctattatcaatgtttacttttcaagcaattcacaactcgaggatggcataggcggccgtgcccatcgatgtcaaagatctattatcaatgtttacttttcaagcaattcacaaccgctacgcctctataataggtcgtcttatgatgtcaaagatctattatcaatgtttacttttcaagcaattcacaactagtagtcaaagaggatggaaaataccgcgatgtcaaagatctattatcaatgtttacttttcaagcaattcacaaccctcgtaggcttcatcccaacgtgtcgccgatgtcaaagatctattatcaatgtttacttttcaagcaattcacaactactcctctgttcaaatttctgctgaagcgatgtcaaagatctattatcaatgtttacttttcaagcaattcacaacagtaattgaaaaatacgtacaaagtccgggatgtcaaagatctattatcaatgtttacttttcaagcaattcacaaccccagttcagtcttatgttgagtgtcttaagatgtcaaagatctattatcaatgtttacttttcaagcaattcacaacccatgaggaccgatgtcggtcttgccctgcggatgtcaaagatctattatcaatgtttacttttcaagcaattatccttattctatctctctgtttcttttctgttttatttgttttttgtcattccgatttcatggtgcaaagatacaaattattttccaaatcgggcaaaagaaaaaagtggagcccggaaagactccactttaaatagtatctacttaactactgtctccttaactactgcaattagtagctgcgggcgaagacgacgcggcggtgcgaggaagtgtaaaccaaaaccgtgaaggtgtaaaccagattagggatatggacgaaacaatgtaaaccaattcagttttgctgtggcgtcggctcggccgacaaccatcccaaatctgtcaaccaatttcagggaaagtcacagggaaagtcaatgaatattgctttttcaccatttgtgtttaatgtgttaaacaatattttttaatttttgtttagcatattaaacaaaaagtgtatctttgcatcacaaaacaatggatatatggaaacactttttacattacaacgacaactgattcagaatagtacaacaaattttgtacgttcagtgatgaatgatatcgactggggcaacacccaacttatcggtattcgtggtgccagaggtgttgggaaaacgacacttttgcttcagcatatcaaattgcactatggaactaacacaaaaaaagcgttataccttaacctcgacagtgcgtattttacacgcaacgacctaatggacaccgtccagtctttctacacttcagggggagagtgtcttctgctggatgaagtgcacaggtatcctcattggagccaatatgtaaaaaatatctatgacctctacccaacccttaagattgtatttaccggttcctccctgttacagattctaaatgcagaagccgacttgtcacgacgttgtgtaagttacgagatgcagggtctctcgtttgctgagtatatgcggttctatcataaaatcgacttgccgaaatgttcgcttgacgatatcgttcacaatgccgacgacatctgcgataatgtcaatgccaaatgcagacctttggagtatttcggagactatctgcggtcgggctactacccattccgcaaggagaatccaaaccaatacactacaagggtagagaatgttgtggacatgattcttggcatagaactaccgcaacagcgaggcgtggatgtgggtaatattcggaaactgaagtctcttttggcggtactggctacagaagttccaatgctggtggacgtaagcaaactttctaagatgacggagttgagtcgcgtgagtcttacctcctatctgcaatatctacatgatgcacgtctcattcgtttgctctattccgatgccacatcggtaaagcgtatgcaaaaaccggacaaaattctgatggagaaccccaacctatgttatatcctcaatcttggccaagccaacgaaggaaccgtcagagagtctttcttctgcaaccagatggcatataagcatggtgtggagtacacaaaacccgctgattttatcattgacgggaagattgttgtggaggtaggtggcagttccaaggacggagggcagattattggtcgcgataatgcctatctcgcctgcgacggaattgaatactcctacggcaaaaaactgccactttggttattcggattaacctactaacaagtcctattctcctgtagccttccggcgacccctctgtagtgtttcgggaagacactaacgcattcacacattaacgcattcccactgttcttttcacggtgcaaagatacgaattattttccgaatgcgacaaaagaaaaagtggagcccggaaagactccactttaaatagtatctacttaactcatgtctccttaactactgcaattagtagctgcgggcgaagacgacgcggcggtgcgagggcttgccgctgtagatgcacttgccttcttcctcgggggcgtcgaaggggatgcagcggatggtggccttggtctcctccttgatgcgctcctcggtctcgacggtgccgtcccagtggcagagcaggaagccgttcttctcgatctcggtcttgaagtcgtcccaggtgtcgacacggcgggtcatgctggcacggaagtcggcggctttcttgaagaggttctgctggatctgctccatgaggtcggcgacatggtcggcgatgccttcgatgggcatggtgatcttctcgagggtgtcgcggcggcagacctcgcaggtgccgttctcaaggtcgcggggaccgatggcgaggcgcacggggacgcccttgaactcgtactcgttgaacttccagccgggcttgtactcgggacggttgtcgtacttcaccaccagacctttggcttcgagggcgcggatgatgggctcgatatgcgagtcgatctgcgccatctgctcgtcgctcttggcgatggggacgatggcgacgtggatgggtgcgaggtgcggcggcaggacgaggccattgtcgtcggagtgggtcatgatgagggcgcccatgagacgggtgctgacgccccaggaggtggcccagacgtattcgagctggttctgcttgttgaggaactgtacctcgaaggctttggcgaagttctggcccaggaagtgggaggtgcctgcctgcagggccttgccgtcctgcatcatagcctcgatgcagagggtgtcgagggcaccggcgaagcgctcgttggggctcttgtggcctttgaggacgggcatggccatatacttctcggcgaactcggcgtagacctcgagcatcttacgggtctcggcctcggcctcctcgcgggtggcgtgggcggtgtggccttcctgccagaggaactcggcggtgcggaggaacatgcgggtgcgcatctcccagcggacgacattggcccactggttgcagaggatgggcaggtcgcggtaggacttgatccagttcttgtaggtgctccagatgatggtctcggaggtgggacgcacgatgagttcttcttcgagcttggcggcggggtcgacgacgacgccgttgccgttggggtcgttcatgaggcggtggtgggtgaccacggcgcactccttggcgaagccttcgacatgctcggcctcacgagagaggaagctcttggggatgaagagggggaagtaggcgttctggtggccggtctctttgaacatgcggtcgagctggtcgtgcatcttctcccagatggcatagccatagggttttatcaccatgcaaccgcggacggcgctctgttcggcgaggtcggcacgtacgacgagctcgttgtaccattcggagtagttctcactgcgtttgggaaagtcttttgccatattttttgactattgaatacaataattaataataagtttcgttaaaaatggagtgcaaaagtacacaaaatatttcacttggtgaaatgattttagacacgaaatgagcaaacgactgataatcacagcatcactgatatgcttggcactatgttccaatgcccaggtgaagctcacggccgacaccttggagtgccacgtgataggtttctcggcgggaatactgatgcctggcggcggcagcgccagcgagggggcccttggcggcgggatgaaagacctgtacggaagtccgtggctggacttcgcactgaactgcgactacaaatacaagagcaactggctggtgaccctagacgccgacctgtggttcggcctcaacagcgacaacctgcaggagcgcagcgaacgtatgcccaacgtgtatctgcccaacggcatcgcctattcgtggggcggcacagacggatatgtcaccgcctacaaccgcggcttggcagcccgtatcggcggcgggaagataatcccggtgctgaaaggcaaccccaattcgggcctgctgctgaaagtgagcggcggatggttcttgcagcagacggtgttccaccaggagtttaccgaagccccagtgccacaggtggtggacgaatacggcaagctgtacgaccacctgcgcaacggcgccatactgaccgagagcataggcttcgtgttcatgagcaactactccacctacgtcaacgtgcgtatcagcttcgacatcagccagtgcttcagttggtcgagccgcccatatataatagacaacaagatgggtctgaacggcaaggacaacaaccgctacttcgacctgctctacggcgtgaagcttacctggatgttcccgctgatgggcaagacgacgtatgattactactattattaagcctaagagtcaaaaagtctaaaagtcgaaaagtctaagagtcgaaaagtcgaagagtcgaaaagtcgaaaagactaaaagctatgcgtctgatttacaccattgggatttggttctacacgctgggggtgcgtgtggcggcgctgttcggccacaccaaggcgtgccagatggttgaggggtggaagcgctggcccgaactggtgaccaagctgaaccacgagcgtccagtggcatggttccatgccgccagcctgggtgagttcgagcaggcgaggcctgtgctggaagcctacatcgagaggcaccccgagcaccaagtgctcgtaaccttcttctcgccctcgggctacgaggtgcggaagaactacgcaaaggcacaggctgtgtgctacctgccaatggacacgccgcacaacgtgcgccgcttcctcgatgccgtgaagcccacggtgacgttcttcgtcaagtacgagttctggtacaactacctcggcgagttgcgccgcaggggtatctccacatatatcttctcggccatattccgcccggggcagtatttcttcaagccgtggggcagatggtacctacggcagctgaaagagtgcttcggccacctcttcgtgcaaaacgaggagagcctgcatctgctgcaagcccacggcatagagcatagcaccatcgccggcgacacgcgctacgaccgtgtgcaccagatagccaccgccgccgagggggacacggtggtggaagaattcctgcaaggatacaatggcaaagtgctggtctgtggcagcacctggccgcccgacgagcaactgctggcacgactgaacgacggcaaggagtggttcccggaacggctcatcatcgccccgcaccagatacacgaagagcacctgcagcaaatagagagactgttccccgacagcgtccgctactcccaactcaagcaatcaagcattgtcggccgagccgacggcacaccacaaacaatcaagcaatctcaggctctcatcatcgacaacataggcctgctgtcgaagctctatcgctatgccgacgtggcgtatatcggcgggggcttcggggtgggcatacacaacatactggaagccgtaaccttcggcaagcccgtggtcttcggtcccaactggcacaagttccaggaagcacacgacattatcgaactaggaggcggcacggctgtcgacgagcaccccgatgtgtcgctactacggaaatggttcaccgacgaggaggtctaccgtgccgcctcggacgcctgtctgaaactgatgcgccgcaacctcggcagcaccgacatcatactcaacacccttgaagcgtagactgccatatataatcatcttgttgctggctgtcgttgcagcaagctgcacgaacacgcgctaccttgccgacgacgagtacgccctctatcggcaggtggtggatatcagcatggccgacagcagcgatgtagcgcccgaggtgtcggcggcgctgaagaagtcgaagagttacatgctgcagaagcccaacagcaaaatactctttctgggccgcgtcggcatgtatatctacaactgggcatcgcccagcgacagcaccttctggggcaactactggcgccgcacaggacaggccacggtggtatacgacgagaacaaagcctaccgttcggcgcagcagctgcagcaactgctcgagagcaaaggctgtttcggttccaaggtaagtttcgacaccctggacacaaagatcacgcgacgcaaacgcgacataacgattggctatcacgtggcagccacccaacgccatgtgattgacgaggtgctctatcgcaccgacaacagcacgatagcgaagatgctcgacgaatggcgcagcgactcgcccatccgcgtcggcgactactacgaccaggagaacctggccgccgaacgagcccgtctagcctcaaacctgcgtgaatcgggattcttccacgcgtcgggcgagaacatctcattcttggtcgacaccacctatctgagcggacacctgagcatagatgttgttgtcgacggttcggcgctcaagatataccacatcaacaacatcgacatatttcccaacagcaccgccaacctcagagaggcgccgcggcagttcgacaccctaatctacaactaccccggagcccgccgccgcatcgacctgcactacatatacgaccgaccgatgagcatcaggccgcagaccatcagccgttcgctctccatcttccccggcatgacgtaccgaccgcgctatatcaccgacacctacaactcgctgctgggactgcgcaccttcaaatacataaacattgagttcaccgagtcgccctcgtcgaccgacacgctgccccttgtcgacgcgcacatacgactcatcaacagcacgatgcagcggctgtcgctgtcgtttgagttgaccaacgcctcgccgctcggttcgtcggacagcagttcgtttctcctcggcggcaacctgggactgcagacctcgctggaataccagcacaagaacctgttcggcggtgccgaactgctgcgggtgaagagttccatgctgctggaacttccgaagctcatcttccgccagagcggccaaggattctacgacaacttcagcgccttcgaggccgacctggagctgtcgctcgacatgcctatcttcctgctgcctttcgccaacggcatccgtttctaccgcaccaagccacacaccctgctgaccctcggcggcagctaccaataccgctactactacgagcgtatactggccaacacgtcgttcggttacaactggcgctggaacaagaatgtctcgcaccagctgctgcccatagagatgacctttgtgcggatactgaacctcgacgccaacttcctggcgcgcctgaaccagctgtcggacctgaggctgaaataccagtacagttcgcactttatcctcgacgcacgatatgactacacctacagcaaccaggtgtacggttcgcggagcaacttctccatactccacctctcgtttgagacggccggcaacctgctggcaggcatcggcgccatagcaggcatagaggccgacagcaacggtgtgcgccaagtgctcggcgtgccctacgcgcagtatgtacgtcttggcggggaatggacacgataccactatatcggtgacaagagttcgcttgttgcccgcatacttcttggcataggcatcccctatggcaactccatatcgatgccatatgagaagagtttcttcggcggcggccccacgacgatgcgcgcctggcagctgcgccacctggggcctggctcctactatggcagtgaagacatgctcgaacgtgtgggcgacctgcagctggtgctgaacctggaagggcgtttcccgatagcaggcgtatttgaaggggcagtcttcgccgatatgggcaatgtatggctcctcaactcgtcggagcaatatcccggtggcgagataaagttgaagagtctgccttcggaggtggctgtaggcataggtcttggccttcgcgtctctgtttcgatagccaccctgcgactcgacttcggcataccgttatac

SEQ ID NO: 2277 - DNA, 24056 bp, synthetic construct
  misc_feature 1..24056: note = Synthetic
  source 1..24056: mol_type = other DNA
gctgcaattctcggagcacaagcacgacctcgtttcgtcactccccctgggctggaaacagaaactggctttctcggtctccatcttccacgagccgggcatcgtgttcctcgacgagcccaccggcggcgtcgaccccgccacacgccgccaattctgggaactcatctacgatgccgccgcccgtggcatcaccgtctttgtaacgacccactatatggacgaagccgagtattgcgaccgtatctccatcatggtggacggaaaaatcagcgccctcggcacccccggcgaactgaaacgccgcttccggcagcccgatatggaccatgtgttcacccacctggcaagacaagccacccgcaacagcgactaaccgaaacgtatgaaacattttatcagctttattcagaaagagtcccgtcacatcctgcgcgaccgtcggacgatgcttatccttttcggcatgcccgtcgtattgatgctgattttcggatttgccatcaccaacgatgtgaagaatgtgcgcaccgtcgtcgtcacctcgcaggcggaccacctgacgcggcaggccatagaccgcctggccgtctcagaatacttcgatatcaccgccaccgttggcacaagccaagaagccgaacgactcatccgcagccaacgggccgatatggcaattgtgttcggcaaagactttgcgtcaaaaaaaagcggcctgcagttcatcgtcgacgcctctgaccccaacatggcgcaacagtggacaacttacgcgacacaaaccattgtcaacccgcaactgtcaacggtcaattccaagatgctctacaatccgcagatgaagtcggcctacaacttcgtgccggccatcatgggcgtgctgctcatgctgatttgcgccatgatgacctccatcagcatcgtccgtgagaaggagaaaggcaccatggaggtgctgctcgtttcacccgtgcgcccgctgacgatcatcatcgccaagacggtgccctatctggtgctcgcccttgtcatcctcgtcagcatactgctcatggcacgctacgtgctggacgtcccactgtccggctctgttgtctggattatcgctgtcagcatcctttacatcctgctggccctgtcgctcggcctgctcatatccaatatttccaacagccagcacatggccctgctgctctcggccatggtgctgctcatgcccgccgttatgctttcaggcatgctgttccccattgagtccatgcctccggttctgcaatggctgtctgccgtcattccgccccgctattacatcgaggccatgcgcaagctgatgatcatgggtgtaggcatcggcgaagtggtgcgcgaagtgatcatccttttcatcatgacagccctgctattggccgtctcgctcgccaggttcaagacccgtctggaataaaaagattcgtcgccatgattcaatatctcattcaaaaggagttcttgcagatacgacgcaactcatttataattaaactcataatcgccttcccaatcatggttatgtgcgtgatgccgtgggtgatgaaccaggaggtgaaagacatccgcgtcagtgtggtcgacaacgaccgctccaccgtgagccagcgactggttcacagcatcgggcagaacagccacttcgtcttttgcggacagcatccgtcgtattatgccgccttgaaagaaattgagaaaagccgcaccgacatcgtgctggttatacctcagggctacagccgcgacatcactctcgggcgcaaaccgcaggtgctcattgcagccaacgctgtcaacggcaccaagggcggaatcggcagcagctacctgtcccagatagtgacggcaaatctcgcccctgacgcctccaccccgctccattcaaacatctccacacactatctatacaacaagcacctaaactacaaggtgttcacaattcccgccctgctggccatcgtgatgatgatgatgtgtggtttcctgcccgcgctgaacatcgtaagcgaaaaggaggcgggcaccatcgagcagatcaatgtcacccctgtctcgaagtggtcattcatcctggccaaactcattccctactggatcatcgcactgttcatcgtcaccgtctgccttgtgctggcctgggccatctacggcatcacctgccaagggtccttgtggcttgtctacttgctgaccatgctgctggccctgttcttctcgtcgttcggactgattataagcaactacagcaacacactccagcaggccatatttgtcatgtggttcttcgtagtctgcctcatactgctcagtgggctcttcacccctacgcgctccatgcccgaatggtcctacgccaccacctacatcaaccccatgcactatttcatcgatgccgtccgcacggtatttatccggggaggcggattcagcagtgtcgcccgtcaagtgtcggccctcattggcttttccgtcgtcatgggcgtctgggctgtcgtcagctataagaaaaacacctaagttcgccacaattctcccaaaaacgcatctcgtttacagcctttttttgtatatttgtaatcttaaaattcaaaaacacaatcacaataatcacttttacaaactcttacaccatgaagacaacaccgtataccgacctccacatcgccttgggcgccaagatggccgagtttgccggctacaacatgcccatccagtacaccggcctcgtcgaggagcacaacaacgtccgcaacaacgtcggcgtcttcgacgtgagccacatgggtgaattccgtgccaaaggccccatcgcaaagcatttcatgcagtatgtcaccaccaacaacgttgaggacctcttcgacggtaaggtgcagtacacctgcctgcccaacggtcagggcggcgtggtggacgacatgctcgtctaccgtgtgcacgacgacgaatacttcatggtgcccaacgccgccaacatcgacaaggactgggcttggatgagccagattgccgataagatgggcatggagctcggccgcgacttcgtcaacgagagcgagcagtgggcccagctcgccgtccagggcccaaacgccctgaaggccatgcagaagctcacctccgagaacatcgtcgacatggagtactacaccttcaagatcctcaccttcgccggcatccccaacatcatcctttcgaccaccggctacaccggcgccggcggctgcgagatctacatccccaaggagaaagccatcgaggtgtgggacgccgtctttgaggctggcaaggaattcggcatcatgcccgccggtctgggttgccgcgacaccctgcgtctggagaagggcttcgccctctacggccacgagatggacgacaccgtcagcccgctggaggctccgctggccttcatcgtcaagctgaaagccgagaacaacaacttcatcaacaaggagctcctcctagcccagaaggccgccggattcaagcgcaaagtggccggcttcgagatggtcgaccgtggcatcgcccgcaacggctacgaagtgtgcgacgcccagggcaacaagatcggcgaggtgcgcagcggctcccccagccccagcaccggcaagaacattggcaccgccctcatcaaggccgacttcgccaagaccggcaccgagatatacatcaaaatccgcgagaaactcctcaaagccgtcaccgtcaagatgccgttctacgagggataaagaaagatagtggcgtgtcttggacacgaataggattacaccccacactgcgcacccttcggccgttcagtgtggggtttataagacatggcgcctccggcacaaatccctgaacaacatgaagaagcaaacactgttcacaacatatttcctgctctgtttgtcgatagcgacaacgatgctgtcgccacaacaggcgacagcgcagaacaatcagccatattttgcggccgatgagttgccaaatgccgtatattggatgcctgcgccgccagcgtccgggtcgtcgcagttcatgcacgacatctcgcagtactattggggaaaagagcagcggttggacaccgcacgtgcccacaaagccatccgcgaggcgcaatacgaagtggccgacatggtgcgccaattcagcgctgccttcggcatggagatttccgaacagacgacacccgccatataccatgtgctggaacggggcatacacaccatccgcctgagtgccgtcaaacccaaggctaaatacatgcgcacacgcccctacgtctacttcaacgagcccacgctggtgcctgacgacgaagccgtgctgcgcaccaacggctcctacccctcgggccacaccgtccgaggctggggcatggcattgctgctctgcgagatcaaccccgacgcgcaggacgcgctgctgaaactgggttacgaatggggccaaagccgcgtgatagctggataccactggcagagcgatgtcgacgccgcacgtatgctggccgccgcctgctacgcccgcctgcacaccagccaagccttcctcgacgacatggcagccgccaaaaaagaattcacaaggatccggcacacccaaggcgcggagacaaaaaaataacattacatccaacatggtgccggatttgcaatccggcacttttgtcacagggatttataatccgtttctttcagattacaaatcttcacaataaaaaacagctgatttaaggcttgcgacactcgacgcaagccttttttttgcagccactcctacacaatatttatcccgatattgcgttataaaacacaaatatcgatatatgtcagaatcaggcaaagaattgaacgcctaccgcctcacctcaatggaggagcccaccgacgaaatgctctccgccatcatgaaggaagccgctgccgaggccacagcatccacaaacaaagcactggctgactacttcaaagaactcagcactatgatgcaacggaagatcgctgtgttatgaatgaggttctccatcgccctgtcctgataatcattgccgggcccaatggatcgggtaaaaccaccatcacatctcaaatcctgtaccatgaatggctcgagaactcggtctatatcaacccagaccaagtggcgcaagaacattttggcgactggaactcgcccgaggcggtgagacaagctgccgaatactgcgccgactggcgcgagcgttgtctgaacgacaagcaaagtatgattttcgaaactgtcttctctgccgacgacaagttagatttcatccgtcgcgcccaacaagcaggcttcttcatccgactgttcttcgtctgcaccgagtcgccgatgattaacgccgcccgtatcgcgggccgtgtgatgaaaggcggtcacgacgtccccatcgcaaagataatatcacgctaccaaaaatccattatcaactgcaaagtggccaccaccatcgccgacagagtttatctctacgacaactccgtcgacggccatgaggcacgcctcctcttccgtttcgcagacgggaccatcatcaaacgctacaccgacaacattccccaatgggcacaggggttgatggtgtaaacactggacagtatccaatattgtaacggatttgcaatccggcacttttgtcacagggatttataatccgtttctttcagattacaaatcttcacaataaaaaaagcggcggatttgcaatccgccgcaatggaaaaatatattatatttcgtttagcattctccacaacttcccacaatctccacgcttgtaatttctcttacctcgaattgataagcatcttgaccattcacagtcgttctccgaagatagtttccatctcttgaacacgatgacgaacaattattactcgcttttactctcgcgtcgagctctgatgatgcgcaaaccgtctcataatgtttcacgtcttctcgtctaacgcttgaagaaataacagtaccgccgtaacgatcagtacgggtttctatcacctgacgataatggacacaacacttgtagcaacggtctcctgtttctttcggcgtaaatgcacaaagaggaattgtaacaaatactgtgagaatcatcaatattcttttcatttcattcattgccggttatataccgtcggctcgtcggtttttgttcgtaaagatttgatagttccgtagaagaatgcacataaaaatagcgtggaactgttcagtcttcatcggaatctttgaggtcttcgactacctttccacccaattacaacgtacaagtccacgccatacgacgggagcgccgttgccttgctctgggtggaaatttgaagttgtcgaagtttcaaagattccagagtttagcctacttcgctattttctattctatgatgtgcatattatcctatgcgctatgcttcatcggcaatggtatttgttaatattccgttcgaaacagactgcaaaattacacatttttttcacaatcggcaaaaccgtgctgattcgcaaaaagtttgtacttttgtagacggaaaccgacgggttgcattcaatgaagatattgtcacatcctatcagccacagcgaattgaacgatatgttgcccggttttttcggcgatatgatcaaagctgttgttgatgtgaagcagggcattctggggcttgacgcggagctccatgccgacattgaaaaagagatgctgtcgcaaggatcaatgcaagcagacctgtggggcatcaacctgtacccggaaatggacggggaggatttcatcgagttcgactcgctcatcaacatccgtccgttccaaggcaaccggagccgcgacgtactggattccactgtgcggagacagattgtcgacatcgtaaactcgttaattcaatgagcgcatttcaacatacggaactggcaggcggccgttgggcggagatgacgctggcggagcagatgttgaatatcggcagcgaagtgtcgcgtgccaaccgctggaaaagcaagggcaacgaagagcaatgccatcgcgcagccgaccgcgctttggaactgatttcgctcaccatcgacgcgcaacgcgggaagcacgacctcggcgaattctgccgtctttacgaggtgttggccgactattactatggcgacaacatctaccagaccgaccccgtcaagttgcaacgcagctttgacatcttttacgccaccgaaacatcaagacaatagcgttgttttcaatcgattacaaacacatttaaataaaatcgcattatgagtatcatcaaacctttcaagggattccgcccgcccgtcgacattgtcgaaaaactggcttcgcgtccttacgacgtgctgaactctgatgaggcccgcgtggagtgcgagggcaacccctacagcctgctccatgtgaccaaggccgaaatcgacctgcccaaaggcaccgacgagcactcgcccgaagtatacctccaggtggtgaagaactacaacctgttcaaagacctcggctggctggtgaaggatgaagaggagaaactctacatctacgcccaaagcatgaaccccaccgccgccgacgccaaatggcagtacggcatcgtggcctgcgcctacagcgaggactatgtgaacaaaatcatcaagaagcacgagctcacccgcaaggacaaggaagaggaccgcatgaaacacgtgcgcatcaccaacgccaacgtcgagcccgtcttcttcgcctaccctgccgtggcccgcatcgacgagattgtggccggcgtcaccgcccaaaagcccgtctatgacttcattgccaaggaggacggcttcggccaccgcttctgggtcatcgacgacaagaagatgattgccgagctcgtcgaactcttcgacaagaaagttcccgccatgtacatcgccgacggccaccaccgcagcgccgccgccgccctcgtgggacaggagaagaaggagcagaacccctgccacaccggcaaagaggagtacaacttcttcatgaccgtcatcttccccgacaaccagctcaatgtcatcgactacaaccgcgtggtgaaagacctcaacggtctctcgaaggagcagttcatcgccgccgtgggccaaagctacgacgtgcaggacatgggcaccgacatctacaagcccgccaagctgcatgaacacagcatgtatctcgacggccactggtacaaactcaccgccaagcccggcacctacaacgacaacgaccccatcggtgtgctggacgtcaccatcctcagcaacctcgtcctcgacaaggtgctcggcatcaaagacctccgcaccgacaagcgcatcgacttcgtcggcggcatccgcggcctcggcgagctgaaacgccgcgtggacaacggcgagatgattatcgacattgccgacaccggcaacatcatgcccccgaagaccacctggttcgagcccaagctgcgctccggcctcgtgatccacgaactctgctaagcgggccctcccgccgagggataataacaaaaccaaagggtatacgtcacccaatggcgtataccctttttatggcaatggacaaacggctacctatagaaaatctctcgccagtcctgttttgggacattgaccgcgaccagttcgaccccgagaagaattcggcacagttgatacagcatgtgcttgagtgcggcgaactcgacgactggcgtatggtgcgcgactactatggcttggaccgtatcgccaccgactgtaagggactacgctctctcgccccagaggccttgtcgtttgtctgcgcaatgacaggtacccggaaagaagactaccgatgctacaacttcagacagtccttcccgacactttggaactcctaaaagagttgtcctctcgtcccgagatgagaggccttcgcctggtgggtggcaccgcgttggcattgcagtacggacaccgacaatccgttgacctcgatttttttggcacaccaatggtcgagcaggaggagattgtcgaaatgctctcaacgttaggcccattatccatacacaatcgtagccgcaaaatattgcaggttgtgttgcgggatatcaaggtcgatgtcattgattatagccattatccatggattagcgcacctgttgtagaagatggggtcacgcttgcctctccacaggacattgctgccatgaagataaacgctgtcgaaggacgtggctcccgcaaggactttgtcgatatctattttctcttacagcattattcactatcccaattgctcaacttctatgcacagaagtatcccaaccattccctattccgtgcattgctcagtctcacttacttcgacgatgccgagcagcaagcaatgtctaaaatgctgacaaacgtcagttgggaagaaataaagcaggctataacagaagaagtcagtcagctgcaggaataagccttgttcttgctgacgggacggcccaccgtatcatatactctcaacaacccctcttcgatgccttcgataatgatgcggttaccgcgaacgaaggttggaggagtctccgttggacgtgatgctctgcagctgtggcggctgatttcgtggctgggcaagattatcgacattgccgacaccggcaacatcatgcccccgaagaccacctggttcgagcccaagctgcgctccggcctcgtgatccacgaactctgctaaaaaaatagccaacaaccgacttgaaaaaggagggacgctgtcagcggcgcccctctttttacgttcaattccattagacgttttctcgcctcaacatacgagcaagcccgtctgtattcggcttggcgaaaacgttctgtcaacaccgacacacgccaaaagaaaacacttgtaaatcccaattaaatttacgaaatttgcacctctatatcattgttgcatcaaacaatacactaacggtacattatgaagattttaggactcgacttagggaccaacagcatcggatgggcggtggttaacgaagcggaaaatgagcgggaatcgtcatccatcatccgtctgggtgtccgggtcaaccccctcaccgttgacgaacaaaacaattttgaaaagggcaaacccatcaccaccaatgcagatcgaacactgaaacggagtatgcgccgaaatctgcagcgatacaaacttcgtcgtgccaacctcgtctcactgctcaaaacacagggatggataacagacgagacactgctgtccgaacagggcaataacagcacgtttgagacctaccgactgcgggcggaagccgccacaaaagaaatcacactggaacaatttgccagagtgttactgatgctcaacaagaaaaggggctataaaagcagccgtaaaatgaaacacgacgaagacggtagcttcgtcaataatcttgatatcgcccgcgaactttacgattccgggttgactccaggccaatacgcatataaccttttaaaggacgggaaaaaatacatccctgatttttaccgttccgacctgcaggaagaattagacaaaatctgggcatatcaatatgaataccacgaaaatattctaacccacagcctccgttccgccatcattgaccaaagcaaaacaggaaccactaaaatctttttgaagacccacggtatattcacggcagacataaaaggcaaccggaacgaacgcaacaaacaactgttcgagcttcgctgcggggcgcttgaaagagccctgaccgcagaagagctcgccaccgtgatagccgaagtcaacggccagattaacagcagcagcggctacctgggagccattagcgacagaagcaaggctctattcatcaatcatcagacggtaggtcaatatctcatgcagcaactggacagagaccccaataagagcctcaaaaaccaacccttctatcgacaagactatctcgacgaatttgaacaactatgggaaacgcaggcacactaccatccggagttgaccgccgccctcaagcacgaaattcgcgatatcatcatcttttatcaaagaagactgaaatcccaaaaatggcttgttgccaactgccctttcgaacatcgcaaagtatgtcccaaatcgtcgcctttattccagcatttcagaatatggcaggtactcaacaacgtcaccgtcaccgttgataacaaaacttatgttctcaacgaagagcagaaaagcatcctcagcaaagaactgctttataaagaaaaaatcagcaagcgtgacgcattgaagatgctctttgtgaaagccaaaggggtggatatgaactttgccagccttgaaggcgaccgcaccatgtccaatctgctcaaggctgcccaagaaattgtttccatcagcggacatggtgattacgacttcggaaaaatgcccgccgacgatatacataacatcattcggtccgtatttggtggactggggtttgcaaccgactggcttaacctcgacaccgatgccgacgatctcgaacaggaatcgcagatgcggctgtggcacctgatatactcattcgagggcgacaactcgaccaccggcgatacaaaactggtagaacgcctgatgtcgctactcaatcttccccaagagtacgcccgcctgtttgccaacgtccatcttgaagacgactactgcggaatatccagcaaagccctcaagcgcatactgcccttcatgaaagccggacacatttacagcgaagcctgcgcattggccggatacaaacactccgaacagtcgctgacacgcgaggaaaacaaaaaccgtccgttgaaagaccatctggagcaactcccgaaaaacagcctgcgaaacccggtagtggaaaaaatcctcaaccagatggtcaatgtcgtgaacagcattatcgacacatacggccgtcctgacgagattcgcatcgaactggcacgcgaattaaaaaacaacgcactcggccgacaagcaatattcgaagccatcaaccgcaacacaaaagaaagcgagcgaatccagcaaatcctgaaaaaagaattcgggctcacgcacgtcagccgaaacgacattatccgttaccgcctctatcaagagttgtccggcaacggatataagacactctattccaacatatacatcccacaagaaaaactcttcagcaaagaaatcgacatcgagcacatcatcccgcaagcccgccttttcgacgactcgttctccaacaaaacattggagtaccgcgatgtcaacatcaagaaaagcaacaccaccgccattgactttgtcagaaacgaatatggtgaaaatgaagtcgaacaatacaaaaaaagagtgaacgacctgctcaaaagcggcgccatatctcaagcaaaggccaaaaaacttaaaatgaccgaagctgagatcccaaacgacttcattgaacgcgacctacgcaacacacaatatatttcacgcaaagcacaggaaatgctacgcgatgtggcacgtgtcgtcaccgccaccaccggcagtgtcaccgaccgtctccgtcaggattggcaactggttgacgtcatgcaagagctcaactgggataaatatgaacggcaaggcctgacaacagtcatcaacggtcgcgacggacaacaaatacggcgcatcaccgactggaccaagcgcaacgaccatcgccaccacgccatggatgcactgaccattgcttttacaaaaccagcctacatcagctatctgaaccacctcaacgcacgcagtgaagacgacatccgatcgatagaacgcagatttctcgaacgcgatgccaacggccacttgcgattcatctcacccattgcccacaacttcagatccgaagccaagcgtcacctcgagatgattctcgtctccatcaaagccaaaaacaaagttgtcacccgtaacaacaacaccacaaaaaccaaaggaggccgccgaaacagaatacaactcacgccccggggtcaactacacgacgcaaccgtctacgggtccatcctcctgccacacaccaagaccatcgccgtagacggcaagatgactgctgaaatcatcggacaagtgcagaacccagttttccgccaagccctaagccaacgtctcgaagcctgcgggaacgatccgaaaaaagccttcacaggcaaaaacagccttgaaaaggcccccgtatggatcgaccaagcgcacacggaacatgtgcctgcggaagtgaccatccaacggttagaaccccagcacaccattcgcagagccgtcaacaaagacctcaacatcaacaaagtgctggacaaaggtatccaacacatcctgcaagcacgtttggatgcgtatggcggtgatgccgccaaggcattcgccaatctcgacaacaaccccatctggctgaatcaagaaaaaggcatcgccatcaaacgtgtgaccacagcagaaaacatatcgggcgaaccacttcaccataaacacgacaaagagggccgtcccatcctcgacaccaacggaaagcccatgcccagcgattttgtcagactgatgaacaatcaccatgtagccattttccaggatgccgacggcaatctgcaagaacacatcgtctctttctatgaggccgtggcccgcgtgacggaacttgggctgcccgtcatcgacaaagagtacaacaaggacaaaggttggcaattcctgttcacgctgaaacaaaacgaatatttcgtctttcccaaccctgcacaaggattcaacccggacgaaatcgacctcaccgacgaacgcaactacagccgcatcagtccaaacctgtaccgggtgcaaaaaatgtcgagcaagtattatgtttttcgccatcatttggaaaccaccgtcgaagacaagaaagagctgcaaggcatcacctggaaaaggatccaatcactgaacaatctgaaaggaattgtaaaagtacgaatagaccatatcggacgcattgtccagataggagaatactgacgccccatgattaaacgcaccctctgcttctcacaccctgcctacctgtcgctgcgcaacggacagttggtggtgaagctggatccacacgacgacgaaccggagcgacaggccaccgtccccgtcgaggacatcggtgtggtggtgctggatcacaggcagatcaccctcacccatggcgccatggccgccttagtagagaacaacgctgccgttgtcacctgcaacgactcccacatgccagtgggcctgctgctgccattagaagggcacaccgtgcagagcgagcggttccaagaccaaatcggcgcctcgctgccactgcgcaaacagctgtggcaacagactgtacaacagaagatacgcaaccaggccgctttgctcgacgagctgcacggcattgagacaggcaacatgacggcatgggccgccgaggtgcggagcggcgacagcaccaacctcgaaggacgtgccgccgccttctattggagccggatgttcccgaccctacccgacttcacccgcagccgcgaaggtgcctacccaaacgccctgctcaactatggctatgccatactgcgtgccgtcatcgcacgcgccctgacgggcagcggcctactgcccacactcggcatccaccaccacaatcgttataacgcctactgcctcgccgacgacgtgatggagccctaccgcccctatgtcgaccgtctggtggtgcagaccatggctgaatgccgcgatgtgaccgtcaccaccgccatcaagcaacgactgctcaccgtccccacccttgaggtgcgcatcggcggccaacgcagcccgctgatggtggccgccagccaaaccaccgcatcgttggcacgctgctttgccggcgaatcccgacgaatcgcctatccggaaatgtagcatggatcgattcagcgagtaccgtatcatgtggttacttgtcttcttcgacctgcccaccgacaccaagaaagagcgcaaagccgcggccaactttcgcaaacacctgcttggcgacggattcaccatgttccaattttccatctatgtgcgccactgcgccagccgcgaaaacgccaatgtgcacctgcgacgcgtcaaatccgccctgcccgaatacggacaggtgggttgcctcaccatcaccgacaagcagtttgccgacatcgagctgttcttctgcaaaaaagaagttgagccaaacgctccaggacaacagttagaactgttttaacaccgccgtcaaacaatccccaatcggtcattcgaatgacttttcagcatgctgtccgcttttaggggttatttagccttatcagcatttcttccggcatcttgtctgccgccttgacgtatctggcataaatccgattgaccggttggggggggggagggggggatcaggattagaaaagagtatgccgaaaacaaaaaatcccgccttttcgggcgagattttttcattctttgacagcgtttagaacattgtatatcatattattactgacatcgtaatgtcaaagaaccaatatcaatgttttctttttaagcaattcacaacctgtgcatcgttcaggaatacactcgaagcaatgtcaaagaaccaatatcaatgttttctttttaagcaattcacaactctttagcgccttgctttaacgtctccaaaatgtcaaagaaccaatatcaatgttttctttttaagcaattcacaactagttctcgcaaatggaaactatggaagaaaatgtcaaagaaccaatatcaatgttttctttttaagcaattcacaacacggtcagttgcagcaacgcgcccggttctaatgtcaaagaaccaatatcaatgttttctttttaagcaattcacaaccaacaagacaattgccaacgtccacacagcaatgtcaaagaaccaatatcaatgttttctttttaagcaattcacaacttggctgcagttttttttgattggtggataaatgtcaaagaaccaatatcaatgttttctttttaagcaattcacaacgcgtactgcatacacaggtaaggctccgtaatgtcaaagaaccaatatcaatgttttctttttaagcaattcacaaccgtgtgccagaagggacgcaacgaggggctaatgtcaaagaaccaatatcaatgttttctttttaagcaattcacaaccggctgcccttgcagatgccacgcttggtgaatgtcaaagaaccaatatcaatgttttctttttaagcaattcacaaccatgatgaaatcaatgacaggctttgcaaaaatgtcaaagaaccaatatcaatgttttctttttaagcaattcacaacttcaactggcaaagagaacttgcaccgctcaatgtcaaagaaccaatatcaatgttttctttttaagcaattcacaacgttgatgatatacttaactgccgcctctgcaatgtcaaagaaccaatatcaatgttttctttttaagcaattcacaacttgctcttcaaaaattggatgttgaagataatgtcaaagaaccaatatcaatgttttctttttaagcaattcacaacacgcatctgtatctaatactaagtaatatttaatgtatatttgtagaaaaaaactaatatgaaaaagttattctattttgctgctgcattacttattttatcaatttcttttattgttatttttctcattatttcatttttctatgcgtttcattgattctcgactgacctgatgtcaaagaaccaatatcgatgttttctttttaagcaattcacaactgttcccatcttcacttttcgactgcgaaacccctgcattataatacggaacacttcctattataaaaagacgacggagcttgaaactccgccctcttagtagttttcacaacggaataatccttattgtgaattgcttaaaaagcgctacaaagatacgaaaaaaatttaaatccacatcgatcgtcaggctgacatttcatactattgtcttttatggtctattcctccgccattagcgagcgggggaaggatgcaataaatagcctgacattgcgttttagaagaatgtttgtatctctatcactcaattgggatgggatgtaaccaggattggaagatggctgttattttgctgttgttgctgttgttgacgggatatacggggtggcacctgtggatgcttccgcccgtggcgtggatgaggtggacgctggtgggagtggaagccgcctgtgtggctatggctgtgttttcactgacccgctatctggaccgagtgccttacggccttgccgtggcggtatacaacgcgggcaacaaggggctggttgtcatcttttatcttttcttgttttttctggcggccgacctgctgcggctgttacatgtgctgccgacggcatggattcgcgactcatgggtgtcgacgggagtattgtcggcggccatggcattgttgtttgtttatgccagtcttcactacgagcacaaacggcgtgtggaattgactatcgacacccacggcaaggtagaccaccccgtgaaggtgcttgccgtgagcgacctgcatctcggctaccacaaccgccgcgccgacctcgaccgctgggtggcaatgctcaaccacgagggcggcgacatgttgctcatggccggcgacttgattgaccgctcgatgaggcccttgctgcatgaggacatggccgaggggctcggcgggctgcagatgcccgtctatgcctgcttgggcaatcacgagtattatgcagcatattattcaccgggcgaagtggagcaattttatagcgaggcaggcatcacgctgttgcgcgacacagtggtcaacgccggggatgtcgacattgcaggacgcgacgaccgcaccaactcccgccgcaagggtatcgacgagtttgtgttccggccggcggcttttgctgtccttttggaccaccagccttaccatctggaggaggccgggcaagcgggtgtagacctgcagatcagcggacatacgcaccgtggccagatctggccgctgtcgtggattaccgacgcgctgtacgaatgctcatggggagagctaagaaagggcgcgacgacttattatgtcagttccggactgggtatatggggtgccaaataccgtatcggcacgcagtcggaatatgtggttatcaatttgatgccggggacagtggagacaacgggtgccgcacagtgacttgattgtgatacaagcaataaatcagactaaaaaatggaaatacgaccttatcgacacgaggtgaaatattatgaatgcgaccgtatgggtatcacgcatcattctaattatgtccgctttatggaagaggcgcgggtggactggatggaccagatcggatatggattcgaccggatggaggcggaaggggttgtctcgccggttgtcgccgtcgactgccggtacaagcactccaccacatttaaggacattgtcgagatacaggtggctgtggcggagatgactccgctgaagatcactttttcgtatacgatgcaggtggcgggcagaacggtctgtacggccaccagcacgcactgttttttggagaagggacgtccggtggcgctggagacacgcttcccggagctttacggacgcattaagcagctgtgagcggtccggcgggaggaaagacaatcagggtgtgacgcgccgatgaagaagcatttttatatcgtgtcggggttggtggcggtagcattgggagcactgggcgttgtggtgccggggctgcccaccacaccgtttctactgttagcctcgtggcttttctaccgcagctcgccgcgactgcagcagtggctgttgaagtcgtggctggggatgtatatacgcaactatcagcgacggggcggcatgaccgccacgcagaaggccggagccgtcggggtgatgacggtgatggtgacgctttcaacatttgtctttataccggcgggctcggtggcacggataattgtccctatcgtgggtgcggccggtgtcgcaacggttgtttttgccgtgccgaacgcccgccgcgacgaggattagtttccggcggggcggcatggatctgatccgccgcaacgtatgctacagggcactttctaactgaaggagccaccgcttgcgatccagtccgccggcatagcccgtcagcgaaccgtcggagccgacgacacggtggcaagggatgatgagtgcgacggggttgcggccgacagcaccgccgacggcctgtgccgacatggtctgaaggccccgctcgcaggcgatggcgcgggctatggctccgtaggttgtcgtggtgccatagggtatggcaagcaatgcttcccacacgcggcgacggaagtcgcccgcctgcacggacagcggcggcacaaaagcagggatgccgccgctgaagtagatgtcaagccattcttttgtctgcctgaagacggggaggtcgatgtcggcctcgtgcagcccgggtcggagatcggggcggtgtttctggccgtcaaagtagagccctgtcagcgcacagccggcactgaccagcgtgatggcgccgagcggactgtcgtaacgggtggtgatgttcatgtcgtatctcgttgacgccggccgcctccgggctgcgggcactgtcggccggggcgcaaagcctccggtgacgtcggtctacagcagcgactctatctcacgctccagtttctccggctcgaccatgggggcaaagcgcttgatttgtgtgccgtcgcgcgaaatgaggaatttggtgaaattccatttgatgtcgctttcttttgagaccgacttgctgattttggaaaacatggcattggtcatcttggctttcaagcctttgatttcttctgccggggcatgggctttcaggtaggtgaaaagcgggtgttcggcatcgccgttgacatcgatttttttcataatctggaatgtcacgccgtagttgacacggcagaactcctgaatctcgccgtcgctgccggggtcttgattggcgaactggttgcaggggaaaccgatgacaacgagcccgcggtcacggtatttttcgttgagtttctccagcccgtcgaactggggtgtgaaaccgcatttgctggcggtattgacgatgagcagcactttgccctggaactgggcgaagtcgacatctttgccgttactggcgacggccttgaagctgtagatgttttccatggtttgctatgatttggattgatgtgttgcggcttgatcttagtgggtacaaatatacgatgttttcggcaagcggctggccggcaaaggcaaggttcgatgtttttttgtatttttgcactatcaaaaatccggacatagttctttcttccgacctcggatcggccgcaggcaacgctttcgacgggtatctgctccacgctttttgccggcaaggcagctgccgttttatttacaacgagcgtccgtttgagctacatgccggcgactgtatgatcatgccgcggcatggcgatcggatgcgcgacatccagcccgacgaagattttgccattgacattatctatgtaaccgaggcatttatcaatgtcgccacaccgcagagcaattacgggatgcgtggcggcctggccctgttcgacaaccctgtcatgcgcctggacgaggagcagcaacaaatctgtgcgctcaatttcgactatatccggaaacgtcttgccttcgacaagcatctgtttcaccgggatgcaatgattaacgccgtacaatgtatgattatcgacttttacgactttcatgcaaaaaattatggcgtcgttcatatcacctcgccaaacgcccggctgatggaacaatttcagatgctgctggacaggggcgacttcaggcagcaccgcaacgtgggctattatgccgatatattgtgtgtcagcccgaaatatctttcagaggtcagcctgaaagtcagcggcgaacctgccagccattggatatcacgctacacggcgttggagataagccgcatgttgcgcaaccaggcgctgtctattgaggagatttccgacctcttcgggttttcgtcgctcagctatttccaccgttatgtgcagaagaacctgggcgtcgcgcccagcacgttccgcgaatagctgcgtctgtaaatttttgaataaatcaccgaaaaatgtgcagcggcggttttgtcaattagtggtatctttgcacaaaataaacatcaagataatgaaacgtattgtatttatgctttttgtggcctctctggcactcacgggctgcaaacaaaagggcgacgctgcgcaggcccagccctccaacgaaggatcaacggtttatatgaccaccgacatcagccccgatgggctcgtcgcaatttacaacgctttgggtgtaaaggccgaaggacgtgtggcggtgaagatcagcaccggtgaggccggcaacaacaattatctgcaacccgggctcatcggaccgctggtgcagctggtgaacggccgcattgtcgagtgcaacaccgcctatgccggcaaacgcatggacaccgacgaccatctggcggtcatcgaagcgcacgggtttaacgctgtcggaggtgtggatattatggacgccgacggcgaaatcaagattcccgtgcgcgacaccacttatatgaactataatattgtggggaagaatattgagaattatgatttcatgatcaacctggcacatttcaaaggccatcagatgggaggtttcggaggcgtgttgaaaaacgcaagcatcggcgtcgcctcgcggaatggcaaggcttatatccacaccaacggccagtgcgaggattacagccgtatgtgggatttcgtcactcccgagaaccaggataaatttcttgaatgcatggccaacgccgccgccgcggtacacgactatatgaaggggaaagtgatttatatcgccgtgatgaacaacatgagcatcgactgcgactgcaacggcaaccccacgccggtggcgctgcaggacatcggcatactggcctcgaccgaccctgtggcccttgaccaagcctgcatcgacctcgtgctggggcaggaacagggcgccgacaacgatgtggcctccatgcgtgagcgcatcgagagccgccacggcatccacacggttgaacacgccgagaagatcggtctcggcagccgcaaataccgactggtcagcattgaccagcaataagcctcgaactgtttgccgttgccgcgacggggcttgactgccactcggacattattgttaagggcggcgccatgccgaccacaaacgacataccgctgacgaaccccgcgccgacaggtatccgcaagcccgaaataggtcccggagctatgtcttccccgcgcactgatgcgcggggaagacgccccttttccgtaaaatgtgtatttttatctgtaatccatataactgatgacatgatatttatttgtaattttgccacttgataaatcgacacatagatatcagaatatgaaaactttactcatcaacggcagcccacacgccaggggctgcactttcacagccatgagcatcgtggccgaagaactggaaaagaatggtgtggaggctgaaatcatccatgtcggcaatatggatatacgcggctgtatcggttgcggcaggtgtggcgaaacgggacactgtgtgttcaacgatattgtgaacgacatcgcccccaagttcgagcaagccgacggcctcgtggtgggctcaccggtgtattacgcagggcccaacggcacgctgaccaacctgctggaccgccttttcttcagcacacggttcgacaagcggatgaaggcgggggccgctgtctgctcggcccggcgggccggcaccacggccacgctcgaccgtctgaacaagtatttcatgatcgccgaaatgcctgttgtgagcagccgttactggaatatggtgcacggcaactccccggaacaagtgatgcaggatgaagaagggttgcagattatgcgtgtgctggggcgcaatatggctttccttatccgcgccatcgccgccgaacgcgaccgcgccggactgccggaggccgaaccggaatggatcggcacgaattttatccgctgacaccatggatgaccgccaacagattgaggcgctctacagcgaaatgtacgaggccatgacaaccaaggacaccgctacgctcgaccgcgtccttgccgatgagtttgtgcttgtccacatgacggggatgcaccagtcgaaacgggagtatatcaatgctgttgccgacggaacgcttaattattattcggccctgcatgagctgacggacatccggattgagggtgcacacgccacgctcacaggccgcagccgagtgtcggcggctgtgttcggcggccggcgcagcacctggaggctgcagctgcgtttccagcttgtgcgccgcgacgggcgctggcagttcactgaatcgcaggcatcagtttattaaacaagaagtctatgaaagcaaaatctcttttcttcgcagcggttgtcatgtgttttgcaaccggctgcaacggacaggataaacatgaagtcaaatcaacaaacagtaaaaacatgagcaaatctatcgttatctttttctctcatgcgggcgacaactacaatgtgggcaatatcgaggtgggcaacaccaagattgtggccggctatatcagcgaactgaccggtgcggatcagttcgaaatcgtcacccacaagtatgacggcatggcctacacaccgcttatcaaccttgcgcaagaggaggccgacaacggggagctgcctccctatgagggatcggcacccgacctcggacagtatgacactgtcttcatcggcggccccgtgtggtggggcacctacccgcaggtgatgttcaccctgttcaa

SEQ ID NO: 2278 - DNA, 24053 bp, synthetic construct
  misc_feature 1..24053: note = Synthetic
  source 1..24053: mol_type = other DNA
ctttttataatctttatcaaccgatttccagtcagttgtgtactttgtaattttcccatcaaatccagtaaaagttgacaattcgaatgctattcgagaaataaaattgtcttttgttgtcaagtaatcttcttctacaaaagcggggatatctttcatactataagttaaaacttcacaatttgcggaaccagcaattccttcaattctaaagcaatctttttttacttgaacatcattgaccgctaacttaaatggaccagttaattttcgattataaaaataattaccaggaatttttgccttaaaaacactttctacttttggaatatctgattgaaaatcccaacctttaaaattgaacttaaacggagattctattatgtagtaatactctacaacacttccttcttgtaaatctggcaaagcaaatttcatttctgaccatctttcatttattttttcatagtatatattactttgctttaaatgtgtattacttgttttattatgagttattgccttaacatgaacaactttttcttcgagattatcattgttgtgtatgggtatggaaacatcagcatgttcaaatccgtttgtattaaaaagttttatttttttataaataactgttcttatataaacgtaataatttctcacaacaaaatcagaatcactatgttcataaagtacaactgcattggctgttgaatctttgtcatatacagtcattgacttttcctgaagagtaacaattccgtaattgtaatcgcttgattttttttgactaaatagtgtgaagatgttaaaaaggagtaggggtattaaaatctttttcatagagttttattagaatcgaattatttttcgactttatatttgagtaaatggtttgtaattagaaacctattgtataagttgtttgtagagacaatttataatttatttttaagtattattggttctgtttgtgaaattatcatttgcttaaataattcttttaaattttcatattcattattgtaaaaataatatttattcaaagaataattaaaagtgatttctattttattgttaatatatactatagtataattgtaatccccaccattatttggtagtgtaaccgtcttattttgtggtatcgattcaatttcgtaattctctggtaaatataatgtcagcagaaaatctacttttcttgaatagccaaaatcaacaggatattctcgtgaatccaatttaaatggattttcttctattttatctataaaaaatggatttaaatatattttatctccaacacttaaatcattttcaaaagtaattttaaattcttcaatgagaggcacttcaatttcttctaaatatttattgatatatgattttatttccaatccttcactggcgtcctcaaagtttgttagatatttttcttctgaaagatcttgtaatttctcccgtgtattgatagcattgtaaccagtattagtcacgcgtatattcccttcgaaatttccttctggatttagttcgagtatcattaccacttcctttttgctatcatttataggaataatttcttcccaataacttccgtttttaaaatccattactcttgcatctttattaagacatctgtatggtaatacaccaaaaggcaatgatttatcagtagcgtcgagaaaatatgttatgccatcaattacaacttttgcaacgatataattaaattctgaaattattggatgagtctttgttggagttccattatttctagtggaaagtaaaactaatttagcatcgatgtcaatagcatttagactgttgataagtgatatatttatacctccaacagttccaacacgttttttaaatacactttttaaatttatatctgaaaataatttataatctccattccatgaataatgattttgaatgaaatagtatgctttttttgctttttcaagatcattactctcttctttaatttcatttggaatgatattttcaaaaaaggatattctttctaattgtccaccaatgttatcatctattttaaattcttcatcaactgtttcccaagttttagtgtattttttactattaataaaatcgaaacttctatattctgaaagttcgaaagcaattcgagaaatgaaattttctcttgaagtcatgaagtcttcttcaataaatatagggacatttatcatttcatatgttagtatttcgcaatctgatgagccaattccagaaattctaaaacatttttttttaatctctgccttattttttgatagtttcaaataaccttttaagtgtctattgtaataaaaattaccagcaatttttgctttaaatacactctttatttttggaattgatgattgaaaataccagcctttaaaattatatataaaaggggattcagtggtatattcaaattcaatgatacttcctgctttaatatttggcattgtaaatttaacttcactccaacgatctgatatcctagttgtatatatgtttttatgatctaatggtgttatatcatcattattaatagtcgtagcttttattttttttaatttttcttttttgttgtcattatgatatagtggaatagtgatggttgcatgattatttccatccttattaaaaattttaatctttttataaattgtagtttttaatttatatcctccgcctttataaataaattttgtaaaaccttgttcatagagaactactgcattagcagttgaatctttatcataaaacttcatagatttttcttctggagtaactaatccgaatttataatctgtttcttgtttttgactaaatatttgtaatgctattaaaaggagtaggggtattaaaatctttttcatagagttttattagaatcgaattattttttcgactttatgtttgagtaaatggtttttaatgatgaatctgttatgtgagttgtttcctaaggttgatactaatgattttaaaatttctaagttatttatttgatattctaaatctacatagcaatagcctaaaagtttattatcttcaattaaaataactgacttttcattgatatttctacctttatcaatcaataagagattgttattgctaaatttaattttagccaccttttttggatagtaataattgaattttggtttatttaataagacttcattatggtatttcaaattacttattagttcgttacctgtattttcgtaactcacattattaagtatttcatgaagtaattttacttttttagaagtttttaaaaataatttatttacactttttttaatatcatttcctttaccaatgtagagaatatttcctttatcatcatgaacataatacaaaccaaggcttgatggtagtgaatctaaaatcaattgaaattttggtgccaattcacgatcaataccatttttaatattactttttatgataattttttttgagtctttatcaattaacatcttaaaaagtttgactgtagcaagagcatcaccttctgcacgatgtcgattggatacaggaatgcataaggttttacataatttacctaaactataagattttaaatcaggtattaattccttagtcaattcaacagtacaaagtgtttttctttcaaaatcataaccaagtcttcgaaattctgtgcgaagtattctatagtcaaaagttgcattatgagcgacaattatagagtcagttgttagttcaattattcgcttagcaatgtcataaaactttggtgcacttttgagcattgtagcatttataccagtaagtctttcaacaaaaggttgaatatctctttctggattaaccaaagtaattaactgatcaactattttatgaccgtcatatttgtagatagcaatctcagtaattccttcttcgttatactttccgcctgtagtttctatgtctaaaattgcgtacaatttctctttctagtgttttttttataaaatgttattgggataataatttagggatggtagcaattgattattgtaatgtactgtaaaaataataaaattatttgtattatcgagtaccaaatattgcactaccaactcttatcatattactaccttcatttattgcagtagtataatctccactcatgcccattgatagaacctttatatttgaattatttgatttaatatggtcaaaaaatgttttgagtgatttaaactcttttgttatttggttaatatcggatgtaaaacttgccattcccataaatccaataacattgatgttttttaactgattatattcttctgaagttataatttcttcaacttctttctgaattagaccaaattttgtttcttcagttgcaattttaacttgtaataggcagttaataattcggttatgcttttttgcttgcttattaatttcttttaaagttttaaaactatcaactccatgaattagatctacaaaatgagccatatatttgactttattactttgtaaatgtcctatcatatgccattgaatatctttaggtaattgatggtgtttttcaaccatttcttgtattttattctctccaaaaatccgttgaccagcattgtaagcatctaaaatatctgaaaccggttttgttttagaaactgcaacaagcgatacattttctggtaagtttaattttattttttgcaagttctcagcaatattcatatttaaaattaattaaaattcatataaagttaaggcgcttcttagtttaggttcaatatacgtactttttggcggcatttttaaattggcatcggctattgttttcaattgatttactgatgctggaaacaagccaaatgatactttaaacttaccagagtcaacttctgatttaagtttgttatctaaattaatagcaggtttatattcaattttattactgttttttaagtttttaatacctaaaattggttttaaaactgtatcaaataataattgagcatctaagtcacttaatggattttcaattttatacgtacttttctttagatataaagaataatagtctccatctaaatacatactaaaatgatgttttttagaaggtgtgtataccctttgaccaagattttttattttgaaggttttatttagtttatctaaaaactcatctttagagagcccatttaaatcttttataaatcgattgaaagatgatattttaagactagattcgggaattaaataactcataaaaaaattataatcttccaatccagtatgatttggattgagtgattttaactcttggctaagtaaaaatgaagatgcagacctatgatgaccatcagcaatatatatagacttcattttttgaaattcttttttaattacatcaatatcatctttatttgtaattaaccataaaaaattcgaattattttggcttgaattaaaagaatattcaggttcggttttttgatacacattcattatttgtgaaatagcatcattatcagggtaggtaagtagtactggttcagcattaaacccaactgattttaaataatttttgaatagattttttctactttttatagtgttttcgtgctttttgattacatcatttttatagtcgtctgttgatgtagcagcaataattccacagtaggtaattccgttttttatttttttatagatatagaaacaagaaatttcttctcgaagaaatattttttgttctttaaactttaaataattacccttaacctcattaaatctttgttcagcagttaaatcaccatcaatatctctaaatgtgggttttattatattgagaaaggaatatgggttggtagccaaaatttcatctacttcttcattagtataaaaatcaaaagagcgggacgaaactaatgagacaatgtctttattagcacgtaccgctctaaatggttttatgtttgccaaaatttattttaaaattgaaataatttgatcagctaattctgatccaattctatcttgtgcttcggcagttgctgctccaatatgcggagacaatgataaagaaggattcattaataattgtatttctggtgttggttcattttcaaaaacgtctaatgctgcttttgaaactttaccattgttaattgcttcaacaagtgctacttcatcaacaactccgccacgtgcggcatttactaaaattgcaccatctttcattaaatcaaattcaggttttccaattacatattctttttgagcaggaacgtgtagtgtaataaaatcagcttgttttaaaacttcttcttttgaaatagtttcaatttcaaaatttacagtttgaccatcaaaaaattctaattcaagatttacactgtccataaaagggtcaaaagcaacaactttcataccagcacctaaagcaacttttgctgtagcttgaccaatacgtccaatacctaaaaccccaagagttttaccttttaactcaacacctttagcatatgcttttttcaatcctttgaagtttgaatcaccttcaagtggcatatctctatttgcattgtttaaaaaacgagccattccgtataaatgaccaaaaacaagctcggcaacagagtgagaagaagcagcaggagtattaataacttttaatcctttttcacgagcatattctacatcaatattatccataccaacaccaccacgaccaataatctttaatgatggacaaccatcaataatatcagttctaactttagtagcacttcttacaagtagtactgtaatttcatttttattgatataatctactaattggttttgagctacggttgttaaaatcacttcaaaaccagcattttctaatgcagtaactccgctttgagcgataccgtcgtttgctaatactttcattataatatttttattatttatttaattttttcattacatcaactaatgcctgaacgctttcaattggcattgcattataaatactagctctatacccaccaactgatctatgcccatttataccacttaagccagcctctttagctagtgaatcaaataattctttctcactttcatcggctaatgtgaaagtgacattcattaacgaacgatcttctttatttgcaacaccattaaaatgcggattattatcaatctcgttatatagcaatgctgctttttcttcatttattttttcaattgcatcaattcctccaagagctttaacccattcaagagtaagcattgatgtgtagattgcaaatactggtggagtgttgaacatactatcttttgaagcatgtacttggtaatctaacattgaaggtatttgtcttccagattttcctaatgcttcatctttaacaatgactaatactgttccagcaggtcccatatttttttgagcaccagcataaattaaatcgaattttgaaacatcaatttttcttgaaaatatatcagaactcatatcacataccaacggaacatttgttgttggaaattctttgatttgagttccaaaaatagtattgttactggttaaatgcagataacttgcatcagcaggaatttcatatcctttaggaatgtatgtgtgatttttatctttgcttgatgctacaatttcaacttcaccaaataacttagcttctttcaatgcttttgcactccaggcaccagtgtctagataagcagctttaccatcaacttttaataagttgtatgctactgctaaaaattgtgtacttgcaccaccttgtaagaacaatacggaataaccatcaggaacacttagaagttctttaactagattttgtgctttttccatgattgaaacaaaatctgcacttctgtgagaaatttcaattaatgaaaggccagaatcatttaaatttaatactgcgtctgcagctttttttataacttcttgagctaatatacttggacctgcgctaaaattgtgttttttcattttttggttaaatttaagtgacaaagttggaaaatttatcacgaataaacacaattaaaatgacaaattattcacgatgtttttaacagatattaaaaatgtattgcctatttaattagaatattaaaaacctagtattttctacgtattattacttatgtttttttaatgtattggtgctaataatttactgaagaattactaatttaattcccttgttcatgtcaattctagaataaatttaataatatctacatcatctgcatagtcccataaattaggggtttgtgttttaccaaaattaactttagatggtaggtctaaattactgactatacattgaattttatcagtatcgttctttagtaattgtaacaattgcgcttcagaatcataatactcataaaaaacggttgctataggtgatgagtaactttcatcttctttaagcattaaaaaaccattttcttgtaatttaaataaactcattaaatatacggctttattatagtcgtaattattttgatactttttgtagtttattatttcgttaaaattatatagtgccttaaataaattatcaaaatcatattctcttggaactaataatttagaaacattgcgacaacccaaaccaaaatatctaaatatatcttcacctaaactttctaattcttcatgagtttcacttcctgttaatatggcaactgaatttctattttttcttataatacttgggtattttccaaaataatattcaaaatatctcgcagtattattactcccagtagctattactgcatcaaagtttgataattctttatcagtgaaagtaattttacccttaaaacttggttcaacatattctaaatatttggcaattaagggtagaaaatgcttgtcatttgaagatagtttagcaatgatattatttcctgttattagcacagataaaaagtcatgaaatccaactaatggaatatttccagccataattacagcaatagtttttggctcaccatcggtaatattataatgagatatccacttttctaaattttcttttgttagacttttaccccaattttctagtgaaaacaagacattttcatcattaaaccacccgttgtattcctttgctcgcttaatttgagttttaaaaatatcaaagaaaatatcattgtgtaaaatattctctaccttttttgtagacttttcagaaaattggcataaaaattgccctaaatttacaaatgcggataatcgtttgtctaatgacatattttaaaacttttactgtatttttgtagcaaatttaatgtaaaaaaagaaatggcaataataataacagatgaatgtatcaattgtggggcttgtgaaccagaatgtccaaataacgctatctatgaaggtgcagaagattggacatatgctgagggaacagaactaacaggaaacgtagttttgccaaatggtaatgaggtaaatgccgatgaggcacaagaaccagttgatgatgaagtgtattttatagtacctgataaatgtactgagtgtttaggatttcatgaagaaccacaatgtgcggcagtttgcccagtagattgttgtgttccagatgaagatcacgtagaaacagaagatgaattattggctaaaaaagcttttatgcacgatgaataaaatagttatgtagtccttcagactaccgctgaactttaaaaatctcaaaacttatgttttgagatttttttttatatttataaaaaattgctaggtattttttaattctaaagaaatactttaatcaaaaatagataaaataaaaaaagcgattcgataagaaccgctttaaatgttttcacaacggaataatccttattgtgaattgctttcaaaattgtgtaacaaatatatacaaaaatattttatacgcaatttttatatatatatacaaaaaaaataataaatatgaagagaattttaggattggatttagggactgcttcaattggatgggctttagtaaatgaatcagaaaatgaaaaagaaaaatctgaaataattaaattaggtgttagagttaacccattaactacagatgaacaaaccgattttgaaaaaggaagaccgttatcggtaaatgcagatagaacattaaaacgtggagcaagaagaaatttacaacgctttaaacaacgaagaaaaaatctaattgagattcttattaaaaaaggtttcatcactaatatatcattgttaactgagattggaagtaatacaacttatcaaacattagaattaagggcaaaatctgtaaaagaaaagatagagaaagaagaatttgcaagagttttattaaccattaataaaaaaagaggttataaaagtagtagaaaggctaaaaacgatgaagaaggaagtttaatagatgggatgtctgttgctaaagagttatatgataataatcttactgtagggcaatatgtgtatcaattattagaaaaaggagggaagtatattccagatttttatcgttcagatttacaaaatgagtttgatgtaatttggaactttcaaaaagaattttatccaaatattttaacaggtgaattgtataaaaaacttcaaggtcaaggacagcaaaatagtagaaagttatttttagcaattcatcaaatttatacagcagaaaataaaggaaaacgagacactgtaaaaaaacaacattataaatggagaaatgacgctattaatacacagttactaattgaagaagttgcttatgttttagtagaaattaataataatctaaataaatcaagtggttatttaggagcaattagcgatagaagtaaagaactatattttaataaagaaactgttggtgaaaatttatataaacaaattcaagaaaacccacaaacaagtttaaaaaaccaagtgttttataggcaggattatttagatgaatttgaacaaatatgggaaactcaagccaaattttattcagaattaacaaaagaattaaaagaagaagtaagagatgttgtaattttttatcaacgtaaattaaaatcacaaaaacatttaatttctgaatgtgagtttgaaaagcatcataaagcaataccaaaatcgtctccattatttcaagaatttaaaatttggcaaattttaaataatatagagtttaaacataaaaaaacaaaagaacttaaaatactaagtgaagaactaaaagaaactcttttcgaagaattaaacattagaggaaattttacttcagatgcagtattgaaatttgtaaaattagataaaaaagaatgggaactaaattacaaaaaaggtattgaaggtaatcgtacaaatgaggttttatacaatgtatatcaaaaaattgcagaatatgaaggttatggttttgattggtcaaaaaaatcagcagtagaaataaaagaagaattaaatacaattttttccgaaataggaatcaactctaaaattttagattttaatcctgaaataagtggaaatgattttgataagcaagaaagttatcaattatggcatttactatattccgcagaagaagatggatttttgaagcagaaattacaagataaatatggtttcaaatcagaatatgccaatatgttggctaacgtttcttttcaatcggattatggaagtttaagtgcaagagctattaaaaagatacttcctaatttaattgcaggacatgaattttcggaagcttgtagtttgtcaggatataatcattctaattcattaaccaaagaagaattagcaaatagaccattaaaaggtaagttagaattacttaaaaagaatagtctaagaaatcctgttgttgaaaagattttaaatcaaatggttaatttggttaatcaagtaattgaatcctatggagaaatagatgaagtacgaattgaattagctcgtgaattaaaaaaatctgcacaagaacgtgcattaatgactacgaatatcaatgcttctaaaactaaatatgaaagttttaggaagttacttcaaaaagattttggtattaaaaatccaactcgtaatgacattattaagtatcgtttatatgaagaattaaaagcaaataaatatcacactatttacactaataaatatatacctcgagataaattattttcaaaagaaatagatattgaacatattattccaaaagcaaaactatttgatgattcattttcaaataaaacattggctttcagaaaaccgaatcaagataaaggaaacatgacagctattgattatatactttcttatcagagtaaagatatagataactataaatcaagaattgagaatctatttaaaaatggaaaaggggatattagtaaagcaaaacgaaataaattattaatggaagaaaaagatattccagatggttttattgatagagatttacgaaatagtcaatacatagcaaaaaaagcaaaacaattattagaagaagttatacgaacagtaaacactacaacaggaagtgttactaacaaattacgtgatgactggggcttaattaatgtgatgcaagaattaaatatgccaaaattcaaagcgattgatgaaagtttaattgaacaaatagagaaaaaagacggaacgtttaaaacaagaattaaagattggagtaaacgaaatgaccatcgtcaccatgctatggatgctttaactgttgcttttacaagatacaatcacattcagtaccttaataatttaaatgcaaaatctgataaaaaaggagcaatttatggtattcaagaattagaaacttatgttaattccaaaggcaaacgaaaatttattaagccaatgcataattttagagaagaagccaaaaaacatattgaagatattttaatttcatttaaagcaaaaaataaagttgtaaccaaaaatattaataagattaaatcaaaagatggttttattaaaaaagtacagttaacaccaagagggcaattacataaagaaacagtttatggaaaaataaatgaagttgttgttaaagaagaaaaaattaacgcaaagtttgatttagaaaaaattaataaagttacaaaacctatttatcgtaatgctttacttaaacgattacaagagtttaatggagagccaaaaaaagcatttacaggaaaaaattcgttgagtaaaaatccaatttatttagatgtagcacaaacaaaaacacttcctgaaagtgttaaagttcaattttttgaagaaaattatactattagaaaagaaatatcacctgatttaaaaatagataaaataattgataaaggtattcagcgtattttattgaagcgtttagatgaatttaatggtaaaccaaaagaagcattttcaaacttagaaaaaaatccaatttggttaaataaagaaaaaggtattgcgataaaacgtgttaaaataaaaggggtaaaaaatgttgagtctttgcataataagagagaccatttaggaaatgaaattttacaaaaagggaagagtgctccaaatgattatgtaagtacaggaaataatcatcatgtcgctatataccaagataaaaatggtaaacttcaagaaaaagtagtatctttttatgaagcagtagcacgtgtaaacaataaattaccgataatagaccaagatttcaataaggatttgggttggaaatttttatttacaatgaaacaaaatgaaatgtttgtatttccttcagaagattttaaacctcttgaaactgatttaatggataagaagaataactcaaaaataagtaaaaacttatttagagttcagaagttaggaaacaaagattatacctttaggcatcatttagaaacaaaaattgaagatataaaaaagttaagagatttcacttatataagaaaaagaaacccagaatcaataaaaaatattattaaagttagaattaatcatttaggtaatattgttcacgtaggagaatattaatatgtaaaaaaataatatgattaaaagaaccctatttttcactaatccagcatacttaagtactaaaaacaatcaattggttgtcaactatcccgatgatgataaaccaaccaaaacagtacctattgaagatattggcatgttggttttagaaaatcaacaaataacagttaccaatggtttaatttctaaactggttaaaaataaagcagcaataatcaattgtgattcctttcatttaccaataagtctattacaacctttgataggtcatagtgaacagactgaacgaattaaacatcaattaaatgctagtattcccctaaaaaagaatttatggcaacagactatatctgccaaaatttataatcaggctcagtttcttgaagaaaaaaacattccaaatcgtaaaatgtataaatgggctacagaagtaaaaagtggtgatattgaaaatcatgagagtagagccgcagtttattactggcaacacatattgggaatagaaaattttactagagctcaaaaagaagtcgcaccaaacaatttattgaattatggatatgctattttaagagctattaccgcacgagcattagtaagtagtggtatgttgccaagtgtaggtatttttcatcataataaatacaacgctttttgccttgccgatgatattatggagccctatcgcatatatgttgatgttttggtagatactattgttgcttcagaagagaattatgaagaattaactactcagttaaaaatgagtttgttgcaattgcctacaatggatgttgtaattgatggtaataaaagtccgttgatggttgcaatgagtagaacaaccaatagtttatacgaatgctttgcaggaataagtcgtaaaattttatatcctgtatattcatttaaataaaatgttattcctgcgaaggcaggaatcttttttctttaaaataaatcaaatggacaatcatttttcacgtttaaatcaatatagaagtatgtgggttttagtattttttgatttaccaaccgaaacaaaaaaagatagaagagccgcaactaggtttagaaaatctttattggatgatggttttacgatgtttcaattttctatttatatgcgtttttgtgcaagtagagaaaatgctgatgtacatacaaagcgtgtaaaagtgagtttaccagaattaggaaaagtaggagtaatgcaaataacagataaacaatttggaatgatgcaattattttacggacaaaaacctgctgaattggaaaaaccttctcaacaattggaattattttaattaataatagtaataaaatattaattcgaggtattcaagaacagtctttttttcgtgataaaataaatttaatactatttgaaatgtcagttcgagcggacttgagaacactattttatgatgaataataatattgaaatatcagttaatgaggagtcgagtcgagaatgctattttttgatgtataataatattgaaatgtcagttcgagcggagtcgagaacactattaggaataataaaccataactaattggtagtaattcatttgaacacttattaaaaatccaatcctgatactttacttaattcacagtatatcagttttttagatttaagtatactgcgaatactaagtaaaaatacaattttgaaagcaattcacaaccagagggttatagaactttagagcgacaaaactgcgaatactaagtaaaaatacaattttgaaagcaattcacaacttttttgtccgcataaaatcaataaatggactgcgaatactaagtaaaaatacaattttgaaagcaattcacaacttcatccaagggcaatgaaaaaggtagtgactgcgaatactaagtaaaaatacaattttgaaagcaattcacaacgaagaaacatgatggcctttgtaaaaactactgcgaatactaagtaaaaatacaattttgaaagcaattcacaacacatattcaataattactgctccaaattctactgcgaatactaagtaaaaatacaattttgaaagcaattcacaacgataaagaattagcacaaattgatgaaaaaactgcgaatactaagtaaaaatacaattttgaaagcaattcacaacttgtcatgcgtgtagttattgtctccacttactgcgaatactaagtaaaaatacaattttgaaagcaattcacaactgttctgcaaatctaattgccctattaatactgcgaatactaagtaaaaatacaattttgaaagcaattcacaacgatgcgttaatttctgtttcattattatttactgcgaatactaagtaaaaatacaattttgaaagcaattcacaacccaaacagtacaggagactctaattttacactgcgaatactaagtaaaaatacaattttgaaagcaattcacaacgcaccaagaactatcactatttacagttcactgcgaatactaagtaaaaatacaattttgaaagcaattcacaacagagctgtcctagaatacccctgtccgtttactgcgaatactaagtaaaaatacaattttgaaagcaattcacaacgaacctattaatataaataaagttgctgtaactgcgaatactaagtaaaaatacaattttgaaagcaattcacaacctacttgtgatatcataatatccgtcgttgactgcgaatactaagtaaaaatacaattttgaaagcaattcacaacatgccaccgcagccataattgcagtagtatactgcgaatactaagtaaaaatacaattttgaaagcaattcacaactactatatggcttatatttttattccaataactgcgaatactaagtaaaaatacaattttgaaagcaattcacaacacggctcaaacacgtaacaattatctatttactgcgaatactaagtaaaaatacaattttgaaagcaattcacaacgattcgatcgcgtgtttcacttctttcatactgcgaatactaagtaaaaatacaattttgaaagcaattcacaacggataaagtaaacggaacaactgattttgactgcgaatactaagtaaaaatacaattttgaaagcaattcacaacgcctataaaatatcttactttcaacaagcaactgcgaatactaagtaaaaatacaattttgaaagcaattcacaacatgtcgtcaattgggtcttctccatcttcactgcgaatactaagtaaaaatacaattttgaaagcaattcacaacctgctgccgaaagcacagataaaaaagtacactgcgaatactaagtaaaaatacaattttgaaagcaattcacaacaataatagatgtttatacaactcatcaataactgcgaatactaagtaaaaatacaattttgaaagcaattcacaacttgttaatttttgttactggtgtcatccttactgcgaatactaagtaaaaatacaattttgaaagcaattcacaacaagccatttattgtctaaaaatatttttggactgcgaatactaagtaaaaatacaattttgaaagcaattcacaactaaaatcaattcgattttaactttgtccatactgcgaatactaagtaaaaatacaattttgaaagcaattcacaacacgcacgttctattttagttttaacaatccactgcgaatactaagtaaaaatacaattttgaaagcaattcacaacttgttaatttttgttactggtgtcatccttactgcgaatactaagtaaaaatacaattttgaaagcaattcacaacaagccatttattgtctaaaaatatttttggactgcgaatactaagtaaaaatacaattttgaaagcaattcacaacgaaaaacgtgctgatggtcaaactgttggtactgcgaatactaagtaaaaatacaattttgaaagcaattcacaactacggtcaaactttaatgtacgattcttgcactgcgaatactaagtaaaaatacaattttgaaagcaattcacaacttatagagaatagtatttatgatgaagataactgcgaatactaagtaaaaatacaattttgaaagcaattcacaactctcgtattgcaagaaataatttacatactactgcgaatactaagtaaaaatacaattttgaaagcaattcacaacttaaaaggaatttttaaagtaaatgaaatactgcgaatactaagtaaaaatacaattttgaaagcaattcacaacggttattttaatatttattttaattcttacactgcgaatactaagtaaaaatacaattttgaaaagcaattcacaacatgaacagctagatacagcattaaacaagatttcgagtattttataaaaataatattgaaaattaatttaatttttgtaattttgaaatattaaaagcacaatttcttcgactgacggcaatctatctgaaccgtctgaaattgtgcttttttatatttttaaaactaatgttgatttattcaatattgcattagtgtttgttttataaaaattaaaaacccatcgatatttaaatattgatgggtttttgagtatctatagtttgttatttttagaaactaaagtttaaacgagagaataagtacatcccatcagatcccatttgtactgaatctgcaaaaccaccttgatctgtccaaccatcaaattgtggagtagggtatacgttaaacagattatttgcacctactgttaattttaatttgtcagtaaattgataacctacattaaaatctgtagttaatactgcttcataaacgtctgtagctattgggtataaagcatctgcttctgcttgagtagttgcaggagtatctacccattgaaaatcttgaagttctacttcgctaaattgtgttaaggttactgaggcatcaaatttatctttagaatatcctaagtttaatccaaatttatagtcaggagcagcagcttctaaataagcctgagaaaaaggtccaaagaatgtaaattcatttaaatttccactgttaatatttttaatctcaagatcattgaaatttcctattaaacctgctctaatcttactatcatctccaagagttgtttcataatttaaaacaatgtcaagtccagtagttttagtatcaacaccatttgcaaagaattgtgctgcatcaacatttaatgggcctaaaattgcttggtcagtaaaattatcagttaaaataattctatcatcaacagaaatagtatatgcatctacagttgctgtaaatccaccttttttataggtaaaacctatactcgcattggttgctttttcttctgacaattgaccaattccaaaggcttgagtaactgtactattatttgccgataataatgaaggtacagattctccagcaacaatatttgtaaatattaaattgtaataaagttgtgcaagtgaaggcgctctaaatcctgtagaaacagaacctctaaatgctaaatcatcattaacttttaatctacttgctaatttgaaattaaatgtgtttccaaaatcactataatcttcataacgaatagcacctgcaagcataaaactttcacttacgtttaattctgtatcaaaataaaggccataatttgttctacttctatcaacttcgtttgcaggactatacccaggaaaaccttgtgaacctccaggtaaatcatcaccatttgaatcaaatgcgacagtttgtgtagcaggatttgtaattggaataccatttacatcatacaatgcatatgatgctacttcacctgcaaaaattccaaagttttcagttctatattccatcccaaaggctaaatttaaacctgaagcaacatcttctaaatatttagtaaaatctaaacctgttgtgttttgcgataaataatgtccaccagcatcaaaatcagttggagaagcattttgcatagaagcattattactaccttttatataataatggaaaaagttttttccataagtgttgttaaagtcaacattccatccattagccatttcatgtcttacacctgctgaaactgaaacatctgtaatttgtgatgtaattcgaggtgtaaatccatttgggtaaatacttggtacagatctgttatcaccatcttcaaaactatctcttgaaaaagcatttgcattagtatctctaaagtttcttcctccaaaagcataaatttcagtattatcatcaacaggtacagcggcatttatcataaaattgaatccgtcaactcctgcactaccatagccttttctccaagaaaaactaggcctcagtgtattttctttagataaaagttctgttgtaaagtttataaaaccaccattttttccaatttcaacaccatagtttaggtctatttgtacagtttctccatcaaatgatttgtctttaccatctaatctgtttttaccttctatgttgaataattctggatcccaaccatcttgagtatcaaaaatttgttgtgcaaaatctccgcctacttttgtactatacgcaccataagtaattccacctgttaacccatcagttttatcttttaaaacgatgtttattacacctgctattgcatctgaaccatattgagcagaagcaccatctcttaaaacttcaattcttttaatagaagcagcaggaattgcatttaaatcagtaccagaatttccacgtcctctagttccaaaaatattaactaatgaagattgatgtcttcgttttccattaattagaacaagtgtttgatctggaccaagtcctcttaatgaagcaggaacgatatgatcggcaccatcagaacccgattgttttgttgcgttaaatgaaggtgcagcatattgtaaaatatcattaacttcaactttaccagtgtttgctgctatttcagaaacgtcaattacgtcaaccggaactggagtgtcaattgcagttcttttaggacttctcgaacctacaagtacaatttcatcaaggcttacaccttcttctagtataacgtttatggttgattgcccatcaacacttacttctttttccgaaaatccaacaaaactaaaaactaatacagcctcagaatttacatcaatggaatattttccttcaaaatctgttgtaactccgttttctgtgcctttttcaataacattaactccaggcaatgaagatcctgagtcatctgtaactgttcctgtaacagtttggctagtggccgaaattgttaaaagaaaaaataaaataattgagtaaaaatgtttcatatattattaatttgataattatatatacaaatgtatgtagaatttgataatgattataaaattttatcaataaaaatacaaatggattgaaatgttaatttagtaatttatatattttttttaatccttgtgaagccatatcagaaattatattaagattatcgaattgatttttattaatatttggtttaggatcaataaaatatattggaatatctttttgtgcaaaatgaattaaattcgctgcaggataaacttgcatagacgtaccaataataattaaaatatcagcggtttgagttatttcttctgcaatggtcaaattaggtacttcttcaccaaaccatactatatgtggtcttaattgagaattacattcacagtgatctccaatattaaggtctttatcccaattgtaaatcaaatattcatcaatagtacttctaacttttcttaattcgccatgtaaatgagtaacttttgtacttcctgaccgctcatgtaaatcatcaacattttgagtaatgatattaacatcatatttttcttctaatttactcaataataggtgtgcatcattaggtttaacttgaagtaattgttttcttcgttgattataaaaatctaagactaattctggatttttataccaaccttgtggagtcgctacatcttgaatattatggccttcccataatccatttgaatctctaaaagtttttatcccagattcagcgcttattccagcaccagttaataccacaattctttttttatgaagcatattgaattattttccttgataaaattacaattatttataaaaggatgcagtatatttgcacctcaaaatttttatcaaatgaaagcaggaattgtaggattgcctaatgttggaaaatcaactttatttaattgtttatcaaatgcaaaagcacaaagtgcaaattttccattttgtactattgaaccaaatattggtgtggtaaatgtaccagatttacgtttagaaaaattagaagaattggtgaatcccgaaaaagttgttcctgcaactgtagaaatagttgatattgcaggattggttaaaggggcaagtaaaggagaaggattaggaaataaatttcttggtaatattcgtgaaactgatgctattattcatgtattacgttgtttcgataatgataatattattcatgttgataatagtgttgatcctgtaagagataaagaaactattgatgttgaattacaaataaaagatttagaatcaatacaaaagagacttgaaaaggttaaaaaagcagcgagaactggagataagaatgctcaaaaagagttggatgtattaactaaagtagttaatggtttagaaggattcaattctgtaagatcaatagatttaagagaggatgatagagaagagttcattaaacctttgcaattattaacagataagccaatattatatgtttgtaatgtagatgagtcatcagctgcaaaaggtaatacttatgtagatgcagttcgtgaagctgtaaaaaatgaaaatgcagaagttattgttttggcagtggcaacagaagcagatattattgagttagaagaatatgaagaacgacaaatgtttttagaggatttaggtttggaagaaccaggagcatcagttttaattcgtgcagcatacaaattattaaacttacaaacctattttactgcaggtgttaaagaagttcgtgcttggacaattaatattggagatacagctccacaagcagcaggagtgattcatactgattttgaaaaaggttttatccgtgccgaagtaattaaatatgacgattttgttcattatggaagtgaagtaaaagtacgtgaagcaggaaaactaggaattgagggaaaagaatatattgttcaagacggagatatgatgaacttccgttttaatgtataatcacaatttgaacatcgtaatttcttagaattccaataattaaataattcttttaggattacatttgaatatgaaatatcctaaaatattttcttctggggttttaattgcaattgtaggcatcgttatgttttctgcaaaagcgataatggtaaaattagcatatcaatatgaagtgagttcaattcatttattattgtttagaatgctcttttcgctacctttttatattgttattctaatttattttaaacctgtaaaaccaaataaaatagacaagaaagactacgtttggcttttcttttttggttttgtaggttattatttggctagttattttgattttttaggattgcaatatattaaagcgggtttagagcgaatcatactttttgtgtatccaactttagtaataataatttcaaaaatatttttaaaaactaaaataactacacagcaaataatagcaatattgattacctattttggagttgtcattacattttggggcgaaatacaattagaaagtaataatactattttaggtggttcattaatctttttaagtgcattaacctatgctgcatatttagttggaagtggttggttgattccaaaatttggagttatagtttttactgcatatgctatgatagtttcatcgttttgtgtaattgtacattactttatttttgatagagaaaatatttt

SEQ ID NO: 2279 - DNA, 24053 bp, synthetic construct
  misc_feature 1..24053: note = Synthetic
  source 1..24053: mol_type = other DNA
tatcggggtgggcacaggtgtcgtttgtgggcggctcacacgaggtttacgacttgattccggagaaaaatacgggtttgaaccatatttatgtgctctacaacacgcagggcgtgggtatgcagtatcgggcgacgagcgatacgcctgtggtgtggtatagttttggtagccaaggtgggggatatgccgaggaaatttcgggtatcactaccgatgggcgcaccactacgcttgcgcaagtgattgccgggcagggctatatcatagaggaaggcactaatcgcacctacgtttgggtggtgaattatgccgaccactacttgcgcttcaacagcatttctgcccttgcgccagaggattgtggcactgccacgctgagcattgatggatccgccgacgaaatatcatacttcaccattactggtgtgagaagggtgctgagccgtgaaatcaagttgaatttccgtacgctcgtatgggacgaaaccgccgttcaatggacacaggtggataccacctacgtgctcacatcggtaaaaccacagttggtgattaccgctccgctgtgcaacaccacattccacatcagtggcgaccgtttcctcaaattttggaacgaagaagtggaaatggagagcgacacttacaccaccacagccgtggatgttcgcaccactgccatcaagcaaaagcgcaacgacggcatcgatgagagcgacgacgaggacagcagtgaaggcggcgaaggtggcgaaaacaccgatgaaagcgaggaattgggcggttcggcacctgccacggtgacatttaaggcgtattgcaccgacgccgttgaccacaaagagtggcaaaaggcactcgactctgattttcagagcatagaggcgcgcttcaacgatgacgaagtggagcaaaccttcaacaccacaggcacatcgtattggcgctttgtgggcacgaacctgcaaggcggttgcgaggcatacggccccacctacactgtgcacattggcgaaagcgaactggtttgcccaaatgtgttctctcctggttcaacagagggcgtgggcgacatttggaaagtgaagcacaagtcgattgtggaatttcactgcacaatcttcaacacttggggcaacaagatatttgaatttagcaaccccgacgacggttgggacggcaaatatcgcggcaaattggtgagcacaggcgtgtattactacgtgattcaagcacgaggtgccgacgacaaagtgtataagctcagcggcgacatcaacattctccgcttccgcaaaaatgccctgaaaagcggcactaccgtagtggaataaagaacgatttgaaataaacgtaaaacaaggctgtgccgctattgatggtggcacagcttttgtttttgaaaaaagcggatgggggcttggtatgattggagcactctgagcactctgagcactcggagagcttcgctctaacatccaacctctaatttccaacctctaatttccaacctctaatttccaacctctaatttctattttctaacatctaatttctgacctctaatttctgatttctgacttctttttgtaactttgcaaattatgattttcaacgggaaagaaactgaatgtgtgagtgtgcttggcgcacgtgtccacaatctgaaaaacatagatgtggatattccacactacaagctcaccgtgattacggggctgagtggtagtggaaaatcgtcgttagcgttcgacactatttttgccgaaggacaacgccgatatttggaaacattttctgcgtacgcgcgaaatatgctcggtgtgctcgaacgccctgatgttgacaagattacggggcttagcccagtgatttcgatagggcagaaaaccaccaacaaaaatcctcgctccaccgtaggcacctctactgaggtttacgactatttgcgactgctttttgcgcgtgccgccgatgccgtgagctacacctctggtgagcgtatggtgaaatactccgttgaaaagatactttcgatgattctcgacaagtacgacggcaagaaaatttacattctggcgccacttgtgaagaatcgcaaaggccactacaaagacctttttgagcaatataggaagaagggctatatcaacgtgcgtatcgatggcgaattgcgtgaaattacattcggcatgaagctcgaccgctacaagaatcacactgtggaactggtgatcgaccgcttgaaggtggcacgaaaggacgaaaagcgccttaaagaaaccgtggaactggcgttcaggcagggcaaagaccaactgcttatcctcgacgccgccaccgatgaaatatcctattacagcaagacgctgatggacccatctacggggctttcgtacctcgatccggctccgcacaacttctcgttcaactcgccacagggcgcttgccataagtgcaagggactgggctatgtgaatctcgttgaccgtgagaaaatcatgcccgacatgtcgctctccatcaaagaagggggagtgctgcctttggggaaatataaaaactcgctggtgttttggcagattgccgccatttgtgaaaaatatggctgcgacatcaacacgccattgtcggaacttccagaagaagccctcgacgacatcatgaacggcaccgacgaacggctcaacatcaaaaccgaaacgctgagcaccaacaactatttcctcacctacgatggactggtaaagtatatcgaacttcagcaagacgaatcggcaggctcaaaggctcagaaatgggcagggcagttctattcgcgttgcgtatgcccggaatgtggtggcgcgcgcttgaacaaggaggctttgcatttcttcatcaacggcaaaaacattgcgcagcttgcgagtatggacatcagcgaactgcgcgactggctcggcgatttgcacaaccacatggaaccgaaaaagtggaaaattgccgatgaaatcgtgaaggaaatccttagccgactgaattttatgcttgatgtgggtttggattatgtgtcgctcaaccgctcgtcggcttcgctatcaggtggtgaaagccagcgcatccgtttggccactcaaataggctcgcaactggtgaatgtgctttacattctcgacgagccgagcattggtctgcatcagcgcgacagcgaacgcctcatagcgtcgctgaaaaaactgcgcgacgagggcaacaccgtgatagtggtggagcacgacaaagacatgatgctcaatgccgattatattgtggatataggcccaaaagcggggcgtagaggcggtaatgtggtgtttgcgggcactcctaagcaaatgctcaaagaaagcacgctcaccgccgattatttgagcggattgaagaagatagaaattccgaaggtgcgccgttcgggcaatggcgacgtgataaggcttcgtggctgcaatggacacaacctcaagaatgtggacgtggactttcctttgggcacgtttatttgcgtgacaggcgtatcgggcagtggtaaatcgtcgctggtcaacggcacacttcagcccatcatcagccaaaagctgtatcgctcgctcaccgagccgctcccttacaagagcatcgagggcttggagtatatcgacaaggtggtgaccgttgaccagtcgccactgggccgcacgccccgctccaatccagccacctacacaggcgtgtttaccgacattcgcaatttgtttgtgaacctgccagagtcgaagattcgtggctacaagccaggacgcttctcatttaacgccaagggcggcagatgtgaggtttgtaatggaaatggctataaaacggtggaaatgaattttttgcccgatgtgctcgtgccatgtgaggtgtgtggcggaaagcgctataacagagagactttggaggtgaaattcaagggaaaatcgattgctgatgtcctcgacatgacgataaaccaagccgtagagtttttcgatgcaattcctgcgattctcaacaagataaaagtgctgcaagaagtggggttgggctacatcaaacttggccaaccgtcgagcactctttcgggcggagaatgtcagcgtgtgaaactcgccgccgaactctcgaaaaaagacacagggaaaacgctctacattctcgacgagccaaccaccggtctgcactttgaagatattaagatacttttatcggtgcttgataaattggtccaaaagcgaaatacggtaattaccaccgatcacaatttagatgtgattaagtgcgccgactatatcattgacctcggaccagagggtggcagaaatggcggacaaatcgtggcttttggcactccagaagaagtggcagagaacccaaattcaatcactgcccgattcctgaaaaaagaattatcagaaaaatgacgcggtttttgcgtcagaaaattcaaaattcaccgatttttgcgtgatttgaagcagtaaaaagccgttttggtgtcctcacagggctttgtggcgcacattcgccgtaaaaaaacacctattttacatttttctgaagcatcaagcagtttacatgtttgcatacatcgttatgtggcgtaacttatttgtttgtcaaaaggttacgccatatatttttgccgtggattaccctctgagaattgattagaatttgattttgtgaacgaatgatggatttgattgaaaaaaatggcaggagaatgagttgagcgaaaacaccgcagaaaatggtaaaattaccgccgcttgtttgtgaatttaaattacaaaattcaccgattaattcgtaaaaccacatcgtgttttgcaaaatgaaatagggtgttttcgtttgtttttcggtttgcgttttgaaagcgaaatggtgtgctggagaattaacgattaaatcgtttacaagcgcattaaaaatagtggttaacaattatttgcaatcaatgtaaagtattaaaaaccaattaaatagatattaaactataaagttgtggtatataatggtttttgtgcttgagagggtggtttgctgtaaagtgtggttaaatgtaaagtaatatgctatataccaactaaataagtagtataaattaaagttgtaatataatataattataaaatatggattttggatatgtgaatcgtgtgttctgaatattgaattgggtattttggctgtttgttttacgatatttgctatttacaaattcattatttaaatttacgtcaataaatttgtgtttttaaataattgtttatacatttgcaaactcaatttttagtggatttttactgtttgcaattatggacatagtttctcgcctaaaatttttcttaagtcataacggaatttctaattccacattcgccgacacttgcgatattccccgtcccactctatcgcagctgctcaatgggcgcaacaaaaaagtaagtgatgaactcatcactaaaattcataatgcttatccagctcttaatataatgtggcttatgtttggcgacggggatatgtttgttccaaatgcgaactctatgccctcgcccaccgtggctcaaccctctgagaatttagaaaattccacggcatcggaagttgatcaggaatctcgcacaccctatatgacctctatttcattcggtgatgatgagtcgtcgtatcagcctaccacgccttcgcctacacctgttgcggccatctcggcagccttgcaaactatggcaaaaaaaactactaaaccagcagtggaaaaaggcgtgaatgtggcacctgtggagcgccgtgtaacttcaatcatggtattctatagtgataacagcttcgaggaatttatcccccgcagcagccgctaagcatcattctcaggaatactcctatcaaaatctatcatatatgcctgatttcaggcggtgaaatcgaagaaaaggcccaaaagcaatcgcttttgagccttttctgatttcttatagtgtggactgtggataaaaacgaccgtaaagccgttttaatcccttgtgagggcgcgaaaggtgaatggatgagttacacctccattccgccgattaattcgcgcacgttcgctatttggtggcgtatcaaataatcttcaatgtagtcgattgccttaacggtcacttgtgggtcaacgaagttggctgtgccaatctgtacggcggtggcaccggcaaggaggaattcaatggcatcgcggccacttgcaatgccgccaagtcccacaacaggcactttcacggcgttggccacctgccaaaccattctcaccgcaatagggcgaatgcaaggtcccgacaagccgcctgtgatggtagagagcattggtttgcgcttctccacgtcgatagccatgcccaggaaggtgttggtgagcgacacggcatcagcgccagcggcctccacggcgcgtgctatctcggtgatgtcggtcacgtttggcgtgagtttcacaatcattgtgccgtcgtaggctttgcgtacggcgcttgtcacgctctccgcaccgctgcatgtggtgccgaatcccataccgccctgcttcacattggggcaagaaatgttgatttccacggctgccactttatcaagagggctgagtttttcgcacacagccacataatcgtcgatgcacgaaccgctcacattcactatcactcgtgtgtcaaggtctttgatacggggataaatatgctcgatgaagtaatccacgcctttgttctggagccctacggcgttgagcatgccgctcggggtttctgccatacgaggataagggttgccctcgcgatggtggagcgtggtgcccttcacaatgatgcctccaaggcggttcaaatcgataaaatcggcgaattcttcgccatatccaaaggttcccgatgctgtcataatcgggtttttcaacttcagttttccaatttcaacgcttaaatctaccatttcaatcgatttatattaaatacaggaccttctttacatacacacacatgaccgctgtcggcggtgtcttccacgcagcacaaacaagcgcccaaaccgcaagccatcatgttttcgagcgacacctcgcagtcgatgcccttgctcttggcaatggcggccacggctttcatcatgggttgagggccgcagcaagcgatgtggtcgatgggggaattgaggatggaatgttgggtaacgaatcctttttcgccctctgaaccgtcttcggtggagatatacacctcgccccaacgcttaaactcgtcgagcagcagcaagtcgcttgccgagcgtgcgccaagcagaaatctcacctttttgccaagtttagagagcactttgcccagttggagcaatggagcgacgcccacgccgccacctatgagcatcatttcgccagcgaacgagcagctgaagccgttgccaagtggcatcacaaggttgagcgtttcgcccactcgtgttgccaaaagcgatgctgtgccctcgccagccttgcgtatgagcagccagagctgatttcgctcttcatccacatagcagatggagataggacggcggaggaaagtggtttttgaatgaggaacttccacctgaacaaactgtccggggtgcgtgtcaggcatcgtgcctgattgtggagtgagtttgagcagtccgtaaagaggggagatgctcagattttcgctcactataaaatccatttcagtcattgtcttgatagcataattaatggttgctgcacaaatttacgaaatagttttcattccatttcaaaaaacgccaatatttatttgcgcgtatggcaggcatggggcggttgttggtggggaatactatttttgctattcgtaacaaattgttagtaatcaaaatgatagcattggtctgaagtgatggtaagttaaattcgtgattcatcataacgtagggacatgcctttggcatgtttcctgtgtgttgacgcattgtcgatttgctattgaaacatgccgaaggcatgtccctacgtttgggcgttatcgtttttgggggcacagtccattaccgccattctatttgcgcattccttcgatgatgtttagcattttgatggtggcttggaaggcggcttctatctggtccacctccaggccgcgcgtcttgatgatgtggccattgtagttccaagtgatgttggtcatcaccagcgcgtcggtgctgccgtggggtggaatgctcaccgtgtagttggtgaggcgaggcatttcacgtttcaggttgtctttgtagattttcttcaccgctttgataaacgcgtcgaactggccatcgccgaatgcgctttgttcgtattccttgccctcgatttcgagtttcaccgtggcggtggggtgcaatccgtgcgacatagtgagcgagtagttcacaattttcaccttgttgattaccgagtcgcgcttcacgatatctgccacgatgtagggcaggtcgtcttgcgtcacaatctcctttttatcgcccaattgaacgattctttcagtcactttctgtacgtatttcttgcccaactgaatgcccagctccagcaaattctcggtgatacttgcctcgcccgacagtttaccaagggcgtattcacgtttgcggccgaagcgttcgggcagtaggctgttgtagtagagctcgtttttcctgtcgccgtcggcatgtacgccagcggtttgtgtaaacacattctcgccaatgataggctcgttttgcgccaccaccacgcccgaaaacgattccacgatgtggctcacggtgtagatttgcttttcgtcgatgcccgtggtcatgtgcagcatgtcgtgcaccataggcaccaccgaagccagtggagcattgccggcgcgctcgcccagaccgttgatggtgcagtgaatgcccttgatgcccaccagccccgcagcaaaagcgttgcttgtggcaaggtcgtagtcgttgtgggcgtggaagtcgaaatgtagagcagggtagcggttcaccatacgcttgcagtattcatacacctgattaggattcatgataccgagcgtgtcggcaagcataaatcgctcaatgggcaggtgctgcagcgtgtccatcagtttatacacatagtgcttggaggcgcgtatgccattcgaccagtcctcaagatacagattcaccttcagccccttggtgtgcgccaagttcacttccctcacgatgtcggcgcagtgctgttcgagcgttttgcccagttgaaggttgcagtgcctttccgatcccttcaccagcagattaatcaccttgccgcccaccttgttcacccattccaccgatttaccgccgtcgataaatcccaaaatttcgatgcgcgcgagttggccattgtcggcagcccattggcaaatcgcctttgccgactcgaattcaccgatggaaacgtggcaactgccaatctcgatgcgaggcacacgcagattggtgagcagcatacgcgatatgctcaacttctcagctgtagagaagctcacaccagaggtttgctcgccatcacgcagtgtggtgtcgagaagctcgatatgcccaacagcctcgttaggcttcggccgtgtgtcaagtattttaccaaacagtgaactcataaattaccccacaaagttactatttttttagtaaaatacacatagggggagaagaagttaaagaagttaagaagttaaagaagttaagacgataccttcgccttttggcattctcgttgcctcgttgacctgttgacttttttcagaacttttgtggagaataaaaaaagagcgacatgagccgcccttgatgttttcacaacggaataatccttattgcgaattgcttcaaatttgtatggcaaatttagcaatattatttcattttccaaaaaataagttgtatttttgaaaaaaatattcaaacacacctaattttacatacaatgaagaaagttttaggccttgacttgggaactagtagcatcgggtgggctgtcgttaatcaggcagtcgaccacaatgaagaatcaagcatcgtgaagcttggagtaagagtaaatcctctcacagttgatgaaaaaggcaattttgagcaagggaaaagtattaccaccacagccgaccgcacgctcaagagaagtatgcgccgcaatctacaacgctacaagttgcgtcgtgaaaatcttttgagtgcgctcaagtcttatggttggattactgatgatacgcggctggcagaagaaggcaattcttctacttttgaaacttatcgcttgcgtgctaaagccgcaaccgaggtgatttcgcttgagcagttgtgccgagtgcttttgatgctcaataaaaagcgtggttacaagagttcgcgaaaaatgaacaatgaggaagatggtgaattaatcgatggaatggcggtggcaaagtcgctctacgaggaacacctcactcctggagaatatacattaaaaattctcaatagtgggaaaaagtatatcccaagctactatcgctcggatttgcaagcagaattcaacatcatttttaaccaccaaagtcagtattacccagaggtgctcaatgccgaactgaaggaaaagttgatggggcgcaataaatcaaccacagagaaaatgtttttcgtcattcataaagtgaaatgcgcagaactgaccgaccgcaaaactcgtgtcatcacccttgcaaggtggcgtgtggaagcgttggctaatcaactcgatattgagcaagtggtgcttgtgctctctaccatcaatggtgaaattgacaaagccagtggctacctcggagctattagcgatcacagtaaggaactatatttccagcatctcactgtagggcagtatttgatgaaaaatcttgatgccgaccctcattttcgtattaaaaacagagtattttatcgtcaagattatctcaacgagtttgaaaccatttgggagtgtcagaagcggttccatagcgagctaaccaaagaacgtaaagaagaacttcgcgacattattatattctatcagcgtaaattgaagtctcaaaagggattgatttcattctgcgagtttgagagcaagcaaattgaagtgatggttgatggcaagaaaaagattgtaaccactggctctcgtgtgtgccccaaaagttcgccaatttatcaagaattcaaaatttggagcgaactcaacaatctcgcgcttatttccaaagaagacggcacttctattcctctatcgcttgaccagcgaaaaatgttggctgacgaattgcgatatgtaaaggaaataaagggctcggctgctatgaaattgttgaagattaatgctaaggagtatagcctaaactacgataagattgatggcaacaccacggcttcagcgctgatggatgcttgcaaaaacgtggtggagtggagcgatcatgatgtggagaagtttgataaactgagtagccaagaaaaaattgatatggtgaaaaccgtatttggagcattgggctacaattccgactttatagtcacttccatcaacgaggatgatgctatgttccgtatttggcacttgctttattcatacgagggcgacagctccaccacgggcaacgatggcttggtgaagcatattcagcagcttacctcacttcctgaagattatgccacagctttggtgaatgtgagacttgagcaagattatggctcgctcagcgccaaggctatcaagcgcattttgcctttcatgaaaaatgatgggaaaaaatatagcgaggcgtgtgaaatggcaggttatcgccattcaaagcagtcgctcacaaaggaggaaattgagcaacgtgagctgaagccatgccttgaggtgctgcctaaaaacagtctgcgaaatccagtggtagagaagattcttaaccagatggtgcatgtggtgaatgaatgtataagtgcgtacggaccgtttgacgaagtgcatattgaattggcacgagagctcaaacaaagccaaaagcaacgtgaaaacgccactaatgcgcttcgccttcgcacaaaggaaactgaagatattaaaaagatactcatcgacgattttaaaataaaccatcccagtcgcaacgacatcattcgttatcggctctacgaagaattgaaaccaaatgcatacaaaacgctttactccaacacttatatttcaaaagaaaagctgttttcgcgcgagtttgatattgagcacatcattccacaggcgaaattgtttgacgattcatttggcaacaagacgttggagttgcgtagcgtcaacatcgaaaaggctgatatgacagcctgtgactatgtgaagcagaaatatggtgaaaagggttttgtagattatgaggcgagggtgaaaactgtgtatggcaaaaccaatccacgcaagcaaaagcaactgcttacccccgaaaaagacattcaaagtgggttccttaatcgcgatttgagcgactcgcaatacatagccaaggaggctaaaaggatgcttcacgaaattgcgcgtacggtagtcgttaccacaggatctatcacggctcgattgcgtgaagattggcaattggtggacgtgatgaaggaattaaactgggaaaagtacgataggcttggattgactgaagcgcattataataacgacggtcaccaagtgcgcagaataaaagattggactaagcgcaacgaccatcgccatcacgcaatggatgccctcactatagcgttcaccaccgtttcgcatgtgcaactactcaataatcttaacgcacgaggtggtggcgacagcatatacggcataatgtataaggagcttaccactggtcgtaagttcaagctcccaatgcccgattttagagcaaaagccatgaatcaactaaagtctattcttgtgtcgattaaggctaaaaacaaggtggcgacaccgaatagaaaccgtgcgaaaaatggcgcaaagcaaatcactcttacgcctcgtggccagcttcacaacgagacagtgtatggaaagcgcaaccgttacgcttctgcattggagaaagtggggaaaaacttcgatgaggcgaaaattgccactgtatgtcgaaaggcgtatcgtgaggcattgctggctcggttgaaggagtttggaggcaaccctgcgaaagcatttacaggaaagaactcattagagaagaatattttgtggctcgacgagttgcacacccacgcagtgccaccaaaagtgaaaacagtgagtatggaaagcgtgtacactattcgcaaatctatcacacctgatttgaagattgaaaaggtgattgatgcaggtgttcgacgcatcttggaaaaaagacttgaagattttaagggtgatgctaaagccgcattttcaaatcttgatgacaatcctatctggctcaatgaggaaaaaggcattgccataaaaagcgtaaccatcaagggtgtgaatgtggcgacgccacttcacgagaaggtgaataagaatggcgagacagagccgaccgattatgtgagcacgagcaataatcaccatgtagcaatctttgaagatgaacaaggcaactaccatgagcatatcgtttcgttttatgaagctatgatgtgcaaaaatatgggcttgcaagtggtggataagcagtacaacaaggatttgggttggaagttcctcttcactatgaagcaaaacgaatactttgtggtgccagatttggagcatggcttcaatcctgaagagcttgacttgatggatgaggcaaacttcaatctcgtcagcccacatttattccgtgtgcagaaattgtcaacaaaatactatatatttcgtcatcatttggaaacaaacgtggaagagtcaaagcctcttaggaatataacttggaagcgaattcaaaatgaaaatgctttgagaggctttgtgaaagtgagggttgaccatattggtaaaattgtagcagtaggtgaatatgattaagcggacactctattttggaaatccagcctatttgagcttagttcattcgcagatggtgcttcgtctgccagaagtggaggagaatgacaccgtgtgcgataaaataaaaaaggaaagcgtacgcactttcccgattgaagaccttggggtggtgatactcgaccataagcgtatcaccatcacgcaaggactacttgaagctctgcttgctaacaattgtgctgtgattacttgcgataatgctcacctgcccactgggctattgcttccacttgagggtaacacacttcagagcgagcgatttcaaaatcaagtggattgcagcaagccacttcgcaagcagttgtggcaacaaacggtgcaagccaaaattgccaatcaagcggctatgcttgagaagatggtaaaaggtgtgcaaacgggcaacatgcgggcatgggtgagcgaagtgcgaagcgatgatgccaccaatcttgaggcacgtgcagctgcctactattggagaaacttttttccagaagtggaagactttattcgtggcagagagtttgcgtgtccaaacaattatctcaattatggttacgccatacttcgtggcgtgattgctcgtgcattggtagggtcagggttgatgcccacgcttggtattcatcaccataatcgctacaatgcctattgtcttgccgacgacattatggagccttaccgcccatttgtagatgaattggtgaaaaacattctcaaaaaatacggtgaaatggacgatatttctatcgacgtgaagcgagaattgctacaaatccccacactcgatgtgaagatagagggaaagcgcagtcctttgatggtggcggcatcagtcaccacttcttcgcttgccaaatgctatgcaggagaattgaaaacgttgagctatcctactgttccataatggaaagaatcagcgaatatagaattatgtgggtattggtattttacgacttgcctaccgagacgaaaaaacaacgaaaagtggcggctcgtttccgtaaagaaatcatgaaagatggctttacgatgtttcagttttccatctatcttcgccactgtcccagcagggaaaatgccaatgtgcatatcaagcgggtaaagtcgatactccctgattcgggaatgataggcattctatgcgtcaccgacaagcaattcggagcaatggaactattccacggtaccactgagcatgtaaaagaatacggcccacaacagttagagctcttctaagctccacttctccgaaatcaagtgggataggcaacagtgttgtggtttttgtagtgcttgtcggtatttgcctctttgatgaattattggaagagtgttgattgcttgagcgaaaagtgttaaatttgccatggaaagttgaaaggtagggaaatttgtgttaaatcactattattaagccccgttttccatttttcctaattgaaatacctataattataacttagaaaagaaacgaacaatattcccgaatgatttctctccatactatccaatggggattctgccatgccctatgtatgtggatgtggcaaatcgtatttatcccaaatcggtcattagggcttgtggtatttcggagttttagaagaatgaattttgcttgtcttttaatgagtgatagcgaactattacgaattaaaaataagcgaaaggcatcttataaaagccgaaagaccgcaaaaagtaatctaaaaatccttacacggcctaatgaccgatttgggtttaattgttctccttatataatataaagaggatgggctatttttcttgtttatttacatttttgccgtagatggtggcgaagtcggttttcattgagattgtggtccagtttttagcgtcgcacgacgatttcatttttactgcttttgtagggttgccgtactcgcgcaccacatcgtcggcgagcacgcaaaacgccatgctggggtagtggttgtttgcgaccgtgtattcaaacatgctgaagtcgcccgatgaattgccaaaagccaaaatcggttttatgcctatctcgcgcacaatggcgctcactttgttcatcttcaagtttttcacatacatagcgccgcgcaccacatcgtcggtaggcttgaacgaatagtcccagccctctttattgccttgcgaggtggcgtaggtgtagatgtcggagcctatgatgtggttgcggccaaacgccaacgctccatcggcataggcgcgtgtcacctgacgctcgctgcccgaaatcacgtaggtggtgaagccgttggctgctaaatatcccaccacttcagccatgggcaagtagatggcttcgccccactgcaaattgctcatgccctcaacaggcgtttccataaattcaattgcgtaatcgcgatactgttcatcggtcatgccggcaaatacctcgttttgcgcgattgcctctgtccacatcatatcgccaggcaccgagcgagcgtacacagccttcttaatggtgtcggcggtggcaatctgctctttcgtggcgtggaaagtggggtcgtcgtacacgcggtgcaaatacatcatccattcaaaatacgatggggcggtttcgcacacgagcgtgccgtcgaggtcaaacaccgccacgcggtcggactgcggcacaaagccatcgctctgcggattggtcacacgctccacaaagttcttgagttttgccaaaggcacgctgccttccgtccagtagcaaaacttgccttccgcgcccacattttgcccaattttggcgatttcatcgcgcgtttccgccattacatcggcagtcaaagccatcgccaccacactcactaacaataatatcgttttcttcatcacgttcaaaaattaataattttttacaccacaaaattacaaattattccccacatcacctaaatgcagtgtgcacgaagaaaactaactccacaaaaaaagccccacatcagtgaggcttttgcgtagtaaacaatcattttttattttttctaaaatctttgcaaccgattgatatactgttgaatacaggtaatcagttgtctaccacgatgtaaagatacaaatttgaaagcaattcacaactaacgagttagcaataacaacaacaaatcagttgtctaccacgatgtaaagatacaaatttgaaagcaattcacaactggcagatttagagcaaaaaattcttgaaggttgtctaccacgatgtaaagatacaaatttgaaagcaattcacaacgttcaagattcgctctcaacgtgtaatcaagttgtctaccacgatgtaaagatacaaatttgaaagcaattcacaacaggactttctttcatgcttgctacgcctttgttgtctaccacgatgtaaagatacaaatttgaaagcaattcacaaccatggttgacgatgataaaaaggtcgctacgttgtctaccacgatgtaaagatacaaatttgaaagcaattcacaacaggcgactgcctcgctgaacacagtaaggcgttgtctaccacgatgtaaagatacaaatttgaaagcaattcacaaccgctaacaggcatagaccttttcaacaagttcatcgaccgtgcaatcaacgcaggcgatgataagtgcgtgtgtcgcctacgttgtggaatcagaataacattatagcgaataataaaccgattaagcacatgctacacgattgacgaaaaaaacgcaatgaaataggctgtgaatatcgcaataactgctaaatttgcgtaaataaacatgtgaaaatatggctaatcgcagattttacaaaaacaaaccctccgacactatttggtgggttgacaataccgacgagacaggtgtgtggcttttttcattcgacaaggtgaaaatttataacctattcgcagattatccacacaaactatctgctatggaacgcaggatatttgatgccgaaaatccgttttggcgtgattttttctccgataggaaataaacctacttaacgttgtctaattttgtgagaagttttgtgggtggggattgaatttttgggactttttactattattgtatgtgaatttaaaattgattggaatatgaaaagagtgctttatgttcatgggtttcgaggttctgcgtatgggagagggtataaacgagttttaaatgcgcttccggaggggtataagttgttttcaattgattatgatgaggcagactgttcgcacgcaagagagcaaattttgaattttattgacgaattcaagattgatttggtgataggttcgagtcttgggggatttatcactttgactttaaatgggattccgagatttgtcatcaatccatgttgggatccacctgtagaactgtgtaaactggtggagcaagatgcggctttcatgaagatgataaagacatatatgccgtatgaaatatggatagcgaaatctgttaattatcaagagaagatgcttgtaaaaggcttttttggaaagtatgatgaattgtttggaactaagtatgtggaagagttttcgggttattatagcagttatgaaatgattgacagcggacatcatctttcagaagaaggcgcaaagcaaatatttaagaacattgacgattactgggaaagtgtgcgaattttgaaaaacatgcaaaaagactaatggattaaaattggaaatgggggatagggtgagctgcagttcgaattattgtgtaagttgtgttaaatgtggcacttttggaggcaataagtaggatatgtgtggagaattatgtacctttgcagtactattttttgtctttatggcgggaaagcataaatgagcggataaagacacaaagccatacacaagggtgggggacgacgatgctaagtatttgcgcttgctttagcttttagctaagtcgcgacctactcatccgttaatggccaaacatacttaactgtatgattttatgaataatgtcaatgtaaaattggcgcaatcactcaggttgatgatggccaacagtgacataaagtagaaaatgaaaatgacgcaggattgctcgcttctatcttctacagccgacgtgaacgacgtgtataacaacaagcgtttaccaaagggcatccacatagtcgggactggcgaatcggtctcgaaagtgggagaaatagctggttttgaagatgcagcaagtgcagaaaagccagaaaaggagaatgccgcacgaagcgaagacgaatgcgccgatgacaaaatcgaaatacccagcacaccaaaaacggaagcggctccatggggctatatcttcatacagcacatgtcggcggcagtttttgaaaaaaatctcgaaaatcgaaaacttttgggcgatttcaagccgaagtgtttcgaacaccgcacagttagatacaaagacaaacccgacggaaaaggcgtggtgaaaacggaaaagcctaccgtaaatgggcttgtgttcttgcagggtgctaccaatcagttgaggacattcctgaaactcaacttccctcagtattatctggtgaacaactgtagcaccaaaaagcccgcatcaatccccgacagcgtgatgcagccattcatggcagtgatgcaaaacgagccagagcggttgacattcatgcgcgagccatttgagcgatttgctaaagaccacgtgaggctccgcgtgcttacaggcctttttaaagggcaggagtgctatgtggtgcgagtgaagcgtgaccgtcagttggtgatgaacattggtggatttgccgtggcggtgaacaatgtgcacaacgaagacttcgagatagccgaatagtcctcatttcaataatattatggtgatctgaataatacatgtataaaggtaaagatattaaaattgccgtggctggtacgggctacgtgggactgagcatagctacattgctatcccagcaccatcatgtaacagcagtggacgtgattcctgaaaaggtggaaaagttgaacaaccgtatttcgcccattcaggacgattacatcgaaaagtatttggcagagaagccattgaaccttgttgccaccctcgacggcaaggcagcctacgccgatgccgactttgtggtgattgctgcccccaccaactacgaccctgtgaagaattacttcgacacaagccatgtggaagaggtgatcgacctggtgctggaggtgaatcccgatgcagtgatgattatcaaatcgaccattccggtgggctacacccgcaacctctacttgaagtatgcgcagaaaggcgtgaagaagttcaacctcttgttctcgcccgaattccttcgcgagagcaaggcactctacgacaacctttacccaagccgcatcatcgtgggctatcctaaaatcatcgacaagcccgaatttgaggcggaaaacaaagctatccaatcggttaccgatgtggagatgctgaaagaggctgctaagacctttgccgcactcttgcaagaaggcgccatcaaggaaaacatcgacaccctgttcatgggcatgaaggaagccgaggcggtgaagcttttcgccaacacctatctcgcgctccgcgtgagctacttcaacgagcttgacacctatgcagaagtaaagggtcttgactcagaagccatcatcgagggcgttggcctcgatccacgcatcggtacacattataataacccatcatttggctacggcggctactgccttccaaaagacaccaagcagctgctcgctaactaccaagacgtgccacaaaacatgatgtcggccatcgtggaatcgaaccgcacccgcaaagactacatcgccgacgcagtgctccgcaaagcaggctggtacgactattacagcaataaccagttcggcacagagcagggtggctgtgtgattggcgtgtatcgcctcaccatgaagtcgaactctgacaacttccgtcagtcagccattcaaggcatcatgaagcgtatcaaggcaaagggtgcagaggtgattatctatgaaccaacacttgaagacggcaccacattcttcggcagcaaggtggtcaacgacctggcacagttcaaggcacaaagccacgccatcatcgccaaccgctacgacgcatgcctcgacgatgtggaagaaaaagtatatacacgcgacattttcagaagagattaaaaaacaaaagttttaaatagatataactatgagcatttttgcaggtaaaacccttatgattaccggtggaacaggttccttcggcaatgcagtattgaatcgttttctccgtacagacattggtgaaattcgcattttctcgcgcgacgagaagaaacaggacgatatgcgccacgagtatcagatgaaatatccagatgtggcatataagattaagttctttatcggcgacgttcgcaacttgcagtcgtgccgcaacgctatgccaggcgttgactacattttccatgcagcagcgctcaagcaggtgcccagctgcgaatttttcccgatggaggctgtgcagactaatgtgattggcaccgataatgtgttgaccgcagccatagaggctggcgtaggcgcagtgatttgcctttctactgataaggctgcttatcctatcaacgccatgggcattaccaaggccattgaggagaaaattgcagtggccaagagccgctattcaggcaagaccaagatttgctgcacccgctatggcaatgtgatgtgttcacgtggttctgttattcctttgtggattgatcaaattcgcaatggcaaccctatcacgctgaccgaaccaaagatgactcgcttcatcatgtcgcttgaggaggctgtcgacctcgtgctctttgcgtttgagcatggtcaaaacggcgatattctcgtgcaaaaggcccctgcgtgcaccattcagacacaggccgaggcagtttgcgagctcttcggtggcaagaaggaagatatcaagataattggtattcgccacggtgagaagatgtacgagacattgctcaccaaggaagagtgtgccaaggcggaggacatgggcaatttctaccgcgtgccagccgataaccgtggtctgaactacgataaattcttcaaggaaggcgacactaagcgtgcggaaattgaagaattcaactccgataacacctatcgtctgaaccttgaggaaaccaaggcaaagattggagcacttgaatatattcaaaaagaactgagcggcgaaggcaacttcgtgcagtaatgataacgtacacgaattgaacagacgagtcggatataataaaaaactgtgaaatccgtgttcaaaaaacgacgaaaatgaagattttagttacaggtgccaagggctttgtaggcaaaaacctttgtgcccaactcaataatattaaagacggcaaggctcgctgctatggcgacctcgccatagaggaagtgttcgagtacgacctcgactctactcccgaacagcttgacgcatggtgcaaggagtgcgacttcgtgttcaaccttgccggagtgaaccgcccaaaggacaacgacgagtttatgaaaggcaacttcggtttcgcctccaccttgctcgacacgctgaaggcgcacggcaacaactgcccagtgatgctgtcaagctcacagcaggcatcgttgaccggtcgtttcggcaatagcgagtacggccgcagcaagaaggctggcgaagacctgtttttggcgtatggcaaggaaactggcgctaaggtgctggtttatcgtttccctaacctttatggtaaatggtgccgccccaactacaacagcgccgtagccacattctgcaacaacatcgccaacgacctgccaatcaccgtcaacgacccaagcgtggagctggaactgctctatatcgacgatctcgttgacgagatgattcatgcactgaaaggcgaagagcaccattgcgagtttgagggcttagaggttattccaatgaatggaacgaacacggattgtacgaataaaacggataatgaaaaatctgttcaatctgataaatctgtgttcgaaaagaagggtagatactgctattgtcccgtaacccataaggcaacactcggcgaaattgtggagctgctccacaagtttgccgatatgcccaccacactgatgattcccgaaattccagccgattcgttcgcaaagcgcctcttcagtacattcctgagctatctgcccaaggaaaaggctattttcgacctgaaaatgaatgtggacaaccgtggttcgttcaccgagttggtgcacacgctcaactgtggtcaggtgagcatcaacatctccaagccaggcatcaccaagggcgagcattggcacaacaccaagtgggagcagttcatcgtggttagcggtcacggccttatccagctccgcaaggaaggcacagacgaggtgcttaactacgaggtgagtggtgacaagattcaatccgtaatcatgcttccaggctacacccacaacatcatcaacctctccgacaccgaagaccttgtaacagtaatgtactgcaacgaaatcttcgaccccaacaaaccagacacttattttgataaagtagaaaaataaacgaacacagattccacgaattgaacggatttgaagatgttgtacaacaaggagcaaagttacgctataaatggtgctgcaatgaatgtgtataatgctctgggacacggattccttgaggctgtataccaagaggcccttgaacttgaatttataaagcgaggtattccctacgaaagggaaaaagagctgaaaatattttacgaagggaaggaattgcggcaaacctacaaggcggacttcgtttgttatggcgacattattgtggaactgaaagccgtggctcatttggatgattcacacagaagccaagtttttaattatttgaaggctaccggattcaaactggggttg

SEQ ID NO: 2280 - DNA, 24050 bp, synthetic construct
  misc_feature 1..24050: note = Synthetic
  source 1..24050: mol_type = other DNA
ttctgcttgttttcatcctttgaatccatttctcgctgttcattttgctggaatgtctcaaagctgacgttatctgtttcactttttctttgaacaatacgttcatatctcttctttatgtctgcatcaacggagaataaaagaaattcagagttctctttcaggtattttatctcttttacattgcgtatgctttctattatacagttcttaccttcttttttagccatagcaagcagacctttagcaataaaatctgctccttctttttctctttcttgatttgcaaccatagtcatagtgtctctgttgctctcaagcccaagttcttttattcttttgttaagaaaatcccttgcggagaaatggacaaaacccatttctttcaaatactccactatagtacctttacctgctcctaaggtacctgttattcctattactatcattatgtggatagtttaatttgtcttatatttaaactctatctttgaaaactcttcattggcttttacaatcttttctttcaaagactgtttgtaagcgtgcattctcttatttatctcctcgttagttaaggcaagtatttccatagccataattgccgcattcaaagagccattaaccgccatcacacttacaggaacagcaggaggcatctgcaacatagaaagcacagagtccatcccctcaaaagaagacttaacaggcacacctataacaggtaatgtcgtttctgctgctatagctcccggaagagcagcagccattcctgctgcagctattattacttttatacctctaccttctgcattacgagcaaactcacttacttccataggagtacgatgagcagacaaagcatttatttcaaaaggtatctcttgttgatcaaggaaaagggcagccttctccattactgagtaatcagaagtactgcccattattatactaaccaaaggtgtcatattaaattcttattcttttggtgctacttttggaaaatctgtatggaaagttggataagtgtagttttctccaagtatatgtgttaagaaatctttatacataggagtaaagcatagtgtttctgcatcaaaatattcttctggcaaaggacggtttcctatcttacccatatctattgcagaacagttgtactcttccaactcatcaaaattgcaaaccttgttcaatacaggcattttaccataatcttctcttagaagtaaatccacagccttatcagccaaagcttgtgtcattcttctgtcgtatgctgaacacataccacttcttggatagtaacctgttatttgagctctggcatctatctttagttttgcagatatttcacttgctattgttccactaactcctcctaaacgagcatgaccatattcatcttgttcggtagaagcatagacaacatctgtttttcctgtttgttcattataccaacgcacaccttcacttacaggaattatcaatgctccgtcaggactttctttataagccttttgaaccaaatcaaagaaatgttcttttctctctttgttcatttctacttcaggaataagactcaaagaagctcctccaaaggttgctgttcctgtcagccaacctgcatctcttcccattacttccataaccattattcttgcatgtgattctgctgtagtctttaatcttgctgcaaaatctgcaactcctaatgctgctgaaggaaatccaggacaagtaacagcatcaattttctttccattgaactcatgccaagtaagagttctaaggtcgttgtctatagtcttagggaaacctattacgggaataccttcttgttcatacaaacgttttgctgctccattagtatcatcaccgcctatagtaaccaatacatctattccatatcttttaaggttacgcattacttgtggcactctgtcctctggattcttcttagaaggaaaaggattagtacgtgaagaacgcaatgctgtacctccatataaaggattatatggtttttgtgttaaatctacaacatcaccatcgcctaaaagacctttccagcctctttttataccatagactttaaaaccaagcatagtagcacggtttcttacagactctatactgctgtttattgccggagtatctccacctccagaaagtatggcaagagttttgcccttaaaaagtttttcttctctcattattatgtatttttgattgttattactttttttattctgaacaaacttaaacgttgcaaagatataatttttttattttataacaaaataaacttgattaatattgattaactatctttttttatttttcagataaagaaaaaatcttgaaaaaaacttcgttatttccaagatttgattgctctgaaaaaagtcttcgttttaagaaaaaaagactaagtcttttgcatcaaaacatcaactctttacaccctaaacatcaactcttttttcaaaaagattaagtcttttttaagttacttatttttagatagttctatattcaaattgagttacaaaaaatcaagacaaaaaagaaaggtatgaaatatgatgaagttttgtatttttgcaaaaggaaaaaatcacagcgatgaaagaagtaaagacaataggttatgacgccaaaagaatagtaagcaatgctacaggattaggttcttatagcagaactctattggagagtttggcaaactatgataaacaattcttattatatgctccaaacaaaggaagaaaagaactttattcttctcttcttgagaaggaaaatcttttttttaaattccctcataaaagcaatggagacttagtttccaataaaatacttcaatggttatggagagaagaaggtattattgatgatttattaaaagataaagtggaagtttttcatggtcttactggacaattgccaaaaggaattaagcaaagcagaataaaatcaattgttactattcatgaccttatattttttcctcaccccgaatggtattcaagaattgatgtctttctttataaaaagaaattctttagaacaataaaacaagcagatagaatcatagccataagtgaatgtactaaaagagatattataaggtatggtaatgttgatgaaagaaaaatagaagtaatctatcagtcatataatccaatattttctcaggagatttcacaagatgaaaaacaaaaagtaaaacagaaatactccttgcccgaaaagtttattctaaatgttggtactatagaaaggagaaagaatgttttgcttgctgtcaaagctttgaaagagattatcttaaataacccgaaaacagaagaacatcttgttattgtgggcagaaagacctcttacgctaaggaagtagaacattatatagaacaaaacgacttaacagacagagtccatattatcaatggtgttttatttgatgaactaaaggttttgtattctttggctaatttatttgtttatccatctatttacgaaggttttggcattcctattattgaagctattgctaatcgtttgcctgttgttgcttgcaaaggttcatgcttagaagaggctggaggagaacattctctgtatgttgaaccaacagatgtaaaagcgatggctgaagcaatgcagactcttctttgcaatgagaaaaaaaggactcttgtaatagaaaaaggattacaacatatacaaaagtttgctaacaatgatgttgcacaaaagcatatacaactatacaatcaattaataaataatcagtattaacaacactataatgacaaggcaattaatcttttttgattgccttcattattatgtgaaattgttcattattttggataacaccatgaaagttttcactgccaggaccttctgcatatataataataggagcagaagtatgtcctgttgtagtccatttacaagtatccatatcttttcctgctacaggaagtgtaagtcctcctgtttcatggtcagcagtaataactactaaagtatttttatctctacgggcaaaatcaagagcaataccaacacaagcatcaaaatctaatgcttcatctatcatttctgaaaaatgattatcatgagcttgcatatctatttgtgatccttccaacataataaagaatccctcgggattatctttgaaacgattgatggttgtttctaatgcagtctgcataatcttgcctctttctttgtaaagtggaagatgtttatcagcaaaaaagcctgctatcctatcagttttggaagataaaagttcgttttcattatatacaacttcataacctaaattccttagttcttttgtcaaatcccgtttgtctgcacgattatcaaaacgtttctttcctcctcctaaaaaaatatcacacttgcctcctaaatagtattcagcaatctgttcatacatttctctatccttaacatgagcaataaaagagcctggagttgcatgtgctaaatcacaagaaacaataatacctgtttttttacccatctgtttacatatttcaagcattgacggaataggtattgtatctttatcaactcctattgctcgataataagtcttttctccacaagcaatagcagttcctccagctcctgaatctgtaaccctgcgatctgtacaattggttatagataatgcagtatgcggcatagtgtagatattcaaaaatctattgtttgcctcataagcagaatataactgagctaaacctgtaccatcacctataagaataataacattctttgcttgctgtgcctttacaaagcatacaaacatcaaagaaaaagaaaagataagtaatgctctttttttcatattatttttgttttttttggtttctaatctttactcttaaaaaatattaattcggttataagaattataatcatagtagcaactacactaacaataagtctcaaaaaagtatgaaagaactccgaaaaactaaagatactgataaggaaacaaagaaaatgatgtacaaaaacaagaacaaaactatatgaaaggtaatgggaaaaacctaaataaaataaagtaggtcgttgaacagcattttctatagaacctgtagaatacatagaaagaagataaggacggatgaaacctataaaagtacaagaaaaagaatgtattcctgtctgccctgaaaatatatctatacttataccaataaaaaaagacgcaagaagtgtaagccaacgagaagtattcattggaagatttaaaataaaaagaacataaatcattggtgtagcaatgccaaacaaactgattttgtcaagtattagcacttgaaaaaacaccagcactatatactgaattacacttgttagtatttctcgtcgcattttcagttctcctctatttttgttgtcgtgtctattccttgcagtaggcggtcttgttctatcttaaagtaatttttgatggcatatacgtagtctaacttattatagtcggtaaagaactctatattgatattgtagaagcccgtccccttatctttggtataggactttacacgtcctacgggtatcccctctggaaaattgcgggaaaagccactcgttactatcgtatcgcccttttttaccgctattgaggatggcatatctactatttgtccaatagcataatgatggccgtcccatacaagtgtccctgttgttttggtgcgttcattccttacgtttattttgctatcttgatgaagaacactcattaccaatgaaaagttctccgttgttttcactactacgcccactactccatttggtgatattatacccatatctttttctatccctgaggatgaacccttatttaacataaagtaattattgcgtttggttactgtcttggagattacgcgcacatctacatatgaatacatctgtttataaaccgtgtcttccttttgatgaacagtgttgattatgcgtacaaaggaagtggaaagcattttgcgtagtcttatgttctctttgactaagtcggcattggtgttttttaaataaaagtaggaagatattccgtctatgctattatagacagttccagagatattattggctaaactcgttatggaaccgccttgacgaaaagaattgagagatagaaaataaacacttagaccctctaagagaataaataaaaatatatgataataacgttttagaaatcttagtaatgaccacatatatttaacctttttccgctttgcaaaattatagaatttatatcaattacttatactataagaaaaaatatttgactttattttgctttatctttcaacattggaacaaaagtaaaggtgccaaactcttctttcttatattctgtttctgatgttttagtaatccgtagcattgtctggactcctctgcctacaggtataaccataatcccgccaacttttaattgtcggaaaagttctaatggtatttttgccgctccacaagttacaagcactctatcaaagggagaatatccaggcaaccccttatatccgtctccataataacaatgaggacggatattcagaagatgaaacatttgttttgcttggtcatacaagtctttctgtcgttcaattgtatataaacggacattaaaacgatgaagtattgctgtttggtatccactccccgtccctatctccaatactttcaaacgaggctctattttcaacaactgggtttgcaaagcaacggttgaaggttgagatattgtttgcaggcacgatatctgtaaggctctatcttcatatgctatattatcaaaagaagaatctaaaaagaaatgtcttggcacttcattcattgcctcaagcacttttttatcagttattccttttgcaataagagtttctatcattcttttcctcagacctttgtgtcggaatgtatctgtaggcattcttaatttaaagtttttaaattatcgttcaaaatttttggcaaagatataacatttttacggaacagggtcatatccactaccaccccaaggattacaacgaactattcttttcaaagaaagccatcctcctttcaaaggaccatatttttttatcgcttctaaagcatattgagaacaagtaggagtaaaacgacaggaaggaggtgtaagtggggaaatacaatgcctgtagaattgtatcaacaacagaaaaacattcttcaataaccatagaaataaggaaaagaccttttttaataccttcattgactaaatttattttcatagataacgcaaaatcctcttgttttagtttattcattattcacaaaacaatatcttttgttgtacagtcaaataaaatattgtaatttcgcaaacaaaaataacaaaatgaaacgaatactattattaataactctattcttttgtatcagtcaaacgatatatgcacaaaaatttgataccttattctacaaagccgacttaaacattgataaaaatacttctttaatcatcaccttagagaagatagaacaacaggatactatcctctatcttttaggctcacctatgcaaacaaaagaaaaaatcgccccttcaaaagtaaaatacatgggtgatactctctctttaggttttaagcagctaaacgctgtaataaaaataaatcaaaaaacattgcaaggaacttttaaacaaggagcattaagaaaaaatatcagatttgaaaagcaagattattcattttctctaaaaagaccgcaaacacctcttcctccttttccatacgagagtaaagaattaactttttctaatcctgagtctgattacgtttttcatggaactcttaccttcccaaaagaaaaaggaaaatatcctcttgttgttttagtttcaggtagcggttgccaaaatagagatgaagaaatttttgggcataagcctttctctgttatagcagattttctttctcgtaatgggattgctgtattcagatatgatgacagaggttggggagaaaaagaagaaagaatgtacaaaggtacaacgatggattttgcccaagatgctctttgtgctataaataaagttaaacaagaaagcatcgtagatactaataatataggaattataggacatagtgagggaggaatgattgctcagatacttgcaaacgaagttgatttcattattatgatggctgctcctgctacaagtggtaaaaatattcttatttctcaaggagctgacttcagcaattattcttttgacactacaaagattaatgattattggctaaaatatttttataattttgagcctaaagattatctaaccaaaataaaagtacctacattagtgcttcaaggagggaaagaccatcaagtcttttcaaaagaaaatatccctcgtatgcaagagtacctttcttctccttttataaaagaataccccaaccttaaccaccttttccaaaactgtgaaacaggacaacttaacgaatatgctctgatagaagaaactatagataaacaagtgttaaaagatatttttaactttatcattttcctgaaaaaataaagaaaagattataaatatcttattttttatttttttttattacttttgcaagataaaacagaaaagatacttgatatggaatttaaagcagaacaaatagcggagtttctcaaaggtagagtagaaggaaataaagatgttgtggttagagaactttgcaaaatagaagaaggcaaacaaggagcgttagcttttctcgctaatccaaaatatactcaatatatctacaccacagaagcctctgtggttattgtcaatgaagattttcacttagaacaacctacaaaagcaacactgataagagttaaagacgcttattcttcgtttgctacattgttggaaatttacaatcaatacagatttatgcgtaatggtgtcagttctcttgcgttcattaatgagaaagctaaaatcggtcacaacgtatatattggcgagttctctgttgttgaaaaagatgctataataggtgatgattgcaaaatatatcctcaagtttttatcggagaaaacgttaaaataggaaacaacgtaactattttcgccggcgtaaagatctatcacgatactgtaataggcgataactgtatcttgcatagcggttgcgtgttgggagctgacggctttggttttgcaccgctggaagatggaacatttaaaaagattcctcaagtaggaaatgttgttgttgaaagtaatgtagaaataggagcgaatacgtgtatagaccgttcaactatgggttcaaccatagtcagtcaaggaactaagttagataacctatgccaaatagctcacaatgtaaaagtcgggagaaatacagctatgtctgcaatgacaggagtagcaggctcaacaactattggagataactgtttcttcggtggtcaaagcggttttgctaactccctaaagataggtaaccgcgttaaagtaggagctaaaacaggtgttttcaaaaatataaaagatgacagcaccattatgggttaccctgctttcaactttagagaatttatgaaaagtacagccatatttcaacgactaccagaattagaaaaacgtatatatgaattagagaaaaaactcaaagagaaagaataaaagaaaagaaaatttgagataaagggagattgtaatttaaatgtcacaatctctcttttttctttttgaaaaagaatattactatcattaacagaaataaaaaaagacaagaccgtagtcctgtctttgatgttttcacaacggaataatccttattgtgaattgcttcaattttgtccgacaaagatataacaaaatttcattataacaaattcttttaagaaaattttccactcccaaaatttttcgtaactttgtgcatataaaaacaaagaagtttctatgaaaaaaataataggtttagatttaggtgttggctctattggttgggctgtcgttaatgaagcggaaaatgataatgaacaaagtaatattgtccgtttaggcgtaagggtaaatcctttaacagcagatgaacaaagtaattttgaagaaggcaaaagtataacaactaatgcagaccgaacattaaaacgttcggcaagaaggaatctacagcgtttccgtttaaggaggaatgaattagtaaaagtcttaaaagaaaacaacatcatcaatgaagattcttgcctcatagaaaatggcaaaaatactacttttgaaacattatctttaagggcaaaggctgttaatgaaaaagtttctttagaagaatttgctcgtatattactttccattaattcaaagagaggatataaaagtaatagaaaagctttgaacagcgaacaagaagatggacaattaatagattctatagacgtagcaagagagttgaacgaaagaaatatcactccatcacaatattgtttagaactattgcaacaaggcaaagaaacattccctgacttctatcgttcagatttacaaaacgagtttgataaaatctggaattatcaaaagcaatactatgcagatattttaacagatgaatttaaaaatcatatacaagggcgaagtaaaacaaatgttacaaagatatttttagccaagtacggtctttatgcagaagatataaaagggtcaaagaaagacatcaaaaacaaaggattacaattaaaagtagaagcattaacaagaaaattaacaaaagaagaattagtttatgttgttgctgaaataaacggtcagataagtggttcttctggttatttaggggcaataagcgatagaaataaagaattgtattttagaaatcaaaccgtaggacaatatctgcataatatcataaaaacaaaccctcatgcaagccttaaaaatcttgtgttttatagacaagattacatagatgaatttgacaaaatatgggatactcaagcaaaatactatcctcaactaacttctgatttaaagaaaaaaataaaagataacattattttttatcaaagaagattgaaaagccagaaaggactattagacttctgtatttttgaaagcaaagaaatcgaaataatagttgatggcaagaaaaagaagaaaagaacaggattaagagtttgtccaaaatcttctccactgtttcaagagtttagaacatggcaaatgctaaataatttacaaataataagtgaaacaggggaaaaacgttacttggacatagaagagaaagacaagttatttgaagaattgcaatacacagataaattaaaaaaatctgaatttttgaaattattgctgaataaagctaaaggatattcttctaactacgaagaactgataggaaaccgtacaatagcaaaactttactcagtggcaccttcaattaaagaagaagtttttatttttaatagtgctgaagacttacaatctcaactaatctttagactttggctccttctctattcttatgaaggggataatactcctacaggtaatgggaaccttattgcaaggttagaaaatgagtatggtttttctaaagaagaagcaaaaggtttagcaaatatttcatttgaggaagattattctaatctgtcttctaaggctataaagaaaatattacctttcttgaaagaaggttatcaatatgatgaagcttgtcttttggctggatacaaacattccgaacaatctctaacaagagaagaaatagacaacaagatactaaaagataaattagatttattaccaaaaaatagtttaagaaaccctgtagttgaaaagattcttaaccaaatggttaatgttgttaatgctttaatagaagaatatggcaaacctgatgagataagaatagaaatggcaagagaattaaaaaagtctgctgcggaaagagagtctacgacaaaagcaataaatgataattctaaattaaatgaggcctatgtaaaagaaataaaagattattaccattttactcatgtaagccgcaacgatgttatacgctataaactttggaaagaattagaaagcaatggttttaagacattgtactcaaatacatatattccaaaagaagaagtttttgataaaaaatttgatatagaacatatcatccctcaatctaaactctttgatgattcatttgcaaacaagactcttgaacttcgagatataaatatagaaaaaagtaatgaaactgcctatgattttgtcgcaaacaaatacggagaagaaggattgcaacaatatcttaatagaattgagaatttacttaaatctaataaaataggcagaacgaaatatagaaacctaaaaaccaaacttacagatataccaaaagactttataaaccgagatcttaatgatactcaatatatctctaaaaaagcaaaagaaatgcttctttctattgtaaaagaagttaatacaacaacaggttcagttacagataaattgcgtgaagattggcagatagtcaatattatgcaagaactaaattgggataaatattctgctttaggtctcactgaagttatagaaaacaaagatggacaaacaataagaaaaataaaagattggacaaaaagaaatgaccatcgccatcatgctatggatgctttaaccatagcatttacaaaacattcttatatacaatacttgaataacctaaatgcaagaagtgataagtcaggcagtatttatgcaatagagaaaaaagaattatatagagacgaacataataaacttttatttaaccctcctttgcctatagatgagttccgttctgaagtaaaaaaacatttagagcaaattttggtatcaattaaagcaaaaaataaggtcgtaacacaaaatatcaataaaacaaaacgcaaaggcggaacaaatagagtgatccaattaactccaagaggacaattacacaaggaaactgtttatggtaaaagacaaagatatataacaaaagaagaaaaagttggaggaagtttttctaaagaaaagataatgactgtttgccgtaaagactatagagaagcccttcttaaccgtttagaagaatattacaacgaccctaaaaaagcttttacaggcaaaaactctttagaaaaaaatccggtttattataatcttgccttagaaaaaaaagttcctgaaagagtaaaaaccgtttcctttgaaacaatctataccataagaaaagagatctcaaaagatcttaaacttgacaaagttgttgatgtaagaataaggaaaatcttagaagaaagattaaaagaatataatggtaatgctaatgaagcgttttctaatcttgatgaaaatcctatttggagtaacaaagaaaaaggtattgcaataaaaagagtaaccattactgcgataaataatgctgaagctttacatgataaaaaagataacaaaggaaatcttattttagatagcgaaggaaacaaacagcctgttgattttgtaagtacaggaaacaatcatcatgttgctatttatagagatgaaaacggagatttacaagaaaatattgtctctttttatgaagcaacagcaagggctatcaatcaagaacctattatagataaaaattataattcagataaaggctggaagtttctctttactatgaaacaaaatgaatattttcttttccctgatgataaaggatttaatccaacagaacttacaaaggattttattcttaacgaagacaactattcaattctttcccctcatttatttagggtgcaatctttatctaaagttatgtatgggaattctgctgtaagagactatatttttaggcaccatttagaaacaaatgtaagttcaaaacttagagattttacatataaacaatataaatcgcttgcatttgcttcaactattgttaaagtcagaattaatcatatcggtaaaattgttgcagtaggagaatattaattgtaacgttatcaagtaatcatcgtataataggtaattattaaccaattaaaaaccttttatacgatgattaaacgtaccctttgttttagcaatcctgcttatttaagtgtaaagttaaatcaactcgtaatttctttttcagataaggatgaaaagaaaaccattccaatagaagatattggagttgttatccttgacagccctcagataacagttactcaaacagttttagtgaaactcttagaaaacaatactgctgttataacttgcaactcttctcatcatcccattggtttacaactctgcttggatggaaacacattgcaaagcgaacgttttcaaaaacagatttctgcttctgaagttttaaagaaaaacctttggcaacagactattcaaagcaagatatataatcaggcaatgtttttgcaagaattggggatccctgttagaaatatgcttttatggagcagaagtgttacaagtggagacaccaaaaaccatgaggcgagagctgccgcttattattgggagactcttttacagtctcacgataattttaaacgagaacgctttggagaatatcccaacaatttttttaactatacctacgccatacttagggctatcgttgcaagaaaccttgtaggatcaggtcttctgcccactttaggcatacatcacaaaaacaaatataacgccttttgtcttgccgatgatataatggaaccttatcgtccctatgcagatagattggttttggaaaccatacagaaatatcctgatacagaagacatcaataaagagattaaatctatgctcctcacccttcccgttatagatgtaaaaatcaacaaacaacagaggcctctgcttgttgctgtggcagaaacgacggcatctcttgctcaatgctttgctggcaaaagaagaaaaataaaatatcccacattttaatggaaaggtttaatgcttacagaattatgtgggtacttgttttgtttgacttaccgactgaaacgaaaaaggatagaaagatttatactgacttcaggaaaaatcttttgaaggatggttttgctatgtttcaattctctatctatttacgtcattgcgtcagcaaagaagcagcagatgtgcatataaacagagtcaaacgtttgctacctcctaatggacatgtgggaattctgacaataaccgacaaacaatttgggaatatggaaatattttttggaaagaaagaaaaggaacgaccagatataggacaacaattagaactgttttagtgttgattttcagtcatttaaaaaacacttgattttcattaaaaaaaacgaagagtttagggtgtaaagtcttcgttttcgcaaaaaaagtcttcgtttttagaaattaaaacgaagacttttttcaagataattaagagttgatattttctcccttttttatgtccgaaaaacataattttgctcttaaaaaaatgtaaaaataatagagaaaattttttcaaaatttttattctgccttctatttttttatcgttttttgaaaatttattgcttttttctttaaaaaacagacaaaatctctaagtcaaaaactattttttattgataaatttaacactaaaaaactaaaaatagaacaaaaaaaatagaccattcgccttaataaaaccctttttccagaaagaaattagcactgaactatagtttgtaaagaactgaaaataaaatctttgcagtgtggtatgttgtgtttcacactgcaaagatacaaaattgaaagcaattcacaactcactaaatttggtcgtttggattactattgttgtgtttcacactgcaaagatacaaaattgaaagcaattcacaacaaagcgtaacggctttgaccttagttttgcgttgtgtttcacactgcaaagatacaaaattgaaagcaattcacaactattatcattccgataactgtggctgcaacgttgtgtttcacactgcaaagatacaaaattgaaagcaattcacaacaaccgcctgcaagtctgaccgcctgaaaatgttgtgtttcacactgcaaagatacaaaattgaaagcaattcacaacatataataatttaatagaaatatactttttgttgtgtttcacactgcaaagatacaaaattgaaagcaattcacaacatactaatattaagtttttagcgttatatagaaatatataacgcttttattatgttaagttttatttttggttatatttttggcggctttcttcgtgattggcatgatggtttaaactttaagaaacgtaggagaataggttttaagagtcttcattgaggaacaagaaaccatctgcgtcatatataggatacctatgttattgcgatttttttaaagaaaaaatagttattttcattgaaataaatgtctgtaattaataagtttaatgttagaaacagtgttttccatattacctgcatagataacagttttatgagatataggttgtttgattagagaagctgttttcttcagtgttttttcaaatacggagttataagtcattgaagacttgatttcaaaagcagacaattctccttcttccaatgacaacaagtctatttcattttgatttgaatctctataaaagtaaagacgaggttcttttccttgatttaatctatgtttaatgaattctgaaacgacaaaattctcaaatagcgatccctttaacttatcgcgtgataattgggagatagattcaatattcagtaagtaacacgcaagacctgtatcgcaaaagtaaagttttggagatttaattaaacgtttaccaaagttatcatagtaaggaggaagcaaataaacaatatatgaggtttgcagtatggaaagccaagaagttattgtattggaagtaactccaacttcattggctaactgtgaagcattaaatacagagccaattcttcctgcacatagttttagaaagttgttaaactgcattatccctttgacttgcaacaaatccctaacatctttttctaaataggttttgacatagaaaggatacagcatatcgggaatatttttctttgcacagatggctggatataatccattgaacagtatttcatctaaggacatatctttatatatattcgcaacttcactgtatgacattggcagcaattcaaacaaagcaacacgtcccgctaatgattgtgtgatggttttcatcatttgaaagttcgaactccccgaaagaatgaattttcttttcgggttattatctacaattccttgaatatatgaaaataaggatggaaccctttgtacttcatccaaaataataccagttcccgtttgatttaaaaaaccgataggatcattttcggcataatttcttacatccaaatcctctaacgaaaatacagcataatcgttaaacatgtgctttattagagtactttttcctgattgacgaggtcctgtaacacaaataacagaataatattctattgccttatatatagccctacttatctctctttcaattattttcatcgttttatgcaaaattgaaattcaattgcaaaattacataatttctttgtaactaccaaataatcacatataaaaaagagtatgttgtcaaatgtgaaatgtatctttattctattacaagtaacattcctgaaaacgtagaaaaggcacaataacactgggcgatcgaaacaccctgcgtattatcatgcctttccatttcgcaagattacaacaataaattagactacaagcaaaaaaataataaaaaatgacaataaaagattttgataaaaaattacaaaacatagcagatcagatgcctgactctctgttgtacttaacatagtataaagtacagattagtgaaagatattccaaggtcagtcgtcagaatagagttcatttttcttgaaaaaactatgcatatcctgaaagaaccagatgattagtccaaggaatccaaaaaaaccgataacgccgactaatattgtaagaataatacgaatcataattacatataaaaggatcacaccctttgatataatccttaattctcttttataaattttctaattttatttattgtattcatatctttcttctgaatgagagtatttatatagatcttttttgtttcctattacttcttctctgtccaattcttcatctgaaaagaaacctatatcagcatctcacgtcttactttatagtaagtatcgccaattttttctatttcccaatattcatcttcctcacacctgtttagcaaatcagagtctgtatttattttctgagattcattttgagaattattctttcttggatcaatattacatatatcccctattcgacctgtttcaacaggttctctcttttcaggaataaggcttcctatcgtaacccccaaacataagattgaaactgctattatcgtttccaatccgttttcttttttgctctcataatttaaactatcaaaaaacgtgaatactcccttgcttatcccattgtattcaatactacaaagatataaacatttagttgtcaaagattatctcgcctgtttctggactatagacaaactgaccgaaatctttcaatccgtttttgtttactatcattgtataagtcatacccttcttgacaatgacttcaaacttatcggctttatagttaccaatagcagcgtttttaaaagtaagtacagcgttgtcaagtatctgtcctttctcgtcaaaggcacgttctttatctttaaagttgtcttttgttattcttcctgtaacaaggaactttgttgcttggtcccaatccaaaacagcagcgtctctatatctctcatcatagatagcagggacagcagcaccattaagaataatgtagagttgtgctttgttgccgtctatcattgttattttgatatgattatctgtatatataataggtatatctgtaataggcgctggtttattgtcagagactatatcaacaatatgacttttgagacttgcatcaactaaggagtccttaaccgtttgaggaacatagtctgtccttagaatacgaaattctgttcttcggtttagttgatgagctgcttctttctctcctttagtctttaaagaattgatataatcatcagtaagagttatacctttaggaaacttgtatgttttacctccgtaagttgcgtatgtctctctcataagtgttcttggcactctgtctccataacctttagcgaccattcttcctggctctattccacgagcttgtaagaactctaccacactttctgctctacgttgagaaagagtgtcattagttagggttacgtatggtcgtgaatctgtatgagaaccaagttctataacgtatgtaggattattaaccaatataaccaaaaggtcagaaagagaatcttggtattggtcttgtaaatcccattttgctaaatcataacgtatctctggcaaaacaacaggttcttttggaataggcataaggcggaagttgtgaaccaaatccttacttgtggtcaaaccaactgtcgtttctgttccttcagtgttcatataatctatttgggacacctgaagtttataatttacgttatattttacttgttctttgttgaattcgtactttccttcgttattagtacgtgtctctatttgtgagtggtcatcacctataagtcttactcttgcaccaggaactgcctgcatacttttatcgtttctaacctctccactcaaagtaaagaacataggtgcgcgatagaatgaataaatgtcgtagcctcctgttcctccgtctctgttagaagaaaaatagccactctcttctgcagcaacgctttcgtcttcgttatagttaaatatcaaacctatttcatcaaaaggagtattaataggataacccatattttgtggttctgaccattcaccatcttccaatgaagaaacaaaaatatcataacctcctaatcctttcaaaccatcagaagaataatacaaacggtcgttacctcttagaacaggaaactcttctttaccttctgtgtttataagtttgccaaggttagtaacattaccaaaaggttcattgatattgtttcttgttgctttccatatatcataatctccttctcctcctggacgattggaagagaaatagatagtaagttcatcacttgttactgcaggatggaaatagttgtaggctgtatcaccaaggtctaacataacaaaagcctctgcctcatcacctccttttgaagattttttatctttatccttgttgtctttattttccttagatgcagtcgcttttttattaccttttgtttttgctggttcaataggagaagaatagatagcacagtttaactgcatattcttctttatattacatcttgaaaaatagtaatgtgtcgttttcccattgtctatctttatcaattctccctcattagcagcggtatttatacctgcaacagaaaactctgaaccatctccaaaagttccattcttaagttttgaagattgatatatatttgaaaaatattctccagtccaagcatctctatctttgctttctgagttgtttcttgaagaagtaaaggtgattgattggcattcaacagcattatcccacgatggcttccaatcattccattctgtattcaagttcttttcttcttttatttcgtgcttcgttggattagccatcatcttctttgctaaggctatgctttctaatcttcttttagccaaagcatcatcaggaacaagtttcaagtactctttatagttatattctgcattatcccaatctgaaaggaaacgctggaagtctgccatataaagataaatacgaggctgagtttgatagtacttagcctttacaagacgttgataagtcttgattgctttctctttctcgtctaaatatctgtaacattctgctttttgaaacaaaatacggtctttttcttggcggttagccttaactttagaataagccttatcatataaatccacagcaacaagatattgtttgctgttaaaagcagcatctgctttttgtgtaagactttgcttttgtgcaaatagacttattgccattgagatagttgcaaaaaatacaaaaaacttttttatactcatttttcttaaaattttcttatagtttattctgctattatacgtaataataaggtcgcaaagttacaaaagatttttatttttcaaataaaatttattaaaaatctcttaaaacatatttttatgaacgagttttcaatcaaaaaaagtattaagaaaaataaaatgttgtaattttgcgacagattcaatggaatagtttttagttagaaattaaaaaacgtttttgatgatagataagaaaactaacaaacaattggctaagagtttaaagaaaaagacaagaaaaccttcttttcttgctcgctacaatagaaaaaaactccttacaaaattgacagaaactcttaaagaggaacaagtaaaacacttgtggttgcatcaggattttgtttctgcggttgagaagaaacccaaaacaatagttgcatacgcagaatttgataacaaagcagaagagggaattgcaaatagtgtagatggtagaatggatgaaaaattccctaaacacaaagtaaatatcataaatgtaaatagtcttcttcctgcaataagagaatctattttcaaagaactgactcaagttttttagaacataagtctatttatgaaaatcacagcaacaattatctccctcaacgaagaaaaaaacattgctaagtgtttggagagtctgcgagaagttgcagatgagattgttgttgtagatagtctttcaaaagataaaactcaagagatttgtgaaagatatggagtaaggtttatttctcaaaagtttttgggatatgcagaacagaaaaactttgctgcctcttttgcaaataatgattatatctttagtatcgatgctgacgaatatctttcagagaaactgaggttaagtcttttgaaactgaaaagttctaattccgttatgcaagcctattacgtaaaaaggcttaacaatttttggggtcattggattaagacttgcggtttatatcccgacaaacaactgcgtctatataataaggagtacggagaattcaaaggcaaatatgttcatgaaagcgtttgcatgcaagaaaactgcaaaacagggctgttggaaggggatctgatgcacaatacttttgcagacaaagagagctttgctgcccagcagaaaaaatatgctgaattgaaagccaaagaatatgccgaaaaaaacaagcgacttcctttacctatgatttatataaaagtggcgtggaggtttttcaagaactttgttctgcaaagagggttcctaaacggaaagacaggattgtttatctgtaaacaatatgctttgtatgaatataataagtataaacgtaaataattaacgctgcttcaagaaagatattataccttctcttactaagtgtttgctgaaagaaaagaacataatctttctgtagaaaatctttctttttttaattttttatcaaaaaaattttgtagttcaataagttattgtaattttgcactcttcaaaagactggttcgtaagtcccgttaatccttacgtaacttgcttttgataagagtattgctaagttttatatatgctttttttggccgaaagggatgtataaaaaattagcgatagtgtaattaaagtttttaaaactaaattattaaaagtagaaatgagtacattaagttataaaactatatccgttaaacctgctgatgtagagaaaaaatggatagttatagatgccgaaaatcaagttgtaggtcgtgtagctacaagagcggcaaacattcttagaggcaaacataagccttcttttactcctcatgttgattgtggagataacgtaatcataataaacgcagaaaaagtcaaatttacaggaaaaaaacttactgacaaacaatatgtacgtcacactggttatccaggaggtcaaagatttgcaactccaagactttggttctctaagttccctgttagagttcttgaacatgcagtaagaggtatgctccctaaaaataaattaggagacaaaatatatactcatctacatgttgtagaaggaccaaaccacaaatttgaagcacaaaaaccacaattagtagaacttaattcaattagataaagatggaaggcgtaataaacacaataggaagaagaaagactgctgttgcacgtgtatatatgaaaccaggtaatggttcaatagtagtcaatggaagagattacaaagagtatttcactactgctcctttgcaatatatcgtttgccaagcttttgaaacagtagaagctatgggtaaatttgatgtaaaagctaatcttgatggtggtggtttttctggacaagcagaagctttgagaatgggtatcgcaagagctttatgtgaagtaaatgcagaagatagacctgctcttaaagcaaaaggtttgcttaagagagactctcgtatggttgaaagaaagaaaccaggacaaaagaaagcaagaaaacgtttccaattcagcaaacgttaatatttattataaggtggataaggttgttgaaaccttattcacttttcttaggatagtttagtatccaaactgacaagatttgttaatcctaaagcaactacttgtcggttgttttaaagtaaaatttaggaaagtaaacaaaaaaacaaaagaaatgttagaatttgacaaaatgcttgatgcaggtgttcattttggacacttaaaaagaaaatggaatcctaagatggctccttatatatttatggagcgtaatggtattcatatcatt

SEQ ID NO: 2281 - DNA, 24041 bp, synthetic construct
  source 1..24041: mol_type = other DNA
  misc_feature 1..24041: note = Synthetic
gcagacttataccgagcgtaccgaccttttccatatcagcatagtcctccatatccacggtgatgtcgcctttggcaagctgttccaccaatgcctgtgcggaagtgttgtcaaccaatgttgcggtaaatgtccggcctccttcgaccgtcagtctgatcttgttgttttccatatctgcatttatttgattatctgaaatttgcatctcatccaaccagacggagacgagtgattccatgctgttcagcgagcttgatgtgagcagcagtgattctgtaaaaacggcatcaggaacaagcgatgcggcatccctttcggaggtacctatgccgctgctaccgctactggcaaaaagggctatacgcttgccggccagcagatcggcatgctcatgcaggaatgcctgcataggagtggccatgtgtccgtaccatatagggtagcctacgaacacaatgtcgtaagtgtcaaaattttcaacggatgtggcgaccgccggataatcgccttgctcaatcgccgcaagctcagcaccggctctgtcaagcatggcattgtagtcgtcctcatacggtgtatccggcacgacttctatcatatcgcagcccaaaactgtacttatagtctgcgccatacgctctgtgttgccggtacgggagcagtagagtacaatacagctgccggactcagactgctcctgaccgtccgtcccggggccgacggcagtacatgatgccgtgctgacgagagcggccgacagcatcatctgtataaggaaaattcttctcatattgcattgtatttaaaaaacacaatgcaaaattacccgccgacaaccacacaggagtagatatttcccggcaataagtaacaatttcacggaatcagctcacgtctcgggaaacatccacaccctacagcttcccgacctcttctgccgtaagacccgtaatctcagatatgacctccaccggaatccccttggctttcattcccctggcattccttatgcgttcctcctgctgtccttgttccagtccttgttccagtccttgttccatgcctttctccagtccttgtttcatgcctttctccagcccttgtttcataccctgttccaagcctttagccagcccttgcttcatacctctttccatacccctctccatacctttagccatacctttctccaggccacggcgctccgctcccaccatcaggaggcgcgacgcacctatcatgtcccagaaatgctcgtaggtcagcagctcctgctccgtgaaggccgactcctccacttcctccactgccttattgatctccggaactgacaaaagctcctccggcacctcacgggtcttcccgtctatctccgtcaggtagcgcagccacagcacctgcatcctacggtcgctgtagctcctcggggtgaacttcggaagctcgatgaagatgaagcgaaggccctcgatcacctccttcgtctcggccacctctacaatgcggtagtcatgatagtagtccgggctctccgagaacgtatcgttgaccagattgagggaatatacaggctgaaggagctcgtaaggacggctcttgtccagctggctcacataggccttggaagcattgaacagcacgcgctgcttgtactccggggtccacatcatctgcatctccaccaggaactgacgtccgcggccgtccacgcagcgcacatccactatgctgtccttgcgcagaggattcatcggaacaagttcaggattgaggtattccacgctcctgatctcttcttcagggctctcgaaaggcagcagggcattcataaagctgatcaccaaatccttgtgctcgccgaacaccttcttgaaggtcaagtcggccttcggatcaagatactttttcataaattctctcctcacgttttaaattcatactcgggttgacggaacaaagataagtattccagagaataataaccagtgttgaaacgtctataaacgtttataaccgtttataaacggatacggcggctgctaatgatgccaatgtatgtttcttttgtttttcgcctcactgcaaaacaagttgactgcaaaacaagttggacaacaatcagcggacacactatgagggttctgtggctatggtacgatacagtcagctcattatctctcggctgaaacgacaaatagaagatttggctgttcaggttatgtaatgatgtaaggtcaattagggtcaattaaccggaagcaatgtcactaaacataatagttatacataagtatctgggcttcctgcatttacacataactaaactgtctagtgagtcaaaaaagtgctttatttgcgatgtttctcaccacataactttttacgaatctgcaactctttggtttttaagaaattcgttttaactaaaatgtttagtgaaaaacagtgaaggcagtgaaaacagctgaaaaacagctgaaagacagtggtaacagcaactatccagactctcgtgggtagtgcttgtaaatgatcatttttcagagacgtgctcctataaccgttactctatcagccaactttcatcagcaatctctcatccgctgtccgtctgaaataagaaacagcccatattcatcagtcctgaaccactttcatcaggcggtcttccgatagctgagcacggcccacgtgccgaagaaggcatcgaacccgagcagggcgaggaactgtgtgccgaggtcggtcagggtgtagccctgaaggtagacgccgcggagcatctctatgaagtagcggggcgggttcagccatgtcaggacctgagcccagcggggcatggaggatatgggtgtgagcagtccgctcatgagcatgaatatcaggatgaaaaagaacatcacgaacatggcctgctgcatggtgtcggagtagttggagatggtgaggccgaaacctgagatggcgaaaatgaacagtatcgagaacagatagaccgtccatatccctttttcaggcgaaagaccgtagacgagccaggccagcagcatgcacacggagagcactgttctaatcagcactttattgtacaagtattgtgcctgtgcggtgagaaattgacaatccccaccccgaggaagaccagcaccgctgcgacacccttggcccacgtcattgtgtccaagccggcggcgaggctgatgcacatggccaccaccggctgcacgtaggagtacatgcacaccagcatgggcttcaggcgcttctgccctatgggtatgaggaaataggagatgaaggtcgcgcacaccacgacgaagaggacctgccacacgatggccggggtcattgactggaaatccgtccgcagcaggccgggtgcgaacggcagggcatacacggtggaaaagacgaacatccacttcatgaaggtgataacgctgtatttccggataagcggcttgaaaatgcccacgtagcaggcaaagctaagggtattgacgaacatcagcaacactccgccgagggtggtcctgtccgcccctcccgaagaaccgaccgagttcagcacgatgaacagcaccccggagaaactgacagccagtccgataatcccgtgcgccgtaatccggtccttgagcgcgatggccgccacaatcatcgtcatcaccggggtcatcaggctcagcaccgaggcatctacggcagtggtcatggttatcgcctccaaaaacgagaactgcgtcaggaacagccccagcatcgacgccagcgcaatcttccacaggtccctcacctccaccctctccttggtgcgggtcaccgtcgaggctatgcagaaaagcagcagggccccggccgagcgcagcaggaacagcgacatcggcgacacattgccgtcattggcaatgtttttgcagaaaattatattgaacccgaatatcaggtaagccgtaaaacaggccaggttgccggtcaatgtatctttggttgcagctctcatctctcactattgctgaaaacggccgcaaaaatacatatactcgctcaattgtagacggatttcgaaagaatcaataggtctttgcaacggaatgcagagtactatagaacagcaaggcgcgagagcattagaaaaatctcaactttttaccgcaaaacggcaaatacatttcagtaactcacatttttgtgatatatttgcattgtcaaacaaaacatcataagttctatgaaatggaatgaatttgcgaaattagcaagaagcagagggtggtactgctaccggagcggcggcaaccacgacatttaccgacatcccgagcggagcggttccctcgtaatagagcggcactggtctcaggaaataaggcccggactaatgaaaagattgatgaaacagattggggaagaatgattcccatatctaagacaaaaaggatatgaaaaagacattggctattattgagaaagacgagaacggatacggcatttatacccctgacctgaaggacacggtcattagcggttcagggatgagtgtagaagatgcaaaagcagactttctgaccgcttacaaagaagtcctggacagctacactgagaatggggaggcagttcctgacgagctgaaggacctggcatttgagtacaaatatgacgtgtcggccttcttcaaccagttcgactgtatcaacgcatcaaagtttgcggcactcgccgggatatctccgtcactgatgagacattacaaatcaggcgaccagtacatctctgagaagcagctggagaagattgaaagagcggcccacgaattaggccgcaggcttctggccatttccatgtgatgttttgtttgacgacttcatctatggatgcagccccggacaatcaagcccggggctttttcagttcatgctttcttaatatttaggtatttcatacgcctgaacatttattatcaacgatgcgaatattcaaaagttttcaatatggttgtatctatacaacctttctctcgcatctgacaaccattttgtcagcggcgttgaacagcagccggttaatagaggagggtgacggaggaaccccagacaagggaggcgccgccgtcagtgttccatagacattcgcgggcggtgaggcggcctgtcgcggtgtccagtacgaccactatgtacgagagcagggtctcgtcctgcgccgaaaactcccccttcatgggagaatccaccctgatgaccggcagggcgacggtgctgtccaccccgtgccaggtgtagaactcattgtagttgcagtcgccgtggaaatacgcctttatctccggatgtcccgcgatgaatcgctccagggcacgccagttctctaatggcaggctgtcgatgctcccgacggcgcaagtgtcggacagcaggttctcgaaacggtctgcgggattgatgtcatagggacaataggggttggtgaaatgctttgcgtccgctccaggaggatcatgtgtgaacagcagcacgggaaggtcatctcctgccgtcacggcactgccgtaccactcccgcatgcacgagtcgggccacatgcccatgaacacgaagcgcacgctgtccatgacaaatgtgtaatgcgtcctgtccgtcccgtaatcgaaagtctccgcactgaccgtagtatccgtatgcatcatcatatcgtagatacccgcagcactggaggcatcccgctcagggctcatcggcttcggatagcctatggcattggaaatgtcgtgattgccggggacaaggtacaggcggtccagatattcagcccagtcccgcaggaactgcctccacgactccgaggcaggctgtaccccgcgctccatcctattggcgatatccccggtgcagacgacgaaatccggctctccgaatacacagccccctcccactccgccgtcatccggcagcaccgcattttccagaaggccgaacgaccgcagcatcgcccggctcaccgaatctgccggaacactctccgcaccgcggaactccctgtctatgccgtaatgcaggtcggagcagtacacaaaacggagaatttccccgtcctgcgccccaacacagccgcagaacagggaaatacacactaacactaatactaacctttttaccattctatcttctcatcctctactttctcggccgaagcattactgctgccttcggttgccgtcatgatgtaccagtcaccggtaccgtccacatccctggcgaaggagcctttgtccttgctgtcgtacattccgtcatcctcgccccaggtctcgtcaagggccttgctcaggttcttgaacagatctatcgaggttccgtccggagcgaacagctcgatcttcaccgacttgtcggccgagagaccggactcgaaaatcgggaaatccggattctcggtgctctcagccttgtcggatttctcggaccagacggtcaggaagccgtgggcaggcacaactgttccggccgcagccgtgaagatatcctcgtcatccttggtgaaatacactccggcgatgtcaatgtcggcatcggaagtgttgtacagctcgatgaacttgtcattgccgttcagctcgttcagtctcaaagctgtataatcggtcgtaccgggttcgtccccgccagcggaagagttgctctcgccgggagtaggctcggtgcatacgctccagttgtcggagccgtcgggaatacgggcgtatgaggagccgtcgtccattgcgggatactctaccgtatccacgatatcaccattggcatccagtactgtcactacgtctccgccgccactgagaccgaaggtgaaggtctcgtccttgtagaagaccattatggccccggcctcaaggactgtaccgtcagtgattacatattcctcctctgagccattgtcgtcctgtagcctgtagccgctgatatccactgcctctgcagaagtattgataagctcgatgaagtcagtctgctccccgtcgatggtggcgccctgaacctcattgatcagtacgggagagctggatgtacccggctcgtccccaggctgatctggaatctcgtcaggagtgccggtgttggaacggccctttgtgccgccctcgatgacatcccatgaagtaccgccatcctctgttctggcgtaagtgaaaccgtcctccatcgcaggtacgatgacctcgtctatcttcgcgtaggtcacgtcgagcactgtgatggcatctccgtcacccgatattccgaactggaaagtaccctcctcaatcactaaaaagccctttgccgggatagtggagccatcagggaatgtgtattcctcatcggttcccttattgtcctgcaagtggaagcccgtcaggtccatctcggtctccccggcattgtacagttctatccagtccataccgccagagcatatctcattgataaaaagaccttgaacgtctgaaggctctgtaccaggctccctgtcgtccttgcagcctgtgagggtaagtgccgcagtcagtgccgcggccatgaaaaagaatctactgcttttcatatctatttgaatttaacctttttactattagaatgacaccataaacctaagctgcagcacatggaagtcgatgccctccggcctggcctggctcagaggcatgttgccggcggtaatctgtcccttggagtcagcgtacttgtcgttgtccatgaacagatagttgagacctatgagaatattgcttaccggataccagttcaggttggcactgtaggaataggccgagccgccggttatcggtgatgacatgtcgtgaaaatcattgaggttcaaatggctgacccttgcgctgacctccaggttgcctcctttgcggttgaccttgactcctccgaactcggcatccgcctggctgtaacgtctctgctcccctatgatcatgtatgacgcggtggcgtaccagcccatgaactccgcatccgcaagcggctcgcggacatccccgttgtatttgtagcggtccagggtagtgaaaagatactcgccgtatgccaggaacttgttccacctgaaggccagctcagccccgaaagtggcgtaatggttcacgttgcccacctcagcctgcacgaaacgcctgcggtcggtgcggctctcggggaaagtccggaacagagcaatacggtcctcctcgccgccggcatccggtctgcgccagcttgcataaccgccgacgtgcagggtgatatcgtcattgtttataatgggcacggccacccttccagtgaatccgtaaccgtcactgcccctgttgcgctccttctgtatgatatcgacctgctgtccgaagactccgccggatacccaccaatatttgccccaccatgtcaccgccacaccgagacgacggcctccggccagagcctcgaccgccataggccgttcatttgccatgatataacgggagctggtcactctctccatactcatcggctccttgaagtgaccggcctggacggacagatgctcgctgaaattgtatcctaagtacatatccttgatttccacctcgttgtacgcaaaatccaggtcgaactccgcaaaccacttcccgtacaactcagccttgaccgcgaacctcgcccggcggatactggcaccgttgctgaaccggaacaccccgtcgtcctcctccaagtcgttgttgatcttggaagtaagtccctccacggactccgtaggcagatagaacgacacatccgtgtagatgcggttgtcgaaccatagatggaacttattgtctttcgtagagaaattgagcttgccgtccttgatataggctccggccttcagttccctgttctccagtccctgaagccaggggcctgatgtgagagtgtccctgccatttgactgtgcggatgccgtaacggcggcggaacacatcatcgatactgcagctgcagctgaaattaacctgttcttatccataacgtaaataacggccgcaaaagtatggagtcggggtttcaaaaatatgacagtacgttgtcataaatatttccggactgttaaaattgcattacggaggagggcctttccttgtcggttttcatttaaatgcctattttcgcggaagaaatccaaaacatcagaaccatgatcagaatctacggaatgcacacctgccccgactgcgcctgtatcgaggaacaggtcagggataatgacggatacaggataatcgatatcggagaacacgtacggaacctcaaggccttcctccgcctgagggacagcagcccggtcttcgacgaggcccgcaggaacggcagcatcggcattccctgcttcgtactggaggacggaagagtcaccctctcccccgaagaggcaggtctgcaccggtgcacctcaaatactcaggcaaatacaaagcaacgctccgggatggaagataccggaaacacagccacagaagggacatcatgcagcctggacggatgcggctgctgaaacgacagcagaggcaaccgcaaaagcaactaccggccaacaccggccataccgtaatcacacaaagtaggatagcggctccagccacctgagagacccgaagcaacggtaagcagagcagcgccccgattcaacaacgcactaacgttcaattagttataaatacaccctgtcaccaagggcctgtccgaaacctacgaaaagttctagtcaaattcacaatccactgtttttctgcgcattacaaaaacggaccgctcctgcgcttaccgttactcaacttctaccaattacgcgcacaacataaaaaggcgaaccgtgaggcccgccttaaatgttttcacaacggaataatccttattgtgaattgcttcaaacttgaaaacaaatatagcccatttttccaaaatgagcaattttttcttaaatttgaagcatattcatttaatgccaatacactatgaaaaagatactaggcctggacctcggagtttcaagcatcggatgggcactcgttaacgaagcggaaaatcaagttgagaaatcgtctatcatacgacttggagtcagagtcaatcctctgaccgtggatgaaaagggcaatttcgaaaccggcaagtcaattacaaccaatgccgaccgcacactgaaacgcagtatgcgccgcaacctgcaaagatacaaactgcgcagagccgcacttatagatacccttatgtcatacggatggatcaacgagggcagtatccttgcagaatccggaaaggataccacattccagactctgaaactgcgggccaaagccgcagagaaggagatttcactggaggaactggctcgagtatttctgaacatcaacaagaagcgcggatacaaaagttcccgtaagctcaacaagagtgataacaccgatgagggaagcctcatagacggcatggagaccgcacggattctgagcgaagaaagcatcactccgggagaatattcctaccggtttttatgcgaaggcaaagaagagaagaatctgccggaattctacaaatctgacttggaaaacgagtttgaacggatatgggcattccaaaaacaattctacccggacatactgactgatattttaaaagagaacctaaaagacaggaacgagaaacagacatgggccatctgtgaaaagcctttcaacattgccggcacaaaacgcacaacaaaaggcaaagagctggtaatagagaattacctatggagaagtcaggctcttaaagagcaattgaatctggagcagctcgcagtagtcctgcagaaggtaaacgcacagctcaggaactcagacagctacctggggagaatcagcgaccgtagcaaggaactttatttcaagcaccggacagtcggacaataccagttggcgcaactgatgaaagacccgcattcaagtctaaagaatcaggtattctacagacaggactatatagaggaattcgaccggatatgggagacccagtccagattccatccggaaatgacctcagacaaaaaaaggaacatcagagacatcatcatattttaccaaagaccgctaaaaagtcagaagagccttgtttcctactgtgagtttgagaaaggccggaaagtgtgtcctaaatcctctcccgtattccaggatttcaagatatggcagatgctcaacaacctcaaagttgatggggaatatcttgacctcaaatccaagcaactgttattcaaagaactgagcatacgaaaagagctgagcaagaccaacacattaaaactgcttttcggcaagtccaaaggccacgatatgaatttccggaaactggaaggcaaccgtactcaggccgccttgttcctggcatattccaagattctctcactttcagggcatgatgaggttgatttttcaaaaagcattgacgaaattatggacaagactgcatcagtattctctgcccttggtatcaatactgacattcttgccttcgactcatcaaaatccgggaaagagatggaaaacgagccactgtacagactatggcacctcatgtattcctacaccgaggacaactctaaaacaggctatgattccttggtcagcaaactgcaagaagaattcggtttcacccctgaatatgggaagattctcgcatccgttacttttgaggacgattacggcagtctcagcacaaaggccatgtgcagaatacttccctatatgaaagaaggaatggaatacagcgcggcatgtaccgaggccggctacagacattcgcaaagatcactgacaaaagatgaaatagaaaacaaggaatatagggacaggctggatattctgcctaaaaattcattgagaaatcccgttgtagagaaaatcctcaaccagatgatcaacgttataaacggggtcatcgatacttacgggaagcctgatgaaatccgcatagagctggccagagaactgaaaaagaatgccgctgagcgccaaggcatgaccgaggccatcaacaggtccgccaaggagaataaggaaatcgaggagaagctgaaacaagacttcggcatgagtcatgtttcccgcaccagcatcatacggtacaaactctatatggaactgaaggacaacggcttcaagactctgtacagcaacacatacatcccctacgaggatctgttcagcaaacgttttgacatcgagcacataatcccccagtcaaggctgttcgacgactcattcgccaacaagactctggaaagcaaggacatcaatatcaccaaaggcgacatgactgctctggactttgtcaccgacaaatacggtcaggaaggagttgaaagatacaaatccactgtagatatgctcttggacaaaggggcaatcagtaagacaaaataccacaatctgctcagaacccagaacgacatcccggagaatttcatccaaagagacctgcgggacactcaatatatctccagaaaagccctggagatattaggcgacatcgtcaaatccgtcgttgccacttccggagagataacagccagactacgcgaggactgggggttggttgacgtcatgaaggagctgaattgggacaaatacgacaaatcggggatgaccgagtattacaacgaccccgacggccgcacaatcagccggatcaaggattggacaaagcgtaacgaccaccgccaccatgcgatggatgccctgaccgtcgcttttacgaaaaggagcattatccagtacctaaacaccctaaatgccaaagacaaagagctacagcaggagattgcctcaaaaggcaggctgctgcctccaatgcctttcgacgagctcaggtgcgaagccagaaagcatttggacgatatccttgtctctataaaggccaagaacaaggtcgcaacccgcaacaccaacaagacaaaacgaaaaggcggattcaacgagaaagtccaactgactccccgaggacagctccacaacgaaactgtctacggcagaatacttcagtacgattgcaaagaagaaaaggtcggaagcagctttgatgcggacaaaatcgccactgtagcctgcgaacggttccgcaacgcactttaccaacggctcgcgcaatacggagggaatcctaaaaaggctttctccggctcaaacagtctggataaaaatcctcttttcacagacatcctgcacagtgaggaagttcctcaaaaagtaaaaacagtcaggctcattccagtctacacaatacgtaaacaaattgattccactcttaaaatcgaaaaggtcatagacagtcatatcaggcagattctgtccaacaggttggaagaatttggaaatgatcctaagaaggcattttccaacctggatgagaatcccatatggctgaacaaggacaagggcatacagattaaacgggtaacaatcagtggtcccacaaacgtctacgcactgcacgacaagcgcaatattttcggcgcacccattataaactgcgacggagccaccataccgtcagacttcgtcagtctaagcaacaatcaccacatcgccatattcatggactccgacggcaatctgcaggagcagccggtaccgttcatggaagcagtagcaagagtcagcctgggagacccggtcatcgacaagacctataaggtcaaggatggctggaagttcatgttttccatgaaacagaacgaatatttcgtattcccgaataaggaaactggatttgaccccaattccattgacctgctgaatccagtcaattatccagtaatcagcaagaatcttttcagggttcagaaacttacgagcaaagactactttttccgacatcacttggagaccagtattgttgacaacaaagccctaaaagatattacctggaaaagaatacaaaacgtgaatggactcaaaggcatcgtgaaagtacgcatagaccacttgggcaacatcgtccagacaggagaatactgatatgataaagcgcacactatattttggcaatccggcatatctgtcacttaaactggagcaactggtagtaagaatacccgacagccttgactgcatggagactgtccggactattcctattgaggacataggcatcgtcatcctcgaccacaagcagataaccataacacaaggtcttatagagaaactgctggacaacaactgcgccctgattacctgctcgtccaaccacctgcctgtaggtctgatgctgccgctatacggcaacaccatccagaatgagcgtttccgataccaactggatgcatccctacccctccgcaaacaactatggcagcagactgttcaggcgaaaatagccaatcaggccgcagtcctcaaatatgccaccagctccattcacaacaacatgcaggtctgggccacagatgtccgcagcggagactcggccaacatggaagcaagggctgccgcatactattggaaaacactgttccaggacatcgatggatttgtcaggggcagggacgaggacgagcccaacaatctgctcaactacggatacgccatagtccgtgctgtcattgcccgcgcattggtttccagcggcctgctgccgacactcggaatccatcaccacaaccgctacaacgcctactgccttgcagacgacatcatggagccataccgtccttacgttgacagaactgtgtttgacatctgccgcaaaggcaatcctctgaaactcacgactgagctcaagcgggaactactttccattccaacaattgatgtcatcatcaacgacaaacgcaacccgctgatggtggctgccactacgacaacggcttccttggtaaagtgttttacaggggaaatgagaaaaatctcatatcctatcatgacttaagccaatatgaatgaacggataagcgaatatagagtcatgtgggtactggtctttttcgatttgccgactgacacgaagaaagaacgtaaagcggcggctgaattcaggaaacaactgatcaaggacggcttcatcatgttccagttctcaatctatatgcgccattgtccaagtgcagaaaacgcaaaagtccatgtccgtagagtgaaatcaattcttccgccgttgggtcaggttggaattctatccataaccgacaaacaattcggggcaatggagcttttctcagaaaagaaggagcggcaaccacccattgactatcttcaactggaactcttttaatgccgaaagtgcaaacaaaaaatccggcagtgatgccggatttttaattctgcaaacacctcataaatacctattgttgtgttcattactggcattctgctgtttgcagtccgtcaaagatacaaagtttgaaagcaattcacaacatattatgctcctattaagtcaaacaatgtgctgtttgcagtccgtcaaagatacaaagtttgaaagcaattcacaacagatgccgtatgattgaagtttggcatagtgctgtttgcagtccgtcaaagatacaaagtttgaaagcaattcacaactcctcggtacgcccggacagaatggcaagcgctgtttgcagtccgtcaaagatacaaagtttgaaagcaattcacaacagtagccgcttttacgagtgcagatttatagctgtttgcagtccgtcaaagatacaaagtttgaaagcaattcacaactcacatacttgacagcctccagcatcgtgggctgtttgcagtccgtcaaagatacaaagtttgaaagcaattcacaactcaaatcttccggtcgtccggggtgttaacgctgtttgcagtccgtcaaagatacaaagtttgaaagcaattcacaactgtatctaatttttattaaaaagtatctaagctgtttgcagtccgtcaaagatacaaagtttgaaagcaattcacaacgatatcgcatatatccgtccctgctcgacagctgtttgcagtccgtcaaagatacaaagtttgaaagcaattcacaactgctaagggatcttgccgaaaaggatagtggctgtttgcagtccgtcaaagatacaaagtttgaaagcaattcacaaccggattcgtgctttcgatggacgaattcaggctgtttgcagtccgtcaaagatacaaagtttgaaagcaattcacaactgacatgctcaaatgcaaaaagacatcatggctgtttgcagtccgtcaaagatacaaagtttgaaagcaattcacaacgtatttagctgactctaataatagattatagctgtttgcagtccgtcaaagatacaaagtttgaaagcaattcacaactgcgcggccctcccttgcgcaccggctcccgctgtttgcagtccgtcaaagatacaaagtttgaaagcaattcacaacttctgctccgggataccatcgtcacccttggctgtttgcagtccgtcaaagatacaaagtttgaaagcaattcacaactaaatttattgcctttgagcatatctcttagctgtttgcagtccgtcaaagatacaaagtttgaaagcaattcacaacttgttaatctttgtattcatggctctctgtgctgtttgcagtccgtcaaagatacaaagtttgaaagcaattcacaactttcgtttgtgtttacaggtaatataactcgctgtttgcagtccgtcaaagatacaaagtttgaaagcaattcacaactatcacagataagggcataatccagtattcgctgtttgcagtccgtcaaagatacaaagtctgaaagcaattcacaatggcatatgcattacattgaagattttccattatctttgacaagcatatttacagacagaaaaacgaaccggcatgctcaacctactcgcagtcacatgggacgtcagcccattcatcttcactatcggagacttcggcataagatggtacagtctgttttttgtagccggaatattccctatcggctactacatcatgcgctcgttctacaaaagggaaggcctgccgaccgaatcgcttgaccctctcctgatagcactcttcataggtacaatcgccggagcccgcctgggccactgcctcttctacgatccggaatactacctgtcccatccatggaaaatattgatgatacgggaaggcggcctggcttcgcacggaggagcgataggcgtcctgctggccatgtggtggtacgtacacaaatacggaaagaaatatgggttcggatatatccagatcatcgaccgtctcgtaattcccgtctgcttcgccggaatgatgatacgccttggcaacctcatgaactccgagatatacggtacctgcacagacctcccgtggggattcatattcgtaagagacccctgggcagacggcctgccgcatcatccgacccagatatacgaggcactcagctactgcatcctcgggctaatactgctgtggctgtaccgcaccagactcgacaagctgcacacaggtaccatcttcggcatcttcctcatcgttctgttcggcatgagattcctcatagaattcatcaagaaggaccagtccgccttcgaagcaggcatggtcctcaacatgggacaatggctgagcgtaccattcatactgaccggcatcctgctcctgatatggagtgctgagaaaggtgctcctgcggcaatacaaccttccttaaagccacgcagataatctccacaaattactgcgattgcagattgtacggatggcacacttttcgatagagacagaatcattatgacagatacagaacacaccatcataaagaaagaaaagatcgcatctccatcggacggactggagatcagcatcctgctgtgcggaccagctataggaactcctaaaggcattgtccagatagtgcatggaatgtgcgaacataaggaaagataccttccgtttatggaatatctggccgaaaacggattctacagcatcatccacgaccaccggggacacggagaatccatacgctcctccgaagacctcgggtacttctacgaaggaggctggactgccataatcgatgatatcaatgccgtcactggcagagcacgcacagaacatcctgaactgccgctgatactgttcggacacagtatgggatctatggctgtccgctcatacgcaaaacgctatgatgacctgatatctggtctgatcgtctgcggaagccccagccgcaattccggagcgggaatcggaaagctggtcgcacggtcttatgcctctctggcaggagaaaaatgccgtccgaagatcatccagtcccttgccttcggttccttcaacagccgattcagtagtgaaggctctcccaacgcatggatttgctctgatccggaaattgtacggaactacgatgccgatccgctgtgcaacttccagttcacggcacacggtttcctcaaccttttctctctcatgcaggacgcctacagcatctcagggtggaagccacgcaaccccgatatgccggtgctgttcatctccggtgaagatgacccttgcttgttgagccgcaaaaaattcatgcaagcggtcagaaccatgcaaagagccggatacacccatatcacatcccgactctatccctccatgcgccacgagatactcaacgagaagggcaaggaagccgtatggcaggacgtcctcgagttctaccagaacctcaccgactgattgacaactgtaccgcacccgacaagaccatgaattacactatatggacagacaaatctgccggcctgaccgccaccacctccataccggtaatctacatacactcgttccgcggaaacggggaggatgtatggcgggcctgccgtgaattgccggactgccctccggtggtgctggtgtctgtcaacaatccgggcggagggctggacgacgaattgtctccgtggcccgctccggcagtctggaaggggcaggctccatataagggccaggcaacggcacatctgaaatggatgacggaagaatgcatgcctgaggtagagggccgtctcaaggcaatgggtatcctgcagcagattccgatgattgccggctactccctcgcaggcctgttcgccctttgggctggctggacaagtgggaatttcgcccgtgtggcgagtgtctccggctcgctctggtatcccggattcacggatttcataagggacaatgccccgaccggccacatctgcaaggtctgcatttctctcggagaccgggagaaccacaccagacatcccctcatgagccaagtggacacctgcaccgctgccgtcgttgatgcagtaaagaccaggggcatcgacaccgtcttcaaatggaacccaggcaatcatttcgaccaccccgaacgccgcatggccagggcaatcgcagaaatggtcaggtaagcatataattgtaatgttcagtccctgagccgtgccagcatcagcacgtcattgtccgtgggctgcaggctggagaggattgcacgtacctgccttgccgcagaaccggtcagagtcccctgtttcagggcctcaggggctgcttccaggaactcctccgccggtatgctctggaccagatagccgcactggatagagttgtctccctgatacccgccgagaaagtcattgaggatctcggtagggtaactttcacactctcccgtcctgaggtcagtaatgacacttgccactggctcccctatgatgatgcgcggcatatattcccgcatttctatcaaggtggacagcaccttgccaggcaacagcgtattcatcatgctggagccgtccttcaatgtcctggtgtttaccgtaaataccggccgcagcatatctccgtcaaggacatacagggtatcaggccagtctccctgagagctgaacgacacatccagcacaccgtccacattgaacgacgtactgacaagtgtgttggagggatgccgcgaacgctcccttccggtctccggtatctcccacaggattttgcccgacatgtcctggcaccaggctatggccgggttggaatcctcctcgtacggtaccgccacgaccgtcatcgtaccggcccgcccgtccaccataaaactggccgagcccgctccgaactcatccatcggtttatatgccagcgggacatccccaagatattttcccgaagtcaggtcatacgactttatgtggtcagtcccatccattatccataccctgcctccatcctcatccacaaaagtctgcaaggaattcagatactccccgggaccgcgccctagatgtcccacattgcagatgaacttcccggtatgccggtcgaacaccctgacaggagccttgctcagaatagcctaagcgtccttgaccagatatttttccgtaatcagcactttcgccgcagcgaaagcatctaaagtatcactgtccagcgcgatgaactccggctcctccgccaggtccgagaacaccagagtatcctgcccctcagtcatctgagaatagtcgaaagtcaccagacctccctctccgagccctcccctgccgcaggaggctgccaggagcaccgccgttgcagccaggaaaaattttaccgatttcatatttttgccttttagtatatctcaagcaaatttaaggaaaatccccggcgtgcgcaactaaaaaatcatttatttattcatgcggtcaaatcggtatttcccccgctccgtcctgtccgtgaaaaaccggaaagaggcgatctcccggtcaaagacatgaagcgatgccgtaacctccggatattgttttacatgcaccttctccattgagagcgggcagaaagcgtatatgcggtccgttccctccacatcgagcagccggcacatactgttgaaaataacagcatcccccgatttcaggacaatattgaagaatggaaggtcgtccttgccgcattttacctccacttcaaaacaaagcagcgccgggttgatttcgacctcgtcgcttaccgggtcgaaatgaatgtccgagaagaagccgttgtagtgacgataatctttagatttgctgaaacatatctccccgcctatcggtgtcatgactttcagacaggcggaataagggatgaacatctcctccaccggcattgtcatacggaaaaatttaaagcaagcccactcgttccactgcacagggacctctccctcctcaatgattcctatatcgtagagaacccctggctccagcatcccgctgctcaccggtacagtcagcgtcagcttgtcctcctcctgcccgaccggcatggaataatccacatccatcttacagacgatcttccgtggaatctcctccgtcgcctttttagaggcctcgctgtacatatccaggatcttccgatacgaggagcggtccatctttatggactcggacacctggccttccttatattcccattcattgaaccggctgacgtcatgctgataagccgcgcagtcctcgtccttgaaaatcgcgactcttatcctgaccgtcttctcctcattgaggttcccgttactaaacacctcctgctgaagagttatgcctctgatgctgtcatcccagatcaggcttttgaatctcgtatccggattcggctcatggccgtccttgcagacatcgacaagggatgagagatgaaagaaaaagtatttacggctgtccatgggctgattgctgtttgtttggttagtgcaaatataggcattttccactcaatattgccgcaacggcagcaaatcccgcgaaacactgccgttgcggtaatgacttttccgcacaaccgctgtcacaggcgctctggacggcatcgaccagccgcgccctcgccacaacggcagcaaatcacgctattctctgccgttgcggcaatgacttttccgcacaaccgccgtcacaggcgctctggacggcatcgcatcgcagcctccttgccacaacggcagcaaatcccgcgaaacactgccattgcggcaatgacttttcagcacaaccgctgtcacaggcactctggacggcatcgacccgcagcctcttcgccacaacggcagcaaatcccgctattcggtgccgttgcggcaatgtcttttctgcacaaccgtcgtcacaggcactctggacggcattgccccgccgcctcttcgccacaacggcagcaaatcccactattcggtgccgttgcggtaatgacttttccgcacaaccgctgtcacaagcgctctggacggcattgcctcaccacgcccttgccacaacggcagcaaatcctgcgaaacactgccgttgcggtaatgacttttctgcacaaccgctgtcacaggcgctctggacggcattgcctcaccgtcccagaatttattcaatatctctttgaatcaagagtgttttcagagctcacgaactcattcacaaatactgagggaaaacgcttatcatataatacaaatgttttagttcttgctcttgtaatcgccacataaaacaatcttcgctcttctccatacggaaattgatcgcatttagtgagtacatagttaagcactggatcgtcatacacaagagatgggaatccatatgtatctttattgcattgtagaagtattacataatctgcttcaagaccttttgatttgtgtacagttaaaaactctattttacgtccttttataatataatagaacctattaccttctttaatggatttatacataaaagagaggtaataatcatcaaatgaataacgtcccaacaagaatattgatttatctgatggaatagacgcaaccagttgtcccaccatattacaataatcccgcctctcataagaatagaactccagttccgttttcattttggagttggatgagtgtatattcttttgtatttgtgctttatttcgctgtataaagttagaagacaacgaaactaaaggctctccgaatctatatgttgtttctattttattaatctctgttgctccgaaatactctgaaaattggctaaacagagccatatcacttcctgaaaagcgatatattgactgccaatcatcgccaacacaatataactttgcaggaggatttccctctcgcaatgcttttaaaaaattataacggtcaatagatatgtcttgaaactcatccacaatgatataatcatactcaacagggtgagaagtacgacatatttcagtagcttgaagaaccgcatctgtaaaatcaatttggttactactccttaacgcacttatgtagcgttcatacacaggctgaaatatattcttgatcataaaaacgtttcgttcatcatccgcatcctgaacttgaatcagaacttcttcaactgatttacaacttgactttagcaatgtaacgaaagtaatgacaagtcgtataaacgctttttcttgcttactatcttttggtaaaagcatctcatataattcgtcatctgttttctcctgaataggcacacctgcatcatctaatacttttcgaagtttatcctttatgtcagaattatgaaaatcagcacttgttgttattaaaagctgagttccaaatttctcgtgaactgctttcttccaagttattccatcattatatttttgattggcttcttcgtatgttatatttttttcttttgcaaaccaaatagggacattactacgttcatcaactccaaaatgctcaagatagatgcgcttagtgactccttcttgttcaaagtatattgaggcatctcatcagccaattggtgctcgtagggttcctcatacctgaatttcaccccaagtgatgataacacgaaacatattttttgttcctgctcacttcttacatatacgactctgccatccatatcagtgaactgcgcttttaaccgcacattcttttgttctgataattgctccagtttttcatttttgcgtt

SEQ ID NO: 2282 - DNA, 23795 bp, synthetic construct
  misc_feature 1..23795: note = Synthetic
  source 1..23795: mol_type = other DNA
gacagaggatggtacgggtatcgtacatatcgcaccgacgtttggtgcggacgataaccgtgtggcgaaaacattcggggttcctcctttgatgatgcaggataaggatggaaatatgcgccctatggtggatatgaccggtaagttctataagctggaagacttggctccggagtttgtacaaaattgtatgaacgcctctgattatgatccatggcaaggaaaattcgtgaagaacgcttacgatgatacgaagacggataaagatgagacgttagatatagagatctgcatgatgctgaaggcccagaaccgggtgttcaagatcgagaagcatgtccacaattacccgcattgctggcgtaccgataaaccggtattgtattatccgttggatagctggttcatccgtacgaccgcttgccgtgagcgtatgatcgagttgaacaatacgatcaactggaaaccgcagagcacgggtacgggacgtttcggcaaatggctggagaacttgcaagactggaacttgagccgcagccgttattggggtactccgttaccgatctggcgtacggaagatggtagcgaggagaagtgtatcggttccgtggtagagttgtttggcgagatcgagaaatcggtgaaggccggctttatggagtctaacccttacaaggacttcgctccgggagattatacgaaggagaattacgagaagatcgatttgcaccgtccgtatgtggatgatattatcttggtttccgcttctggtaagccgatgaagcgtgagacagacttgatcgacgtatggttcgattccggcgctatgccttatgcccagatccactatccgttcgagaacttgaaggagttcgataatcgtcagatctatccggctgactttatcgctgagggtgttgaccagacacgcggttggttctttaccctgcacgctctgggtaccatgatttttgatagcgtggcttacaaggctgtcgtgtctaacggtctggtattggataagaacggaaacaagatgtctaaacgcttgggcaacgctgttgatccattctctacgatcgagaagtatggttcggacccgttgcgttggtacatgatcacgaacgcttctccatgggataatattaagtttgatatcgatggtatcgaggaagttcgccgtaagttctttggtacattatataatacgtattcattcttcgctttgtacgcgaacgtggatggcttcgactactccgatccggatgtggaatggagcaagcgtccggagattgaccgttggatcctttctctgttgaacagcttggtgaaggatgtggatggctacttggaggcttacgagccgactcgtgccggacgtgctatctctgatttcgtaaatgataacttgagtaactggtatgtgcgtttgaaccgccgccgtttctggggtggtggtatgacggaggataagttgtccgcttaccagactttatatacttgcttggagacagtggctaagttgatggctccgatcgctccgttctatgccgatcagttattcttggacttggtcgctgttacgggacgtgagaacgttgagtccgtacacttgtccgatttcccggtttacgacgagtctaagatcgacaagaatttggaagagcgtatgcaaatggctcaagatgtttcttctatggtattggctcttcgccgcaaggtgaatatcaaggttcgacagccgttgcatacggtaatgattccggttgtagacgctcatcaacaagagagtatcgaggccgtgaagaacctgatcttgaacgaggtgaacgtgaaggagctgaagttcgtggataatacggcaggtatcttggtgaagaagatcaaaccggactttaagaagttgggcccgcgctacggaaagatcatgaaggcgttggccgccacgattcaatcgatgagccaagaagatatcaacgctttcgagaaagccggaacgtttaccttgatggtagatggacaggaggccgttttggagcgtacggatgtagagatcatctctgaggatatcccgggttggttggtcgctaatgaaggtcgcttgacagtcgctttggatattaccgtaaccgaggatttgcgtaaggaggggctggcccgtgagttggtgaatcgtatccagaacttgcgtaagagcagcggtttcgatataacggataagatccatgtatccattctttcttgcgaggagatggatgaggcgatctatgattataaggattatatcgctaaccaagtattggcggaatctatcgaaatcatggataatgcgatcagcgacgctacggaactcgatttcgaggactttaaattgtccgtaaagatcgagaaagcttaaaaatagaatagcatttcttgcggaagaattaggaatgaaatataggaaaatcgataattatattatctttgcatgcaaagaagaaataatatgattttatattcattcttaattcttctttttgattgatatttgaacgattgttgaacctaaatttttttagaaccatggcagagaagacaagatattcagacgctgagctcgaggagttccgcgctattatattagagaaactggaaatcgcgaagagggattacgagcttttgcgatcaggggttacgaattccgacggtaacgacgtggctgatacgtctcctacattcaaggtgctggaggaaggcgcttctacgttatcgaaggaagaggcgggccgtttggcgcaacgccagatgaaattcatccagaatttacaggccgctttgatccgtatcgagaataagacctacggtatttgccgggagactggtaaattgatcccgaaagaaaggctacgtgctgtgcctcatgcgactttaagtatcgaagcaaaacaaggaggtgcaaagtaaatgagatattctaaaggttggggagcagtgttaatcataatactgctccttcttcttgaccaagcgctgaaaatatggattaagacccacatgcagttgcatgagagtatagagataactccgtggttttatctctattttaccgagaatccgggtatggcattcggtatagaggtgattgggaaattattcctttccgtattccgtatcgtggctgtattgtttatcggatattatttgtataagctggttaaagaaaattataaattcggttttattgcctgtatatctttggtttttgcgggggcggtgggtaatataatcgactcgatattctatggcgtgatcttcgaccatagtttcgggcaactcgctacttttatgccggagggaggtggttatgcctcttggctgcatggtaaggtggtggatatgttctatttcccattgatagagaccgtattcccggattgggttccgatctggggtggacaggagttcgttttcttccgtccgatctttaatttggcggactcggcgatttgcgtgggagttttccttttgttaatattttatcggcatactttgtcggctagcctttcgaaagaagagaaataaatgcggagaaaattacggatatatggtatggctttattagccacgacgttgctggcggcatgtagtaaggttccggatggtattctgtcggagaaaaagatgcagggtgtcttgacggatatgttgctggctgaggccatggtaaatgtggattataatacttataaatccgataccatgaagcttgccttgtatgagtctgtattccgtaagcatgatattacacaagcggtgtatgatagctcgttggtgtggtacggccgtaacttggatatttacatggaggtctacaaccgggtcttggccgatcttaataaacggatcaataacttaggggatgtgcaggcggacgctgcgccggtatcgaaccgggattctgtggatatttggcctcgccgttcttatctggtcttgtctcctacctctgtatttaatggggtgactttcgatatacgtccggaaacgaattattcctcgggcagtagtttcgtgctgggcgtgcgtgtctggggattgaataacaaaatggcttataagccggaggtacgtttaagcgcagaccaaggtgatacgaccttgacggtgaatagtaagatcacgaaagatggatatcacgagacgatcttgaagactataccaactaagaaagtaaagcgtgtgtttggatatatccgtatggataatatggatacgacttattataaggtgtatatagatagcttaagcttgatgaaatataactatggtaaggagcttgccgaattacctaaggattctattaagtaatctctctatttgtttattatacttatgagaagaattgccgctcattacgtttggtgtaagcaggtttatcgtatgcattatatcgaactggatgataatggtgcgtttcatggtgtttacccgttgaatgaggagatagctggaaccgctttttatgatggagtgctggtgccggttctttcctcggaaccggcgattggttttaagcaggtgatgggatcttggccggcgttaaccgaaaagattacgccgggttgttcagtccatatatatcgtttaagcgggattcccttggcgtctgcgaaactcggcacagaccacagctgtagcgatggccacattgagagactctgaggtgtctcttccttccggatagttcgggatatataatttttcgtttacaaaagcctctatggcgggacgtattccatttccttcattacccattatcaagataccgtttccggataaggttttctcatataagttttctccgccaaggaaggtgccgtataaaggtatggcttgggctgattgggcctgtaagaacgtttccagatcggtgtaatgtatttttacgtgggcgagcgcacccatagtggcttgtacggtttttggactgaaaacatcggcggtatctttgctgcatacgatatgggaaataccgaaccagtccgctaaccggatgatcgtacctaagttgcccggatcttggattccgtctaatgcgagaacaagctccttttccggcgttatttccgttatatcccaattggggcgtttaaagatcgcgagtacatcttggggatttttcaggaagctggctttacgaatatcatcttcttccgctaccaataactccttggccggaatatcgccttgtgtagccatccaagatggcttggctattaataactcacattcaaaggccggtaacatatcggctaccaatttatttccttcggctacaaaaacattattttcattccggaatttctttaattccagagaacggatgtatttgactttggtcttgcttagcatcttagttctttttacaaaacaaaagtacggtaaattctttaaattccagtacattcgcgatcgtaaaaagcttggaatgatgaatcgatctctacgtatatgctattttatctgtatcgtactactactaacctcttgtagtacgaccaagtttgtgccggatggggaatatttgctggataaggtggagatcgtgtcggataacagggactataagtctgcggatttaaaatcttatcttaggcagcaaccaaacttcaaggtgtttggtctgatgaagtggcagttgtttgtctatgattggtctggtaagaatgagaagaaatggatcaataaacagttacgtaggattggtgagcctcccgtggtgctggatacgatgttggtggaacagtccgccatggaactagagcgtttttacattaataaagggtatgtccatgcggatgtatcaacgacgatcgatacggcacgccataagaaagcggttgtaacttaccatataaaggcgaacgatccgtataggatacgcaattacacgatgaagttccccgatccgaaaattgatagtttggcacatctgaaagcgcctcgccgctcttccttagcttctgcgttccggtcctcacaggaagagtataaccaattagttaaggaaggaactttattcgaccgggatatattggacaaggagcgggagcgtattacaaccttacttcgctggaacgggtattatggttttaatcgggattatttaggatatatcgctgatagttcttttaaccaaaatgtcgtggatcttgatatgtccatgaaaccttatcggaaggtgttgcccaatgggtcggtagaggatcagccgcatcgtcagtattatattaaggatgtaacggtcttaaccgattataatccgatgggggtaggagaggacgctagtttcatggctacagatacgatgctcagcgcaggggtgaatatcgtatatggccgaaacgggaagagtatccgtccgagcgtgcttcggaggagtacttatattcgtccggggcaattatttagtgagaagaatatagagcagacctattcggcgttcgcttctctaagggctttgaggaacgtaaatatacgttttacggaagtagaggagcgggatacgatgaagttggattgttacattctcacttctcccgcgaagataaatacggtgggagtggatttggaaggtactaactcggcgggtgattatgggtttgcctccagcttgaattatcagcataggaatatcttccgaggatcggagctgttctcggcgagggtgagaggggcttacgaggcgttatccggaaataaggcgaatggctttggtaattactgggagttaggtgcggaaggatccttgctgtttcctcgtttcttgttcccgttcttgagttcggattttcgtaggcggctacgtgcgtcaactgaagtgaaaataagttataacctgcaaaaacgtccggagtatacgagggcgattctatctggtggttggagttatatttggcaagatcggggtaatacacaggcacgccatacctttaagcttgtagacttgaattatgtgtatttgccggataagaatatggactttatcaatagcttgccggattatatggtgttgtataactatacgaaccattttatcatgagttcgggatatacttattccttcagtaattattctccccagaatcgtttgagaaacacgcattccctacgtgcgtcggtcgaggtcgcggggaatttgttgagtgccttttcgcatcttacgggggcgaagaaaaatgatgacggttattatgagttatttggtacggaatatgcgcaatatgtgaaattggatttcgattttagtaaaggaatcgtgcttgacagtcgtaacaagttagctttccatataggagtgggagtggggatggcttatggtaactcaaactatttaccttttgagcgtgcttatttctcggggggagcgaatagtgtccggggatggtctgtacgagagttaggtccgggtagtatggaagttgacagcacgacttcttttgctcttcaatcgggggatatccgcttggatttgaacttggaatatcgaacgaaacttttttggaagtttgaactggcggcttacatagatgccggaaacatatggacccggaatgtatcagatgaacgctataaggctggaaactttgatttctctcgtttttataaggagatcgctgtttcctatggtttgggacttcgtttggactttgatttctttctactacgtttagatacaggcttcaaggcttataatcctcaggagaaaaagtctaggcgttgggcgataacccgtcctaatttcaaggataatttcgccttgcattttgccgttggttatccattctaaattcaatatgtaaaaaagtgtactaaaagtttgcaaggaaaagaaaaatccttacctttgcaccacgaaaataaggatggtcaggtagctcagctggatagagcaacagccttctaagctgtgggtcctgggttcgaatcccagcccgatcacgagggagattctaaaagagtctcccttttttgtgtcataacttcgttggcaaagtatcttaggtgcgtgagccgatgtacttaagatacttttttggggggagggatcgacaagaggttctttctttttccgactggaaaaactatatgcctatcctctatgatttgctactgagctggaatttgtcttatatggatgtcttgtcctgaaatagcttgacacttttaaggggctaaaaagtatagaaatgatcaaaagaaagcccaaaagagtgttcacggaaccctttaaattatccgtgttacgcgagtattacagtagcggaatgagcaagtatgcgataacgaagaaatattctttgagccctccttgcatatatagatggctaaaagaatacccagtgggatcggaccagttacctttgccatcagaaacaaaagagaggttacagatggttcccaagcaatcggatttgacagatatggagtcccttcaaaagcgcatagaggaattgcgtcgttctttggagctggagaagatgcgtagccgtgccttcgagaagatgatagagatagcggaagaggaagaaggcatcagtatattcagaaaagatggtgccaaacagtaacggcgttacgtgaggagtatccccatgagagtgtggctaccctttgcgggctgtttggaaagaaacgccaatggtattacgcgaacatgaaggcggatgtatcggagagacaacgcgtcaagcttcttgctgacatgataggctattatcgtctttgttgtccccgtatcggaggtttcaagctgttccatttactggaaaaggatttgggacatgctgtgaccctcgggcgagactcgttcttaaaggtttatgaatcaaaaggctttaagctcaatcccaacaaacgtaggcgtacgacagactccaatcatgtctataaaaggtaccccaatcttatcaagggaaaagacgtgcggtattccaaccatatatgggtgtcggacatcacgtacgtgtggatattgggggacgtgttgtacttgcatcttgtcaccgacgcctattcgcacgccgtattgggctggtgcctatccgacagtctcagcgcctcgcatacgacagaggccttgcgcatggcgatccggatcgccggaggcggcaacctttgcggtaccatacaccactcggacagggggtcacaatacgccagcgaggcttacgtcagctgcctcatggagcatcacatacggataagcatgacagaaggatatgagccgacagacaacgccatggcggaaagacagaacgggatcttcaaggtcgaatggatatacgagcaggaaatgtacagggataaagaacaggcgatcaatgagatcaatcgtatgattgacttttataacaaccgaagacctcatatgagcatcggaatggagtgcccgatggaggtgtataaaggcaaactgccggggaaaaatctttggcgaaaaagaccctgattctttttgattccttacatttgtacgccgagaatatggatcactctggtatatccattgtccattcttgatgacaggctttttggtaggctttatcagagagtgacaagtaagccaggaggatcatgagtttattgacaagtaaagttgtttaactaccccaaaagtgacaagtgattttaggaatggacaggattgaggaatatgccgtaaaagtaagtactacttactttgtcatttaatataatatatactgcaagtggcatagaagatatactgtcctttccacgggtttctaccaagctggcatttaggctgattttagaacttcgtagcataaaaaaatcccccgcagaagggcgagggaacctaatgttttcacaacggaataatccttattgtgatttgcttcattttagtatgacaaatatatgaaatggaatgcttgcgtgcaagtgtttctgaaataaaatttttatatttgggaaaatgtaaagataacatactatgaaaaggattttaggcttggatttagggacaaatagtatagggtgggcgttggtgaacgaagctgaaacagatgaggaagtctcgtcaatcatccgattaggtgtgagagtaaatcctttgacagtagatgaaacgcagaactttgaaaaagggaaaagtatcactacaaatgcggaaagaactcttaaaagaagtatgcgccgtaatttgcagcgatataaattacgtcgtgatgcgttggttgaatttttgaaagagctgggttttattaccgacgaaactatcctttcggaacaaggaaacagaactacgtttgaaacctgtcgtttacgggctaaagctgctgaagaagagatttctttagaggaactatcccgtgtcttattgatgattaataaaaaacgtggatataaaagtagtcgaaaggtaaaaaaggaagaagatggagttttgattgatggaatggagattgctaaaaagctgtatgaggaggatttgactccggggcaactttgttcgcagttacttgaatcgggcaagaaagttttgccagacttttaccgttctgatttgcaagaagagttggatagaatatggagtgttcaaaagcaatttcatcctgatgttttctgtgatgccgccaaagaagaaatcaaaggaaaaaacagaagccagacatgggctatcttggctaactattttgtttggaaagaagaagtggttggctggaatgacagagaagcaaagaatgaaacgatagaaaaagaatgtaaacttgtcggtcttaaacggacgactaaggggtatgaactgaaaaaggaaaattatcgttggcgtgcgcaagctcttactgaacaattaggtttggaagagatagccgtagtcttgcaagagatcaatggtcagataaatgcgtctagtggttatttgggagccattagtgataggagcaaagtgttatactttaatcatcaaacggtcggacagtatcagatggctgagttagacaagaatccccatgcaagtttgcgcaatatggtattctatcggcaggattatttggatgaatttgatagaatttgggaaaagcaggcagaatttcataaggaattgacagctgaattgaaaaaagagattcgcgatatgatcatcttttaccaacgacgtctgaaaagtcagaaaggcttgattagtttctgtgagtttgaaaggttggagattgtagtagaaaaggatggaaagaaacagaccaaagtcataggatgcaaggtgatacctcgttcgcatccattgtttcaggaatttaaggtatggcagacattgaatgacataaaggtattgggaagagagaagaaaagaaatgctttgtcggcaagcgaaagtagggctttgtatccagaagaaaaagaaatactggcaagagaacttgcgataaaagaaaacatgaagaaagcagatgtgttgaagctcttatttgaaaatccacaggaattggatttgaacttcaaacaaatagatggaaatcgtactgggttttctctcttttctgcctatagcaaaatgatagaaaagtatggctacgaaccgttggattttaagaaaccagcagatgagataatcggacagctaagaactatctttaccgatttaggttggaatacgaatctgtttaccattgacttaaccaaagaggggaaagagctcgagatgcaaccttatttcagactttggcatctgttgtattcttttgaaggagataatacgtcgaccggtaacggcaaactgattgaaaagatcatgcaactttgcggagttgagaaagaatatgctgtagagctagccagtctttcgtttcaagatgattacggaagtttgagcgcgaaagccatcaaaaggattttaccctatttgaaagagggtaatctgtatgatgtggcttgtgaatatgccggttatcgtcattccaaatcttcactgactaaggaggagatagaaaataaggttttaaagggcaagctggaggttcttcctaaaaacagtctccgaaatccggtggttgaaaagattttgagtcagatggtgaatgtaatcaatacaatcattgatacgtatggaaaacctgatgaaatccgagtggaattggctcgtgaattaaagaagagtgccaaagaacgtgaggaactgacgaaagctatcgcaaagagtacccgtgagcatgaggagatccgtaaattgttgcaagatgaatttggtatgatgaacgtgagccgcaatgatattatccgttacaaactttatgaagagttgaaagataatggatataaaacattgtattccaatcaatatatacctaaagaaaagattttcagtaaggagatagatatagaacatattattccacaatcccgtctttttgatgattctttatctaacaagacattggagtataaggctattaatatagaaaagggaaataagaccgcttatgattttgtaaaagaaaaatatggagaagaaggcttgcaacaatatataaatcgttgcgaaagcttgttcaatgacaaaaaggcgaaacttcggaaattgaaaatggaacagaaggatataccggatggtttcattgatagggatttgagaaatacacaatatatagcgaaaaaagcactcgctatgttgaacgaaatctgccgtagagtagtggcaactaccggttccattacagatcaattgcgtgaagactggcaattggtggatgtaatgaaagaactgaacctgcctaaatatgaagccttgggttttgtggaaacatacgaagataaggacggaagaaaaatcaaaagaataaaggattggacaaaaaggaatgaccatcggcatcatgcgatggatgcgctgacggtagcttttacaaaggatgcgtttattcagtatttcaataataaaaatgcggcacaagattcaggcaatagaaaccatacgaatataataggtatcaagacccgttattttgacaaaggaagagctttgcctcctattccattggagcaattccggatagaagccaaacagcatttggaaaaactgctggtatctattaaagctaagaacaaggtggtgactgtcaatgttaatcgaacaaaaaagagaaagggtgaaaatacgaagatacagcaaactccgcgaggtcagttgcatttggaaacggtttatggtagtcacaaacaatatgtgacaaaaatagaaaaggtgaatgcttcttttgatgcggctaaaatagcgactgtgagtaaacgggcttatcgaaatgccttacttaaacggttggaaacattcggtaatgatccaaagaaagcatttacaggaaaaaatgcattggaaaagaatccgctttatgctgataagtatcagaccatacgagttccggagaaggtacaaacagttgaatttgaaactatttatactatccgaaaaccggtcgatcctgctttgaatgtggataaagtagttgatgtaaaggtacgtgctattttagaacggcgtttgaaagaatacggtggagatcccaaaaaggcatttgttaatttttgggaaaatccgatatggctgaataaggaaaaggggataagtatcaagcgggttagcatccgaggaatcaataatgcccaatcgatacacgtgaagaaagataagaatgggaatccgatatgggatgaaaatggaaaacaaatccctgtggattttgtaaataccggaaacaaccatcatgtggcttttatcgtaaacctgttttagacaagaaaggacaggtgacgtttgatgaggatggtaatctgatgtatgaactggacgaggtggttgtccccttctttgaggctgtaacacgggctaatttaggacttcctattattgataaggattacagaaaaagtgaaggttggcaatttttgtttagcatgaagcagaatgaatatttcgtgttcccgaatgaaaagacaggcttcaatccgaaggaggtggatttgttgaatccggataattatgcaatgattagtccgaatttatttagggtgcagactatgtcaaaagttatgtatggaaataatgttgttcgagattataaatttagacatcatttggaaacaacagtgaaagatatgaaagagttgaaagatattgcttataaacaatataaaacactttcttttggtaatagtgttgtcaagatccgaattaaccacattggacaaatagtatcagtgggagaatattaatagtatctattagaaattgaaataaatagggtgtatgctattctcaaaaaggttgtaccctttttagaaacagacttttatactgattaatagtaatttaaaatctaactgcttatgatcaagaaaaccctttattttggaaaccccgtttatctgtctctgaaaaatgctcagttgatgataaaattaccggaggtagtcaggaatgatacgttacctgaaagtttcaaacgaacttcagaagtgacgaaacccattgaggatattggagttgtggtactggatcacaagcagatcaccatctcttcgggcgtgttggaagctttacttgaaaataattgtgctgtcattacatgtaacagtaaaagtatgccggttggtttgatgcttcctctgtatgggaacacgacgcaaaacgaaagattccggcaacagttggatgcctctctaccgttaaagaaacagctttggcagcagaccataaagacgaagattgaaaatcaggcagccgtattgaaagaatgttctggcgcagaagtgaaatgtatgtacgcatgggcttcggatgtgaaaagcggagatacgagtaacctggaagcccgagcggctgcttattattggaagaatttgttttggatagaaggtttcacaagagacagggagggcattccgcctaacaatttgttgaattatggatatgctattctgcgggcggttgttgctcgtagcttggtggcaagtgggcttttgcctactttaggaatccaccatcataatcgttataatgcttattgcttggcagatgacatcatggagccttatcgtccgtatgtggatcaattggtctgtggtatcataaagcagggagtggattatgcggaactaacgagagagttgaaagcgcagctgcttactattcctgtgctagaaacttatatgtcaggaaaacgtagtccgttgatggtggctgtcgggcaaactacggcttctctgtataagtgctttagtggcgaattgcgtagaatctcctatccggaaatgtaatatggatcggtttagcgaatatcgtgttatgtgggtacttgtgttgtttgatttgcctaccgagacgaagaaggagaaaaaggcgtatgtggatttcaggaaaaatctacaaagagatggatttacgatgtttcagttttctatttatgtccgccattgtgctagtagcgagaatgcggccgtacatgtaaaaagagttaaatcttttcttccggagcatgggaatgtcggaatcatgtgtattacggataagcagtttgggaatattgaacttttttatggaaagaaaacggtggaagtgaatactcctggacagcaattggagttgttctaaaagaaaaatcccgctgtcaagcgggatttttaatggaaacaatatctgttttttttattctgatgtgctttgtaatccattgattaatagtttttaatagataatatgctgtttccaatggctcaaagttactaaaatgaaagcaaatcacaaccggggtacattggtgtatatacgcatatatgctgtttccaatggctcaaagttactaaaatgaaagcaaatcacaaccacgatatttaacatattgatataagcatagctgtttccaatggctcaaagttactaaaatgaaagcaaatcacaacactcttttgttgatttgcttccagtacctgctgtttccaatggctcaaagttactaaaatgaaagcaaatcacaacccctacccattgccaagaaaaaccaacggtgctgtttccaatggctcaaagttactaaaatgaaagcaaatcacaacttcgtaaaaatacatctcttcatatgcttagctgtttccaatggctcaaagttactaaaatgaaagcaaatcacaacagatcaaagtagacaaaacgattgtccccgctgtttccaatggctcaaagttactaaaatgaaagcaaatcacaacctaagatatcagaggaaaaagtgaaagagagctgtttccaatggctcaaagttactaaaatgaaagcaaatcacaactagaggcaaagtggatctcaaatccctaacgctgtttccaatggctcaaagttactaaaatgaaagcaaatcacaacggggctatgcaccgggtgaagcctctatgcgctgtttccaatggctcaaagttactaaaatgaaagcaaatcacaaccgtgaggcggtctatctcccgtcttgcggagctgtttccaatggctcaaagttactaaaatgaaagcaaatcacaactacaataaggtagaacgtttacaatccccggctgtttccaatggctcaaagttactaaaatgaaagcaaatcacaacaccaatagcgttaaaggtttcttgaagcaagctgtttccaatggctcaaagttactaaaatgaaagcaaatcacaactgcaatcgcattgaaccaaaacgcagagaagctgtttccaatggtccaaagttactaaaatgaaagcaagtcacaataaaatattgcaaaatattggggcagctacaccaaaaagtaagccattctcttttatgtcatcaaaatatctctttttctgtcattttgctcaaaatggagacttttagctgataaaggctttttatggaaatgcgaaaatagagagaaaaggaaggcggaaacagcgtatttcgccattttttagtgtatgaataggctttgtagagggattatgatccaatagtaaggtgtttataacggcgttgtatgctgttttcgactgcgatccttattgtttccgaccggaaatccgattgttttcggatgaaaagcttattgttttcagataaaaagtcgcttgtttgtccgactgaggttgacagaagacgaaatctttcgctagaataaatcagtgaaaatttgtaatgcgttgttcaatagattattgtgaaaaaatattttcgaatttggaagcaagtcgtaccttgcctcgaaataatcgattctccaagcgtttagattgcaaagtgtcagaatgacaatttgcattgattgaggaatattttggtgcggtgttctggtaaaagattgtttaggcacggcttttttattttttttggaaagattatcctattttttaatactgattatcagtttcttatatataagtttctctcgtgagcttattgtgcggaattttacttgagatccatgcattccggcctgctgaaacggatgggtaaatgaaagagccgtgttgtttaggtcttagataaatgatttaatttcgtacatttgtttttgataggcttaagctggaaactatggggcttggttccctatggttgagattaaacagattgtaaatatataaagagtaggtaagatggaaacattcgacgatatcattaaaggggataaacctgtattggtggatttttttgcgacatggtgcggcccgtgtaaggtgttgagtccgacggtcgaggcattggggaaggagttggcgggacaagtgcgtgtccttaaaattgatgtagataagaacgaagcacttgccacacagttgaggatccaatccgtacccactttgatcatctttaagaaaggtgagatcgtatggcgctcttccggcgtgatggatcacggaagcctattgcggaaggcgcaaagctatatcgattaaaagccgttcatcgggatcaataccgttgggatcaataataggaatcctaggatcactaggacaaggatgaacttccatgcccatttgaaccatttatcatacgggatacggcttactcctagaaccgctatcaggacacctgatgtgggagttatcaggttcgtgaagccatcgccaaactgaaaggccatgacggtggcctgcttggataaaccgatcaactccgagaatggggccatgataggcatggtaagggccgctttggcgcttccggaaggaataactaaattgataagcgtctggataacgtacatcatcccgaccgtagctacttgccccaagccttccatccctttcgctaggttaaagagaatcgtatcgatcactttgccttcttgtaggattacgatgatacctcctgccaaaccgacaaccaaggcggcgctcataatatccttgcaaccctctaagaatagtttcacaagctcattcggatcgcgtccattggcgattcccgccgctatgcccaaggcgaagaataaagtcgctatttccataatgtaccatccatagcccattacgcctgttatcaggaaaaagatcgtgaagaataaaaggttcaatatatataaatgtacggttttccgcagagtgaatatcgaactgattatgaacgctacgctaagaatcgggattaagggaagtccctcgattacactattcccgatttctaaggatgtctggggataatagacagaaaagaccgctaagatgattgccaataggataaaactgacccatgcggctttcggggtcctgtacacgatttccaaagaatgggtattatgtaggtctctccagtattgatcatcctcatagactggtgacaattgagggttcttttttaccttggcggcataacgcaatatccatgtgaagcctaccacattgataatacaccaacaaacgatacgatactcgatgccggaaaaaagaggaattcctgctaagccttgcgctataccgatagtgaaagggtttaaaatcgctccggcgaaacctaatcccgccgctataaaaaccatacatacgccggttatggaatcgtatcccatagatatcgccatcgggaccaagaccagacaaaaagcgatggtctcctcactcatcccgaatacggccccgaatatactgaaaagtagcatgatggcggtcaataagaaattatctatgcctattttacgaaggatggggttgttctccattttgcgtgctttccgtaggaaactgactgtcccgatatcaaatgccttactgtcgttcacgatccagaatgccccgccgatgataaggataaagacaatgatatccgccttgtctacaaatcctttataaaaggcggagagtacctcccaagtctggggtacgctttccacggattcatatacaacggttcgctctctgtccgggctgatactttccgtatattgcccaccgggaataatccatgtcaatatggcgcaaaataagataatgtaaaagataattacgtaagtgtggggtatttgtctctttttcatgattctgctttttcgtcttcttcagttaatattccgatctcgggaaggatagcccgggcctcacggtcactaagcgtatctacgtctttgagtttacgttggatggcacgggtacgggtacctaaaacctcttctatttgcccgctggcggtttgcaagttcttttgggctttctcgagcataccgcctactttctcgaattcttttttcacggcccctaagatcgtccatacctcccctgagtgcttttggatcgccaatgtacggaagcccatttgtaaactgtttagtatggccgctagggtagtgggacctgttacgactaccttgtagtttcgttgcaagtcctccaataaagcggaacggcgtacgacctcggcgtaaatgccctcgaacggcaggaacataatgccgaaatcggtcgtggcgggaggtgccagatatttgtccgaaatatctttagccatcttcttgatcgttgtctccaataattttccggctgtctcgatcgcttgggaatctgcggcatcgtaagcgtctaggagctgttcgtatacatctttcgggaatttagcatctatgggaaggtatacgaattctcgggcatcatcccgcccggggagcttgactgcgaattcaacgaccgcatccgaacctttccgggtatgtacattcgcctcgtattgctctggtgccaataactgctccaataacatactgagttggatctccccgatatttccccgggtcttaacattactaagtacccgttttaatcctcctacatcctgtgctaaggtttgcatctcgcccagtcctttttgtacactttctaattgttcggtgactaaacggaaagattgcccgatacggtcattcaatgtcttttgaagtttctcgtctacggtgactcggatctcttccagccttttttccgtgttatccactaatctctgttggcgttcgtccaaggcggcgaatttctctttctgcaacctgttaaaagaatcgattccacgttcgaaggcttccttgaactcattcatggaacgagccagctcttctcggttatcttttgctactaaccggctttcttcccggttcaggcggaagtcctccctaaagtttttctcgatacggtcgaacgagcgttgtatctcgtttagtaacttttctaggtcttctttgttattatttagctgtttaggacgcaaaaggatttgcgtcacgatgattataagaagtccgccgataataatccaatccatctgtttttaattttgacgtcaaagataggtaatctgtattttgcaacagtagttaaatagagttaaatgaaaaaacattgtttattttcgtttgttttatcgacagaaagctgcttatatttgcgcagccaacttaaagtaagactatttaatttacatacaaagatggcaaaagtaacattaaaaggtaacgagattcatacgaacggcgagttgccaaaagttgggacagaggctccggactttaagggtgtaaaaagtgatttatccgaattgtcgctaagcgacttgaaaggaaagaaagtggtgataaatgtttttccgagcttggatacaagtgtatgtgcggcatcggtaagacgcttcaataaagaagccgcttcgcatccggatacggtggtattagctgtttctaaagatttaccttttgcgcatggacgtttctgtactacggaaggtattgataaagtgattacattgtcagtgttccggtgttcatgttttgaggataagtatgggatgcttctggtagacggtccgctgaaagggttattagcccgtggcgtgatagtggtcgatggagctggtaaggtggtttatgaggaacttgttcccgagattactaccgaaccgaattacgatgcggctttagctgcattgaaataaatgtagtagattattgtttttcattggttaaagttaagggttagtgtaggaggccgtcggatgtgaatctcgcggccttcgtttttttaatacaaacacgtttatatggataactggaagcgagtatttgccattatttggacggggcagttcttatctatactgacaagttcgattgttaatttcgcgatagtcttgtggttgagtctggagacaggttccgctgaggtattggcatttgctacgatggccgctttgttacctcaatctgttttggggcttttcacggggatctttatcgaccggtggaaaaggaagcgggtgatgattatggcagatagctttattgctttttgtacgttgatattggcggtcttgttttattttgatttggctaagattagtcatatatatgtgttattggcccttcgttccgtaggttctgcctttcatatgcccgctatgcaagcttctgttcctttgctggctccaaaatcagagttgatgcgcatagctgggattaatcaggtgatccagtcggtgtgtaatatcgccgggcccgctttggccggtctattcataacgatgatgaagatgacgaatatcctcttattggatgtggctggagcggcgttcgcttgtctatcgctctgctttgtctttattcccgatccttctcatgaggaacgaaattcagaattgcatctttggagagaggcgaaagaggcgattatggaagtccgtaaccaatatgggctatcgtggttattcctattgtctatattggctacattcgtgattatgccggtaagtgtcttattcccgttgatgacgttgaatcactttgccggaaatgctttccaagtgagtttggtcgaggtttcatggggtggaggagccttgctcgcgggtgctttactggggcttaagaaatatcgttggaatgagatcctgttgattaatgggatgtatatagcgttgggattgacattcttgttttccgggttgttaccggtatccggttttatctggtttgcggtgctgacggctttaggaggtgtttgtggttccctgtattttgctacttttactacggttatccaatctcgcattgatccgggagttatgggaagggtattctctttttacatgagctttagtatgcttccttcgatgatcggtcttttgagtaccggctttttggcggattctatcgggcttggaaatacctttataataagtgggggctttttatgtttgataggtattatatccttttttatcccttcgttgatcagtctgaaagagagttttaagagataacgatatcgtatttagacactatttaatatgaataagaaaatacttcaactggcgataccttctattatttccaatataaccgtacctttattgggattgatagatgtggcgatcgtgggacatcttggatctgcttcgtacatcggggcgatcgctgtaggcgggatgctgtttaatattatctactggatattcgggtttctccgtatggggacaagcggtatgacttcccaagcgtacgggaaacgggatttgacggaagttacccggatcttattccggtctgtcggggttggtttcctgatatctttggggcttttgatacttcaataccctatcttgaaggttgcgtttactttgatcgacgcaacggaggaggtaaaacaatgggcctctctctattttaatatctgtatctggggagcgccggctgtattggggttatatggctttgccggttggtttatcggtatgcagaattctcgtttcccgatgtttatcgctatcgcgcagaatatcgtgaatattgtggccagcctatgtttcgtgtttgtgctgggtatgaaggtggaaggcgtagcgttgggaacactgatcgcccaatatgcgggtctcctcatggcgtttgctctttggttgaaatattataaacgtttgaaagcgtatattgattggaacgggctttggggtagggaggcgatgcgtcgcttcttctcagtcaatagtgatatatttttccggaccttgtgcttggtcgctgttacgactttctttacttctacaggtgcgagacaaggggatgtgatattagccgtaaacaccttgttgatgcagttatttaccttgttctcttatataatggatggattcgcttatgcgggagaggcattagccggtcgctttattggagccaaaaacgatgtggggttacgtaaatgcattcgcttattgttcctatggggaatcggcctctcattgtctttcacg

SEQ ID NO: 2283 - DNA, 23660 bp, synthetic construct
  misc_feature 1..23660: note = Synthetic
  source 1..23660: mol_type = other DNA
ctttgagacgattggagaaggtaggcagcgccgtctgattgcccatttctcggatggtacggggattgtggatttagtctggtttcagggaattaaatttctcgtcggtaagtataaggtacatcaggaatatattgtatttggtaaacccagcgtcttcaacggacggattaacattgctcatccggatatcgataatgcttcggaactgaagctctcgacaatgggattgcaaccttattataatacaacggagaaaatgaagcggagttccctcaattctcatgcaatagagaagatgatgagcgccgtagtgcagcaactccgcgaaccgctgcccgaaacgctttctcccgctatattgacagaacatcatttgatgccgctgacggaagctttgatgaatattcattttccggcaaatccggaattgcttcgtaaagcgcaatatcgcttgaagtttgaagaacttttttatgtacagttgaatattctccgctatgccaaagacaggcaacggaaatatcgtggatatgtatttgaaacggtaggagagatattcaatactttctatgccaagaatctgcctttcgaactgaccggcgcccagaagcgtgtactgaaagaaatacgccgggatgtggggagcggtaagcaaatgaaccgtctgttgcaaggggatgtaggtagtggaaaaacgttggtggcactgatgagtatgctgatagcgttggataacggttaccaggcttgtatgatggcgcctaccgagattctggctaaccagcattttgaaacaatccgcgagttgttgtacggaatggatatacgcgtggaattgctaaccggttctgtgaaaggaaaaaagcgggaagccattctcaccggtctgttgacaggagatgtacgaatactgatcggtacgcatgccgtgatagaagataccgtgaatttctcttcactgggtctggtcgtgatagatgaacaacaccgtttcggtgtggcacaacgcgcacgtttatggactaagaatgcacagcccccccatgtgctagtcatgacagctacccctattccgcgtacgctggccatgacattatacggtgatctcgatgtttccgtcattgatgaactgccgccgggacgtaaacctattgtgaccattcataaatatgatgcgcaccgtgtaagcttgtaccaatccgtccataggcagattgcagagggcagacaggtatatattgtatatcctttgattaaggaaagtgagaaaatcgacttgaagaacctggaagaaggctaccttcatatttgtgaggaatttccggattgtaaagtctgcaaagtacatggcaagatgaaagcggctgagaaggatgcgcagatgcagctttttgtttcgggcgaagcacagataatggtagcgactactgtgattgaggtaggcgtaaatgtaccgaatgcttccgtgatgattattgagaatgcagagcgcttcggtttgtcacagctccatcagttgcgtggtcgtgtaggtcgtggagcagaacagtcttattgtattttagtgaccggatataagttggtcgaggaaacccgcaagcgcctggaaattatggtacggacaaatgacggctttgaaatagctgaagccgatctgaagctacgaggtcccggtgatttggaaggcacacagcaaagtggtattgccttcgacctgaaaattgccgatatagcacgtgacggacagctactgcaatatgtgcgcaatgttgctgaagaagtggtggatgctgatcctaccggtattcgtccggagaatgaaatcctgtggcgccagctaaaggcacttcggaaaactaacgttaactgggcttccattagttgaataacggttaaacatacactttatttgcatttttatgttgtaaaacatataaggtcttatcttgccgatatacagggagttaggaggtggtttaatatgtaccttttagtcccttaccgaaaaaatagttaagaacagccttttcatttagagaagaaatactacctttgggagaattttttaaaagaatgacgaaacggaatgaatttcaattgcattaaaacgatcctaatagctgcgacggcaatggtcagcctgaattctttttctcaggatttgattgcccgacaagcccccatcgacaggaaactaaagagcgttgactcgttggctttacagaaacagatacgtgctgaacaatctgcttatccaggtctaagtctatatccgacttggaacaatgagtatgtacaagcttatggcgatgctatcgttcctgaaagttataaagtggacctgacaggtttctgtatgcctaccacgcatacgaagattaccgatgtattcggttatcgccccagaagacgcagaatgcactatggcttggatgttaaagtattcatcggtgatacgattcgagctgctttcgatggtaaagtacgcgtagtaaagaatcagggacgccgtggctatggtaagtatatcgttattcgtcatgacaatggactggaaactgtttacggacacttgtccaaacagatcgtagaaattaatcaattggttaaagccggagaacctatcgctttaggtggcaatacgggacgttctaccggttcgcatcttcactttgaaacccgtttcctgggaattcctatcgaccccgctttaatgtttgactttgaaaagcaagacgttgttgctgatcattatacttttactaagaccaagacttcaaaaggaactgctcgcagcatggcttccggtgaaggtttgttctataaagtgaagagtggcgatacattgtctaagattgcatcccgtcagggagtatctattgacaagctctgtcagttgaatcgcattacacggaaaacaatcttacgtccgggacaggtattacgttgttcgtaagatatcaataaacccataaagaagagggcactttaatataatttagagtgccctcttttcttttttctttaattattcctacctttgcaaccaatttgtaaggaaatgaaagataccaaacaacaatttgagcatgtcattgccatctgtcgtgatttgttctccaagaaactacatgattacggtccggcatggcgtattctccgtccggcttccgtgactgaccagatattcattaaagccaatcgtatcaggagtattgaaaccaaaggagtgacgttggtggacgaaggaatacgttccgagttcattgcgatagtcaactatggcattgtcggattgatacagctggaactgggatatgcggaatcagccgatatcacgaatgaagaagcaatggcgttgtatgacaaatatgctaaaacttcattggatctgatgcttgctaagaatcatgattacgatgaggcatggcgcagcatgcgtgtcagttcatacactgatctgatattgatgaaaatctaccgtacgaaacagattgaaagcctgtcaggacagactttggtttcggaaggagtggatgctaattatatggacatgattaattattccgtattcggtttgattaagattgaatttggagactaaacagaaacatataatctggaagagctgggtgaatgtttgccgttttttattggcggcagtattcatcttttccggctttgtgaaggcagtcgatccgttaggctctttttataagattcaggattatctgacggctttcggaatgatcgcgtggtttcctacatatttgcagctactgtttgccatcgtattgtcggcgttggaattttccgtgggagtattcctgttcttcggtatacggcggcggtttgctacgactctggcattgttgctgatgatcgtgatgacaccgctgacactgtatctggcgttagcgaatccggtgtccgattgtggttgtttcggtgatgcatgggtgttgacaaattgggaaacgttcggtaagaatgtggtattgtttattgcagccgtatctgtcttcaaaggtggaaaacaaatcatccgctttattacggcaaagatggcatggatggtttctatgtatacgttctttttcgtatttgtgctttcgttctattgtctggacaatctgcctatcctggatttccgtccttacaagatcggaaaaaatatcaaagaaggcatggaaatacccgaaggagcaaaacccagtgtgtttgagagcaagttcattctggagaaggacggaaaaaagcaggaatttacactggataattatccggatagcacatggacgtttgttgaaacacgtacggtgttgaaggaaaaaggatacgagcctccgattcacgacttttctattgtaagtctggaaaccggagaggatctgaccgatagcattttatcagataagggatatacattcctgttagtagctcatcgtattgaaaatgctgacgatagcaatatagaccttattaacgagatctatgattatagtgtggagcatgggtacggcttttatgccctgacttcttcgccggaggaacaaatagagttgtggcgtgacaagaccggtgcagaatatcctttctgccagatggacgacatcactttgaagaccattattcgttccaatcccggactgatgctgataaaggatggtgtcattctgaataagtggagtgataacagcttgccggatgaatacgtgctgacggatagtctggataaactggaactcggtcagcagaaacaagaaagtgatttgcgcacgattggttacgttcttttgtggtttatcattccgttgctgatggttatcggcgtggacatcctggttgtgaagcgcagggaaaggaagagagcgaaaaataaagtgattagcgatggagtgataagtgataagcaagagctccctcagccataaatcacaaattataaatcaaaaatacattaacccttttaataaataaaaaacaaaatgagaaaaaacattgttgcaggaaactggaaaatgaacaaaacccttcaggagggtattgctcttgcaaaagaactgaatgaagtactggctaacgaaaagcctaactgtgatgtaatcatctgtactccttttatccacctggcatcggttactccgctggtagaccccgctaagattggcgtaggtgctgaaaactgtgctgataaagaatcaggtgcttacactggtgaagtttcagctgctatggttgcttctacaggcgctaaatatgtaatcctgggtcactcagaacgtcgtgcttactatggcgaaacagttaccatcctggaagaaaaagtaaaattggctttggctaacggtctgactccgatcttctgtatcggtgaagtgctggaagaacgcgaagctaacaagcagaatgaagtagttgccgctcagttggcttctgtattctctctgtctgctgaagatttctctaagatcgtattggcttacgaaccggtttgggctatcggtacaggtaaaacagctactcccgaccaagctcaggaaatccacgctttcatccgttcattagttgctgacaagtacggtaaggaagttgctgataactgctctatcctttacggtggtagcgctaaaccgtctaacgctaaggaattgttcgctaatcctgacgttgatggcggcttgatcggtggtgcagctctgaaggtagcggacttcaaaggtatcattgatgcttttaattaatagataatggaagactgataattgataaccggtgaagtgccggttgtcggttatcagtctctataatcatattatcaatcgtctattattatattattcattatgaagaagcttggtttacttttaattgcatgctttgctttcgccgcttttgcttcggcgcagaataacattgtgaagagtttggaacgcaatgtgccgggacagggtaaggtaaccatccatcaggatgcccgcatcgaggccttgataggtcaggaatatatccccaacggaacggagaacagagtgcttaaaagtcagggtttccgtgtacaggtgtatgccggaaacaataccagtagagccaagaacgaagctcacgctgtgggctcacgaatcaaagaatatttcccggaactttctgtttatacctctttcaactctccccgctggctgtgccgtgtaggagacttccgcagtattgaagaagcagatgccatgatgcgccagttgcgtgctacaggcgtattcaaagaagtttctattgtgaaagagcagataaacatccccttataaaaacttactcatgttaggaaaagaagaaatcgtatctcctgcactggatgaactgaaagaacactatcagcgtattataactttattgggcgaagatgccgaacgcgaaggactactgaaaacccccgaacgtgtagcaaaggctatgctgagtttgacaaaaggctatttcatggacccgcacgaagtgctccgctctgccaagttcaaggaagaatacagccagatggtgattgtgaaagacattgatttcttctcactttgtgaacatcacatgcttccattctacggaaaagcacacgtggcttatatccccaacggttacattacagggctgagcaagattgcccgtgtagtggatatcttttcccatcgccttcaggtgcaggaacgcatgacgctccagattaaagaatgcatccaggaaacactgaatcctctgggtgtaatggtggttgtggaagccaagcacatgtgtatgcagatgcgtggggttgaaaagcaaaattccataacgaccacttccgattttacaggtgctttcaatcaggcaaagactcgtgaagagtttatgaatctcattcgtcagaattcattcacataacagtcccgtacgttatttcatgaaaggaaactacagttccatgaaggaaaactgttgttcccattaaaggaaacgcgcgttccctttaggagagaccgtcgttcccattaggggaagctgtcgtttctgtatgagggagctatcgttctcattaggagtaaggtgatttaaccgagtacaactctgtctcccaaccgtttggccataatacttttgatctcacgcagttctgagtagcgtttcatgatagaggtgcattgttcttcatcattggctacggcagggtcttgcaaggcatacatcatgtgtttcatttcttcactgatgatggcgaacttgaaattaatcatgagcgtaggtaccaattcgaataggcgttcctcatcggtcaccaacctttgggctttggagtgatacttactcagttggtagcggtcggcaatcaactctgtacttagcttactgataatagggtcgggatgtgccaggaaataccgttctgcggtgaacccttcattatgtatatgctctgctgcttctgtcaacatctgcctgtgcagcgggttgtggaaagccagttcatcctccttcaagtcattgactacgtattccgttaccgtgatgggaatttctttcccttcctcatcgggaacgttgcacaatactttctctccgtagcgtactaccatttgcaggataaggcgctcgtatttgtagaattcctgtccttcttttccttcctgcgggatataagatacgtattcggcagcttccggtggaagcggtgcaccaccgtcaggcatttctccatccatgggataaggaggtatgtcttcagggtagggtggttgcattccgtcgggaagcggtgcttgtgcagcgtcgcgggctgcattattctttcttgtttcccggtttctttgttccgcctgcttctcagcctgcgtttcgcgtcgtttggcaacttccgaaaccaatagcttgtcttctatacgaagcagttggctacattctttaatatatacatcgcggacaattgcttcaggaataatagatatactttgtacaagattaccaattaactcagcacgcttgataggatcttttcctgcatcttccagcagaagattggttttgaaacgtataaagtcagtttcattatcttgtatgaatttctggaattctgtagcgttgtgcttgcgtgcgaaggagtccgggtcttccccgtcgggaagcaggcaaactttgatattcattccttcttccagcagcatgtcgataccacggagagaagccttgatacctgccacgtcaccgtcatagagtaccgtaatgttattggtgaagcggtgaatgagcttaatttgtcccggagtcagtgccgtacccgaagaagctaccacattctccacacctgactggtgcatggaaataacgtccgtgtatccttccaccaggaagcaacggtcttgtttcacaatagcctgtttggcaaaataaatgccatacaactcactactcttatgatagatttccgattcgggagaattgacatatttaactttgactcccttcgtcgcactgctaagcacgcgcccgccgaaagcgaccaccttaccggaaagtgtgtgtactggaaaaataacacgtccccaaaagcggtcacgcaagcggtgatcgtccgtttcgtaacaaagccctgtcttgacaagatattctttcttgaatcccttcctgatggcttcctgagccatggcatcgtgactttcggtgcaatagcctaactggaacttttcgatgatgtcatcccggaaaccacgattgcggaagtatgccataccaatgctacgtccgtccacatggtttttaagtatattttggaagtaatcacgtgcaaagttattcacaatgaacaaactttcacgttcgctctgcatcagcttctcttcactggacagttcgcgctccttgatttcgataccgtatttctttgccagatatttcagagcttcagggtagctcatctgctcgtgctccataatgaagtgcaccgcattgccacccttaccgcaggaaaagcatttgcacaaccctttggaaggcgatacataaaaagatggcgtcttgtcatcatggaacggacacaagcctacataattcacacctcgcttgcgcaacgtaacgaagtccgatacaatgtctacaatctgtgcggcatccagaattctgtctatggtaggttggtctatcattggataattgtttttgcgaatgcaaagataaaaaaaatcccccgttgaggacgagggaacctaatgttttcacaacggaataatccttattgtgatttgcttcattttagtctgacaaatatatgaaataaattgggaaaagcaatagaatatagaaagttttttactatatttgacaaaacatcaaaataatatcatgaaaaaaatattaggattagatttaggttgcaatagcattggttgggcattggtcaatgaggctgaaaatactgaggaaatatcgtctattatcaaacttggtgtaagagtgaatcctttgactgtggatgaaatgcagaattttgaaaaaggaaaaagtattaccacgaatgctgacagaactcttaaaagaagtatgcgtcgtaatttgcaacgttataaattgcgtcgtgacactctcattgaagtgttaaaagagcacggtttcataacagatagcactttactttctgaacatggtaataaaacaacatttgaaacatatcgtctaagagcgaaagctgcagttgaagaaatttcattagagaagtttgctcgagtgttactgatgattaacaagaaacgtggttataaaagtagccgaaaagccaaaggaagtgaagatggtgtattgattgatggtatggatgtagctagaaaactttatgaagagggcttgaccccaggggaactctgcctacaaatacttgaagctggaaaaaaaaatctaccggatttttatcgttctgatttacagaatgagtttgacaggatttggaacttccaaaagctagtttaatccggaattattttgtgatgcagtgaaagaagaagttagaggtaaaaatcgtagtcagacttgggccattctagcaaagttctttgtttggtcagaaaaagaatctgtttggaatgagaaagaggcaaggacagaagaaagagtaaaggagtataagcttgtcggtcttaaacgagataccaaagggaatgaattaaaattggaaaattatcgttggcgtgtacaagctctttctgaacaactaaatccggaaatagttgctattgtactacaagaaatcaatggtcagataagtgcttctagtggttatctgggggcaatcagcgatcgtagtaagcagctttacttcaatcgtcagacggttggacagtatttgatgtctgagttggaaaaagaccctaatgtaagtttacgcaaccgagtgttctatcggcaagattatttggatgaatttgacaggatatgggagaagcaggctgagtttcatgaggagttgactgtggaactaaagaaagaaattcgtgacatcattattttttatcaacgtcgtctgaagagtcaaaaaggattaataagtttctgcgaatttgagaagcgagaagttgtagtagaagaggatggcagaaaaaaaaataagacagtgggttgccgagtgattccccgttcgcatccgttattccaagagttcaaaatatggcagaccttgaatgatattgaagtttttgcgtgggataaacagagtaaacgcaagaaagcggataaatcttctatattgtttgataactcggaagatgctttgctcgtagaaggaaaacggtttttgtatcaggaagaaaaagagttgctagctaaggaactttttgtaaaagagagtatgaaaaaggctgaggttctgaaactgttgttcgaaaattaccaggaactggatctgaattttaagcagattgatggtaatcatacaggatttgctcttttctcagcatatagcaagatgattgagaagtatggttatgaacctgtggattttaagagatctgcagatgagattatagaaaagctggaaaccatattcactaatttaggatggaatacagaactactttctattgatttgagtaaagaggataaagaacttgagaggcagtcttatttcagactttggcatttattgtattcttttgagggggataatacaccgactgggaatggtaaactgcttgagaaaattatgcaactttgtgacgtggaaaaagagtatgctgtagaacttgctaatgtgtcatttcaagaagattacggaagtctgagtgcaaaggctattaaaaagatactaccttatttgaaagaaggtaatcaatatgacgttgcatgtgactatgcggggtatcgtcattccagatcctcattgaccaaagatgaaatagaaaataagatattgaaggacaaattggaaattcttcccaagaatagcctgcgtaaccctgtggttgaaaagattttgaaccaaatggttaatctgattaatacactcattgatacctatggtaaacctgatgaaattcgtgtggaactagcccgtgaactaaagaaaaatgctaaagaacgagaagaattaacaaaatccatagcacgaaatactcgtgaacatgatgaaatccgtcagttactgcgaacagaatttggcatgatgaatgttagccgtaatgatattatacgttataaactctatgaagaattaaaagataacgggtataagactttgtattctaatgagtatattccgagagaaaaaatattcagtaaagagattgatattgaacatgtcattccgcaagctcgccttttcgatgattcactgtctaataaaactttggaatacagggctatcaatatagaaaaaggtaataagacggcttatgattttgtaaaagagaaatatggaaatgatggtttagagaagtttctcaatcgttgcgagaccttattcaaggataaaaggacaaagcttaggaaattaaaaatggaagagaaagatattccggaaggatttatcgatcgggatttgcggaatacgcagtatatctccaagaaagcttttgctatgttgaatgaaattagtcgcagagtggtggctactactggttccataactgataaattgcgtgaggattggcaacttgtggatcttatgaaagaattgaatctgcctaaatatgaaaagcttggtatggtagagatgtttgaggacaaagatgggagaaagatcaaaaaaataacggactggactaagagaaatgaccatcggcatcatgcggtggatgctctgacggtagctttcacaaaagatgtatttattcaattctataataataagaatgctgcctggatgcccgcctccaaggaacatgctaatattacaggtataaaggctcgttactttgaaaatggaaaggctcttgctcccatgcctttggcgcaatttcgcgctgaggcgaaacgccatttggaaaacttgttggtatctatcaaggctaaaaataaggtaattacttctaatgtaaaccgtacaaagaacaaaaatggtgaaaacaggaaactgcaacaaacaccgcgaggacagctacatttagaaactgtttatggaagtcatcggcaatatgccacgaaaatagaaaaggtgaatgctgcttttgatgttaccaagattgctactgtaagtaagcttgcttatcggaatgctttactaaaacgtttggaggcttttggaaatgatccaaagaaagcatttactggtaaaaatacattggaaaagaatccgctctatcttgatgagaaccaaacggagatggttccagaaaaagtacagacggtagagtttgaaactgtttatactatacgaaaaccgattgatcccaatttaagtatagataaggtggtagatgtgaaaattcgtagtgtcttggaaaaaaggctaaaagagtatggtggagatgccaaaaaggcattcgtcaacttggatgaaaatccaatatggctgaatgaagctaaaggaatatcgattaaacgcgtgagtattcgaggcattagcaatgctcaatcgctgcatgaaaagaaagataaagatggtaacttgattttgggcaaagaaggaagaaaaatcccagtggattttgtgaatactggtaacaatcatcatgtggctatctataaaaagcctgtcttggacaaggtgggacaggtagtacttgatgaagaaggtaatccgaagtatgaacttgatgaagtagtggtttctttctttgatgcggtgacacgggcaaaccttggtcaacctattatagataaggattatagaagaagtgaaggatggcagtttctgtttagtatgaagcaaaatgaatattttgtatttcccaatgataagacaggattcaatcccaaagaggtagatttgttgaatccggagaattatgcattgataagtcctaatttgtttagggtacaaaagtttgcctataaaaactatgtttttagacatcatttggaaactactattaaagatacaagttcaactctaaaaggtataacatggactgattttcgtagttcaaaagggttagataaaatagtgaaagttagagttgatcatattgggcaaatagtatcgattggtgagtattaaaaatatagggtaatgaataatattagttgtttcaagataagaaaatctattttacgtggaatgaagaagagtaacaatggtaattttcaattgtcgatgtggcggaggcgttgactgatagtgttaatcttaaacagtatataaagcgaatgtgttcacgggacgaggtttatcattgaaccaaggtacactttatacctcggttcaaatgatagtataggatgttaaaaagagcaaaattcaagcagtatatataaaggattatttcgtattatacagtctatttcttctaaaatagtacactttaaactttgactagctcaggtgagggatgaacgtgtgcaagagatagagaagtcagagcttgcccaagagtatatgaaagaactctatgagcagaaggttatcctaagggttggattgtcagacgtgtggtatagttatccgtcttcacaatgtttggcgaacatgttacagtggaaatcctctcaaaagagtagtcgaatacatctaaaaaagtaagcaagttgtaaatcgtggaggaatgtaactagagtagttcatgagcaagcagagaaggagttaggaagaagcaatatatcttttcgaaacttcttagcaaatttaggaaaaggagaaaaaccgccccaattgtcttttgaagcggatagtgagtagtagataatttaaaaagtagaatactatgattaaaaaaacgctttatttcggtaatcctgtttatttatctttgaggaatgcacagttggtaatcaaattgccggaggttgtgaaaaatgacaccttacctgatggcttcaaacaacaatcagaggtaactaaaccaatagaggatcttggtgtagtagtactggataataagcagataactattacttcaggagtattagaagcgttacttgaaaacaattgtgctatcataacttgcgacagtaagagtatgccggttggattaatgcttcctttatatggaaacacgacacaaaatgaacggtttcgtcaacagttggatgcctctcttcctctgataaaacagttgtggcaacagactgtaagaatgaagattgaaaatcaagcagctgtattgaaaaaatgcgcaggtgaagaagtaaagtgtatgactatatgggctgctgatgtgaaaagtggggactctgataatctggaagctcgtgcagctgcctattattggaaaaatttgtttaaaataaaagggtttacaagagacagggaagggattccacctaataatctgttaaattatggatatgcgattctaagagctgtagttgcacgtggattagttgccagtggacttttgcctacattaggaatacatcatcataatagatataatgcttattgtctggctgatgatattatggagccatatcgaccctatgttgatgagttggtctataaaatattgcaggaggggatgaattgtaatgaactgacgaaagggttaaaagctcagttacttactattcctacactagaagttattatctctggtaaacgtagtcctttaatggttgcggtggggcaaactactgcatctttgtataaatgctttagtggtgaattgcgtagaatattatatccggaaatgtgagatgaaccgatttagtgaatatcgtattatgtgggtacttgtattatttgatttgcctactgaaacaaagagggataagaaagcatatgtagattttaagaagaatctgcagaaagatggctttactatgtttcagttttctatttatgttcgtcattgtgctagtagtgagaatgcagaagttcatataaaaagagttaaatctttcttgccggagcatgggcaggttggaattatgtgtattacagataagcaatttggaaatatagagttgttttatgggaaaaaatctttggatataaatactcccggtcagcaattagagcttttctagaaaaagaaatcccacttaaatgcgggattcttaattgaaaacagcatcgtttttgtatttcaaaaatggtttataactaattgaaaatcaatttgtaatgtaggttgtactgttttctatggttcaaagatactaaaatgaaagcaaatcacaacctcagtcacggtttccacgtccgttgcttactgttttctatggttcaaagatactaaaatgaaagcaaatcacaactatagtatctttactatctgttaaatatggactgttttctatggttcaaagatactaaaatgaaagcaaatcacaacggactttgagtgtttctaaagacgaatgaactgttttctatggttcaaagatactaaaatgaaagcaaatcacaacatatctttgttttatttcattgcaatgataactgttttctatggttcaaagatactaaaatgaaagcaaatcacaacggacagatggaaggctgaccagatagaaaactgttttctatggttcaaagatactaaaatgaaagcaaatcacaactgaatacttatattcttttgtcgtcgcatcactgttttctatggttcaaagatactaaaatgaaagcaaatcacaacaccgcaagcggtgttatggtagtcttgatactgttttctatggttcaaagatactaaaatgaaagcaaatcacaacaagggggaaacagataactaccgtgaaaaactgttttctatggttcaaagatactaaaatgaaagcaaatcacaaccagtggcaatctgtgggcgaagatgaacctactgttttctatggttcaaagatactaaaatgaaagcaaatcacaacattgatacgatcggagaaggcgcgggcgtaactgttttctatggttcaaagatactaaaatgaaagcaaatcacaaccgagtataagttctcagttgaggaggccagactgttttctatggttcaaagatactaaaatgaaagcaaatcacaacaggatattaagattaagcgcctgaagaaaaactgtttcctatggttcaaagatactaaaatgaaagcaaatcacaactacagatttcacgctgtcggagttgacgttactgtttcctatggttcaaagatactaaaatgaaagcaaatcacaacgtacgtctttgggttgggtttgtatagccaactgtttcctatggttcaaagatactaaaatgaaagcaaatcacaacaggtaaacaagttcattgcccatgtcctccactgtttcctatggttcaaagatactaaaatgaaaacaaatcacaacaatcgagcatattcgtatctacgccaacaggctgtttctaatggttcaaaaatacaaagatgagaaacaaattacaacagaattttatttcattcctgcctatatttgactatttttaataattttagaaataagtatgctcccccaatcctaaatatcatcccttctctttattaacgaattgaagagagaagccccacttccttttccgtacccctcctctcttcaatcccttaattccacctatctattttatcttttccctaatcttcgtcagatacagcttcatcccttccgcatccttcgtactgataatttccagcaaattctttagctccagacgaatattttccacttgcgagggagtgcgcggattaaagagaatttcctgaagtaagtaatcatcttcactcagcaaacccttggcaatagccatatgcttcttgaacgtagtacccggagcctcctggtgcttcatcaccgctgcaaaaacaaacgtagagacaaaaggaatagacagagaataggctaccgtctcatcatgttcgtcgaaagtatattcgaagatattgaggcggagcgtctggtaaaggtccttgaagaaaatttttcccaggtggtcaccttcactgatgatgatagcattctcgctgctcagattgctgaggctggcaaacgtagggccaaacatcggatgcgacgatacataacggaaaccactttcctcatagaatttcttcaatcccgtcttcactgaggcgatatcactgatgatacaatccttgggcagcacaggcagcaccttgcggaatgcgtccagcgtatatctcaccgtggcggcattgattaccaactccggttcgaagtcctttatctcttccaacgtggtgaaacgatacgtgttatagacaaaacgcaactggtgcggattcacgtcgaacactgccgtttcatgttggaaacttagaatatctgtaaagaaagagcccatcttgccggctccgagtattaaaatacgcataaatttagtgtttaggtattaatgattagtgataagtgaaagatagcgtagccattaatcacttatcaccagtcgctaatcacttgtttataatttccatttgttgcctcacactctcctcgtgtatcagctcgaataccttcttgataaattccgaatccacgcccagaagcacaccttgagaaccgcgtttatccagaatttcattgtaacgtcccgtttgcagaatcgtcatatcgtgctctttcttgaacgtaccgatttcacgtgccacacgcatacgcttggcaagttcctgcatcaggttgttgtcgcactcatcaatctgcttgcgcagttcgctgaggttttctgtggtctgggtctctttacggatgacgagcaggttcaggatgtaatccagtacgtccggagttacttgctgcgaagcatcactccatgcacagtcggggttgcagtgactttcgataatcagaccgttgaaaccgaggtccatagcctgctggcaaagcggtgcgatgagttcgcgcttaccaccgatatggctgggatcgcagatgatcggcaagtttgggatgcgacgacgcaactcgatggggatatgccattgcggcagattgcggtacaacttcttgtcgtaactgctgaaaccgcggtggatggctgccagacgtttcagaccggcattgttgatacgttccagggcaccgatccagagttccaaatccgggtttaccgggttcttcacaaacacaggaatatccacacccttcagtgcatcggcaatttcctgcatggcaaacgggttggcagtggtgcgtgcgccaatccaaaggatatcgatacctgctttcagacactcgtatacatgcttcgaagtggctacttcggtagaaacgtacattccggtttctttcttcacctctttcagccatgccagaccgtctacgcctacaccttcgaaaccacccggtttggtacgcggtttccagattccggcacggaatatcttcattcctttttcggccagttgtttggcggtgcacattacttgttcttctgtctcggcgctgcaaggacctgcaattaccatgggacgtttgtcctcaatacccggcagcaaaatcgattctaattcaagttccatattcttttatttttgttcaattatatttttattgtatagatatttctcagtgtcttctgaaccctctgcaacccccgtcgataaagcctttcgaacgtgttaataaatacaggcctcgttttttaaaaacgttgcccttattctttaaaaacgtcgggcacgttttttaaaacggtgagtgacttgtgttacaggacttcttttttgtaaatatattacttcatctccctgatgcgcttcaatgcctcttccaatttatggtctttgcagcaaagcgagatgcggatataccgttttccgttacttccaaagataaatcccggcgtgatgaacacgcgtgcgttgtgcaacaccttttcagtcagttcttcaacgtcggcacagctatcgggaatttttccccagaggaacatacctacctgtttttcatcgtatgtacattccagtgcatgcatgatttcccctgccagatggcggcggctgcggtagttcttgttatttccgtcgtaccattcctgttcggcttccagagcgttggcggctgccagttgcatggcgcggaacataccgctgtcgatgttgctcttcactttcaggatccattgcacaaagtcggcgttgcttgccagcataccgatacgccaacccggcatattgtggctcttgctcatggagttgaactcgatgcaacactctttggcgcccggcacactgaggatgctgagggggtggtcgttcaggatgaagctgtacgggttatcgtttacaatcacgatgtccttacggcgtgcaaagtccaccagttttgcataaagttccggggtggcgttagctccggtcggcatgttcggatagttggtccacatcagctttacgcggctcatgtccatcttttccagttcgtcgaagtcgggcatccagccgttttcctctttcaggttgtagttgatgacttccgcgcccagtatcttgctcaatgaggtataagtggggtagcccggattgggaaccaatacctgttcgcccggattgacgaaggccagtgtgacgtgcaggataccttctttcgagccgatgagcggctgtatctcagtattaggattcagctccacgccgtaccatttcttataccaggcggcaaagctgcggcgaagttcggggatgccgacataaggcatataaccgtgtccgtcaggattttgtgcttcgcggcacagggtctgtatggttgcttccgagggaggcatgtcggggctgccgattccgaggctgattacgtcttttccttcggcattcatttgtgccacctctttcaacttcttggagaagtagtattcgctcacgctggccaaccggtcggcgggcttgatcttagatgtttgattttccgtctgcatattcgcctaatattttaagttctttggttagcggtgtgatggccgcgatggattgtttatatctcagtaggttgtcgaaaacaacgtctacgtaaaattggtattcccattcccgcccgatgatgggcagtgactgtattttggtcaggttgatgctgtagaacgaaagaatggacagtacttgcgagaggcttccttccgtgtggggcagtgtgaataccatgcttgccttgttggtttccgggtgtggatggcggcgtatttcgtctacttgccagggatcggcaactaccagaaaacgggtgaagttgtgcttgtttgtttcgatgccttcctgcaacaccttcatgccgtaacgctcggcagcagccttggagcagatggcggcgtgtcctttcaggttctcccgcttgatgatttcggcgctgagggcggtgtcttccgcttccactactttcatcttcgggtgctgggcaaggaactcgcggcattgcatcagtgcgatggggtgggagttgacttccgtcagatcgttccagtcctcatcgggcaggcagacaaagctgtgtgaaatgcgtagtttgtattcgcctatgatttgtgttccgctctgccgcagcaactcgttgttgtgcaacaggctacctgcaatggtattctctattgccaacattcctatggtcttgctgtccttcttcacggctgcaaacacgtcctcaaaagtagcgcaacagattaactctatttcttctccttcgaagtacttgtgtgcggcaatgtcgtgatacgaccctaatgttccttgaatggctattcttttcatactgtttctttaaaataaaaaatcccgcttccatacaatggagcgggattaagtatattactttagttctctattcagttcttaagcatcactgtcacttgacacatacaaactcccgctctactttctggctaaagtaaaagtaaaaaaagaagtaatatgtataagtaaacaaattcatactttcgttttctttttgtttttaatttcgtggcaaaagtaatacttttctcttatatgcaagcaaaaaatgatattttttttatttcttcttcaaaattagctttcagacgagtgcttccggttgtctttttctgccggaaatccatcaatcgtcgtgcatgattcccttgatttgctcccatttgttcacggcatcgttggactgtgcttttcccggagtgctccggccttcgcggatgtacttttgcaataggtctttcagctcgctgactatttcgggatgttcttgatagacatttttgctttcggtgggatcgtctttcatattatagagttgaatcggtgggagttgggcaatggcttccttgtccacacccggtttggggtagctccaaccgccggaactgggggaacacaacagtttccagtctcctttacggatggcaaactctccgcggatggagtggtgcacggttgcttcacggatggttggcatgtggtgcggattccggatgaggggaagaatgttgtagctgtcttccgcttcgttatctttcaggggataatggttgagggcggcaaaagaagcgtagaagtcgttgaggcagacagtttgcgcacaggtgcctcgacctgcaccgttgacccattccacgatggtgggtacgcggtgaccgccgtcgaagagatcggctttcatgcctcgccagatgtagttggcatgatgccctttagctgccatttcggggatacctccggcgggagagcaaccgttgtcggtggtgaaaactacgatggtattggaatctataccgttgcgtcgcagggcttcgcgcacttgtcccactacatcgtccaccatcaggacgaagtcgccgtaatcacccagtccggtttttcctttgaaggcttcggcgggcaggatgggggtatgcggggcgggcaggggcagatagaggaagaaggggcgttcgtcttgtgcgtggcggttgatatagtctactgcgcggtgggttaggttgggcagacagtcctggtggttgaagtcgttgcctatggcgcctgcacgccagaagcccggtttctttcctgcgggtacggtgcctatttgcgtggtggtgggctggcggttttctatatatacatagggagccatgtcgagggaaccgcagaagccgtagaagtagtcgaagcctaagtcgacaggaccgttggtgatgggtttagagtagtccacgtcttcgtcgttgagggcgttggcgtcgggtttctcatgtcccggtttcgtgccccagttccagcctaaatgccatttgccgatgcaggcggtggtatatccatttgctttcagcatggatgccatggtactgcgggtggtggggatgatagggcgggagtagccatagagtacaccgcttttgaggctggaacgccagttgtagcgccctgtgaggatgccatagcgggtgggggtgctgacggctgaacaagaatgagcatcggtgaacattacgccgttggcggccatctggtcgatgtggcgggtttggatatgcgagtctttgttgtaggcggagacatctccatagcccatatcgtcggcgaggatgaaaatgatgttcggcttttgctggggttgtgtgtcggggtgaggggatgactgtgcatgggcatgttgtccaaggcagaagggaacggataataatccgagataggtgaggtttttcatgatatgatgttttgggtttgattttacttggttattatgtacaaaattagctgttcgatggaaagggctttattagttctgtctcaaaagtttgagatattgttgcaagtgcggagtggttattacgaatttaaacaagggaagaattctgttaatgtattattctttttctgatcccataaaaaagcattcttccttttggctattccctgcaattcatctatctttgcattagccgaagagaaatgcggcgtgttgaagctatttttgataacgaaaaaaactggtaattttatttaagtcaagaaacagaacttcaataaagatgtttcacgcagaccaaaaagggtcgggcgtgcaagcatgtttatgagttctgtgggtataccagtgcctttcgttacataaatatgaactatacgtccgac

SEQ ID NO: 2284 - DNA, 23555 bp, synthetic construct
  misc_feature 1..23555: note = Synthetic
  source 1..23555: mol_type = other DNA
tgagaagatcgatttgcaccgtccgtatgtggatgatattatcttggtttccgcttctggtaagccgatgaagcgtgagacagacttgatcgacgtatggttcgattccggcgctatgccttatgcccagatccactatccgttcgagaacttggaggagttcgataatcgtcagatctatccggctgactttatcgctgagggtgttgaccagacacgcggttggttctttaccctgcacgctctgggtaccatgatttttgatagcgtggcttacaaggctgtcgtgtctaacggtctggtattggataagaacggaaacaagatgtctaaacgcttgggcaacgctgttgatccattctctacgatcgagaagtatggttcggacccgttgcgttggtacatgatcacgaacgcttctccatgggataatattaagtttgatatcgatggtatcgaggaagttcgccgtaagttctttggtacattatataatacgtattcattcttcgctttgtacgcgaacgtggatggcttcgactactccgatccggatgtggaatggagcaagcgtccggagattgaccgttggatcctttctctgttgaacagcttggtgaaggatgtggatggctacttggaggcttacgagccgactcgtgccggacgtgctatctctgatttcgtaaatgataacttgagtaactggtatgtgcgtttgaaccgccgccgtttctggggtggtggtatgacggaggataagttatccgcttaccagactttatatacttgcttggagacagtggctaagttgatggctccgatcgctccgttctatgccgatcagttattcttagacttggtcgctgttacgggacgtgagaacgttgagtccgtacacttgtccgatttcccggtttacgacgagtctaagatcgacaagaatttggaagagcgtatgcaaatggctcaagatgtttcttctatggtattggctcttcgccgcaaggtgaatatcaaggttcgccagccgttgcatacggtaatgattccggttgtagacgctcatcaacaagagagtatcgaggctgttaagaacctgatcttgaacgaggtgaacgtgaaggagctgaagttcgtggataatacggcaggtatcttggtgaagaagatcaaaccggactttaagaagttgggcccgcgctacggaaagatcatgaaggcgttggccgccacgattcaatcgatgagccaagaagatatcaacgctttcgagaaagccggaacgtttaccttgatggtagatggacaggaggccgttttggagcgtacagatgtagagatcatctctgaggatatcccgggttggttggtcgctaatgaaggtcgcttgacagtcgctttggatattaccgtaaccgaggatttgcgtaaggaggggctggcccgtgagttggtgaatcgtatccaaaacttgcgtaagagcagcggtttcgatataacggataagatccatgtatccattctttcttgcgaggagatggatgaggcgatctatgattataaggattatatcgctaaccaagtattggcggaatctatcgaaatcatggataatgcgatcagcgacgctacggaactcgatttcgaggactttaaattgtccgtaaagatcgagaaagcttaaaaatagaatagcatttcttgcggaagaattaggaatgaaatataggaaaatcgataattatattatctttgcatgcaaagaagaaataatatgattttatattcattcttaattcttctttttgattgatatttgaacgattgttgaacctaaatttttttagaaccatggcagagaagacaagatattcagacgctgagctcgaggagttccgcgctattatattagagaaactggaaatcgcgaagagggattacgagcttttgcgatcaggggttacgaattccgacggtaacgacgtggctgatacgtctcctacattcaaggtgctggaggaaggcgcttctacgttatcgaaggaagaggcgggccgtttggcgcaacgccagatgaaattcatccagaatttacaggccgctttgatccgtatcgagaataagacctacggtatttgccgggagactggtaaattgatcccgaaagaaaggctacgtgctgtgcctcatgcgactttaagtatcgaagcaaaacaaggaggtgcaaagtaaatgagatattctaaaggttggggagcagtgttaatcataatactgctccttcttcttgaccaagtgctgaaaatatggattaagacccacatgcagttgcatgagagtatagagataactccgtggttttatctctattttactgagaatccgggtatggcattcggtatagaggtgattgggaaattattcctttccgtattccgtatcgtggctgtattgtttatcggatattatttgtataagctggttaaagaaaattataaattcggttttattgcctgtatatctttggtttttgcgggggcggtgggtaatataatcgactcgatattctatggcgtgatcttcgaccatagtttcgggcaactcgctacttttatgccggagggaggtggttatgcctcttggctgcatggtaaggtggtggatatgttctatttcccattgatagagaccgtattcccggattgggttccgatctggggtggacaggagttcgttttcttccgtccgatctttaatttggcggactcggcgatttgcgtgggagttttccttttgttaatattttatcggcatactttgtcggctagcctttcgaaagaagagaaataaatgcggagaaaattacggatatatggtatggctttattagccacgacgttgctggcggcatgtagtaaggttccggatggtattctgtcggagaaaaagatgcagggtgtcttgacggatatgttgctggctgaggccatggtaaatgtggattataatacttataaatccgataccatgaagcttgccttgtatgagtctgtattccgtaagcatgatattacacaggcggtgtatgatagctcgttggtgtggtacggccgtaacttggatatttatatggaggtctacaaccgggtcttggccgatcttaataaacggatcaataacttaggggatgtgcaggcggacgctgcgccggtatcgaaccgggattctgtggatatttggcctcgccgttcttatctggtcttgtctcctacctctgtatttaatggggtgactttcgatatacgtccggaaacgaattattcctcgggcagtagtttcgtgctgggcatgcgtgtctggggattgaataacaaaatggcttataagccggaggtacgtttaagcgcagaccaaggtgatacgaccttgacggtgaatagtaagatcacgaaagatggatatcacgagacgatcttgaagactataccaactaagaaagtaaagcgtgtgtttggatatatccgtatggataatatggatacgacttattataaggtgtatatagatagcttaagcttgatgaaatataactatggtaaggagcttgccgaattacctaaggattctattaagtaatctctctatttgtttattatacttatgagaagaattgccgctcattacgtttggtgtaagcaggtttatcgtatgcattatatcgaactggatgataatggtgcgtttcatggtgtttacccgttgaatgaggagatagctggaaccgctttttatgatggagtgctggtgccggttctttcctcggaaccggcgattggttttaagcaggtgatgggatcttggccggcgttaaccgaaaagattacgccgggttgttcagtccatatatatcgtttaagcgggattcccttggcgtctgcgaaactcggcacagaccacagctgtagcgatggccacattgagagactctgaggtgtctcttccttccggatagttcgggatatataatttttcgtttacaaaagcctctatggcgggacgtattccatttccttcattacccattatcaagataccgtttccggataaggttttctcatataagttttctccgccaaggaaggtgccgtataaaggtatggcttgggctgattgggcctgtaagaacgtttccagatcggtgtaatgtatttttacgtgggcgagcgcacccatagtggcttgtacggtttttggactgaaaacatcggcggtatctttgctgcatacgatatgggaaataccgaaccagtccgctaaccggatgatcgtacctaagttgcccggatcttggattccgtctaatgcgagaacaagctccttttccggcgttatttccgttatatcccaattggggcgtttaaagatcgcgagtacatcttggggatttttcaggaagctggctttacgaatatcatcttcttccgctaccaataactccttggccggaatatcgccttgtgtagccatccaagatggcttggctattaataactcacattcaaaggccggtaacatatcggctaccaatttatttccttcggctacaaaaacattattttcattccggaatttctttaattccagagaacggatgtatttgactttggtcttgcttagcatcttagttctttttacaaaacaaaagtacggtaaattctttaaattccagtacattcgcgatcgtaaaaagcttggaatgatgaatcgatctctacgtatatgctattttatctgtatcgtactactactaacctcttgtagtacgaccaagtttgtgccggatggggaatatttgctggataaggtggagatcgtgtcggataacagggactataagtctgcggatttaaaatcttatcttaggcagcaaccaaacttcaaggtgtttggtctgatgaagtggcagttgtttgtctatgattggtctggtaagaatgagaagaaatggatcaataaacagttacgtaggattggtgagcctcccgtggtgctggatacgatgttggtggaacagtccgccatggaactagagcgtttttacattaataaagggtatgtccatgcggatgtatcaacgacgatcgatacggcacgccataagaaagcggttgtaacttaccatataaaggcgaacgatccgtataggatacgcaattacacgatgaagttccccgatccgaaaattgatagtttggcacatctgaaagcgcctcgccgctctcccttagcttctgcgttccggtcctcacaggaagagtataaccaattagttaaggaaggaactttatttgaccgggatatattggacaaggagcgggagcgtattacgaccttacttcgctggaacgggtattatggttttaatcgggattatttaggatatatcgctgatagttcttttaaccaaaatgtcgtggatcttgatatgtccatgaaaccttatcggaaggtgttgcccaatgggtcggtagaggatcagccgcatcgtcagtattatattaaggatgtaacggtcttaaccgattataatccgatgggggtaggagaggacgctagtttcatggctacagatacgatgctcagcgcaggggtgaatatcgtatatggccggaacgggaagagtatccgtccgagcgtgctccggaggagtacttatattcggccggggcaattatttagtgagaagaatatagagcagacctattcggcgttcgcttctctaagggctttgaggaacgtaaatatacgttttacggaagtagaggagcgggatacgatgaagttggattgttacattctcacttctcccgcgaagataaatacggtgggagtggatttggaaggtactaactcggcgggtgactatgggtttgcctccagcttgaattatcagcataggaatatcttccgaggatcggagctgttctcggcgagggtgagaggggcttacgaggcgttatccggaaataaggcgaatggctttggtaattactgggagttaggtgcggaagggtctttgctgtttcctcgttttttgttcccgttcttgagttcggattttcgtaggcggctacgtgcgtcaactgaagcgaaaataagttacaacctgcaaaaacgtccggagtatacgagggcgattctatctggtggttggagttatatttggcaagatcggggcaatacacaggcacgccatacctttaagcttgtagacttgaattatgtgtatttgccggataagaatatggactttatcaatagcttgccggattatatggtgttgtataactatacgaaccattttatcatgagttcgggatatacttattccttcagcaattattctccccagaatcgtttgagaaacacgcattccctacgtgcgtcggtcgaggtcgcagggaatttgttgagtgccttttcgcatcttacgggggcaaagaaaaatgatgacggttattatgagttgtttggtacggaatatgcgcaatatgtgaaattggatttcgattttagtaaaggaatcgtgcttgacagtcgtaacaagttagctttccatataggagtgggagtggggatggcttatggtaactcaaactatttaccttttgagcgtgcttatttctcggggggagcgaatagtgtccggggatggtctgtacgagagttaggtccgggtagtatggaagttgacagcacgacttctttcgctcttcaatcgggggatatccgcttggatttgaacttggaatatcgaacgaaacttttttggaagtttgaattggcggcttacatagatgccggaaacatatggacccggaatgtatcagatgaacgctataaggctggaaactttgatttctctcgtttttataaggagatcgctgtttcctatggtttgggacttcgtttggactttgatttctttctactacgtttagatacaggcttcaaggcttataatcctcaggagaaaaagtctaggcgttgggcgataacccgtcctaatttcaaggataatttcgccttgcattttgccgttggttatccattctaaattcaatatgtaaaaaagtgtactaaaagtttgcaaggaaaagaaaaatccttacctttgcaccacgaaaataaggatggtcaggtagctcagctggatagagcaacagccttctaagctgtgggtcctgggttcgaatcccagcccgatcacgagggagattctaaaagagtctcccttttttgtgtcataacttcgttggcaaagtatcttaggtgcgtgagccgatgtacttaagatacttttttggggggagggatcgacaagaggttctttctttttccgactggaaaaactatatgcctatcctctatgatttgctactgagctggaatttgtcttatatggatgtcttgtcctgaaatagcttgacacttttaaggggctaaaaagtatagaaatgatcaaaagaaagcccaaaagagtgttcacggaaccctttaaattatccgtgttacgcgagtattacagtagcggaatgagcaagtatgcgataacgaagaaatattctttgagccctccttgcatatatagatggctaaaagaatacccagtgggatcggaccagttacctttgccatcagaaacaaaagagaggttacagatggttcccaagcaatcggatttgacagatatggagtcccttcaaaagcgcatagaggaattgcgtcgttctttggagctggagaagatgcgtagccgtgccttcgagaagatgatagagatagcggaagaggaagaaggcatcagtatattcagaaaagatggtgccaaacagtaacggcgttacgtgaggagtatccccatgagagtgtggctaccctttgcgggctgtttggaaagaaacgccaatggtattacgcgaacatgaaggcggatgtatcggagagacaacgcgtcaagcttcttgctgacatgataggctattatcgtctttgttgtccccgtatcggaggtttcaagctgttccatttactggaaaagaatttgggacatgctgtgaccctcgggcgagactcgttcttaaaggtttatgaatcaaaaggctttaagctcaatcccaacaaacgtaggcgtacgacagactccaatcatgtctataaaaggtaccccaatcttatcaagggaaaagacgcgcggtattccaaccatatatgggtgtcggacatcacgtacgtgtggatattgggggacgtgttgtacttgcatcttgtcaccgacgcctattcgcacgccgtattgggctggtgcctatccgacagtctcagcgcctcgcatacgacagaggccttgcgcatggcgatccggatcgccggaggcggcaacctttgcggtaccatacaccactcggacagggggtcacaatacgccagcgaggcttacgtcagctgcctcatggagcatcacatacggataagcatgacagaaggatatgagccgacagacaacgccatggcggaaagacagaacgggatcttcaaggtcgaatggatatacgagcaggaaatgtacagggataaagaacaggcgatcaatgagatcaatcgtatgattgacttttataacaaccgaagacctcatatgagcatcggaatggagtgcccgatggaggtgtataaaggcaaactgccggggaaaaatctttggcgaaaaagaccctgattctttttgattccttacatttgtacgccgagaatatggatcactctggtatatccattgtccattcttgatgacaggctttttggtaggctttatcagagagtgacaagtaagccaggaggatcatgagtttattgacaagtaaagttgtttaactaccccaaaagtgacaagtgattttaggaatggacaggattgaggaatatgccgtaaaagtaagtactacttactttgtcatttaatatatactgcaagtggcatagaagatatactgtcctttccacgggtttctaccaagctggcatttaggctgattttagaacttcgtagcataaaaaaatcccccgcagaagggcgagggaacctaatgttttcacaacggaataatccttattgtgatttgcttcattttagtatgacaaatatatgaaatggaatgcttgcgtgcaagtgtttctgaaataaaatttttatatttgggaaaatgtaaagataacatactatgaaaaggattttaggcttggatttagggacaaatagtatagggtgggcgttggtgaacgaagctgaaacagatgaggaagtctcgtcaatcatccgattaggtgtgagagtaaatcctttgacagtagatgaaacgcagaactttgaaaaagggaaaagtatcactacaaatgcggaaagaactcttaaaagaagtatgcgccgtaatttgcagcgatataaattacgtcgtgatgcgttggttgaatttttgaaagagctgggttttattaccgacgaaactatcctttcggaacaaggaaacagaactacgtttgaaacctgtcgtttacgggctaaagctgctgaagaagagatttctttagaggaactatcccgtgtcttattgatgattaataaaaaacgtggatataaaagtagtcgaaaggtaaaaaaggaagaagatggagttttgattgatggaatggagattgctaaaaagctgtatgaggaggatttgactccggggcaactttgttcgcagttacttgaatcgggcaagaaagttttgccagacttttaccattctgatttgcaagaagagttggatagaatatggagtgttcaaaagcaatttcatcctgatgttgtgatgccgccaaagaagaaatcaaaggaaaaaacagaagccagacatgggctatcttggctaactattttgtttggaaagaagaagtggttggctggaatgacagagaagcaaagaatgaaacgatagaaaaagaatgtaaacttgtcggtcttaaacggacgactaaggggtatgaactgaaaaaggaaaattatcgttggcgtgcgcaagctcttactgaacaattaggtttggaagagatagccgtagtcttgcaagagatcaatggtcagataaatgcgtctagtggttatttgggagccattagtgataggagcaaagtgttatactttaatcatcaaacggtcggacagtatcagatggctgagttagacaagaatccccatgcaagtttgcgcaatatggtattctatcggcaggattatttggatgaatttgatagaatttgggaaaagcaggcagaatttcataaggaattgacagctgaattgaaaaaagagattcgcgatatgatcatcttttaccaacgacgtctgaaaagtcagaaaggcttgattagtttctgtgagtttgaaaggttggagattgtagtagaaaaggatggaaagaaacagaccaaagtcataggatgcaaggtgatacctcgttcgcatccattgtttcaggaatttaaggtatggcagacattgaatgacataaaggtattgggaagagagaagaaaagaaatgctttgtcggcaagcgaaagtagggctttgtatccagaagaaaaagaaatactggcaagagaacttgcgataaaagaaaacatgaagaaagcagatgtgttgaagctcttatttgaaaatccacaggaattggatttgaacttcaaacaaatagatggaaatcgtactgggttttctctcttttctgcctatagcaaaatgatagaaaagtatggctacgaaccgttggattttaagaaaccagcagatgagataatcggacagctaagaactatctttaccgatttaggttggaatacgaatctgtttaccattgacttaaccaaagaggggaaagagctcgagatgcaaccttatttcagactttggcatctgttgtattcttttgaaggagataatacgtcgaccggtaacggcaaactgattgaaaagatcatgcaactttgcggagttgagaaagaatatgctgtagagctagccagtctttcgtttcaagatgattacggaagtttgagcgcgaaagccatcaaaaggattttaccctatttgaaagagggtaatctgtatgatgtggcttgtgaatatgccggttatcgtcattccaaatcttcactgactaaggaggagatagaaaataaggttttaaagggcaagctggaggttcttcctaaaaacagtctccgaaatccggtggttgaaaagattttgagtcagatggtgaatgtaatcaatacaatcattgatacgtatggaaaacctgatgaaatccgagtggaattggctcgtgaattaaagaagagtgccaaagaacgtgaggaactgacgaaagctatcgcaaagagtacccgtgagcatgaggagatccgtaaattgttgcaagatgaatttggtatgatgaacgtgagccgcaatgatattatccgttacaaactttatgaagagttgaaagataatggatataaaacattgtattccaatcaatatatacctaaagaaaagattttcagtaaggagatagatatagaacatattattccacaatcccgtctttttgatgattctttatctaacaagacattggagtataaggctattaatatagaaaagggaaataagaccgcttatgattttgtaaaagaaaaatatggagaagaaggcttgcaacaatatataaatcgttgcgaaagcttgttcaatgacaaaaaggcgaaacttcggaaattgaaaatggaacagaaggatataccggatggtttcattgatagggatttgagaaatacacaatatatagcgaaaaaagcactcgctatgttgaacgaaatctgccgtagagtagtggcaactaccggttccattacagatcaattgcgtgaagactggcaattggtggatgtaatgaaagaactgaacctgcctaaatatgaagccttgggttttgtggaaacatacgaagataaggacggaagaaaaatcaaaagaataaaggattggacaaaaaggaatgaccatcggcatcatgcgatggatgcgctgacggtagcttttacaaaggatgcgtttattcagtatttcaataataaaaatgcggcacaagattcaggcaatagaaaccatacgaatataataggtatcaagacccgttattttgacaaaggaagagctttgcctcctattccattggagcaattccggatagaagccaaacagcatttggaaaaactgctggtatctattaaagctaagaacaaggtggtgactgtcaatgttaatcgaacaaaaaagagaaagggtgaaaatacgaagatacagcaaactccgcgaggtcagttgcatttggaaacggtttatggtagtcacaaacaatatgtgacaaaaatagaaaaggtgaatgcttcttttgatgcggctaaaatagcgactgtgagtaaacgggcttatcgaaatgccttacttaaacggttggaaacattcggtaatgatccaaagaaagcatttacaggaaaaaatgcattggaaaagaatccgctttatgctgataagtatcagaccatacgagttccggagaaggtacaaacagttgaatttgaaactatttatactatccgaaaaccggtcgatcctgctttgaatgtggataaagtagttgatgtaaaggtacgtgctattttagaacggcgtttgaaagaatacggtggagatcccaaaaaggcatttgttaatttttgggaaaatccgatatggctgaataaggaaaaggggataagtatcaagcgggttagcatccgaggaatcaataatgcccaatcgatacacgtgaagaaagataagaatgggaatccgatatgggatgaaaatggaaaacaaatccctgtggattttgtaaataccggaaacaaccatcatgtggctatttatcgtaaacctgttttagacaagaaaggacaggtgacgtttgatgaggatggtaatctgatgtatgaactggacgaggtggttgtccccttctttgaggctgtaacacgggctaatttaggacttcctattattgataaggattacagaaaaagtgaaggttggcaatttttgtttagcatgaagcagaatgaatatttcgtgttcccgaatgaaaagacaggcttcaatccgaaggaggtggatttgttgaatccggataattatgcaatgattagtccgaatttatttagggtgcagactatgtcaaaagttatgtatggaaataatgttgttcgagattataaatttagacatcatttggaaacaacagtgaaagatatgaaagagttgaaagatattgcttataaacaatataaaacactttcttttggtaatagtgttgtcaagatccgaattaaccacattggacaaatagtatcagtgggagaatattaatagtatctattagaaattgaaataaatagggtgtatgctattctcaaaaaggttgtaccctttttagaaacagacttttatactgattaatagtaatttaaaatctaactgcttatgatcaagaaaaccctttattttggaaaccccgtttatctgtctctgaaaaatgctcagttgatgataaaattaccggaggtagtcaggaatgatacgttacctgaaagtttcaaacgaacttcagaagtgacgaaacccattgaggatattggagttgtggtactggatcacaagcagatcaccatctcttcgggcgtgttggaagctttacttgaaaataattgtgctgtcattacatgtaacagtaaaagtatgccggttggtttgatgcttcctctgtatgggaacacgacgcaaaacgaaagattccggcaacagttggatgcctctctaccgttaaagaaacagctttggcagcagaccataaagacgaagattgaaaatcaggcagccgtattgaaagaatgttctggcgcagaagtgaaatgtatgtacgcatgggcttcggatgtgaaaagcggagatacgagtaacctggaagcccgagcggctgcttattattggaagaatttgttttggatagaaggtttcacaagagacagggagggcattccgcctaacaatttgttgaattatggatatgctattctgcgggcggttgttgctcgtagcttggtggcaagtgggcttttgcctactttaagaatccaccatcataatcgttataatgcttattgcttggcagatgacatcatggagccttatcgtccgtatgtggatcaattggtctgtggtatcataaagcagggagtggattatgcggaactaacgagagagttgaaagcgcagctgcttactattcctgtgctagaaacttatatgtcaggaaaacgtagtccgttgatggtggctgtcgggcaaactacggcttctctgtataagtgctttagtggcgaattgcgtagaatctcctatccggaaatgtaatatggatcggtttagcgaatatcgtgttatgtgggtacttgtgttgtttgatttgcctaccgagacgaagaaggagaaaaaggcgtatgtggatttcaggaaaaatctacaaagagatggatttacgatgtttcagttttctatttatgtccgccattgtgctagtagcgagaatgcggccgtacatgtaaaaagagttaaatcttttcttccggagcatgggaatgtcggaatcatgtgtattacggataagcagtttgggaatattgaacttttttatggaaagaaaacggtggaagtgaatactcctggacagcaattggagttgttctaaaagaaaaatcccgctgtcaagcgggatttttaatggaaacaatatctgttttttttattctgatgtgctttgtaatccattgattaatagtttttaatagataatatgctgtttccaatggctcaaagttactaaaatgaaagcaaatcacaaccggtcgatctctttagtaggggaggttcatgctgtttccaatggctcaaagttactaaaatgaaagcaaatcacaactatgaataaggtggaaattttttacaaaaagctgtttccaatggctcaaagttactaaaatgaaagcaaatcacaacaagacttggtgatatggcgaagaagaaagagctgtttccaatggctcaaagttactaaaatgaaagcaaatcacaactgcaatcgcattgaaccaaaacgcagagaagctgtttccaatggtccaaagttactaaaatgaaagcaagtcacaataaaatattgcaaaatattggggcagctacaccaaaaagtaagccattctcttttatgtcatcaaaatatctctttttctgtcattttgctcaaaatggagacttttagctgataaaggctttttatggaaatgcgaaaatagagagaaaaggaaggcggaaacagcgtatttcgccattttttagtgtatgaataggctttgtagagggattatgatccaatagtaaggtgtttataacggcgttgtatgctgttttcgactgcgatccttattgtttccgaccggaaatccgattgttttcggatgaaaagcttattgttttcagataaaaagtcgcttgtttgtccgactgaggttgacagaagacgaaatctttcgctagaataaatcagtgaaaatttgtaatgcgttgttcaatagattattgtgaaaaaatattttcgaatttggaagcaagtcgtaccttgcctcgaaataatcgattctccaagcgtttagattgcaaagtgtcagaatgacaatttgcattgattgaggaatattttggtgcggtgttctggtaaaagattgtttaggcacggcttttttattttttttggaaagattatcctattttttaatactgattatcagtttcttatatataagtttctctcgtgagcttattgtgcggaattttacttgagatccatgcattccggcctgctgaaacggatgggtaaatgaaagagccgtgttgtttaggtcttagataaatgatttaatttcgtacatttgtttttgataggcttaagctggaaactatggggcttggttccctatggttgagattaaacagattgtaaatatataaagagtaggtaagatggaaacattcgacgatatcattaaaggggataaacctgtattggtggatttttttgcgacatggtgcggcccgtgtaaggtgttgagtccgacggtcgaggcattggggaaggagttggcgggacaagtgcgtgtccttaaaattgatgtagataagaacgaagcacttgccacacagttgaggatccaatccgtacccactttgatcatctttaagaaaggtgagatcgtatggcgctcttccggcgtgatggatcacggaagcctattgcggaaggcgcaaagctatatcgattaaaagccgttcatcgggatcaataccgttgggatcaataataggaatcctaggatcactaggacaaggatgaacttccatgcccatttgaaccatttatcatacgggatacggcttactcctagaaccgctatcaggacacctgatgtgggagttatcaggttcgtgaagccatcgccaaactgaaaggccatgacggtggcctgcttggataaaccgatcaactccgagaatggggccatgataggcatggtaagggccgctttggcgcttccggaaggaataactaaattgataagcgtctggataacgtacatcatcccgaccgtagctacttgccccaagccttccatccctttcgctaggttaaagagaatcgtatcgatcactttgccttcttgtaggattacgatgatacctcctgccaaaccgacaaccaaggcggcgctcataatatccttgcaaccctctaagaatagtttcacaagctcattcggatcgcgtccattggcgattcccgccgctatgcccaaggcgaagaataaagtcgctatttccataatgtaccatccatagcccattacgcctgttatcaggaaaaagatcgtgaagaataaaaggttcaatatatataaatgtacggttttccgcagagtgaatatcgaactgattatgaacgctacgctaagaatcgggattaagggaagtccctcgattacactattcccgatttctaaggatgtctggggataatagacagaaaagaccgctaagatgattgccaataggataaaactgacccatgcggctttcggggtcctgtacacgatttccaaagaatgggtattatgtaggtctctccagtattgatcatcctcatagactggtgacaattgagggttcttttttaccttggcggcataacgcaatatccatgtgaagcctaccacattgataatacaccaacaaacgatacgatactcgatgccggaaaaaagaggaattcctgctaagccttgcgctataccgatagtgaaagggtttaaaatcgctccggcgaaacctaatcccgccgctataaaaaccatacatacgccggttatggaatcgtatcccatagatatcgccatcgggaccaagaccagacaaaaagcgatggtctcctcactcatcccgaatacggccccgaatatactgaaaagtagcatgatggcggtcaataagaaattatctatgcctattttacgaaggatggggttgttctccattttgcgtgctttccgtaggaaactgactgtcccgatatcaaatgccttactgtcgttcacgatccagaatgcaccaccgatgatgaggatgaagacgatgatatccgccttgtccacaaatcctttataaaaggcggagagtacctcccatgtttgaggtacgctttccacggattcatatacaacggtccgctctccatctgggctgatattttccgtgtattgcccaccggggataacccatgtcaatgcggcgcaaaataagatgatgtaaaaaatgattacgtaagtgtggggtatttgtctctttttcatgattctgctttttcgtcttcttcagttaatattccgatctcgggaaggatagctcgggcctcacggtcgctaagcgtatctacgtctttgagtttacgttggatggcacgggtacgggtacctaaaacctcttctatttgcccgctggcggtttgcaagttcttttgggctttctcgagcataccgcctactttctcgaattcttttttcacggcccctaagatcgtccatacctcccctgagtgcttttggatcgccaatgtacggaagcccatttgtaaactgtttagtatggccgctagggtagtgggacctgttacgactaccttgtagtttcgttgcaagtcctccaataaagcggaacggcgtacgacctcggcgtaaatgccctcgaacggcaggaacataatgccgaaatcggtcgtggcgggaggcgccagatatttgtccgaaatatctttagccatcttcttgatcgttgtctccaataattttccggctgtctcgatcgcttgggaatctgcggcatcgtaagcgtctaggagctgttcgtatacatctttcgggaatttagcgtctatgggaaggtatacgaattctcgggcatcatcccgcccggggagcttgaccgcaaattcaacgaccgcatccgaacctttccgggtatgtacattcgcctcgtattgctctggtgccaataactgctccaataacatactgagttggatctccccgatatttccccgggtcttaacattactaagtacccgttttaatccgcctacatcctgcgctaaggtttgcatctcgcccagtcctttttgtacactttctaattgttcggtgactaaacggaaagattgcccgatacggtcgttcaatgtcttttgaagtttctcgtctacggtgactcggatttcttccagtcttttttccgtgttatccactaatctctgctggcgttcgtccaaggcggcgaatttctctttctgcaacctgttaaaagaatcgataccacgttcgaaagcttccctgaactcgttcatggaatgagccagttcttctcggttatctttcgctaccaaacggctttcttcccggttcaggcggaagtcttccctaaagtttttctcgatacggtcgaacgagcgttgtatctcgtttagcaacttttccaggtcttctttgttattatttagctgtttaggacgcaaaaggatttgcatcacgatgattataagaagtccgccgataataatccaatccatctgtttttgattttgacgtcaaagataggtaatctgtattttgcaacagcagttaaatagagttaaataaaagaacattgtttattttcgtttgttttatcgacagaaagctgcttatatttgtgcagccaacttaagtaagactattaaatttacatacaaagatggcaaaagtaacattaaaaggtaacgagattcatacgaacggcgagttgccaaaagttgggacagaggctccggactttaagggtgtaaaaagtgatttatccgaattgtcgctaagcgacttgaaaggaaagaaagtggtgataaatgtttttccgagcttggatacaagtgtatgtgcggcctcggtaagacgcttcaataaagaagccgcttcgcatccggatacagtggtattagctgtttctaaagatttaccttttgcgcatggacgtttctgtactacggaaggtattgataaagtgattacattgtcagtgttccggtgttcatgttttgaggataagtatgggatgcttctggtagacggtccgctgaaagggttattagcccgtggcgtgatagtggtcgatggagctggtaaggtggtttatgaggaacttgttcccgagattactaccgaaccgaattacgatgcggctttagctgcattgaaataaatgtagtagattattgtttttcattggttaaagttaagggttagtgtaggaggccgtcggatgtgaatcccgcggccttcgtttttttaatacaaacacgtttatatggataactggaagcgagtatttgccattatttggacggggcagttcttatctatactgacaagttcgattgttaatttcgcgatagtcttgtggttgagtctggagacaggttccgctgaggtattggcatttgctacgatggccgctttgttacctcaatctgttttggggcttttcacggggatctttatcgaccggtggaaaaggaagcgggtgatgattatggcagatagctttattgctttttgtacgttgatattggcggtcttgttttattttgatttggctaagattagtcatatatatgtgttattggcccttcgttccgtaggttctgcctttcatatgcccgctatgcaagcttctgttcctttgctggctccaaaatcggagttgatgcgcatagctgggattaatcaggtgatccagtcggtgtgtaatatcgccgggcccgctttggccggtctattcataacgatgatgaagatgacgaatatcctcttattggatgtggctggagcggcgttcgcttgtctatcgctctgctttgtctttattcccgatccttctcatgaggaacgaaattcagaattgcatctttggagagaggcgaaagaggcgattatggaagtccgtaaccaatatgggctatcgtggttattcctattgtctatattggctacattcgtgattatgccggtaagtgtcttattcccgttgatgacgttgaatcactttgccggaaatgctttccaagtgagcttggtcgaggtttcatggggtggaggagccttgcttgcgggtgctttactggggcttaagaaatatcgttggaatgagatcctgttgattaatgggatgtatatagcgttgggattgacattcttgttttccgggttgttaccggtatccggttttatctggtttgcggtgctgacggctttaggaggtgtttgtggttccctgtattttgctacttttactacggttatccaatctcgcattgatccgggagttatgggaagggtattctctttttacatgagctttagtatgcttccttcgatgatcggtcttttgagtaccggctttttggcggattctatcgggcttggaaatacctttataataagtgggggctttttatgtttgataggtattatatccttttttatcccttcgttgatcagtctgaaagagagttttaagagataacgatatcgtatttagacactatttaatatgaataagaaaatacttcaactggcgataccttctattatttccaatataaccgtacctttattgggattgatagatgtggcgatcgtgggacatcttggatctgcttcgtacatcggggcgatcgctgtaggcgggatgctgtttaatattatctactggatattcgggtttctccgtatggggacaagcggtatgacttcccaagcgtacgggaaacgggatttgacggaagttacccggatcttattccggtctgtcggggttggtttcctgatatctttggggcttttgatacttcaataccctatcttgaaggttgcgtttactttgatcgacgcaacggaggaggtaaaacaatgggcctctctctattttaatatctgtatctggggagcgccggctgtattggggttatatggctttgccggttggtttatcggtatgcagaattctcgtttcccgatgtttatcgctatcacgcagaatatcgtgaatattgcggccagcctatgtttcgtgtttgtgctgggtatgaaggtggaaggcgtagcgttgggaacactgatcgcccaatatgcgggtctcctcatggcgtttgctctttggttgaaatattataaacgtttgaaagcgtatattgattggaacgggctttggggtagggaggcgatgcgtcgcttcttctcagtcaatagtgatatatttttccggaccttgtgcttggtcgctgttacgactttctttacttctacaggtgcgagacaaggggatgtgatattagccgtaaacaccttgttgatgcagttatttaccttgttctcttatataatggatggattcgcttatgcgggagaggcattagccggtcgctttattggagccaaaaacgatgtggggttacgtaaatgcattcgcttattgttcctatggggaatcggcctctcattgtctttcacgatcctttatgcgttgggagggaagaattttctgggattattgacgaacgatacctcagtcattgaagcttccggggattatttctattgggtgttggcgattcctttatgtggattctccgctttcctttgggacggtatctttatcggtgccacggccacacgccagatgctttactcgatgcttgtggcctcgggcactttctttattatgtattacttgttttatcaatcgatggggaatcatgccttatggatggctttcctttggtatctgtctttacgtggcggtatgcaatgggtactttggcggttaaaaaaataaggcgagaacctgtaactgatcctcgcctcattttatcctaggaaaacctatttactgttgtttgtaataagctaagtcctcacgattgaagttgttgatgaaggattcgatcttatcaatctcagcttgtccgtagtttacataaacctcggcggaacggcggaagctgtcatctttgtttgcgtcttgcaatagcaagtagccgaatacgcaatgagcggctgcctcgaccatacggcgagcttggaagtcaatatattcgttatcctttgtctccgtaaccttggctaccactttctcatacttctcggtcatagcggcaagtttgttcttcagagcctctaattccggcttatactcgatcgcttggtattcacgaatctggttcaagtaagtacccgtggtgacgtggcggatggccgctacgacttgcaattgggtggtaccctcatagatattcgtgatgcgggcatcccggtagatacgttcgcaagcgtagtctttcatgaaaccggaacctccgtgaacttggatagcgtcgtaagcgttctggtttgcgtactcggtagtcatgcctttacccatcggggtgaaagcatccgcgagcttgctgtacttcttgaattcttgacgttcttccggagtcagtttacgttccttggatatatcatccaacgctttgtagacgtcaacgaaacgggcggtctcgtataacatagaacgggaagcatccgctttcgcacgcatcaaggcgataatctcagcgatcgccgggaactcgatgatagacttaccaaactgtttacgatccaaggcgtaagcataagcctcacgataggcagcctcg

SEQ ID NO: 2285 - DNA, 23531 bp, synthetic construct
  misc_feature 1..23531: note = Synthetic
  source 1..23531: mol_type = other DNA
taatactgctatacttatagataaaggtatttattattatataattgcacaagattttgatacttttttttatcaaaaaaatatgcttataatgattaatgggagtgtcttcagtaaaaaggatgtgccagaaaaagtacttattgaaaatggacctgagaatgcttcctttatgttaggaacctctgggattttaattttttcactttataaatctacaacttctttctttattaatttattttctatcattattatatgtattctagtattcaaaatattaaagaccattaatttttctatgaataacgaatatgctttttttatattattgggtcctattctaagtggtgttggtctagaatatttcgcctgtttattaaacgctatcatattgtttataactttacttttttttagagcttttaaaaaattacaattaaactaattttatgaaacaagttatatatataaattcttatgccaataaaaaacatcacgaattatttaatactgctgtactaattgcattaaataattttaatatcaaattatactctggtaaaagatctaaaaataatatgatatttctatctaaagaaaacggatttaaactgaatttcaataatataaaaagtactaacctatttatattagaaggaaattctagatggactaatttttttaaatatattttaggcactttatataatatatatatattgttatcttctaataaaaatgatatccttatatataatttcaacaattctctatccttgtattttttgaataaactaaattctctcttaaagagaaaaatacttatcttctgccatggagagatggaattattaattaacaatgaaggaggagggcttgcaaaacttctaaaatggaatcttagaaatttttttctaagaaaaagaaatatttatatttcattctgtgtcttaggtgattgtgtgatagaaaatctaaaaaatataataggagaaaatattaaatatttttacagtattgatcatccctatttttttaataaaaatattgatgaaaacattaataataaaaataatgtagtgtcttttgctacaattggtgaattaaatatttttaaaggactatattcttatataaatcttttagaaaaagtcaatatgaaagataaatctttttctataataggtaacacaagtgatcatgtagaagaactcaaaaagaaaaatattattttaaggggaaaggataattatttagatcgaaaagattttgaaaacctaatttcaaaaatagattatgctctatatttctattcatccaacaaatataaactaactgcaagtggagctatttttgatgctatcaacgctagaaaacccattatagcattagagaatgattatttcagataccttttcaaaaaatatgggacaattggatatctttgtaaaaatatagacgaaatggcagaggtaatcaacaatataaaaaaagaaaagaaaactatttttaattttgataattatatcaaccaactatctatagattcttttacaaaaaattttttaaatattatagaaagaatgtgattatgtcaactccaaagatttctgtttgtatagctacctacaatggtgaaaaatacataaaagagcaattagaatctattatacatcaattagatgaagatgatgaaatcattatatctgatgatggatcaaatgataaaactatccaaataatagaaaactttaaagatactagaattaaaatttttaatcattctcccaataggaaaacaaaatataaatttgatttaactactcgaaatatagaaaatgctctttctaaagcacaaggggattttatttttttagcagatcaagatgatatttggataaaaaacaaggttgaaaaaataatacctttctttgaaaaatatagtttaatactacatgattgtactataataaatgattccaaaaaggtattacatgaatcatattttaaattaaataaatcaagaacaggtgttgtcaataaccttataaaaaattcctatttaggatgctgtatggcttttaggaaaagtattttaaaaaaatctattcctttccctacatctcctattccacatgatatttggataggattgattgctgaacttaaagagaatgttttcttttgtaatgaaaaattaatccaatatagaagacatgaaaataatttgtcttcatcgtcatcaaaaagcaacaattctatttattttaaattaaaatatagattttttattttgaaaaatttaatcaaaaaactatttatatgaaaatcttacatataggaaaattctatcctccttattttggggggattgaaaaggttaattatgatattgtagagggtttgaatacaaaaggtattcaaacggatgtattgtgttctaattataccaagggaaactctttttcagaaattccctataaaatatatagaactcacactttaaaagttatagcttctaccccattaagttatagtcttataacaactctaaagaagattcaagacaattatgatattatccatgtccatttacctaatcctatggctaacttagctatctttcttacacgtcccaagagtaaaattattttgcattggcatagtgatatcataaaacaaaaaaaattattaaaactatatagtcctttacaaacttggttattaaagagagctgataaaatagttactactactcctacttacttagaaggttccaatactttaaaaaaatataaaaataaaatagtatgtattcctattggtattgataacaacgaattattcatagaccaaaatactttaaatagcctaaaaaacaaatataaaggatataaaataatttttagcttaggaagacttgtttattataaaggttttgaatatttaatagaaacagtaaaatctttacccaatgatattatcattctaatagcaggtattggcgaattaaaagaaaaattacaagaacacatttctaaacataatttacaagatagagtaaaactcttaggaaaaataccttttgaagagttaggagcttattaccagctttgtgatatattttgtctcccttctaccgaacgatcagaagcttttggagtagtacaaatcgaagctatggcttttggaaaacctgttatttctacaagtatcaaaggttcaggggttgattgggtaaacctcaataatgtatcaggtattatagtgcctcctaaagatactaacagattgacagaagctattatggaattacttactgatgaaaagaaatatcaactgttatcaataggtgctaaaaaaagatatgaagaagtatttacaaaagataaaatggtagatagttttaaaagtctctatttagaaatattagaatcttaatctataattcatattattttcgtacctttgcctcaaaatctatacttatgcaactcacacaaaagctcaaacaaatctttataagtgatttagaaaaatactccccttttatggagcgagacctgaagaaattgcttatgaatgtctctatcccttatctcaatggtaaggaggtagcgcatgtggtggccttttgttttgagtatgactatgaggatcttaccatttctttttgggcattgggagaaaataatgaaattatctctgaaatactcgaacttcctaccgaaagggacgaaaaacacttcccctcagataagtttgttgtagaagaagaggacttggaggacttattgtatgaaacagagctagaggagaacgaaattgaggatttgcttattgaataccgacaggaaaaactagctatcttcaccaactggtttatagctcgttggaaaaatgttaccgaacagcttaatgttactattgatgcctatttttctaaactcaatgctttctataagacagatctgaacaccttagagcctatcagttcagaggaaattcaggagaaatatacaaatccagaaaatgaaatataacactttattacacatgagaacatttgcccaggtcttttgtttaagttggctctttttttgcggtagcttagctacaaatgcacagacaaaagggcatttttccgataaaaggttgcaaacagacacttcaatagcaggttatgatgggccttatatcttttataataaagaaaaagccatcataaagcagattattgagaaaaaagggcaacctacaagtgtaagtgaagaactggcatatcccattgctggtaagaagcttaaatgttatgtaaatgacaaagagcatttctctttcaaggtacaggaattactacaaaaccagccttctgtgtataccatgcctgaaaagctcattgctatttcagatatagagggacgttttgaggagttcaagaactttctcattgccaataaggtgatggataagcactacaaatggacttttggtaaagggcatctggttactgtaggtgatttctttgatcgaggtttgttagtcacccaaacactttggcttatttattccttggaagaacaagcagagaaagctggaggcaaggttcactttatccttggcaaccatgatcttatgaatatgaacaatgattttcgctatgttcgtaagaaatatctcgaaaatgccaaactcatgggacaagaatattatgatttctacaaacctaatacagaattggggcgttggttagctactaaaaatattctggagaaaataggagactatatctttgttcatgcaggcatttccaaagaggtaagtgatctgaatatgggggttgaggggatcaataagtatgcacgaggctactatttccataatagagaagcaacattaggaactgatcctataggaaaaaccatctatatgtttggtaaaagtccgatgtggtatcgtggttatggaaaacagaccattgataaagcagaatttgcagccattgccaaaaatatggatactaagaaatttgtcattgggcataccctgcacgaatcagtaacttatcttatggataagcaagtcattgaccttgatgtgctccatgccaaaggaattactcagggattactgatagaaaatggacaagaatatatggtagatattcagggacaaaagtcagctctcaaggatcaagccaaagaagttgatgattaattattatatttaaattgtttttatttactcatgaacatgaaaaatcaatttggaatactctttgtttattctgagttgatttttcccctttatgaacattacctcaaatgaaattccaattagtatccgatttcaagcctatgggcgaccagcctgctgctattgcctctttggtcaatggtatcaatgaccaagagaaataccaaacgctcttgggtgttacaggctctggaaagacctttactatagccaatgtagtggaacaggtacaggtgcctactttggtcttagcgcataataagacccttgccgctcagctctatagtgagttcaaggccttctttccgaataatgcagtggagtactttgtatcttattatgactactaccagcctgaggcttatatccctacaactggggtgtatatagagaaggatttgtctatcaatgaggatattgagcgaatgcgcctcagtactacctcttctctactctctggccgccgtgatgtgctcgtggtagcgtctgtctcatgcttatatggtatcggaaaccctttggagttccagaagaacgtcatttctatagaggaagaacaaacactcacacgtaccaagtttatgcaccaacttgtacagagtctctacgcacgtaccacagccgactttctacatgggaatttcagggtaaagggcgatgtcattgatgtctttcctagctatagcgaaacgcctattcgagtacatttcttcggcaatgaaatcgaactgatagaaacctttgaccgcgagacgaataagaccatagaacggttggaaaagctcaatatatatcccgccaatatgtttgttacctctcctgaaatactacaagcagctatcagggaaattcaggacgatttggtcaagcaaatagcgttctttcaatcggtagggaaaaacttggaagcaaaacgcttggaggagcgtaccaattttgacctagagatgatacgtgagttgggctattgctctggaatcgagaactattcccgctacttggacagacgccctccagggagtcgccccttctgcctgatagactatttccctaaggacttccttatggtgatagacgagagccacgctactgttccccaagtacgcgctatgtatgggggcgataggagcaggaaagagaacctcgtagaatacggattccgccttccggcagcgatggacaaccgtccacttaagtttgaagagttcgaagcgctacaaaatcaggtaatctatgtcagtgctaccccagcggactacgaattgcagaagtgcggaggcgtatatgtagaacaagtcattcgccctactggtttgctcgaccctaagatagaagtacgccccagcaaaaatcagatagatgatctcttggaagagatacagaagtgtgtagaggaagaccaacgtgtactggtaaccactcttaccaaacgtatggcagaggagctgactaagtacctaacaaagatggaggtacgttgccgctatgtacatagtgatgtggatacactggagcgtatcgagattatgcaagaccttagaaaaggactttttgatgtacttataggggtcaatctgctcagggagggattggacttgcctgaagtatccttggttgctatcttggacgctgataaagaaggctttttgcgttccgctcgttccatgacccaaactgtaggacgtgccgctcgtaatatagatggccgcgctattatgtatgccgacaaaatgactgatagtatgcgcattaccattgaggaaaccgcctaccgaagggaaaaacagatgaactacaacctcacccacggcattatcccacaaccattgcataagaaaatcgagaatcctcttagcaaaagccctattacggaatttcattatgaaaatgctccgaaaaagaaagaacactcccctaccaagccgatgagcagaggagaacttgagaaagagatacaacaaactcgcaagctgatggaagccgcttccaaagaattggacttcattcaggcggcacactaccgcgacctactcaaggaacttcaggaaaagcttcaaacaagctccttataggcattgtgtatcaaaagataatcagcaagcactaaggcagacatcgcctctacgatgggtaccgcacgaggtactacacaggggtcatgtctgccttttccttggaactgcaccacctcccctgccctattgatcgtctcttgctcctgcataagcgttgccaccggcttgaaggctacacggaaatagatatccattccattggaaatgcccccttgtatgcctcctgagtagttggtatgagtcgtgccatcaggtaggaatatatcgttgttctggcttcctctttttctagtagaagcgaatccccctccatactcaaaaccttttacggcattgatagaaagcatggccttacctagttcagcatgtaagcggtcgaaaacgggttcacccaatcctacaggcacgccttgtattacacaagaaacgatccctcctacggtatctccgtccttgcgtacctccctgatataggcttccatttgttctgccagtacgggatctggacagcgtacgggatttttttctatttgggaaaaatcaagcaattgataatccttttcaggcaatgccaactcccccacggctgatacataggcagtaatttttatcccttttaggaactgcttggcaatagctcccgccactacacgaacggctgtttctcgagcagaactacgtccgcccccacgatggtcacgtaagccatatttctgctcatagacatagtctgcatgggaggggcgatataaatccttcaaatggtcatagtcctgagaatgttgttgggtattggctatgataaagccaataggtacccctgtggtctttccctcaaagatacccgaaagaaactgcaccttatcagcttccttacgttgggttacgatagccgactgccctggccgacgtctgtcaagctctctttgtatttcttcgaagtccaatgcgattcccgcagggcaaccatcaatcacacctcctatagctgccccatgtgattcgccaaaggtagtgagcctaaacaaatgtccaaatgtatttcctgccatagtcctaatcttctaatttttcaatagtaacctcataaagttgctcaaaaagctgttctacatagctggcttctgccttgcgcacctctataagaagggtgcagttcatctccatagtctgcgaaacaatggtgagattcctgtccttaataattttcatcaccttattcatatccttataatcaaagacaattttgtaggtaaggtcaatggtgcgttcctctatctcggcttcttgtagggtgagctgagcggtagttttataagcggtaataaggccactcacccccagcttgataccaccaaaatagcgcactacgatcagtagtacattggtcagctcaaaggactgtatctgcctgtagataggtagccctgctgtgccactaggttcgccatcatcattcgctctataagtaaagtgctctttgcccaactgataggcatagcaccagtgccgtgctgaaaagtgttctttcttaatcgcctccaagtgctttttcacctcctcctccgtggtaataggatacaaataacctataaacttactgctcttatccttatagataatatcggtaacaggctggctgatagtcttataggtatctgtcataggagtgaagaatgaatagtgaaaggtaaaaaataaagtacaaagatataaaaacaacccctatattactataggggctcctttagatgttttcacaacggaataatccttattgtgagttgctttcaaatatgggacaaaagtacaactttttttctaaataacaaacttaaatatgatttttttattaaatttgtagcgaattaaacttattaaatatatgaagaagagaaaacatattttaggattagatttgggtaccacctctatcggtttttcgcatattatagaggatgaagaccgagaaaaatcaactattgaagaaattggagttcgtattattcctctaagtgtagatgaattatctaattttgaaagaggaaaaactattagtactaatgcagatagaactcttaaacatggggcaagaacaaaccttgatcgctatcaattaagacgaaaacaactcatcgaattatcaattcaagcaggtcttattacctcttctacaatcttagctgaagatgggaaaaacacgacccactctacttggcaattgagagctaaagctgctgttgaacggatcgaaaaagatgaattagtaagagttttccttgctattaataaaaaacgaggttataaaagtagtagaaaagttaaaaataaagatgatggacagataatagatggaatggctattgccaaacgtctatatgatgagaatttaactcctggtcaattagtattgcaactattaaaagaaaagaaaaagcaacttcctgatttttatcattcagacttgcaaaaggaatttgaccttatttggaattttcaaaaggaattttatcctgaaatcttaacaaatgacctttacaaggctttgcaaggaaaaaacaaaactgattcctcaagtattttctataattattatcatttcaatactgctgaaaacagaggtactaaagaacaaatgcgattgcaagcatatcgttggagagtagatgctctttccaaaaaaactctcaaaagaagaagttgcttatgttttggtcgaaataaatagtaatctaaacaatagtagtaactatctaggaaatatttcagatagaagtaaggaactctatttcaataagcaaacgataggacaatttttatatacaaaactgaaagaggatagacactatagtcttaaaaataaagtattttaccggcaagattatttagacgaatttgagcgtatttgggagacacaagctatttttcacaaagaacttacagaagatttaaaaaaacagatccgagataccataattttctatcaacgcagacttaaatcacaaaagggattaatctctctttgtgaatttgaaaataaagagattactattgaaaaagaaggaaaaactgtcactaagcagattggagttcgtgtcattcccaaatcatctcccctatttcaagaattcaaaatttggcaaatcctcaataatgttatttgtaaaaagaaaggaactcgaaaaaagaaagctgttacacctgctcctttgctttttgaattattcggcacaccctctgaaacattctttagcttagatatggagtgtaagcaacttctttttgaggaacttaacctaaaaggtaacctaaaagcagataaagtaatccgtttattaggttatattcctcaagaatgggaaatcaattacaaccaattagaaggaaatagaactcaaaaatcactttatgaggcttatttgaagattattgagatagaggggtatgatataaagacctttttgagaataaaatcagataaagaggattgggatttagaagaatctcctctttctgcaaaggaaataagagaaaatatacaacatatttttgaaacattaggtatcagtacagcaatactatattttgatgctactctacctattaaagactttgaaaaacaggcttcttatcaactttggcatttactttattcttatgaaagtgataattctccttctggtaatgaaacactttacaaattattacaagataaattcggtttcaaaagagaacatgctgtgtttctttcaaacatatcatttcaagatgattatggtagtctctcggcgaaagccattcgtaaaatatatccttatataaaggagaaccaatatagtactgcttgtgaattagcaggatataggcactccaaactttctttaacaaaagaagaactgaataataggccactaaaagacctaatttctccactaaagaagaatagtttaagaaatcctgttgtagaaaaaggtctcaaccaaatgattaatgtcgtaaatgcattaatagaaaaaaatagtgagaaggatgctgaaggaaacatcattaagtacttccattttgatgaaattcgtatagaattagcccgtgaactaaagaaaaatgcacaagaacgagctgaaatgaccctaaatataaagaatgctaccatagaacaagaaaagattaagagtatacttatctcagattttggaatcaaaaatcctactaaaaatgatatcactcgttatcgattatatcaagagttagctcataatgactataaggatctatatacaaataccgatattcctaaagaactattgtttagtaagaatattgatattgaacatatcgttcctaaagcaagagtgtttgatgatagtttctcaaataagacattagcctacagagatttcaatctcaaaaaaggagaaaatacagcttttgattttatagattcttctttaggtgaagaagaacttaaccaatatattgcaagagtagaaaatgcctttaaaactaaaaacatttcagctaccaagtatagaaatttactaaaaaaagcaaccgaaattaacgacggttttatcaacagagacttgagagaaactcaatatatagccaaaaaggcgaaggatctacttttccaaataactagaagtgttgttagcacatcaggaagtattaccgataggttacgtgaagattggggactaatagatatcatgaaagaactaaacatgcctaaatacagggatttaggacttactgaaataatagagcgtagagatggtagaaaagtagaagtgataaaagactggacaaagcgtaatgaccatcgtcatcatgctatggatgcgcttactgttgcctttaccaaaccctcttatatacaatatctcaatcatctgaatgcccgaaaagatgaaaacaataaactatatgctgatattttaggtatagaaagaaaagaaactactaaaatacacgatgaaaatggtaatgaaaaaagggtttttatagaaccaataccaggttttagacaaatagctaaaaaatatttagaagaaatactcatttctcataaaacaaaaaataaagtagttaccaaaagtataaataagatagctggtacaaataaaaaacaagaaacacttacaccacgagggcaactacataaagaaactatatatggcaaatatcattattatagtaataaagaagaaaagataggcacaaaatttgataaagaaactatttcaaaagtatctaatcctatttatcgatatgcgttacaaaaaagattagaagcaaatgaaaataatcccaaaaaagcatttacaggaaagaatgccctttctaagaatcctatctatttggatgatgctaaaactaaaattttaccagagaaagtaaatcttatttatttagaggaagatttttctataagaaaaaaaatagtctctgaaaatcctacctccaaagaatttgttcctaactcaatatctattgaaaaaatagtagatgaaggtataaagcgtatccttaaagaaagacttgaaacttataacaatgaccctaaaaaagcctttgctgatttagataagaatcctatttggctcaacaaagagaaaggaatttcaatcaagcgagttactatcagtggtgtaaagaatactcaagccttacatagtaagaaagatcacctaggaaaacctatcttagacaaagaagggcaagagatccctgtagattttgtaagtacaggtaataaccaccatgttgccatttatcgtgatcaaaaaggaaatttgcaagaacaaatcgtctccttctttgaagctgttgtgcgtgctcagcaaggacttcctatcatagataaaacttacaaacaagaagaaggttggcaattcttattcaccatgaaacagaatgagatgtttgtattccctaacgaaataactggatttaacccttctgaaatagacctattagatccaaaaaataagaaattaataagtccaaacttgtttagagtacaaaaaatatctattaaggattatttcttcagacatcatttggaaactaatgtggagactaataatattttgaaagatatcacttggaagcgaggaggattatctcttttaaaaggtattataaaagttcgtattaatcatttaggaaatatagtaagtattggagaatactaaatattaaacattaagcaaaaacaattgaatcatataagctatgttataccgttctatttatataggtaaccctgcttatttgaagctgaaagacaaacaattaaaggttaccgacccagaaaccaaagaagaaaaaggcagtgtccctatagaagatataggactactgatgcttgaccattaccaaatcaccctctctcaccagctgatacaggaactgatgaaaaacaatgtgatccttatcagctgtgatgaatggcacttacccttggcaaggagaatgccgaggtacatatcaaccgtgtcaagcaatggctccctgagtttggaaaagtagccatatttactatcaccgacaagcaatttgaaggaatagagatcttctattgtcaatcaaagaaagatcctcctaaagattgtattcagctcactcttttttaaattttagaaaacgaaaaaccttcctttttattcctaagatagaatagaaaagaaggttttctctttttgaacttttgaataacctacagacaatcaatctctttaaaaagattgaggttgtttgaggtcacaaagttacaaatttgaaagcaactcacaactgttttgtgctacataaatatctatatcagttgtttgaggtcacaaagttacaaatttgaaagcaactcacaactttgctaagaacgaagccaaccaagcgggcgttgtttgaggtcacaaagttacaaatttgaaagcaactcacaacattgtcaagatagccaccgaaagtggggggggtgtttgaggtcacaaagttacaaatttgaaagcaactcacaacaaaatgtattgatgttagtgccataattgggttgtttgaggtcacaaagttacaaatttgaaagcaactcacaaccctactcaacgacaaagggcaggctgtggagttgtttgaggtcacaaagttacaaatttgaaagcaactcacaacggtgattctcgaaagcgagttttttatacagttgtttgaggtcacaaagttacaaatttgaaagcaactcacaacccctcctctttctccttcagttccttttccgttgtttgaggtcacaaagttacaaatttgaaagcaactcacaacgcagtttgggaaggttcggatgaggaaaagttgtttgaggtcacaaagttacgaatttgaaagcaactcacaacgctgtgtaggatcaggcgctccccatccactgttgtttgaggtcacaaagttacgaatttgaaagcaactcacaacgttgttcttggtcaatgataaatcagcatggttgtttgaggtcacaaagttacgaatttgaaagcaactcacaacggccgccacgttgtgttgtttgcttcttgggttgtttgaggtcacaaagttacaaatttgaaagcaactcacaacgctcaggtcgtcgatttactcagaaacttggttgtttgaggtcacaaagttacgaatttgaaagcaactcacaacttatctgcccgttcatgtccttgactatcggttgtttgaggtcacaaagttacgaatttgaaagcaactcacaacggcaaaggctcttagttcatatttacgttggttgtttgaggtcacaaagttacgaatttgaaagcaactcacaacgcgctccgctgtaccctctttccgatgaagttgtttgaggtcacaaagttacgaatttgaaagcaactcacaacaggattggtaatgatggctgttttcatctcgttgtttgaggtcacaaagttacgaatttgaaagcaactcacaacataacttttttatatcctcctccctatctgttgtttgaggtcacaaagttacgaatttgaaagcaactcacaacggctaagtacttatccttcatctcagataggttgtttaaggtcacaaagttacgaatttgaaagcaactcacaacatttccaaactcatcttgaaaagtaaccttgttgtttgaggtcacaaagttacgaatttgaaagcaactcacaacatattcttgtttaattttgacagtgcaaaagttgtttgaggccacaaagttgcgaatttaaaaataactcacaacaatacttatactaattcatgttttacaagttgattttaatatacaattaacatatttagatgtaacagcataacgaataagaggttagtcactatagactgacctctgaccactaacttctgttaagtacttaacatatttttttattgtataaattcttacttctcataagccttccccttgacttcgacacctgaattgttgtaactttgcctcgtttttcagtagtcagtggtcagccattaaccattagtggcattaatcattaatcattatggaagaggctttagatatactttggacatacgctcgtcgtgagccgatagagagcaatgggaagactatagtggccaccattagccaaagcatcgcagctattcgccttattatgcgtttagaaggatggctgcaaagagatgaaaaacaaaaagtgaagagtgaaaaacaagctgcgcctgcttacgcaacaccaactctcacatcatgtgatttgccagcggctcaatgtctaacgtctgatttgccaatgcctgcctataagggcaaagcccatgacaatgaagctggtgagcaattcgcccaaaccaatatagacactccagccagcacctgtttagcagcctcctctcctagggaagaaaagtttaggacttctcagcaagagcctaaccatcctactgccaaagcctcctatcatacgagcaaaccccgtaaggtttgtcatcagcgcccctatgtcaaggatgataaaagtcctaaacatacgagcaaaccccgtaaggtttgcctccagcgcttagttattaaggaaggcttgtacaaggaaatcaccttgattgagtcgcctataaggagcgcttctctaaattgcgtctctaacctaacactagctaaggcgctcccaccttaaaattagttcactaagccttttagtaaggttttttctatgataagcctcaagggaggttgggtgcatatgaagctgctgagtcttatagagcgcatagtaatgagtgagggcttgcttaataccttgtgtgtcggttagggaaagggtgatgcctgtttgggtttgtgcaataatatccttgacatcccattgcttataccccaaggcgagtataggtcgctgtgaggccatatattcaaagagtttccctgggataataccctctgtcttgggttggttaatctccaaaaggagcaaaagttgtgaatggcgttgtagaactatggcctcagcgtgagagatatagccctttaagtctaaatagtcggtaagctgccacttctgaagactggcgagtacctcatcgcttacttttcctgccaagcatatacgtaggtcttgcctgaagtcggcttgttcccttatcatctcgctcaagacctgccaaagaggttcgggattgcgctcggagagtaaggagcctatatgagagagcagaaaaagaggggaaaccgagggggtctctgtagggagttcatcgtcatagccgttggtaatcacctctattgggcgagaggtcttggcttgaaactctctttgggtactgggactggttacaatcagggtatcggcagtttgcaaaacagcttgctccatggccaaatgtttctgtgcggagtgcttagtgagtcttagctgcgaatggtaacctatggttgtccatgggtctctgaaatcggctatccagcgcaaggcgggaaactgctccttgaggcgtagtcctataaggtgtaggctatgtggaggagctgtagtaataatggtatctatatgattctcagataggtattttgacagatattttacagaagggcgtacccatagcacccttgcatcgggaataaagaggttgccccgtatccagagcaggagtttgtcaagcggggagggctttttagtagggataatacctgcacttatcttttgggtcttctccttagagaagagagaggccaaagcgtagggctcaaaaatcttagtttttaggacggttaggtcttcagggatatcatctgccatatgggggtcaagtatagggtaagtaggattctggggggtatagatcactggttctataccaaaatcgcgtaggtacttgacaaatttgacccagcgttgtacccctggtccccctgctggcggccaatagtaggtgatgataagtactttcttcattcctgatgctgattagtactaacgcttttcggcaaggattcttacagaggccaattccttgtatttcttacgggcttcctcggcaggagaaccaaaataggtttgccctccttcgagtgatttggtaacgccgctttgagcgagaattactgctttttcacctatagtaaccccactggtgatacctacctgtccccatagggtaaccctatcttctattaccacacaacctgcaatacccacttgggaggcgattaggcactcctgccccactactgtatcgtggcctatatgtacatggttatctatcttggtacctcgcttgatagtggtatcgcctgtaacacctcggtctatggtacagagcgcccctaagtccacatgatcctctatgaccacgcgcccccctgagatgagtttgtcaaaaccttcaggccgtttcttataatagaacgcatcggcaccgaggatagtacctgcatgtatagttacatggtctcctatcttgcaaccatcatatatggttacattggcatgaatcaggcagtgatctcctatctccacatgattgcctacaaaagacccaggctgtataatcgtatgctggcctatcttagccgtaggagcaaccagtgtatcggccttttcaaaaggtttgaaaaactgagtgagcttattgaaatccctaaaaggatcatcggaaataagcagcgctttgccctctggacaaggtacttccttgttaatcaacactatagttgccttagactgcaacgctttgtcatagtactttgggtgatccacaaagacaatatcgccctgctctaccacatgtatctcattcatacccagtacaggaaaggctttatctcccacaaagggacaattgataatagtggctatttgttctaatgtataaggttgtggaaacttcatagggtcataaaataattatggttgcaaagataaaaaaaatatgaataccctaatagtgaattttttctaaaaaaaatccgccccctatttgttaataaaaaatcccttttcccatgactatttgcgtgcatttattagtatctttgccctatagattatatgttatttcattgatgaataataaaaaaacgcaattatttattatcctcaaaatcagctgtattgttctcttaccaatactattccaatcttttgctaaccaccgaaataatattcgcaaagtacagaaaataatcatcaaccgccaagcaccacttgacaaagtacaatatattactaacgatgcgattgagagcctattgttttctactaagaatgccgaagaatactcccttaaggagctgaaaataaatttgttagaaaaaaaactggatgctgatcccatggtagaaagtgcagatatttatctcactattgacgggatactcaaagtggatgtcaagcagcgtgaaccgatagcgaggattatctccaataatcagttctattatatggatatgcagggcaagcagatgccgctttccaaagccacctctgcccgtgtgcctattgtacgtggggtaggtgaaaaacagtgggaggacgcacatctgattctaaaacacatctatacagatcattttctaaaagaaaacattatagaactgaccgccaacaagggtgctttctatgcaagactccgaggagctgatttctctgtttgcttgggaaaggctgataatatacctttgaaattcaacaacttaaaagccttttataaaaaagctgctaaggatcatttcttagataaatacacaagaatagatctgcaatataacaatcaagtggtctgccacagagctcagacagctatagaacaagcaaatgagtaaggatttaaaaatattcataaaagaattaaaaaacacacaaaataacagattagatattattagaaatgaaaacagaaaataaaatgaatcagagaaaatactttgcgggaattgacataggaactactaagattgtggcaatcattggttgcgagaaccaatatggtaagttggagatcttaggttatggaaaagctaagagccaaggtattttccgtggaatggtaggaaatataggaaaaacgattgattctatagaacaggcggtagcacaggcacaagccaaagctggagtgatcatctcggaggcttatgtgggtattgcagggcaacatatcaagagcaatgaggcctctgactatatcacacgcgagaatgctgaggagattatcaccgttaaggacttggaagcgctttgccaatgtgtgatgagcagcaagaaccgataccctggtgaagaagtgattcatatacttccacaagaatacaaagttgataatcaggaagatatacatgaccctatcggaatggtaggatcgcgtttggagggtactttccatattgtaacaggacaagtagcccctatcaagaacatacaacgctgtgtaaccaaagcgggaattgccctaaaaggacttaccttggaacctattgcctcttcggcttctgtactaagtgaggaagagaaggaagcaggggtagctttggtggatataggggggggtactaccgacttggctatcttcaaggaaggttatatccgctatacagcagtggtgccttttggtggcaatattatagataaggacatcagggaaggttgtaatgtttttgacaaacaagccgagcagctcaagatccgttttggctctgcatggcctgaatataccaaagaaaatgaggtaatcaatatccaaatgttcaaaggacgtgagcctcaagagattcaagttactaacttagcgcgtatcatacgctgccgtatggaagagatcattgaagctatcttcaatgaaatcaaaaactatggctatgaccaaccgcgcaaaaagctcatcgcagggattgtactcactggagggggtagtgaactgaaagacctacctcagctggtggaatacctcacaggcctacctacccgtattggtcaccccaatgagcacttagctagcaatacccctaccgagctttcctctcctatctatgccactgccatcgggctattattggacggcatagagcgcgaacatagtgagggacagcgcatcgacttctcccagctaagtgagacccctacacaggaacctacagctactatagaaccagaggaggaagcgcccgcagttgccgaacctgtagtacttcctgtagcggaacaagaacctgaaaaggaaaaagaaaaagaggaagaacacaagcctgaaaagaagaatatcataagaaccctctcggataagtttactgactttttcaaaaccatggaatagccatacttgatttttatactacattaacgtaaaaaacaaggattatatttgttagatacaattataatccttatttttgtctcttaattcattacttattcacaatggaacaaaaagatgtatatctaaatgattttcagtcctttttggggaaattcatggacaaaattattggtttcttacctagcctaataggagctatcattgtcctatttgtaggggtatggatatgccgcctgatacgaaagttcgtaagacgcctgatggtggctcgttcggtggatattaccatacagaacttcgtgaatgaactactgcgctgggtgctctatatcattctttttctaaccgttatccaaaaggtaggagtacctgtttcctctttcttaggagctttggccgcagcgggcgttgctataggcttagccttacaggggtcattatccaattttgctggtggtatcatgctcctaatactcaagcctttccgtataggtgattctatcgaggcaaaaggacatttaggcacagtagagcgtataggtatgttctatactactattatcaagtttggcaacgaacgagtgattatccccaatggtcctctattctcggataatatcatcaattattctcagaatccaacccgccgagacaacattattgtaggcattggctatggctcagacctcaagaaagcaaaagaaattctctattcacttacccaaagttgtcctactgcccttcaggatcctgctcctgtggtttatgtgaacgaattggcggataactcggtaaacttcaccctacgtgtatggtcaaaaaccgaacactattgggatactcacttttatctaatagagcaaataaaattaacctttgataaggaaggtattgaaattcctttccctcaaagagatgtacatatcatttcacaataaagtaactaactaaattaagaatatggcaaccattttagtaacaggtggtttgggctttattggctctcatactgtggtggctctgcaacaagctggtcatgaagtgattatcatagacaatttgtccaatgcttctattgaagttaaggatagaattgccaaaatcactggaaaaacacctatttttgagcaaatagaccttagagaaaaggacaaagtacaggatttcttccgtcgttatcccaagattgatggcgttatccactttgcagcttccaaggcggtaggggaaagtgtagaaaaaccccttttgtactatgaaaataacatagcatctcttatctatatcctcgaggagcttcagaaaagggaaaacacggcctttatcttcagttcttcatgtaccgtgtatggacaggccgacaagctccccgtaacagaggacgctcctttcaagcaggccgaatgcccttatggcaataccaagcagatcaacgaagagattatccgtgatacctgtgccgtagtacctgctatcaaagccatttccttacgctatttcaaccctattggagcccatgagtctgcccttattggggagttgcccaatggtgtacctcaaaacctaattccttatattacccaaacggctattggcttaagagaatctctctctgtatatggggacgactaccctacccccgatggcacttgtatccgcgactatatccatgtggtagatttggccgaagcacacttagctgcccttgagtatattcttcaagggaagatacaaggcaactatgaggtgttcaatgtaggtactggtaagggaagttccgtgctggaggttatcaaggcctttgaaaaagtaagcgggcaatccctcccttacaagattgtaggtcgtcgcgcaggagatgtcattgctgcctatgccgatacccataaggtcaatgaagtattgggctggaaggctaagcagaccctcgaagatgccctgctctcggcttggaattgggagcaaaaactaagagcgaaataatcttcaatttttttatcttatgaaaataaataaactcctctcgctagtggcgctctccttctcaggaatcgccttagcgcaagagaaatccttggctacccttgtcaatgagaaggatgccttcttggtcgatgtacgttctgaaaaagaatttgacgcaggaagtgccgcacatgcagtgaatattcctttggaaaatatagagaaggaactctctcaattccaaggaaaaaccaatatcattgtcttctgtaggagtggcaagcgctctgaagcggctagaaagctcctagctaagcacaacattcaggcagtaaatggaaaaggagttgcttttctcaagtcgctacagaaagagaatcttatggatatgct

SEQ ID NO: 2286 - DNA, 23291 bp, synthetic construct
  variation 11136..11186: note = n is a, c, g, or t
  variation 17146..17318: note = n is a, c, g, or t
  misc_feature 1..23291: note = Synthetic
  source 1..23291: mol_type = other DNA
  variation 9884..9950: note = n is a, c, g, or t
  variation 7588..7589: note = n is a, c, g, or t
acacgtcttgcgataagctgtgtgtactgcgagccgaaatcgaggataaggacattgttttgcatccgcaaaaatactatttcgatacaatttttcatacaaaatgtcttgctttttatatgaaatagaactctgtagtttatttgctttacactcaatatgatttgaaaaataaattttataaaaaggcgactaagggaatgatgatgccatacagtttattttcatctattcaaaacagtaatcaaatgcacgttaaacatatcctaatctattcgtaaaacaggtaatggcattcaatttttgggtaattttaaagctctatgctagaccaaaaactattacaaacgcttagcgaaaatttagaaaacgaacttcctataaacgaagtccttccagaagggggtaaacttcatattgataaaatattaccctacatctgtgtgtatcggtacaaaaaaactgacagctacttttcaggtttgctaaaaacacaggcatcgtatattattgtaaaggacacggtagctatttcagaattaataaaaacgcttgccattgccatttcaaaaaaactgaattcgtttcttatacttgaaatgtggcccctgcgaaaaaaccacgaagccgagtttgagatctcttgccctgcaggcaaagcacctgcaaccattaaagccttacaggatggcattaatgaaatgcgccttatttatcctgaagtttcagcaatagtatccgacacgcacaacagacatcccgaccggctggagccactgttaaatctggaccagacaaaagaatcgggaagtttaattattgggttggccgttcctacaatttaccaaaggccagaagaaaaccagatgttttccattttttatagaaaatttgcaacacatttttcagaaataataaaacgcgcagtatacgaatttataagagtacaaacatccaatccgtttgcacattacttaatgcttggaaaaacaaatctggaccggattaccatggaagcagacgaagccctggctgaaataagcgaaggaatgtcatttttaatgcgaaccacaccggtaaacagttctcaggagtgggaaaaatttaaagcctctaattttaccgaaaaaccagcatttaattataggttagttgccctggatcccgagcagcaaaaaagaaaactgtataaaattccgttggaaaaagtagacgatccaaccctggcctatatcttacgcgacaaacggctggaaattgaaaaacaacttactatgctggaagaacgcggaaccaatagctttcggtttgtgggggaaagtttatacggtgctattgaagacaatgtactggttggagcgcaggaaattttaaaaacatttcccgaaggggatagcccttccgaaaaagaaaaatttagttgttacgactttgccaaacacgcacaaaaagaaatagattattaccaggagaaatttccgcagttgcaattatcccttgaaataagaaaagatattgcaggcatcatggtttctgaaaccaagcttttaataagcaatcaaataatgatggattctcaacggtgcgacgctttaatacaacatgaggtagctacccatattttaacgtattgcaacggtaaaaaacaacctataaggcaaatgtatgcaggctttgcaggctacgatcaattgcaggaaggtcttgctgtgctagccgaatacctggttaacggacttacagtaaacagactgcggttactggcgggacgtgttatcgctgcacatagtctggtaatgggggcttcttttattgaaacatttaaccttttaaagaatttccatagtttcccggcacgtaccagttattacattagcatgcgtatttacaggggtggcggacttataaaagacgctgtttatcttgctggtttaatgaatgtactggattacattaaaaaaggtggaaacttagaaaccttatacgctggaaaatttaacaccaaccatgtgccgctcatagaagaacttatgcaccggaacgtacttaaaaaacctgttcttccaagatttttggaacgcgaaaacgtacaggaacgtctcaaaaacttaagaaacggaatacaacttacagaattacttaactaaagaaaaatatatgaaaattgcttttattattaacgatcacgcaaccgaaaaacctaattatactacaccagcattagggtatgcggcttacaaacgagaccatgaggtctattttattggggttggagaattagcatatgctagtgacggtcatttgtctgcccgttgtaaaacaacttctggaaaaaaatttaaaactcaggaaacatattttaagacagtacaaaaagaaaaattttctagaatcagttcgaaagatttagatgtattatttcttagaaatgaccccagcgatgaaattggcgagcgcgaatgggcacaaaatgctgcctttatttttggtgaaattgctacacgggataatgtaattgtactaaaccatccaaaaacactggcgagcgcggtaaacaaaatgtactttcaacattttcctgaaatattgcgccccaaaacgattatttccagggatcacgaagaaattagagccttctttaaagagcagaaacaaaaaatgattttaaaaccactacaaggctctggcggcacgaatgttttcatgatagacaaaaagaatgaacagaacttaactcaaactatagatgctattagccgcgatggctacgtaattgcacaagaataccttccggatgccaaaaatggcgatacccgattatttttaatgaacggagaaccactggcggtagatggaaaatatgccattatgcaacgtgtaaatgcaaaaggtgaaatacgtagtaatatacacgcaggaggaaaaccccaaaaagtaaaaatgaccgatcaaattatgaaacttgcagaaatagtacgccctaaattagtccaagatggtatgtttttggtaggaattgatattgttggagataagttgatggaaataaatgtgtttagtcccggaggattaaatgttatgggacaaatgtatgaagcagatttttccacagaagtaattaagtctatcgaaaaaaaggtatactataataaaacgtatgaagattacctcttcaatagccgcttagccactttataaaataaaaactgaaattcatggcatttttagattattataaaattttaggcatcaatcaaaacgctacggaacaggaaataaaaaaagcctaccgtaaacaagccaggaaataccatcccgatgtaaaccccaacgatcccgaagcgcagcggaaatttcaagaaataaacgaagccaatgaggtcctgagtaatccggaaaatcgtaaaaaatacgatcaatacggaaaagactggaaacatgcagacgatattgaacgcgcaaaacaacaacagcaataccaacgacaagcagggcaacaggattttggcggatttggcggggaggcctcagggtattccgatttttttgagtctatgtttggaggcggtcgcggcggctttgggcgttcggcacaatttaaaggccaggactacaacgccagcctgcaaattaacctgaccgatgtgtacacctcccaaaagcaaaccctgactgtaaacggtaaaaatatccggctcacaattcccgcaggtgtggaagatggtcagaccataaaaataaaaggctatggcggcgaaggtgttggcggaggtcctaaaggagatctttacattaccttcaaaattaataacaataccaagtttaaaagagataaagccgatctacaccatacggttacactggatctgtacacggctgttttgggcggcgatattacagtggacacctttaaaagcaaagtaaaactaaaggtaaaacctggcacccagaacaatacaaaggtaaaattgaaaggtaaaggctttccaaaatataaaaaagaagacacttttggcgatttttatattacctatcaggtaaccattcctgaaaagctttccgctaaagaaaaagaattatttgaagaacttgctaaactacaaacatcatgagcaccacagaatacatcacggtaacccatctttgtagccaatacaaagtgacatcacagttgtttcagcaattacacgaaacggggttaatacaggttataactgtagaagaagagccttgcgtacatatagaaactgtccatcaggtagataaaattatgcggcttcaccaggatttgaacgtaaaccctgaaggaattgacattatcctaaatctcctggagaaaatcgacaccctgcaaaccgagatgaactctctggaacgaaagcttcggctatataaagaataaaaacctataacgttaacacggtaaattttaaatccaggggatcgagtgtatcttttaaagtttggagtaaatcatctccataaacgaggtaatattcagaaaaattggtgttgcgctcctgcaaactctgctttgggaagagccggtcttgtagtgctgttaagcgcgctaactgatctgctagttttcttttttgggcttttaacagtcttttttccaggttgtccaagccatttaattgtttcttttcctgtgctcccacagctcctacaaaagaagcatcggtttttttcgctaactcatacaagtctttaaattgctgctgcaaatgttcccgttggggagaaagatctatttttattgctgaaatttgatgcgtaaaagctgttcttaagtcggtttgcttctggaataaccgttccaccgagacttccagattctgaagtttttctgaaagtttttcgggcaccaacaacaccgagtttcgcaataaaagtattgggaacggcacctcaaccgcttcaaagtactcttttaactgaaaccaatacgccagctcaccgccgccgccaacataacaaaggtttggtaaaatcacttcctgatatagggggcgtaacaaagcattgggggagaaacgctcgggatgggtttgcagttcgttgaaaatttcatccttggtgaatataagttcggtttcgtttacatagaattttccatcccgttctatgatgcgctcgcgaacaccttcagccaaataaaataaattgatttcccgcggatgtacttgttccccgtagcccaagtccactagtttttcggtagtttgagttacttttttaaaggataggttttcgatgagttccttttcagcatacgggataaattgttttttaagctccgcatcgtttccgtctatgattaccaggccgtatgctttaaacagctcattccctaaatagcgggtggcatctgccagatttttatgttttgtataagcttcggtaaataactcctgcaagcgttttccattttcactctcgccaaaggcttttgcagtttctttagcgacctctgctaacccttctgtagaaaattcacccactgccccaccgtccggtcgttcccaaaccatcttttttccttcaacattaaaataattaatctcctcaaaatcgtggtcttcggttgccatccagtatacgggtacaaaatggttggtaggatattcagcaatcagttgttctgaaagattaatcaccgaaaaaattttatataaaaaatacaatggcccggtaaaaagattcagttggtggccggtggtaatggtaaacgtgttttcttgtgaaagggatgcgatgttcttttgagttgcttctgaaatttcaaaaccttcgtattgtttttgaagttgattcactaaagtttggcggtccaaattgcgtacatttcgactccgctcagtgtgctccttaaaattttgaagtttcggaaaccttccgtagaactcttttagttcgggtttttcagccaaataatcacacatcaatttggaaaaatagccggtttcgctgtacggaatggtagattttgacataaaattttcagaaggtttgttcaaaaatacaggataattaagaattcagaatttagaatttagaatttgtgagaactttaagtaggtttcattattttaaaatttcagcatagcctgttaaaaatggaaaatctagtatcttagcgacccttaaacaaccataccatgttgaaacaccttacgcttacttttctttttatttcagtaacacttactgcgcaactacaatctccagccgatttcctgggctacgaaataggcacccaattttcccgtcatgccgatgtggtgcgttattttgaacacgtagcagccaatagcgatatggtaacctacgatacctacggaaaaacatacgagcgcagaccccttacctatgcagtagtttcaacagcgcaaaacattgcaaatattgagcagattagaaaagataatctaaaaaacataggcctggaaaacggtactgcgagtccgcaaaccgccattgtctggctaagctataatgtacatggaaacgaagcgtccagcaccgaagctgcgatgaataccctctacaaactcataaccgaaaaacaagcctggttgcaaaacaccgtagttataattgacccttgcgtaaacccggatgggcgcgatcgctacgctaactggtacaatcaggtaaaagctacgccgtacaatgcaaaacaggcagccatagagcataatgagccctggcctggaggaagacccaaccattatttatttgatctcaaccgtgattgggcgtgggcaacgcaggtagaaacacagcaacgattagaagtttacaaccaatggatgccacatattcacgtagattttcacgagcagggcataaatgagccgtattactttgccccggcggcagagccttaccatgagattattagtgagtttcagcgcgatttccagactgaaataggtaaaaatcacgccagatattttgatgccgaagggtggttattttttacccgagaacgtttcgatttattgtatcccagttatggcgacacctaccctacttttatgggggctattggaatgacctacgaacaagcaggccacggtagagctggactaggaattaacaccgacgaaggttttgagttaacattggtagaccgggtagcgcaccacaccaccacaggactttctactattgaaatgggaagtaaaaatgctgtaaaactaaattcagagtttaaaaaattctttaaaaatgacaaccttacctataaaagctacgtcttaaaaggacatccggacaaactgaatgcactagccaagttactggataaacaccagattacctacggaataaaaagcaacggtaccgtaaatggctttaggtatgctgaaaataaaaatggtaaaatggatgtcaccaacgcacttttggtaagtaccaaccagccaaaaggaaaaatggtcaaggtgttgatggaacccaacgcagtactaaccgaaccgttaacctacgatattaccgcatggagcatcccacatgcgtacgggctggaagcagtggcttctaccggttttgttgcagtagataaagaaatgtcgcnntcggctttaaaaacaacaaatacagcttctccgaactcagctggataccttgtttcctggaatagcatgtacgatgcacagtttttagccgagctattgcaaaacgatattcgcgtacgcttttctgaaaaagatcttaaatttaatgacaaagatttcggtaaaggaacccttgtcattaccaaaagtgataataaaacaaatgaccatttcaacgaaaaagtagttgaaatcgccaacaagcacaaccgacaattatatgcatccaacaccagctttggagataccagaaccgattttgggtcgccagacataaaattaattaacaaccagcgcattgctgttttacgtggcaatggcgtttcttcgttaaactatggcgctatctggcatttctttgaacaacaacttaactaccctattacttcaattgatacgggcgattttaaagcagctacgctccatagttttgatgtgttggttctgcctagtggttggtattccagtttaaaaggtgatactatggatgctgtgaaaacctgggtacaacgcgggggaaaaattatagccattgggagtgccataaacagctttacagacctggatggttttgatcttaaaaacaatgtttcaacagatacaacgaacgacaccggggaaaccaataaaagtgaaggaaaccttactccctacgatcaacgcgaacgtacccatgtaaaaaatcttattacaggaagtatttataaagtaaaaatagaccccagccacccaatggcttttggatatagtgatacgtattatagcttaaaattagggagtgcttcgtattcatttttagaaaacggctacaacgttgggtatattgaaactccaatgtcggtagctggattttctggggaagacgccaaaaataaacttacaaattcattggtttttggagaagcaagagtaggcagtggtagcgttatctatatggtagacgatgtactatttagaagcttctgggaaaacggaaagctgttttttgtgaacgcactgttttttgtaaataataataagtttacgttgtagaaatctttaacgcttaaaatcaaaacgttataaaccgaagcatttgtttcggttttttttatataaagatttttcttactttgtgtgtcttccccacaaaatttgttaaaaattaaaaataagattgaaaaggtattgcactatttattatgcaaaacctcaaactttttaattttataaaaagtaatcgaaaacatttaaaaaagaaaggtgatagatataaatctaccaccttgaatgttttcacaacggaatagtccttattgtgaattgctttcagattgtaaatctacaaaatttatagttactaaaaatgaggataacctcaaaagaaaaaaaatgaaataatagttttataaaaaatatattattatgaaaagaatattaggattggatttgggcaccacctcaataggttgggcatttgttaatgaagcagaaaacgagacagagatgtcatttatagtgaaaacaggtgttcgagtggttccactttcaacagatgaacaaattagttttgaaaaaggacagagtattactattaatgcagatcgaactttaaaaaggggaatgcgaagaaacctgcatcgctataaaatgagaagggctgccgtgatcgacactttaaagtctattggttttattacagatgaaacgccactttctgaaaacggaaatgatacacacagcacatataagttgcgagcgaaagcagtatcagaaaagttgtccaaacaagatttcgctcgtgttcttttaatgataaataaaaaacgaggttataaaagcagtagaaaagcaaaaaaccaagaagagggacaacttattgacggtatggcagttgcgaaacgccttgaaaatgaaaagctattacctgggcaactttcatttattttattaaatgaaggtaaaaaaatgctaccaacttattacaggtcagatttgcaaaatgagtttaatgctatatgggactttcaaaaacaattttatgaggaacacttgactgaaaaacataaagaagctcttgaaggtctaaacaaaacagcaacaggacagtattttgaaaagactattaaaactcagagagcagagaacaaagggaaaaacaaaaagctgcaagagtatgaatggcggaacaaggcaataacagagcaacttaccttaccgcaagtagcatatattttaactgaaataaacaatcaaatcaatcagtcaagtggttannnnnnnnnnnnnnnnnnnnnnnnnnnnnnnnnnnnnnnnnnnnnnnnnnnnnnnnnnnnnnnnnnntcaatcagtcaagtggttatttgggtgctataagcgaccgtagtaaagagttgtgttttaatgatcttactgttggacaatttcaatacaaccaactaaaacaaaacccccttgcatccttaaaaaatcaagttttttatagacaggactatatggatgaatttgatgctatctggaaagaacaatcgaaacattattcagaattaaataagaaaattaaagataaacttagaaacattacgattttttaccagcgcaagctaaaatcacaaaagggacttataaacatttgtgaactagaaggtgtggaacgcaaagtaatgacagatggagagctaaagaaaaagctaataggcccaagggttgcgcctaaatcttcacctgtttttcagcactctaaaatttggcaaaatatcaataatattattttaaaaaacgaaaagacaaaagaaattgttgaattaggtgaagatttaagggaattgctgtttcagtatcttaattggaaagataatatttcggcaagccagctcataaattttttaataaaaaattcagatataccaaaaggaaagtggaaagtaaatcttgaaaaggtagaaggtaatagtaccaatgctgtactattaagtgtttatgaaaaaattactgaaattgaagggtatgataaactcaaattcagtaaccccaatgaagaactcattaaaagtttaaaggtttgctttactgaaataggagttgaaccacaaatcctggaaatggattatactttaacgggtaatgattttagcaaacaaccggcttacgagttgtggcatttgttatattcttatgaagatgattgctcaataacgggaacagaaagcctagaacaaaaactacaagaaaacttcggctttaaaaaggagcacgccaaattacttgtaggtgtcaactttcaacaggattatggaaatttaagtgtgcgggcattacgtaaaatatatccctatttagaggaaggcaaagtttatagtgaggcgtgtgctttggcgggatacaatcactccaagtccttaactgccgaagaaaacaacaagagaatattacttgataaattagagcttttaaagaaaaattcactacgaaaccccgtggtcgaaaagattctaaaccaaatgatacacgtggtaaatgctgtgattgnnnnnnnnnnnnnnnnnnnnnnnnnnnnnnnnnnnnnnnnnnnnnnnnnnngaaatgctgtgattgagaatccagaaatgggtaaacccgatgaaattagagtcgaacttgcaagagaactcaaaaagacagcaaagcaaagaaatgaattgatcaaggtaattaccaaagctaccacagaccatatcgcatttagagataaaatcaaaaaggaatttggcttaccctatgttagtagaaaagatttaataaaatacaaattatatctcgagttaaaatccaatggatttcgtacactctattctaacacttacataaaacctgaagagctttttaccaagaaatttgatgtagaacacataatcccacaatcagtattatttgatgattcgttttccaacaaaaccttagaattgagagatgtaaacctcgaaaaaggaaatgagaccgctattgaatattgcagacgtaaaggttggggagatgattttaaatctcgaactgatgaaatttttaaagctaatggcataaaatacggaaagcgcaaaaaactgttgatgaccaagacagaaattcccgaaggctttttaaatcgggatttgggaaataccgcatatatttctcgcaaagcaactgaaatactgcaacaattaacgagaaaaaaagtggtctccacatctgggaagattactagtaaactgcgtagcgattgggaacttataaacgttttacaagaactcaattgggataaatacgaagtcttaggacttacatattatgattataataaagaaggaaaggcattggcaaggataaaagattggactaaaagaaatgatcatcgccaccatgctatggatgcaatcgccgttgcatttacaaagcctgcttttattcaatatttaaacaatatgcacgctaaaagtgaaaaagcaggagatatatatggcatagaaaaaaaatacacctatcgagataaggaaggtgggcgtaaatttcacaaaccttttgagaacataagagaagaatcaaaaaaccacttagcttctattttagtttcccacaaagcaaaaaacaaagtggtaactcgcaataaaaataagattaagataaagggtaacaatagtttcaagactaaaactgaactcacaccaagagggcaacttcataaagaaaccatctatggaaaatcattttacccagaagtaaaagaagaaaaaataaacggttctttttcaaaagaaaaaataaaaacagttacaaaaccaatttatcgagaagcacttttaaaacgactttcagaaaataaccatgatgccaaaaaggcatttactggaaaaaattcattgaccaaaaaccccatttttattaatgaaaaaacaaacgtacctgacaaagtaaaaacgcaacaactgcaacatcaatttacaatacgaaaggtaattaccccagaccttaaaattgataaagtaacagatgaaggcattaaaagaatactggaggaacgtctaaaagaatacaacggcaagaaaaaagcagccttttcaaatttagatgaaaaccccatttggctcaataaagaaaaaggtatttcaattaaacgagttacaatttcgggagtcagcaatgcagaaccactccatattgccaaagaccatttgggtaatgatgtcttggatgaaaaaggcaatacagttcccacggattatgtgagcactgggaataatcatcacgttgctatttataaagacgagaaaggaaatttgcaagaagaggttgtttccttttatgaagctgtcataagaaaaaacaatggtttgccaattgttgaaaaaaatcatcccaagggttgggaatttcttttcactttaaaacaaaatgaaatgtttgtcttcccaaatgaagattttgaccctttaaatatagatttatatgatgatgcaaatagagagttaatcagtagaaatctatttagagttcagaaaataggttcaaaagattattggttcaggcgtcatttagaaaccacattagttaccactaaagaattaaatgaagtcgtttatcatagaaagcgtaatcctaattcgattagtaaaatcatcaaagttagactaaatcatataggcgaaatagtgcaaataggagaatattaaagtcatgataaaacgaaccctctttttcggcaatccagcttacctcagcacgcgtaatgaacagttggtggcaaacttccctgatgaagaaaaaaaggaagctactattccaattgaagatttaggctatgtcattctggaagacccccaaatcacaattaccaacgggctcttaatgaaacttgtacagaacaagactgccgtaatcacctgcgataaacaacatttaccctgttcgttactgcaacccttagtgggacacacagagcaaacagagcgtatgcgccaccaacttaacgccagccagcccttaaaaaagaatctttggcaacaaactgtacaggcaaaaattgaaaatcaagcagtacacttagaaggtcgaggattgaatgctttaaaactaaaaagatgggcacaagaggtaaaaagtggcgatacccaaaaccacgaggcaattgcagcggcatattattttcaaaatatttataaagatttagttccagaatttgggcgtaatcagaaagggatagcgcctaataaccttttaaattatggttatgctattttaagggcgattacagcaagagcattagtaagtagtggcatgttgcccagcgtgggtgtttttcatcggaataagtacaacccattttgcctggccgatgatattatggagccctatcgcatttatgtggatgcagtggtatatgagataaccgaaacaggtgctaatattgaagagctcacccaaaatataaaggcccagttgctcacaattcctgcattagatgtacttatagatgagaaatggagcccattaatgacagctatgagccgtactactgcaagtttatatgattgttttaaaggtgaaagccgaaaaattctatatccaaaatttgtgctgaataccttgtaaaatgatttctgaaagtaatttttcaagattaaaccaataccgatctatgtgggtactcgtattttttgaccttcctaccgaaactcgtttagagcgaaaagccgcagcgggattcagaaaaaaattaattaatgatggtttcggaatgtttcagtttagcatctatgtgcgcttttgtgccagtagggaaaacagtggagttcacataaaaagaaccaagaacaacttgccgaaaaaaggaaaagtatgcattatgcaaataacagataaacaattcgggatgatggaactctttcacggtcaaaaagaaatagaacctgaaactcccacccagcaattagaattattctagaattcaaattgtctggtcgagcgtccatcagaatgaaaattcctttcgggctgacagtcgcaatctaatataacagattcaaattttaatcctatgattgtatttaaaaaacagtataccagccaattacggcgggtatactgcgaattatctctaaaattaaagaactgaaagcaattcacaacaaaagcatctaattgtctaacgtctttcttactgcgaattatctctaaaattaaagaactgaaagcaattcacaactcgaccccattcaagatactttatcttttgactgcgaattatctctaaaattaaagaactgaaagcaattcacaacatcctttgttgtggtgagttaccataaggcactgcgaattatctctaaaattaaagaactgaaagcaattcacaactaaagccaatctattagaagcggccacggtactgcgaattatctctaaaattaaagaactgaaagcaattcacaaccactggaataccttgtacctggatgcaagcactgcgaattatctctaaaattaaagaactgaaagcaattcacaacaagaagaaatagaaaaaggtgctttcgacgactgcgaattatctctaaaattaaagaactgaaagcaattcacaacgggcacaggtttattgtaaccgcagtgcaaactgcgaattatctctaaaattaaagaactgaaagcaattcacaaccatcttccaggtcttttgcatacccacggtactgcgaattatctctaaaattaaagaactgaaagcaattcacaaccggaaaattggataccactacgcgaaagcgactgcgaattatctctaaaattaaagaactgaaagcaattcacaactatcacactaccgtttgcattgtaaatgtcactgcgaattatctctaaaattaaagaactgaaagcaattcacaacaggttgcaaagaaaacctttctaccctctcactgcgaattatctctaaaattaaagaactgaaagcaattcacaactgcctcaccgactttaacaattttatacatactgcgaattatctctaaaattaaagaactgaaagcaattcacaactgctgaagtaaccaaaataaaacgggtgccactgcgaattatctctaaaattaaagaactgaaagcaattcacaaaaaaaaataaaccctgctttgtgaagtttctaatctgtgattaaacggctgttgtgttacacacaggtatcataaattttaaatagctgcctggctcaattgctttgaaatatttataaaaatggcagaattcaaaaaactgaaggaacccttgcattaaaattctcttacatcactcaaaccgaattgccttcacaggagaaattttcgatataatataactgggcagcaataacatgaccagacacaatacaaacgtgccaaggtttaatgccagaatataactaatatcaaggtaaacgggggctttggtcacataataggtgtctgggtttaagggaaaaagtccaaaatatttttgtgtgaagagtaatcccaaaccaattacatttccccaaaaaagccccactagtattaaatacatggaattgtataaaaacacttttcgcacactccaattactactacccagggcttttaaaattcctatcatctgtgtgcgttctaaaataagtaccaacaaagcagtaatcatattaatacccgcaaccagaatcataatccctataattagatacgtgttaaagtcgaataaatcgatccattcaaaaatagacccgtacttttgcctaatggtcactgcatccagatcgctgtctatagctttatacaccttgccacctaccgcatctatagcatcaaaatcctctacaaacacttcaaaagagccaatctggtcatcttcccatttattaaggaattgtatgtgcctaatatctgcaatgaggtattgctcatcaaattgctgaaaaccgctgttataaattcctacaatgtcaaatcctctggtacgtgctttttgtgttttcccttcctgcataaaaaaggtgatcactttatcgtttaactggagtcccagacgcttggcaaggtattctgaaattagtatttcttcgtttaaatcgcctttcgtatattttggaagacgtccttcccgaagaaactcttcaaaatactgccagttataatcggtacccacgccttttacaaccaccccttcaaaattggtttcagttctaattacagctcctttttgagcagtaacctgaatatgctttataccttccaccagattaaaaaccgggtaaaacgcttgctttttgcttattggaatttgcgattggttactctggttggtatcgtagttggtaattataatatctccgttaaaagccgataccttttcacgaatctttttttgaagtcccatactggtagcaacacttactaacatcataattatcccaagtgcaattgcagtgatcgcaatttttataattggccccgaaatactacttttatagtctttggcagcaatgatgcgtcgagcgatgaaaaattcgaaattcacnnnnnnnnnnnnnnnnnnnnnnnnnnnnnnnnnnnnnnnnnnnnnnnnnnnnnnnnnnnnnnnnnnnnnnnnnnnnnnnnnnnnnnnnnnnnnnnnnnnnnnnnnnnnnnnnnnnnnnnnnnnnnnnnnnnnnnnnnnnnnnnnnnnnnnnnnnnnnnnnnnnnnnnnnnnnntaaatgatcttatacaagtaggagaagcaattaccagagacgctcagcgtgatgaaaaaagaaccgagaagaaaacctcgctggaggtaggagcgctggaagaattaaatactggtaacaattctataattaccggggccgaacaaccaggtgtctatttcccgatgctaagcaacaaaaaagtaggggttgttgccaaccagaccagtgtaactatagaaaaattaaacacgtttgatgaaaacgaacccgaaaaacaacaagttatacaaacgcatcttgtagattatatgcttgacaacgctattaacgttactagagtgtttgcgccagaacacggatttagaggtactgccgatgcgggagaaaaagtaaaagatggcattgatactaaaaccggattgcctataatttcgctatacggtaccaataaaaagcctaccaaagcacaattagatggaattgacatcttagttttcgatattcaggatgtgggtgctcggttttacacgtatatttcaaccctacattatgtaatggaagcctgtgccgaacaaggaatccctttgcttattctggatcgtcccaatcccaatgggcactatattgatggtccagttttagagcctgaacatacaagttttgtaggaatgcacccagttcctgtagtacacggtatgaccataggtgaatacgcacaaatgattaatggcgaaaagtggctggcaaacggagtaacgtgtgctattaccataattaaaaatgaaggctacacacataaaacagcatactcattaccagtaaagccgtccccaaacctgcctaacgatgttgccatttccctgtacccaagcctgtgcttttttgaaggtacttttataagtgctggtcgcggtaccaatatgcagtttcaggtatttggagctccttcgctacctgaacgattttatgagttcacctttaccccggaagccaatgaaggtgctaaaaacccaaagtttaaaggcgaagtgtgccacggaaaagacttgcgcaactacccacaattagaaaaattaaatctggactggctcctggaagcctatgttgccaatggaaagaaaaaagacttttttaactcctttttcaccaaacttgcaggcaccaaaaaattgcaggaacagattgagaaaggttttacagctcgtgaaattcgaaaaacatgggtagaaggattaaaacggtatgaaaaaatgcgtggtaaatatttactttatgagtaataaatttacctatatcccttaaaatttaattttgaaattagtgaattaggattttaaacgttttttcatctcctccacaatgttaaaggcagcagggcaaatggctacattttttaacgtaagattggagatttgctgaaactttcttctatcggtatgtggaaattcgctacatgcttttgggcgtacctcgtaaatactacaataattatcggctcccaaaaaggtacagggaacgctttgcagcacatagtcgttgtcttcatctacccgcaaataagtttcaataaactgctgtggcttcattctgaaatgcttcgaaatacgctccacgtctttattggtaaatagtggtcccgtggttttgcaacaattagcacaagtaaggcagtcggtacgttcaaactcggcatcgtggagttcctgcatgagggaatccagatgcttgggtggctttttctttagctttgcgaaaaattttttgttctcgttatgcgtatctttggccttttgtgggagttgacgaagggtttcttccatactgcaaaagtagaaaaacgaaaaatgaaatcagaactaaatttttacattgtataacccaatttctaattcacctattaatcaatgaccgaccttcttggcaaagccctacaggattaccacaacggaaattacaccgaagacattattacggcaaccagtattagtgaggacgatgagttgccccttccctatctcttccgaagctttgctgaaatgcccaaactggaacaatttgctttaaaaaaatgccgcggaaacattctggacgtaggctgtggtgcaggaagccatgcactttggttacaagaaaaaggggtttgggtgaaagctatagatatttcggcaggtgctgtaaaagttgccaaagcccggggtgttacaaatgccaagcaggccaatcttttggaaatttcagaagaaaagtttgatactattttactcctcatgaacggcacgggaatatttgaaaccgttgaaaaatcggcacagtatcttcagcatttaaaaaacatattaaaccctaaaggacagatcctcatagactcaagcgatttacaatatatgtacgatcgcaacgaagacggaagtatctgggtgccgcaggaacgctattatggtgaattagaatttaccatgagctataaaggtgaaactacccctactttcccctggttgtatctgcacgaagcattatttaaacaattggcagaaaacaacggatttaaaattgaaattttaaaaagaggaagcaattacgattatctggcaaagcttaccacaccaggaaagtagtctgtttgaaagtattccagaaatgttccgactgtaaataaaacttaaaaaaaaaagcgttaaaaaaagggagggtattttcataatcccatatttacgttatgtttgctaaaattacgctattctagatgaaaacatccttttcaaaattcttattccttctttcggtacttcttgttgttgtttcttgtaaaaaagatgacgatagcgccatgacagacgaacgggcattaaacttattaggtttgggcgagtctgctgaagacttgttgtcggacgatatttacaaaagtcttgtagtagaactggtttatagcaatggatttagaccagagcaacaaaccatagacaacctgagacaattattagtggagcgtgtaaacaaacctgacggcataacaattatggaaaccgtaattgccccccctgccggagaaccttacaccactgaagaaataagaaatatagaaacccagaaccgcacacaatatacaagggacgaccagatagcggtatatgtgttttttgcaaatggaaatgcttcaaccgataccaattctaccgttacgctgggaacggcttatagaaacacatcggtggtaatttatcaggaaacactgcaaggtttaaatgttaataggtttcttgtggaagccacaacccttcgacatgaatttgggcatttatttgggcttgtaaatattgtaaatgacgatattcacacagatcacgaggatccatttaacaacaagcattgcgtggtagaagattgcttaatgtattttgcgagtaccatcccaaaaacccttccaaatcctactgaagaagatattccagtattcgacatgctttgcctggaagatctacaagctaaaggcggaaaatagatagtgaatagttaaactataatcttgtacattcagatttactgactctctgttttactaaaaactttttctccattaataaaggttgccagcacttgtatttttggaatgctatctgcaggaatttccattatatttcgatccaagagggtaaagtcggctgctttgcctacttctatacttcctttttcatcttcttcaaaatttgaaaaagctgcccaaatagtcattccttttaaagtttcttctctcgttaaggcttcttccattctataccccttttctggataatttttcaaatcctttctggcaacggcgctataaaacgtgtgcattgggtttacctcctccacagggaaatcggtacccagtactacaattccagcctttttcagtaaagttttgtatgcatacgccccttttatacgctcacttcctactctgtcttccgcccaatacatgtcgctggtggcatgagtgggttgaatagatggtatacaatttttagaaaacaattcgaaatgggctggggctacaatctgggcatgttcaactttccaccgggcgtcggggtagttttccagtgcttttttataagcgctaattactgaaatattagccgaatcgccaatggcgtgagtattcatttgataccctgccttagcaagtctagccgccaattgttgtaaactatcggcaggggtaatcatagcaccaaaatggttttctttatcgctataaggttcccgaagcgctgcaccccttgagcccaatgctccgtctgcatacacttttacagaacgtacatgcaacctatcagtttttatgatacccttttttaaataataatcgaggttttcttccgaattactcaccatggcgtataccttaattttcatcgcatctgcctgttgcaagctgtcaattaattcaataatacttcggtcaagcccagcatcgtttactgttgtaagtccgttttctaagcaaatcttttcagcatcttttaatgcttgtatagaaaattcacgggacggagcaggaatcgatttacgtaccaaactcatagggctgtctattaaaattcctgtaagttgtcctacactatccagtacaacttctcctccttctattttagtctcaggagtaattccggctaattctaacgctttggtatttataatcatagcgtgaccatctactctggtaagtgccacgggggtgtccggaaatagggtgtccagttcttttttagaaggaaaatcttttattttccaatcgttttgatcccaaccacggcctgtaatatacccaacctttttttcttgttgaaacgcacttacgcgctccaaaacctcatcgtaactttcggtccccaccagatctacttgttgacgggttactcccaggttatataaatgcgcatgggcatcaataagtccgggaaccagagttgcaccattggcattgtaactttccttgaaacggtattttaactctagttcaggttttaagcctatttcaagtattttaccgtctttaattaccattgcattggctttttcaaaagcattgtttactgtgtaaattgtagcgttttttacaagtaaatctgctgaaattttatcgggtgcgcaattgtaaaataaaataagggtacttaaaagatagatgtatttcatgaggtatcgtttcaaaattaatttagagtattccaaattaacaacaaatataaccttgtttttttatatctcctcacagcaaacgttatgaccaaaaagaaagaaataatacacggtattttagtgtaacaactatgctacttagaaagtgagaaaataatgcaataaaaaaagagcggttggggctccgctctttttgtattgttatagtgtcacatttggggctcgcaacactatagtaacataagtattaaatttcttttgtaaagatacacgcatttttggatattccaaataaaaagtgcgtttaatcgtaatttatatacactttatcgagttttgattaatattattaatgaaattcctacaaaataacactataaactttaccataaaaaaaaacgggtcagcccccgctaagacccgtttttagtgcgttcgcattacgcttggggctaataatgtcgaacaatacataagaagtatgctgtaaatgtagtccttttttcctacaaaacaaaaaaattgcgtcttttgtcggttatttatgcgttttatcgattttactataaaatctcctttcttaattaaactatatttgagtaaagaagtcttacctttaaacaaaactaattggtggttcaggaacaaaaacttgtggctttattacaatccccttcccaaaacgaagaggcgtttcggctattggtaaccacctataaagaaagactgtattggcatattaggaatatcgtgaaatctcatgacgatacagacgatgtacttcaaaatacctttgtaaaagtc

SEQ ID NO: 2287 - DNA, 23255 bp, synthetic construct
  source 1..23255: mol_type = other DNA
  misc_feature 1..23255: note = Synthetic
atttttccatatgccacagaactggatatacagatgcttacctccctgccttcgctgctgataattccttttgtgctattggcgggcaagctggccgagaaacgtgactttgtgcgtctgctgaaagtgggactttggatgtttgccgccagtggggtactttatcttttttcggacaaaatgtggcagttgatggtggtcagtgctttgctcggcattggctcgggactgataatcccgttgtctaccggtttggtttcacgttatttcacgggggagtatagggtaaagcagtttggttacagttctgccatcaccaatgtgacgctggttgtggcaacggcggtgactgggtatctggcagaggtaaactggcacttgcctttcgtggtatatctgcttccgttggtttctctgctgcttgtcgggtatttgaagggagataccggtcagccgcagaaaacagaagatacggctaccgttgttccggaggaatccaagcgtgcgattcccggtaaatacggcatccatgtccgccatctgctacagttgatgctgttttatggcgtcactacgtatgtagtgctggcggttacttttgacttgccttttttgatggaggcccatcacttctccagcggaaattccggattgatgatctccttattcttccttgccattatggctccgggtttcttcctggggcatatcgtgaagtggatggggaaacacacaaagttttacagccttttgtccattgcagcgggtttgcttttgatatggatttcgcctaaagaatggctgataataccgggatgtatgttggttggtttgggatatggtgtcattcaaccgctgatttatgacgagacagtagatacggctataccggaaaaaacaactttggcactggcctttgtaatggtaatgaattatctggcgattctattgtccccgttcattacagacttctttcagaccttgttccacactaattccaaggaatttccgtttattttcaacctctgcatcacactgctcgctatgtggtgggagtatgcgaggaagaaggattctttgttgggggggagttatgagtgatgagtgatttgttggtaattgtgctgcgctaccatgctgaaaggaaaataccaacaaatcactcatcacttataacttataactcaatcgcctcatatttcagcccgaagacgtcggctacagctttgtatgttactttgccttccactacgttcaatccttgcgccagagccgggtcgtccttgcaggcttgtctccagcctttgcatgccagggcaacggtgtagggcagggtggcatttgtcagtgccatggtggaggtgaagggtacggcgccggggatattggcaacggcgtagtgcacaattccatccacaatgtaggtaggatcgctgtgcgtagtgggatgggaggtctcgaaacaaccgccctggtcgatggctacgtccacgagtacggtgccgggtttcatcatcttcagcatttcgcgggtgatgagatgcggggccttgtcaccggggatgaggacggaacctactaccatgtcgatgttcggcaattccatcttgatgttatgggtggaagaatagagtgtctttacgtttttcggcatcacttcactcaggtagcgcaggcggggaaggttgatgtcggcaatcagtacctcggcacccattccggcagctatctgtgcggcattggtgcccacgataccacctccaaggataagtacgcgtgcgggacgtacgcccgttactccgcccatcagttttcccttgccgccttgtggcttttcaaggaagcgggctcctacttgggtagccatacgtcctgccacctcgctcatgggggtaagcagcggaagtgaacggtcttctttttccacggtttcgtaggcgatgcagacggcaccgctttcaatcatggcttcggtcagtaatttatcggctgcaaagtggaaataggtgaataccacttgtccctttttaatcagtttgtactccggtgtaataggttcctttaccttgacaatcatgtcggctgcggcatacgtgtcttcaatggtcggtaaagtctttgcacctacggcgatgtagtcatcgtcggagaaaccgctgtttgcgcctgccgtggcctgcacatacaccgtatgacctttttttaccaactcggctactccggcaggggtcatgcccacgcggttctcgttgttcttgatttctttaggtactccgataatcataaccttaaagttttaattggggggttaaacatggcgcaatatagcgatttcccggcttgggtgttatcggtgtatctatgttcttcaacagaatttttatgcatgttttaatcaatgataattgcacctttctgtaggtagagagaactattctttttatatttgcatgcatttaaaataatattgactgtacaaaatatgaaatatcctatatttttctctcttttgttctttattggtagtgtgcaaagcggctatgcccaagaaaccgatacagacaagacctccttcaccccgccttttgatttccccatcaccttctccggtaacttcggcgagatacgtgccaaccattttcatggcggactggatttcaagaccggtggaaccataggcaagccggtacgcgctctggccgacggatatatttcgcgtatccgcgttacccacggttcgggctatgtgctcgatgtggcttatgacaatggttattcgacgataaaccgccatttgagtgcctttgtgggcgatgtggcccgccgggttgaagacttgcagtacgagaaagaaagttgggaggtggaaattactcccgaacccgatgaatatcccgtgaaggccggtcagataatagctttgagcggaaacaccggatactctttcggtccgcacctgcatctggatatgatagagacggctacggacgaatatatagacccgctgcctttcttcatggacaaggtgaaggacaagactgccccgcgtgccgaaggtatcatgctgtttcctcagccgggaaaaggagtggtggaaggcaagcagacgcgacgggcttttccggcacatcctacgaaacccattatcgcctggggactgattggtgctggcatccgtgcctacgattatatggacggagtgcagaataaatatggcgtgaaggcggtgattctcgaagtggacggcgaggaagtcttccgcagtacggtagaccgctttgcctatgaggagaaccgctatatcaattcgtggacacacggtcagtacatgaagtctttcatagagccgggcaaccgccttcgcatgctgcaggcatccaacggcaatcgcggactggtggacatcaacgaagaacgcccttaccggtttgtctatacgctgagagatgcgctgggaaatatctccaaggtccgcttcacagtgcagggacagaagacgataattgctccggtggaacatcgtgagaaatacgccctcaaatgggacaaggtgaactatctgcaggagccggggctggagttggttatcccgaaaggaatgctctacgatgacgtcttgctgaactactccgtgcgggctgatagtggcgacatcgctttcacctatcaattgaacgatacccgtattcctatgcacggtacctgcgatttgcgtatcggcttgcgccggcgtccggtggaggatatggccaaatattatgtggcgggcgtaacggcacgcggtggaaaatatcgtattggcggtaagtatgaggatggtgtcatgaaagtgcgtatacgggatttggggacttataccgtggcggtggatacggttccgccggtgataactcccctaaaccaagcccaatggggacgtacgggaaaaatcatcttcaaggccaaggacaaggaaaccggcatcaatacctatcggggtacgattgacgggaagtatgccttgtttggaaagcccaattccatcagtggtaacctggtgtgcgagctcgacccgaaacatgtggagaaaggcggcaagcatgtggtggagatgacggtgacggatggctgtggcaaccgtaccaccggacagtttgaatttgtatggtaaagactgaaatatttagtaacattataatttagaagtatgaaaagtaaaagactgactcttttcgtcttgtttgttgtggcagccgtggcgaatgcgctggcctgcaccaatcttatcgtgggcaagaacgcttctgcggacggttctaccattgtttcctattctgccgattcttatggtttgttcggcgagttatatcattatcctgccggtatgcacaagaaaggtacgctgattgacatacacgagtgggacaccggcaaatacctcgggcagatagagcaggcccgccagacgtacaatgtcatcggcaatatgaatgagttccagctcactatcggtgagacgacattcggcggacgtcccgagctggtggataccaccggcatcatcgactatggcagcctgatttacctcggtctgcaacgctcacgcaccgcccgcgaggccattaaggtgatgacggagttggtgcaggaatacggctattacagcagtggcgagtcttttaccattgccgaccccaacgaaatatggattatggagatgattggcaagggacccggtgtgcgcggtgccgtatgggtggctgtccgcgtgcccgatgattgtatctctgctcatgccaaccagagccgcattcatcagttcaacatgaacgacaaggagaactgtatgtactccgccgacgtcatctcctttgcacgcgagaagggctattttgacggtgtgaacaaggatttcagctttgccgatgcctacgctccgctcgatttcggtgcccgtcgctattgcgaggcccgtgtatggagctatttcaatatgtttaccgaccgtggcaacgagttcctgccttatatattaggtgagacgaacactccgatgcctctgtttgtgaagcccaaccgcaaggtttccgtgcaggatgtgaagaacgccatgcgcgaccattatgaaggtactcctctcgacatcagcaaagatttcggcgcaggcccgtatcataccccgtaccgcctttccccgctttctttcaaggtgggtgaccaggaatacttcaatgaacgtcccatctccacccagcagagcggtttcgtattcgtggcacagatgcgctccgagttgcccgatcctatcggtggagtattgtggttcggcacagatgatgccaacatgacggtatttacgcccgtatactgctgtacggacaaggttcccgtatgctacacccgtgtggacggcgccgattacatcactttctcctggaactccgctttctggattttcaactgggtggccaatatggtttatccccgttatgacttgatgatgggcgacgtgcgtgccactcagacagagttggagacaaccttcaacgaagcgcaggaaggcgttgaggctgctgctgccaaactactggaaaaagaccctgccaaagcaaaggcattccttaccaactatacgaacatgactgcccaaagcactttcgatacttggaaacgtcttggcgagtttcttgtcgtaaagtataatgacggcgttgtcaaacgtatgaaaaacggtcaattcgaacgtaattccatcggccagccggcaggcgtaatccgcccgggatacccgaaggagttccttgaagagtatgttaagcagacgggagacagatataaaatgcctgaataaaattaggatatttgaacttattcttctacatttgtgtcttacaaaaaagtttatattaacccttaaaacaataacagtcttatggaaaatcaggaactgattaagcaggtgactgagaaagccgaaaaatggcttaccccggcatatgatgccgaaactcaggcagaagtgaaacgcatgttggaaaatccagataaaaccgaattgatagacagtttttacaaagacctggagtttggaacgggtggtctgcgtggcatcatgggtgccggtacaaaccgcatgaacatctacaccgtaggtgccgcaacacagggcttgtccaactatctgaacaaatgttttgccggaaagaaggatatttccgttgttgtggggcacgactgccgcaacaatagcgacaagttcgcaaagatttctgccgacatcttctctgcaaacggcatcaaggtatatctttttgatgaccttcgtcctacgcccgaagtttcatttgccattcgccacttcggctgccagagcggtatcaacattacagccagccacaaccccagagaatacaacggctacaaggcttattgggatgacggtgcgcaggtgctcgctccgcacgatacagccatcatagacgaggtaaataaggtgacggtggccgacatcaagttcaacggcaacaaggacttgattcagattatcggcaaggaagtggataaggtttatctggacatggttcactccatctccatcgaccccgaagtcatccgtcgccagaaagacctcagcattgtgtatactccgcttcatggcgcaggccgcgtgctcattccggactcattgaaggagtggggatttgagaatatcaactgcgtgcccgaacagatggtgaaggacggcaatttcccaacggtggtttctccgaatcccgaaaatgccgaagccctttccatggccattgcgctggccaagaagattgacgctgacatcgtgatggcaagtgacccggatgccgaccgtgtcggtatggcctgcaaggacgataagggcgagtgggtgcttattaatggtaaccagacttgtctcattttcttgtactacatcatcaagaaccgtattgcaatgggcaagatgcagccaaacgacttcatcgtgaagaccatcgtgaccactgaactcatcaaggctgtggcagacaagaacaagattgaaatgcgcgactgctacaccggcttcaagtggattgctcgcgaaatccgtctgagcgaaggcaagcagcagtatatcggtggtggtgaagaaagctatggcttcctggccgaagactttgtccgtgataaagatgcggtttctgcctgctccttgctggccgaaatctgtgcttgggccaaagaccagggtaagacgctctatgacgtattgatggaaatctatgtagaatatggattctcaaaggaaaccaccgtgaatgtggtgaaaccgggtaagagcggtgccgaggaaatcaaggcgatgatggataacttccgtgccaatcctccgaaggaaatcggcggttcggctgtcagtctgattaaggattacaagacgctggaacttactgatgcccagggcaacgtaagcaagctggatatgcccgagacttccaatgtacttcaatatttcactgtagacggcacgaagatttctgtccgtccttccggtacggaaccgaagattaagttctatatcgaggtgaagggcgagatgggttgtccgaaatgctataccagcgccgatgccgaagctgagaagaaagtggaggcagtgcgcaagtcactcggcatttgataggaaagaggaaaaaatgtgtatatagtgttcggagaggcgtaacccgtgagggctgcgcctcttccttttgcttctgtgttgaaagaaaacttaaataaagacttaaacccgatggttgatgaacaaaacgtttgcagggaagttaagtataggcagattgcggttacacaccgattggttgatgtgaatgagagtcgtttcattcgtagttgttcgtttgtgagtgtgtgttttccgcaatctgctttttaaaatttcttccccccctctttttaattctttaatttttaattgttctccatccaccagtctatcagccttcttgcgatactcagttttcgtggaatttcgggcaggttgtctttggaatagaaggcggcagcggtcagctcatcttcctgcagttttatctccccgctttcgtagtcggcaatgaaacccaccatcaatccgctggggtagggccagggctggttgctgaagtaggtgatgttctttaccttcagccccgtttcctcaaaaacttcccgttccacacattcttccagtgtctcgccggcttcgaggaagcctgccaccagtccgtagaaggttcctcggaagttccgggcatgcaccagcaggatttcgtctcctttgcgtatcagtacgatgatggcggtggaaacgggagggtacatctcattgccgcagttgggacacttcttcatgatgggggtctggtgctccatggcggtgccacacacggggcagaagtggctgtgctcgtcccaatagagtatctggaaggcctttcctgcagaacggtactcgtccggcgagatgtagtcgtacgatgcgcgcaggcctatcatgacccattcgtcggtttcggccacgggctgttccaaggcgaatgcacgtacttgcttgccgttgggggggaacacttcgtgtatattacttccggcttccggtgtcagaggaggctctatactgacgggtacgctgtattttatttctcctttgtctgtatatccttttttcagcagcagttggtctttgaagaagacgaaccactgcgtggagggttggggttctgttgatttttccattgtttgttgttttattatttgggggggatgaacacgaaaatacaaaggcatagagattcttttcaaagagataaagcattaatttctatgtctttgtatctctgtgttcgcctcccccctaaatttcgtttgctgtgtctttttcttgtcgtacatagaccgttgaccttcccattccgcggcggcgcaggaacccttgccggatgaagttgtttagttcgtctatggcggcatgtctggttagtccgcttagctggatgtattcgttcttgttgatacatacattctgcttgaggaacagttccagttcggtttttcttgtttcttcggtggtctctactacttttttcgatttcttggtagtggagtgtacacgttccaacgtcattttcttcttgatgttgttgcggaacgtgctgctgatgcgcaggtgtacgttttggaattggacggattcggagcggattttctttttctcgtcgtcggtctcgcgcaagcatttcagtgaagtgctgaagaatccgagttctcccagctccacgatgtttccgttggcaaggaggtcgcacaactcgtcaatgcaggcatccaatgctgcccctatcacattcttgggcagatgttggaaagttgcaatatgttccacaaactccttttgggtataagtccttttcgggcagatacgtgcatggagtgatttcttgtcttctttcccgtcgggcgaaggcgtttcgtaaaggtcgtaatacgcgctcataagatatttatttttgtttatagcgataaacagttctcgtcgcttcggggaattatttttgtcgctaagcagattaattttcttcttcctaaaaactaatcgtccgacaactgttgcattatcgtccaacagttgtttaattatcgtccgacagctgtcggacgaaacagaaatgggtatgggacgattaattcttagtgaacaaaggtataaaatattgtgatacgaagggtagtgtttggggaggaaagttttagtaggcaggaagttttttaaggaaagaaaaagtagtttctttgatggaaaaactcgtttattgaaataaaaaatcccccgttaaggacgagggaacctaatgtcttcacaacggaataatccttattgtgatttgcttcattttagtacgacaaagataagaataaaaatgatatatcctgcaatcttttcaaatgctttttttacatttgtggaaattaactttaaattattgttatgaaaaaaatattggggttggatttggggaccagtagcattggctgggcattagttaatgaggcagaaacgagcgaagagaaatcgtcaataattaagcttggtgtgcgagtaaaccctttaacggtggacgaattgcagaattttgaaaaggggaagagtatcactacaaatgcagataggacagcaggtcgaagtatgcgacgtaatttgcagcgctataaactgcggcgtgaaaatctgattgaggtcttgaaagaatataatttcattaccgatgaaacgatattgtctgaaaatggtaatagaacgacttttgaaacatatcgcttaagagcgaaagctgctgtagaagagatttcattagagcaatttgcacgtgtgttattaatgattaacaagaaacgtggttataaaagcagtcggaaggccaaaggagcagaaaatgggactttaattgacgggatggaagtggccaaaaaaatgtatgatgagggtattacacccggcgaattatgtttgcaacttcttacagcaggaaaaagatatttccctgatttttatcgctcagatttgcaagctgaatttgatagaatttggaattttcagaaacaattttatccagattccttaattgataaagtcaaagacgaagtaagaggaaagaataagtcacagacttgggctatattagcgaagtattttgtatggaaagaagttgaaaatagttggaatgaagaagaagcccaaactagaagagtagaaaaagaatacagacttgtgggaattaaaaggggagtaaagagagaggaattgaaacttgaaaacttccaatggcgagtaaaagcactttccgagaggatgaatcctgaagaacttgcaatcgttttgcaagagataaatgagcagattagtaattcgagtgggtatttaggtgcaattagtgatcgaagcaaggaactatatttcaatagacaaactgttggacagtatcaaatggctgttttggataacaatcctaatataggcttgcggaatatggtgttttataggcaggattatttggatgagtttaatacgatatgggaaaaacaggctgaatttcataaagagttgacggaagatttgaaaaaggaaattcgggatatcgttatcttttatcaacgtcgtttgaaaagtcagaaaggtttgataaatatttgtgagtttgaaaggcggcagatagaggtggaaatagatggtaagaaaaagattaaaactattggtagtcgggttattcctcgttcttcacctctattccaggaatttaagatatggcagactttaaacgatatagaggtgtcggtgcttggtgtgaaaaataaacgtaaaaagcaagatgataattctactacactgctcgattctgccgaaaatattgattctttgaaattgaatgttagccgtcctctggatgctgatgaaaaaagcttacttgctaaagaactttttatccgtgataagctgactaaatcagatgtgctgaaattgctatttaataatcctcagaatctgaatctgaattttaaaaatattgatggaaatagaacaggaagtgccttatatcaggcatttagtaagattcttgaaatatctggtcatgagtctattaatttcaaaaaatcagctgacgaaattgtagaacaagtaaaaacgatattttctgctttgggttggaatacggaagttttgtgttttgattcggaaaaagaattggacaagcaaccttactttaaactttggcatttattgtactcttttgagggtgatagtacgccgaccggagatggaaatctgattcaaaagatagcagatttatgtggttttgaaaaagattatgcttcaattttggcgaatataacttttcaagaagattatggtagtttgagtacaaaaacaattcgtaagatattacctcatctaaaagatggaaatcagtatgatgttgcttgtgaatatgcagggtataaacattcaaaatcctcattaaagaaagaagaaattaagaacaaggtattgaaagataaattagagcttcttcctaagaatagtttgcgtaatccggttgttgagaagatactgaatcagatggtcaatgtgattaatgcgattattactacttatggcaaaccggatgaaatccgtattgaactggctcgcgaattaaagaaaaatgcaaaagagagagaagaactgacgaaatctattgtggatacaacaaaaacgcacgaagggataagagctattctgcaaaatgatttcggaatgtctcatgtaagccgtaatgcaataattcgttataaattgtatgaagagttgaaagataatggttataaaaccttgtattctaatacctatattcccaaagaaaaattgttcagtaaggattttgatattgagcatattattccacaggctcgtttgtttgatgattctttctctaacaaaacattggaagtgaaaagtataaatattgagaaaggaagtaaaactgcttatgattttgtggaggagaaatatggcgaacaaggtttgcaggaatatttaaatcgttgcgaggtactgttcagggataagaaaactaaacttagaaaattgaaaatgcaggagagtgaaatccctgaaggatttattgatagggatttacggaatacacagtacattgcaaagaaagctctttctatgttgaatgaaatttgtcgtcgagtggttgctactactggggcgattactgatgaattgcgtgaagattggcaacttgttgatgttatgaaagaattgaattgggaaaaatataatgtactgggattagtcgaatattttgaagataatgatggaaggttgataggtaggattaaagattggactaagcgtaacgatcaccgccatcatgcaatggatgctttgacagtagcatttactaaagatgtatttatccagtattttaataataagaatgctagtcttaagcctgatacgaatgaagctgcaataagaaataagtattttcaaaatggaaaggctattcctcccatgtctttagatgaatttcgtgctgaggcaaagaagcatttaaatgatacgctaatctctattaagaccaagaataaggtagttacaattaatctcaatagaacaaaaaaagaaaaatggaataaacaaaaagcagcaacaaactccacgagggcaattgcatttggaaactgtttacggtagtcataaacagtatgtggttaaagaggagaaagtgaatgcctcgtttgatgcagctaagatagccactgtaaataaacctgcttatagagatgcattattgaggcgtttgcaagaaaatggcaatgattcgaagaaagcttttactggtaagaattcattggacaagcaacctgtttggttagatgctaagcagaacgagtgtgttccggaaaaggttaaaacagtaatgcttgaaacggtttatacggtacgaaaacctattgatgaaaaattgaatgtagataaagttgtagatgcgagaattcgtaaacttttgcaggatcgcataaaagaatacggtaatgcgaagagtgcatttgccaatctggatgaaaacccgatatggctcaataaagagaaaggtataactataaagcgagtgagtgtttttggtatcagtaaagcgcaatcacttcatgaaaagaaggataaggatggtaattttattttagataaagacagtcggaggattccggttgattttgttaatacaggtaataatcatcatgtcgcaatttatcgtaaaccagttttagacaaaaagggacaggctgtatttgatgaaaatggtgaattgaagtttgaacttgaagaggttgtagtttctttctttgatgcagtgacgcgggtaaatcttagtcaacctattattgataaagattataagagaagtgaaggttggaagtttctttttagtatgaagcaaaacgagtattttgtgttcccaaatgagaagactggctttgaccctaaagaaattgatttgctgaatcctgagaattatgctttaataagtccaaacttgtttagagtgcaaaaaatagcctctaaagattatgtgtttaggcatcatttagaaacagttgttgcagataggaaagaattgcaggagattacctggaaacgaatttcttctctaagtatattgaacagaattattaaagtccgagtcaatcatattggtcaaattgttatgataggggaatattgagatggagaataaattgaaattgtttcaaggcaagagtattcgttccgcctggaatgaagaagaacaacaatggtatttttctattttagatgttgttcaggttttgacagataatgcaatgctaagcaatatacaaagcgaatgtgttcaagagatgaaatgttgaatttgaactggggtacaaattgtaccccagttcaaatgactgctgaagatggtaaaagaaggaaaatccaagcggcaaatataaaaggactttttcgtatcattcagtctattccttctcccaaagcagagctttttaaactgtgatcagcccagattggctatgatcgtgtacaagaaattgagaccccagaattagctcaagagtgaatgaaagaactttatgaacagaaagggtgtctcctcagttaccgtttgaagaaggtgatgaataatattcactaaaattgaagtactatgattaagaaaacactctattttggaaatccaatttatttatctttaaagaatgcacagttagtaataaaactaccggaagtagtgaaaaatgaaactttaacgggaggatttaaacaaaaggcagaagtgacaaaaccaatagaagatattggtgtagttgtattggataataagcaaattacgattacctcaggagtactggaagctctacttgaaaataattgcgctatcataacctgcgatagtaaaagtatgcccgttggcctgatgcttcctttgtatggcaatacaactcagaatgaacgttttcgtcaacaattaggtgcttctcttccattgatgaaacaattgtggcaacaaaccattaagcaaaagatagagaatcaggcagctgtgttgaaaaaatgtgcaggggaagaaataagatgcatgaaagcatgggctgctgatgtgaagagtggggattctgataatctggaagctcgggctgcagcttactattggaaaaacctatttaaaatagatggtttcacgagagatagagagggcattccacctaataatttgttgaattatgggtatgcgatattgcgtgctgttgtggcacgtgggttggtattgagtggacttttgcctacgttaggcattcatcatcataatcgttataatgcgtattgcttggctgatgatataatggaaccttatcgtccgtatgtggatgaactggtttgtgatattatgaaaaaaggaggagattatgggatgttgacaaaggaactgaaaggacagcttttgacgattccgtcgttagatgttattatttcaggtaagcgtagtccgctaatgatagcagtgggacaaacaacagcttctctttataaatgttttaatggagagttgcgtaaaatagcatatccggaaatgtaatggaccgttttagtgaatatcgcattatgtgggtactggtgttatttgatttgcctactgataccaagaaggataagaaggcgtatgcagacttccggaagaacctgcagaaggatggatttactatgtttcagttttccatctacgtacgacattgtgccagcagtgaaaatgcagatgtgcacataaaaagagttaaatctttcttaccggagtttggacaggtgggaattatatgtattacggacaaacaatttggtaatattgagctcttttatgggaaaaaagttcaagatgtgaatacaccggggcaacagttggagttattctaaaagtaaaaatcccacttgttggtgggatttttagtggaaaactgtttgctttttgtgattcaaattgattgtttaaccatttgattattagattataatgaatagtcagctgtttccaatggttcaaagatactaaaactcgctcacatacggatggatttcagaggaataatgcaaagtgcttggacgagaaagggataagtcgttttgttccacattcttccatttgaggtttttgacctgtttttggggagttaggcaaacaaatcgctacttatccgttgccttttcgggattgaaaataggtatgaaatttacttccaaaactgtttttctacccctgttcaccaccgcaagaacgctgttctgtctgttttttgctaatgcaaagttagtcaaaattttccgtatcaggaaaaaatacagtctcagattggaagtcaagggggctttttctatattccgctatatttttcatgccattcatttgctcgctatataataattttgcaaacaaaggaataggttatgaatcaggcaaatgtaaaggtgtcgttctacctgaaaaagagcgaggcggatgccaatggcgaatgtccggtaatggctaagttgaacatcggaaaatactctgaagcggcattcagcgtgaagatgaaagtgccgcaatcccgatggacttcggggcgtgcgtctggcaagagtgtgacggcaaaggaaatcaacaaccggctggatgagatccgtgcggtggcgttgagtatctataacgagcagtctgccgtccgtgacggtgtgaccgctgaggaagtgaaaagcattttgcttggaatggcaagcgggcaggaaacactgttgagctatttcaggcaattcatcaacaactttgaaaagcgagttggagtcaaccgcacagccaaaagtttgcaggcataccgcaatgcctataggcacattgagaagtttctgcaagaaaaatacaggctaacggatattcctttctcggcattggaccgctccttcatcgacaaatacgacctgtaccttcgtaccgaacgcaatctcgctcccggaaccgtcatcaacctgaccgtccaactgaaaaccatcgtgggtgaggctatcgctgacggtatcattaccgtttatccgttcatgggttacgagccggttcgtccgaaagcggtgcagaagtatcttaccgatgaagagctgcaacggcttatgaccactccgctccataggcagacactttaccttgtccgtgacatgttcctgttttcctgcttcaccggcatttcatacagggatatgcgctcgctgacaaaagaaaacctgtcgcttgcggaagacggcacatggtggattaaaagtgcccgccagaagaccaagatagaatttgaaatccccttgttggacttgccgttacagattctgaaaaagtacagtgatgccgtttctgataacaggctgctaccgatgtattgtaattccaacatgaatctctacctgaaagagattgcccggatttgcaacatcaaccgtccgctggtatttcacgtggccaggcacacctacgccacggaaatcaccctttcgcatggggttcctcttgaaaccgtcagcaaaatgctcggacatagccggattgaaaccacacgtatttacgcgaaagtgaccgatgacaagattgattccgacacaaggactttgaaccggaaaatatcggaacgtttttccgtcgtgatttgattacctcttaaaaaaacaagaacatggaaaagaatatagaaaaccagaatatcaagcggcgtagtacatttgccgtattgttctatataaaccgcacgaaagtccgcaaggacggaatgtgccagttattgtgcaaggtaagcatcgatgccgaatgggcacagataggaaccaaagtatccgtcaatccctctatttggaatcccgacaaaggacgcgccgacggacggagtgaaaatgcagttacggtgaaccgcgccatagatgacctgacagacgagataaccggacattacgacaggataaagaacagtctggggttcattacagcggaacttgtcaagaatgcagtcaaaggcatcgggcagaaaccacttaccctgcttgccttgttcagggagcataacgaggagttcaagaagcgtatcgggatagaccgcatacaggaaacatacgactcctacaagcgttcctacaagcacctttccgcttttgttcaggagaagaaaggcgtggaggacgtgacattgagaagccttgaccgtgcgttttatgacgacttcgagttgttcctgcgcacgaaccgcaaccaaaaacccaagaccgtacatgaacacctgtaccgcctgaagaagctgacaatgcgggcggtcagccaggggacattgcgccgtgacccttactgccgcctgcatcccgaactgccaaaaagaaaaagccggcacatgaaattggaggacttgaagacactgatgaccaccccggtggagaagcctcaactgcaattcgtaagggatatgttcattttctcgacatttaccggattggcgtatgcggacttgaaaaaactgtcggtcaatgatgtcacgcaggctgaggacggcacatggtggattcacatccacaggcaaaagacggatacgctttcgtctgtccgcctgttggatattccccttcaaatcatcgagaaatatcgtagccaaagaaccggggacaaggtattcaatgtttacaatcgtggatattttataacattgacacgagagctgggacaggtatatggctttgatttgacctaccatcaggccaggcataatttcgggacccacatcaccctctcgctcggtgtgccgatagagacggtcagccgcatgatgggacacaactccatttccaccacccagctgtatgcccaagtaacggacaccaaagtggacgaggatatgaaacggctaaagtccacaggtttcggaaaacagatacagctttgcgaagaagatttcatcgtcaagaaaaaacggggaagaaagtctgaaatggcataaaataaaaacggagaaatgccctttgtaaaaaggaaatcatttctccgtctcttttagtgaacgatgctatacccatcgttgttcttcccggcaacgcttgtaggaatcctccagtatcttcagaatatccgattccttatacagagtcttgccctgcaccatgtaataaggaaccaccccgaatgtccggtactcctgcaatgtgcgcctgcttacccgcaggactttggagagttcctcgtcagtgaggaagcgctcaccgttaaagagggatttcggcatcttctcaatcacggagagcatcttctccattttttccagcccttgaaacatcacgtcgatccgagggtctttgtcgtccaagaaatgatagctcataatctgctttttattaaagggtgataattcaaatccaacaatctctgtacgtcttcaggcttgtagaacagcttgttcttgatacggctgaaaggcaatatccctttgttgcgatatacctgtagtgtcttcttgttgatgcgaagcacatcgcacacctcctgattatccagccagtttttcaagccgaggtcctcggccggacggcatacccgcgtcatccgttcctcaaaatcacagaaccggacacgcaattcttcaaaagtctgtttgtcaacacatattatttccataatccttgcttcattttaattaaacatttggctgatgtctgaacctcgccggcaatgacttgcccttttggttgaggaacgcctccacttcggatgccttgtagtaggttctcccgtcaatcatgtaataggtcacgagcttcttctggcggtaacgcgccagcgtgcgtttggtgatgccgagcagccggcacaggtcgtagttgtccaagagcgtgtcgccgtccaggcattccttcagcttgttcatacgctccaatgcccgctctatcctgtcgaaccgttccatgatttgggcgaacatctcgctgtttatctgtaacatgagtaatctgttttaagtgtaacttatcgtttgcttacaccttgttgcgcaacaggttatatcatattataaggccaacagcgtaccaatgacaccgatagacaccaagaggaactgatataacattgtatatcagtgaaataaaaatctgaggctgtaaaaatgaataaatggcgaatcttgcaaattgcaagatttccttgcaggatgcaatggactatcgcgaggatttgcgataaatgagacggacaatcccgtttttgaaagcaactgtcctgtaaagtttccaacgattgaccggaagtcgatgcaggcagtccgtaccgttgcctgttgtcagaggaagaatgtagatgatgatttcgtcaatgaggtggtagatggaaagcccgtgtagcaagtcaaggctctttgggtcggatatttctgaggtaaaggtaaaggagtccggtttctcgtccttttcacaaatcaagtccagcatgggatagccgggaaacagcgtgaaggtactcctctcgtgccagaacgggaaaccttggctgtccgtcttcacccattgcaacaactcttcattcgggtcgggaagataaccgtccaatgtcactgccgttatgatttgtattcttgccatacctgtccgtctaaaaaaagaagcgtggtagccacgcactcagacagaggctctggtaaagcctaaaggagaacacgcaacaccacgctatgacagagcatagcataagcattacgcaatcattctcctttaacgtcaatttaccagatttctgtccgagaagcttgcgctcttatgttatataatcagcagaggggttttccctccaccggttttcttctatgtttcagaccggcaaggctataccctgccaaatcttttgcaaatttacaaaatttcagtcggattgaaaaatcatttcaatatattctgtgtcaacactgttgccggaaatagatagaatatcggggattatcttatcccgtatttcttcatcttccggtacagtgttgaagagtttacattcaacaatcgtgcggtctgttcacgatgcccgttgcacgcttgaagggcatttgcaatggcttccctctcgctgttttcgtctttcaaaggcaatatgtccggagttttctccgtaatccgaatatcagtctgactgtctgcgttcaagtccggcaactccaatacaggggtttccgtaagcaacaccgcccgtttgatccggttctgcaattccctgacattgcccggccaacgataagaacgaagtcggtatatggcatcttttgaaaagccttttgtctctttcttaagttctttggaaaaccgttcacggaaaaattccgccaaaggcaaaatgtcatcagcacactcggccaaagatggcatcctgatttccatctctgccagacggtggtacaggtcttcccggaatcgtccttccttgatggcccgttccagattttcattcgttgccgccacaatccgcacgtctgccatccgctccctgtcgctgccgataggggtataggtattctcctgcaacactctaaggagcatggactgtatgtcaataggcatcgtgccgatttcatccaggaagagcgtaccgccttttgccatgtcgaaatatccgttctttgccgtatccgcaccggtgaaggcgcctttctcgtgtccgaacaggagggatgccgcaagttcgcgtggcaacgctccgcaattgaccgctacaaacttgccgtcacgtccgctgttcgcgtgaatgccctgtgccacggactccttgccggtaccgttggcaccgagtatcagcaccgacatatccgacggggctactatcctcgcgtatctctccacctcaagtattttagggcaggtacgtctgaacaggtctttcggtttcgtgcggacagtcgcgagcggacggaatatctcttccgccagttcaagcaggtgttcccggtgtaccggcttgggcagatagtcttttgcccccaacttgatggcgcgtaccgcatccggtatagacccgtattccgttgtcactatgaatggaatgtctttcttctcttttgtgagccactctaaaagcgatattccgtcaccttcaggcaagcgcacatcggacaatatgaagtcgaaccgatgcttgcgtatcaatgcacgtgcggccggttcacgcatggcggtcattacatcgtaccccgcctgttcaagccagtctttctggcgttgtgacaaacttatattgtcttcaactatcagtaccttctgtttcatcgctcattttctttatttccttttcagcttctgttataagtccggagatgtgtcctatcagcagcttcacctgttcattgacggtattcatatcgcatgcagaatcgtttaacgtggtgcggagttttaccagtggagcatcggcccgtaacaactccaacgagggctttatctcgtgggctatgtcatggagcttttcaatgtcccctgtctttattgccgattgcaagtctgccatattttgttcggactggataatgaaagttcttagcagttctcttttatcaagcacatctgccgtgaacgtggcaaaatccggtgtatgtgactcttccacatcgcgtgacaccacagaagagaccatatccaacagttctctcatggaaaacggcttgtggatggagtccgtgaatccgccctttatgaatgcctctttttctccttctcctcgtgcagtcatggctactatcggaattgtgtgtgaatttccgatgctggatttgcgaagcaatgccagaatttcaaaaccgttggtttccggcatctgtatgtcgcttagcagcaagtcgtaatcctgcctgcgcatctcattgaccagttctttggcattggaacaggtggtacacgatactccgttgcgttcaagcatttccttggctatttccagttgtaatgtgtcattgtctataacaagtacgcgctgtggcaatggcagacggtcttgcggaactgccgacgcttcactattgattttctcattggaaaccgctaacggcagggatacacgaaatgtgctgccatgcccgattttactttccacatcaatgctgcctcctaaaagtttgaccaatccttttgtgatgggcaagcccaa

SEQ ID NO: 2288 - DNA, 23219 bp, synthetic construct
  source 1..23219: mol_type = other DNA
  misc_feature 1..23219: note = Synthetic
tcagaaagtcttcgtccgatagaaactgctccacgaacagtcacatcaaagcttgggaattcatctcttgcaattttacttgccgaataaacagaagctccggcttccgataccacaaaaacctgtaaaggtttatcaaaagcaatttttttaatgaaaaattcagtctcacggcttgcagttccgtttccaatagaaattgcctgaatattataagcatttaccatcgaacgtatttttttcattgccattccactttcgttttgtggagcgtgaggatagattgtttcgttgtgcagtaaatctcctttttcatccaaacaaactactttacagccgcttttgaaacccggatcgattgctaatattcttttttctcctaaaggtggagccaataaaagctgactgagattctcagaaaatatttcaatggcttttttatcggctttttcttttgcttcttgaagcgtttcgttggaaattgctggctcgagaagtcttttataagaatctttgacagctaaagcaatttgctctgcgctgtcatttttagattttataatcgcattctcaataaaatcgagtgcttcatctttgtcaattccgatgtttattttcacaaagccttcagcttctgccctaagcattgctaaaagtctgtgagaaggagttcggttaaggctttcttcccattcaaaatactgcgaaaatttttgagccacttcctcatcttttttagcttttaccacttttgacccgacaacagctttgcgttgaaaaagacgacgcaaatttttacgaacgtacatattttcgttaatccattctgccataatatctcttgcgccttgtaaagcttcttcctcagaagagacctgatcattcaaatattttgaagctaaaaactgaatatcctgagctttttggctcataatgattttggctaaaggttcgagacctttctctttggcggcatcagctttggtttttctgcgttttttgaaaggtaaatacaagtcttccaattcctgaatatcaaaactttcttcaatccttgtttttaattctggagataaggcatcttgttcttcaatagatcttaaaatactttctttacgttttactaggtcttcaaactgtttatttagttttgagatttgctctatttgaatttcatctaaatttcctgtagcatcttttcgataacgagaaataaatggaatggtgcagtcttcagataataattttaaagtagcattaatgcttttatcggatatgttaagtgttttatgtataaattctgttacagtcatgccgtttttttagaatggctaaaatactgacttttttagaggaatgaaatatatgtcattcgcaatttaaagcttataaaatttattcatcaaatctatttaaggaatctgacaatgaggtacaaacattaatttatttaaaaagataaataatctacaattttagtggattatataattgttttagataattatcttgtgatataaataaaaatactatatttgtgcaccatcacaaaataatatgcctatgaggaaattttctacttcttctattccttttgtatttacaaatctagatgtttttctaatccaaaaaaacatctcaattactaatccatattctatattatgaacagatttttaacaattctggggattttgctgtgctttcagctcaaagtctccgctcagtgtacggcggtccccgtaccttttttacaatcttttagcacgggagtattacctccctgctggacaagtcaaaaccccacaagtacatcgacaagcttatatgttaaatggagatttaacacctctgctggttatggtgcaactggaaatggagggaaacctgcaggaacttttgcctgggttgacgccacttcaccgtatgataacgagcatactgttgaacttatcagtccacaaattaatctgacaggattaaccaatccttatgtgaaatttgaatggtttaaaaaccatcttacatcagctacaggaactttacctccttatgagaacaataaaatgaaggtggaagtaaataacggaagcggatgggttgaaatttggtctgatacgagcaatgctgcagaatggagaacagtaggtgttcctcttgctacaagttatgtagggacaaccattcaacttaagtttactgttgataaggatgttgctaacaacggatatttttatgatgacgtacttttggatgaagttcaggtaatacaggcgccaacgtgttttgaacctgttattgcaccaacaacaaacattactcctaattctgccaccttgaattggacagcaccattagctccggctcctgcacctgcaggtggatatgagtattattacagtacttcaaatacacctcctactactgcaacagtaggaagcattgttcccggaatttcagctaatatcactcctttggtttccggaactacttattattggtgggttcgctcggtatgtagcgcttcagataaatctttatgggtagaaggagaagcttttactcctgggcaaattggtggaggaactgcaacgcatgcatttttaccggcatattcttgctcaggattcaattactctcaacaaatttatacggcaacagaaattggaacagcagttggaaccaataatatgatcacttctgtgaaattttttgtgtctacgactgcagctactcaggcaaactacaatcaatgggtagtttatatgggaaatacaactcaaactgattttcctacaactacaagttggattcctgccggaaatatgactcaggtttacaccggaacattaccagcaatgacagctggaacatgggttgaaattcctctagcaacaccatttctttgggatggaacgagtaatgtagtggttgctgttgatgaaaatagtacaggaacatcttgtactgccaactggggaagttattctgcaggaacaaatagaggaatgctttattataacgcaacaacaaatccaaacccgacaaatccgcctacggcaacaagcagatatgctgttttgccaagacttcagcttaccgctactgttttaccttcatgtacaaatgtaccgccattaaatattgcagtaagtaatattacagctacttctgcttcagtgtcttggacggcaactcagaacgcaacttatgttgtaagatacagagttttgccttctggagcatggcagacaattaatgttactacaccatttaccaataatgtattgctttcaggacttattgagcaaactcagtatgaagttgagattgctacaatttgtggaactcagggagctttctctgcgccaatttctttcagcactccggctctcacatactgtagctcgggaactgcaacagtaaccaatggctatattaataatgttacaatgataggaaccaatgttcctgctaccactaataactccggatcaagtacttatacagattattctattgacccttcaaagaccattactttattaaggaattcgactaacaatacattgtcggtaggaagaactattgcttcgagtacttatactacgaatgcctggatagattttaatggcgatggagttttcaataataaccctgtaggaactgcgggaggggaaagagtcatgaatttaggatattctaatactactcctgtaactgccaattttgatgtacctgcgaatgcctatattggaaacagtaaaatcaaaatgcgtgttattgtctatttcaatactccgacagacccttgtatgaatcttacaagtaatggagaagtagaagattatcagattaaatttattgatcttcaaccatgtactactgcacctccaacgagtattgctgtaggaaatcttactcatagttctgcatatgtatcttggatgccaacagcgaatgcgacttatgtgatcagatggagacaaggaactacgggagcgtggttaccaagtgcagcaggattaacgcttcctgcaggtcagagttttcatacaattaccggtttgactgagcaaactgcttatcaggtacaaattgctacaatatgtggtggaaaccaaggagctttttcatcattgctaaattttaccactccacctgttacttactgtaacatgaatggaaccggaacgaatgattacattgctaatgtaaaagtgacgcctataaattttccaattatggaaaatatttcacttcaaaccagttatacgagttatactactcctgcaacattaattaatctggaaataggttcagtaggtaatcaaatttcagtatcaaaagcttgggtgggaactacctatggagactcagtacatgcttggatcgactgggatcgagacgggatatttacagacagtgaaaaaataatgaccactccttccaatactaccactccggttaccgctaccttcaatgttcctgcaacgggagtttatacaggtacaaataccacgacaatgagagttgttttgaagcgaggaagcacaccgttgatgtgtcaagatgcagttaacggggaagtggaagactacgctgtaagattaaaaccatgtaacaatgctactccgggagcaccagcatttactacaataactcataattcggttattgttaactggactcctgcagcaaataacaatgcatttgttttagaatacagaccggtaaccaatccagcttctgcatggacgacgatgaatcttaccgttttaggaggaaatccaccggtgagtattactggattaacaccagcaacaatgtatgaagttagggttgctgcattatgtggaagtggtggagtaggtgcttttactcctttacaagcatttacgacaagatgcgaccctacaccaccgaacgctgtgatatctaatattacatcaaattcggcaatggtaacatggaatccgcttgttccaaatgcaacttatgttttaagatggagagaggtaggaacaacagtatggaatacaccaacattgcttccccctcctataaatacttacgtaataccaaatcttgagtcttataaaacgtatgaggtgcaggtagcaagtatttgtaatggggaaacaaatactaatccatggtcaattacacaaatatttaccactgtaagagtgtgtgaagtacctcctccaggatttacgattactcaattaactcctacaactgcagaagtgatttgggatgcttatgcaggtaccggagctaccaataattatacattaaaatacagaaaagttggaataccaagttggacgactattaatgtaagtaataacacttatataataacaggattattagaactaaccaaatacgaaatgcagattgcaaatgtttgtagtggaggagaagggaattatatacctccttactattttacaacacctacagtgatttattgccaaatgcattcaactaattttgcttctgaatatatttcaaaagttactgctacaccgaatggtaagcctgaaatgattaatgtttcaacaggagctgcttattctgattttacaggagattcaactaaatttattgaattgattcaggggtcaacaggaaatcaaattactattgataaaactcaaggagcagattctggagtagcagtatggattgacttcgacagaaacggagaatttgaccttgatgaaagaattcttgcagacggagctaattcaaattctactgtaagtgctacattcaatgtaccatctgatgcatttattagcatgaccaattctaaatatgttgtgatgagagtagcgatggctaaaggagcaattccagttaactgtattagtttcaatgatggggaagtagaagattatacagtgagaatatcaaaattacctattgtaaattctgttaaccagacagatattttgatttatccaaatcctgttaagtcagtcttgaatgttaaaaatattagcgagaaagcaaactataaaatttatagtgcagctggaagactagtatctagcggattaatccttaacaataaaattgacgtgagtgcacttcttagtggagcctatgttattgatattgaagataagaaaggaaatgcacagaaaaaattcattaaagaagattaactgttttaatttccatctataaaaaataagctctcaattctgagagcttattttgttttattaaagatataattgataggatttttattttaaaacttcattgtaatacagtaaatcattgttttcatcaaaaccaatgatcatcacgcggaaattttttgcatcatcattattataccattgtacaatagtaggttctccggatttactttctaaataaggattccaatataaaatacttcttttgtcctctattgtagtttttaaattaatatctttatatatgtcattattgaatgtttcttctttgtgatagcctgtcagtttaatctcgttacgtactgagggttttgatgtatctatgtttcttggcatgtttccacgacgagtatataccaatattgcaccaactgcgccaccacttacacctctaaagtcattgcggataaatttaatcattgccacatctgacggtgatataccacctatatctgatggttgcacttgaaattcatctatataaagtggaattgaggatcctcgatacattatttttggattagcttctcctaaatggaatgtaactccaggagctcttccttgtaaccactgtaatatatttccagagttggagatcatattattctcattaacaaaatcaaaaacagtttcactcattcctctaaacataggactgctaagttcgttatttagtttttgagtaagactttttttttcggcaattattttcacttcttctatttcagtaaattttccttttaaaattttttccgattttgatgaagcaattgccttttcgacatgcaaagcagttttttcttctttataccgaggttcaagtagatagtcagttttaggaagttcttttctcaatggaagaaatgaaaattcaggttgaatataaagttgtaccgagtttttatctacttttcctttattcagttgataagaaagatccattttatcttcaaaaaataaattatttatagtgaaaaaaccattttgatcagttttgatcaaattgaatttcaaattgttatctccggttttgaaaagtaaattaatttcttcttctgaggcaggttgtccttgttttatagctttgcctttataagaaagataatttgtgggtttatgagatattataggatatttcccagataataaagatttccaactgaaccgattccaatgctcagatatgagaagagcatctaaagcatccttattttttctttcatcaaaatattgtgcaggtttatatattttagaagtaatatcacctgtaagatataggttgcttaagaggctattttcatcttctgtactttcgttattgacatcagaaatagcaacggtgtaatttgtaattttagaattctgattaattttaaatgtgttgctttcttttggattgtaatttaatgaaatgtcctttaatattattttttttgaatcttgagggtgtggatctacaaagcaaagtcgctctgcaacaattttgttattttcatccaaaacggtaaaatataaaacaccattaatgcttttatcatttggtaaagcatatattttgttagataaagcactaatgttagcttcgaaaacaaggttgttatttacagtgcctagaactctatatttcgatttttgagaaatgtttttagattttagcctaaatctaatattcccattattattttctacctcaaaatgcactccgcttactgaggctttaggtatgtttatcgttttttttacaccattatggtcctttactgtcagcaaatagcttttccccgtttctggtatgaaagtaaaagaacctatattttgatcaaaaccattaaagctaataattttattttcgggattttgcagctcagttacaaaaccactccatttagttggagtttctccatctgaatttaaccttactgcaaatttggtactgattccatctataatagtgctaccttccgggaataaggacacagaccattctgcattttctttttttataagtttttcagtcgacaaaagattatatactgttatgggttgtattttattatagtcatcactaaagttacccatccaagttgtatatgctctaatgtaataaatgttctctttaagatcttctggtaaagaaatgcttccgcttccttctccatttaaaagtgggaatatttttttacttaagattttcttattttgatcgtaaagctctataaaaatagttgtagaaatttttgaaggactataaccattaaatacaaatgatttaaaccacagattttcgcctgcaacataattttttttacttaaaagaagatgtattttttcttgaggataattttcttcaaactttttaagcgcttcttctgctctattctgggaaaaataaaacggagctacaattagtgataatgcaataagtggtttttgggtgaaacaaattttcattatatatttatgttttaatatatttcaaaaatacattttttcttttatcagagaaataattgagagcttttttatggaatcaatattagaaatataaaagaggtaagcttgtatgtctaaaatatttgttgatttgggaattcacagaatatttagatataaaaaataccccgcagataggcgaggcgctaaatgttttcacaacggaataatccttattgtgaattgctttcggatacaaatctaaaaataatatttttaatcagtttacggttttccatatttttatgaattaaattcttattaattttagaaaattcatttaaactaaaagctatggcaaaaaatatacttggattagacttaggagtttcatcaattggatgggcttatgttcaggaggatagtaagaattcagcggataataaaatcatcaaattaggtgttcgtgtaaatcctttgacggttgatgaacaaattaattttgaaaaaggaaagcctattacgactaatgccagtagaactttagcgagaagtgccagaagaaatcttcaaagattcaagttgagaagagctaatctgattgatgtcttattgaaaaacaatattataaaagaaaccgacttattaacagaagttgggaaaaattcaacattccaaacccaggaaataagagcaatatcagctaaagaaagaattgatttgtttgagtttgctagagttttacttcttatcaataaaaaaagaggttataaaagtagtagaaaagccaaaaatgaagatgaaggtcagattatcgacggaatgactgttgccaaaaaattatacgaagaaaatagtactcctggagaatattcttaccaacttttgcaggaaggtaagaaacaattaccagatttttatcgttcagatttacaatctgagtttgataaggtttggaactttcaaaaacaatttcatccggaaattttcactaatgaactttataaaactttagaaggcaaaaacaaaaatgcgacttggaagattttagaactgccattttctcttgtaggtatcaagcaaacaggaacaatgcaggaaaaaaagattgagaaatatctttggagaagcgaagctgtaaaaaaacaattaaattttgaaattttggctattgtttttcaggaaataaacagcaatctgaataattcaagtggttatttgggtgcaataagtgacagacgcaaagaattgtatttcaacaaccaaacggttggcgaatacctttatcaacaacttaaaaaaatcctcatacaaagcttaaaaatcaggttttctacagacaggattatttggatgagtttgaaaaaatatgggaaactcaatctaaatatcatcagaaattaacgaaagaattaaaagaagaaatccgtgatattgttattttttatcaaaggaaactcaaatctcaaaagggattaatcagcatttgtgagtttgaaaaccgagaaattgaaatcaatgatatttcgacaggctcaataggaaaaaacaaaaagaaaacggttggtttaaaagtagcgccgaaatcttcacctttgtttcaggaatttaaaatttggcaggttctgaataatttaaagtttcaaaatttagaaacaaaagaaattttcccaatagatttagagtttaaacaatcgatttttgatgaagttaatatcaaagggaaactttctgcaaaagatgttttagatattgtgggttattcaggtaaagaatggaaaaccaattttaaggatattgaaggaaataataccaatgagaatctatacaatgctttcctcaaaattatagctaatgatgggaaagagtttccaaaagaatttaaactgactattgatgatgatattaaaatatctaaaatttcttcttctgcaaaagttataaaagagtttgttaaagaaaagctatcagaattagaaattaatatttctgttttggattttaaccccgaactggatgggagcgcttttgaaaagcaaagttcttatcagttttggcatttattgtattcttacgaaggtgatgattccccttctggagatgataaattgtatgagcttttagagaaaaaatttggtttcaaaaaagaacattctaaagtattggcagaaattggtttttcgcaggattatggaagtttgagttctaaggcgatgcgaaagatttatccttatataaaagaacataaatacagcgacgcttgtaattatgcaggatataatcactctaaaaattcattaactaaagaacaactggaaaacagggttttgaaagagcaattagacattcttccaaaaaactcattgcgaaatcctgtggttgaaaagattttaaatcaaatgataaatcttgtcaatgaagtttcaaaagaatatggaagacctgatgaaatcagaattgaacttgcacgcgagcttaaaaataatgcggaagaacgagctaatatgacttctgaaattagtaaagctactttgcttcatcaaaaatatgtcgaggttttacaaagagaatttggaataagatcgccttcgagaaatgaccttattcgatacaaattgtttctggaattggcaaataatggttttaaagatttatacactgatactaaaattgaaagagaaaatatattcacagaaaaatatgatattgaccatattattccgcaatccagattctttgatgatagtttttcaaataaagttttagttccaagaggttctaatcttaaaaaaggaaattttacggcttttgattatcttgaaattgaagggaaagaaaaattagaaaaattcctcaatcttatcaaagaactttatgataaaggagtaattacaaaagctaaatatgaaaagcttcagaaaagaggtgttgatattggagatggatttattgaaagagatttgcgcaacacacaatacattgccaaaaaagctaaagaaatcctttttgaaataacaaattcagtagtttctacaacaggaagaattacagataaactccgcgaagattggaatcttgtgaatacgatgaaagaacttaatctggagaaatacagaaagttaggtttaacggaaacgattattaattctaaaggagaagagaaacaaagaattgtagattggactaaaagaaatgaccatcgtcatcacgcaatggatgctcttactgtagcttttacaacgcataatcatattcagtatttgaattatttaaatgctagaaaagatgagaatcataaacaacatcaagttatttcgaacattgaaaatctaataaccaatgtgtttgaaaagaaaaatggttctaagcaaagaatatttatagaacctattaaaaatttaaggattgatgcaaaaaagcatttggatgaaattttagtttctcataaagcgaaaaacaaagttggaactaaaaataaaaacaaaacgaaatctaaaaacggtgaaaaaattaaagtagaattaactccaagagggcagcttcataaagaaaccatttatggaagttcaaaatttcttaaaaccaaagaagaaaaggtatcaggaaagtttgatatggaaaccataaataaagttcagaacgaaatgtttcgaaatgctttattgggaagattgcaagaatttggaggtgattttaaaaaagcatttacaggaaaaaatatagtttcaaaaaatcctatatatcttaatgatgaaaaaacagaattgttacctgaaacggtcactttagcttggtatgaaacaggttatacaatcagaaaagttgtcaatccggataattttaaagattataaaaatattgaaaaggttactgatagaggtgtacgtgatattttaaccgaaaggttgaaacaatttaatggaaattctaaagaagcattttctgatttagaaaaaaatcccatttggcttaataaatctaaagggattactgtgaaaacagttacaattacaggaattagtaatgctgaagctttgcataataaaaaagaccatttaggaaatgagattttagatgaagatggaaatagaatagcagttgattttgtgagtacaggaaataatcatcatgttgctatttatgaagatacatatggaaacttgcaggaaagaatagtgagcttttatgaagcagtcgagagagtgaatcaaggactttcaattattgataaagattataaccaaggtttaggatggaagtttctttttaccatgaaacaaaatgaaatgtttctgtttccatcagaagatttcaacccaaaagaaattgatttgtttgatgataagaatttgagtttgatttctaaaaatttatttagagtgcagaagtttggagagctttcaaagtcaggtttttggtttagacatcatttggaaacatctgttgaagtaaaaaaagaacttagaaattattcatatttagatttttacagcaaagattttatgaagactattgttaaagtacgattgaatcatctaggaagaatagttcaaataggagaatattaaaatttttgtaatatgattacccgctccatctacatcggaaatcccacctatctgaaactgaaagacaatcagatgaaaatcgtatgcccggaaacaaaaacggagaaagggagtattcctgtggaagatttgggcttgttgatgttagaccattttcaaattactatttcgcatcagctcattcagaaaatgatgggcaataacgtggttgttgtgagttgcgacgcgcagcatttgccacatgggattatgttgccactctatggacataccgaacattcagaccgaataaaagaccagttggaagccagcgaaccgctaaaaaaacaactttggaaacatactatcgaatgtaaaatcgaaaatcagaaagaagttttatggcgtttgggaaattattacgagccgatgcttgagtatcataaaaatgtgaaaagtggtgacattaccaatatggaaggcgttgcagctcaacattattggaaacatctcatcagtcttgatttcctcagacagcgttttggagactcgcccaatcagtttttcaacttcggatattcggtgcttagaagcattgtggcgcgtgcaatcgtagaaacgggtttgcttcctgtccttggaattttccacaaaaacaaatacaatccttactgtctcgccgatgatttaatggaaccttatcgcccgtttgtagaccaattggttatgatttggcttaccaaaaatcctgattcagaagagttgactaaagaattcaaatcacacattctccagattgccaccaaagatgtgaaaatagaccaagtcacaagacccttattaatcgctgtgaaaatgacgacttcttcactctacaaatgttatacaggcgaaaaacgtcagatttcttatcccgaattcatatgaaaacgcagattatttgggcgtgccccattgtttttccaatcgctcaatctcatcggtttcaaaaaccgttgaggtttttcctggctcaaaaacaaagggtcggtctccgcttccaatcttttcccgccaccgcattttcttcgctagaaaaggatttccagctgcgccctcacgcaaagcaccgttcccgaaacaccattttcacccatgaaacaagatcgttttaacgcttaccgtattatgtgggttttagttttatacgatttgccaaccgagaccaaagccaatatgaaagacgccaaccgctttcggaaaagtttgctggatgatggttttacgctatttcaattttcaatgtacgttcgtcattgtccaagtcgagaaaacgcggaggttcatattaaaagagtaaagtttatgctcccaaaagcaggaaaagtggccattatgtgcattaccgataagcaatttggcgatatagaaatattttttgccagaaacaaagaagaaccgccaccaactttccaacaattagaactgttttaaaattttaggcctttcgcaaatgaagtattttatatatattttaatcgcgatagtcgttatcttttggttatggccaatttttcttttggctttggtttatcttatgactttcataaatgaaatatcaagcttaggtaatagtgtaagtcttgtgattgctgtaataattattttagttttaataatgggatttttaagaatcaaaaaatgacagaaattaattttatatcccatccaaaaatgcaaaatttgaaattctaaaaataaataaaacctactgataaacagtaggtttagcttttgaggttgtgttatatctcaaagatactcaaaaatgaaagcaattcacaacagatttgctttagagctttttcaatttctggttgtgttatatctcaaagatactcaaaaatgaaagcaattcacaacgggcgcgtcggcgctaaaaaattctaacttgttgtgttatatctcaaagatactcaaaaatgaaagcaattcacaactctaacattgcttttaatgttttgtattgcgttgtgttatatctcaaagatactcaaaaatgaaagtaattcacaactaactgaaggtttatataattccccaggatgttgtgttatatctcaaagatactcaaaaatgaaagcaattcacaacaaaatattcaagtgcggctttttttgtaaggttgtgttatatctcaaagatactcaaaaatgaaagcaattcacaacacattcttcttcaaagctttttttgattcggttgtgttatatctcaaagatactcaaaaatgaaagcaattcacaacataaaacacttttgaacgctgctctgatcggttgtgttatatctcaaagatactcaaaaatgaaagcaattcacaacttctttggtagaaggtaatgtcctggatttgttgtgttatatctcaaagatactcaaaaatgaaagcaattcacaactactgcagtaaaagagatgccgagatccacgttgtgttatatctcaaagatactcaaaaatgaaagcaattcacaactatttcaacagaataatatttatctgaaacgttgtgttatatctcaaagatactcaaaaatgaaagcaattcacaacctttttcattgacaatccagtgattgccaatctcaaagatactcaaaaatgaaagcaattcacaaccgattgcattaatatgatcctcgtactctagttgtgttatatctcaaagatactcaaaaatgaaagcaattcacaactatctaactctaaccgtttgatctttactggttgtgttatatctcaaagatactcaaaaatgaaagcaattcacaacttccagggctgccaaatgcttcaagccatagttgtgttatatctcaaagatactcaaaaatgaaagcaattcacaacattgcccaaacgtcgtcgtccaattgttccgttgtgttatatctcaaagatactcaaaaatgaaagcaattcacaactatcgatctcccagggcttagttccccaacgttgtgttatatctcaaagatactcaaaaatgaaagcaattcacaaccctgaaggatttaaaaacaattcctttactgttgtgttatatctcaaagatactcaaaaatgaaagcaattcacaacaaactctttcgcaattctttcaaaagtaaagttgtgttatatctcaaagatactcaaaaatgaaagcaattcacaactaaatcactgaaattagttcccatccattcgttgtgttatatctcaaagatactcaaaaatgaaagcaattcacaactaagtataaattgctccagctttccatttagttgtgttatatctcaaagatactcaaaaatgaaagcaattcacaactcccagatctacaacattcattgttctgtagttgtgttatatctcaaagatactcaaaaatgaaagcaattcacaactataaacgttctcatatactaatcaattttgttgtgttatatctcaaagatactcaaaaatgaaagcaattcacaactacttgagaatgcaggcgtttttatttctggttgtgttatatctcaaagatactcaaaaatgaaagcaattcacaactaatgtaacgtctcggatatgcccaaagttgttgtgttatatctcaaagatactcaaaaatgaaagcaattcacaacaagaactatattcaatattacttaaaataagttgtgttatatctcaaagatactcaaaaatgaaagcaattcacaactgcaagcaactgttgtttgatggtttgttcgttgtgttatatctcaaagatactcaaaaatgaaagcaattcacaacgttagggcggtttttaaaattattataaaagttgtgttatatctcaaagatactcaaaaatgaaagcaattcacaacaggtgcgaatttgtttgtcattttcaaagcgttgtgttatatctcaaagatactcaaaaatgaaagcaattcacaacgttcaacaaagcgtcgtttatcatgtccgggttgtgttatatctcaaagatactcaaaaatgaaagcaattcacaacaacctgctccttttcatttaaaatcgactagttgtgttatatctcaaagatactcaaaaatgaaagcaattcacaacgaagatctcattttcatccagtataggatcgttgtgttatatctcaaagatactcaaaaatgaaagcaattcacaacaccttgagtaacttcttctacagaaattgtgttgtgttatatctcaaagatactcaaaaatgaaagcaattcacaacatgtgtcagcttatgaaaagatatcgttaggttgtgttatatctcaaagatactcaaaaatgaaagcaattcacaactttgagccttgtccattcccaatgtgatggttgtgttatatctcaaagatactcaaaaatgaaagcaattcacaactattgaactgatgcatccaagatgtttcaagttgtgttatatctcaaagatactcaaaaatgaaagcaattcacaacgcgtaaaataaatgagaacaaaatttgcacgttgtgttatatctcaaagatactcaaaaatgaaagcaattcacaactcaccaactttgatcaaatttaaagtaccggttgtgttatatctcaaagatactcaaaaatgaaagcaattcacaacgaacaatgcaacctgttcctgaaagaacaagttgtgttatatctcaaagatactcaaaaatgaaagcaattcacaaccaaaatcgaaaacaggaatgaaaaagttctgttgtgttatatctcaaagatactcaaaaatgaaagcaattcacaacatacggcaatgccatattttcgaaaagcatgttgtgttatatctcaaagatactcaaaaatgaaagcaattcacaaccggcaggtgcaattattgttaataatttcggttgtgttatatctcaaagatactcaaaaatgaaagcaattcacaacaataaagataatttcatttataaaaaatatgttgtgttatatctcaaagatactcaaaaatgaaagcaattcacaacttgttcctcaatcaaccattcccctgcgatgttgtgttatatctcaaagatactcaaaaatgaaagcaattcacaactgtattcattttatttatttattgaagaaagttgtgttatatctcaaagatactcaaaaatgaaagcaattcacaaccattagtaattaccggtgacgaaggaaaaagttgtgttatatctcaaagatactcaaaaatgaaagcaattcacaacccacaaacgctgttgggcatttaaaagtttgttgtgttatatctcaaagatactcaaaaatgaaagcaattcacaacaagaaagtccattcacaacaatagaattatgttgtgttatatctcaaagatactcaaaaatgaaagcaattcacaaccttgatagattctttgctcatggttgtgccgttgtgttatatctcaaagatactcaaaaatgaagactataagcatatcaaagttttttctccgaatatttaagagatcagtttaaaaacccagaagtattgattcttacgcagtattcaattccaagatagagtgggttgccgtgtttctcagaccagaagccatctagtatatttttattgatgcagcggtaaacagcaacacctttataaatcatttcatcttcactttcgtaattaaagttgatgaccaaaatttcattcttataaaaacctgttccattttgaatatggtcatcaattatccatttagcaataattctgttgttttcgtctagagatagggtgagaattccctggtaggtaatttcattgctttctacctgattgcttccttgaatagaatagcttcctatcaaatcgtgtattgtcattaattttgtttttgagaattacaaaattagaaaaacctttgcaatctaaaggaaatagaatttcttgtacgaattcatgtatctttaacaaacattataaaccaatgattttttatatactgatttttattaatcttttgactttttttgtgttttttgcagataaacgaaaagcaataaagcatcaaagaagaatttctgaaaataggctccttatgctgagcttttttggaggcagtttgggagctggtataggaatgctgattttcaggcataagatttctaaaaaaatctttcttgtaaagttttttggaatacttgttcttcaaatcatattggtagttttttatcaaaagtttaaacaattttacttttaaaataaaaaaattcccaaaaataatttcgggaactgtaagttaaaattttagatacttaaaaataattaaggcaaaagcttttcgtaataaacaggagtgtatttttcagcatcaaatcccataatcagaaaacggaatttttttgcagtatcattattataaaaatcaacctttgcaggtgtatctgaatctatttccatattgggattccagtagagtacaggtctgtagtcactgcttatcttagacaattcagaatttccgtaatcagaatcagggtattcttcagattgattataaccttccataacaaaaaagttaagattcaccatttctgaaagtgtatttgctttggttacaggctttgtatctcctcttttagtatagataagtacaccaccactaccaccgccactcataccaattgcaccgtctttaataatttttaccatagcaatattatctgaagataagccagtaagggtgctagcatcagttagcatttcatccagataaacattcgcttttgcttgacggatgtatggagtaggaattccattttcgtaattaatagttaatccggcagcgcgaccttgtagccattgtaatatattttgtgagctcagcgactgattttcattgacaaaatcaaaaacggtctcactcatacttctgtaaagcgggctactcagtttgttgttaagttcgtctttaaggtttttctttttagcttttaattttacttcctcaatggtgattattttttcatcatattctttttttgctttttgagctgttattattttattaatttctgcgggttgcgttgaatctgatgctctgtctaccaattgataaccttcaaccgcaggtagttctttttttaacggaataaaagtgttgacaggatttacataaacattggttcggctttttaaagccgcatttgcgccgtttaattgataagtgattttaatgggtttttcgaaaagcatattgtcgaagaaaaattctccgttactgtctgtttcaacttcaagaacttcgcttccagatttacctccttctataaacataattaaattttgctgaggtgcaggctttgcattaagggttactcttcctttatatgaaatgtatttagaaggattattgatgatagaagggtaatttccagcaataatttctttccagtcgaaagatttccattgttctgaaatcaataaagcatcaagtgcttccgtatttcttttttcggtaaaatattgtgcaggtctgtcgattttagacttgataacacctgtaagccataatgagctcaaaagattttcatcctgtaaagattttttaaactcaaggtcaaatacggttacagaataattaatgatatctttaagtggtttaatttctaaagaatttaaagctctcttttctgcactgactatttcaggctttatttcaggagcggcaatatttagatgctgaggcattacaaaacacattctgcttaccaatacattttctttatcatcaaataccgtaagttgtaaaactccgttgataagctgattggtgggtatcgcctgaaatgcatcttttaactgattcacttttgctttgtagaccaactgatcaccaatattggcgataacagtgtaatagggaatattttcgccgctgttttttattttatatttaatattttctttttcactgataacctgcaggcttactcctttttctgaagctttaggaaggcttacagatttttgtaaaccattattatctgtaattatcgcttcgtaaatcttatctttttcaggagttaatgagaaaacgccaacatttccgtctaaacctttaaaagtggtgattttcttttcaggatggtctttttcaattacatacccgtcccattgagagggtggagttccggtattatgaagacgcacagctattttagactgatttcctgcaataaaagaatttccttctggatgcactgttgcagaccacgaagaagatttatctgtaactaattttttaggcgaagaaggattgtatataggtatttgctttatatactgaaaatcttcctttagattactcatcattggagtataagctctcacaaaataaatgtcttcatttagactttcaggaatctgaaaacttcccttcacaactccgttaaaaatagggaatctttttctcagaatctgctttttatttttatcataaagctcaataaaaaaattggttgaatggtcagatattgaaaagtttctgaaaaccattgcattaaaccacaatgtctcacctgaaagatataagtctttatctgtaaggatataaatattttcctgtgaaagattttcgttaatatattgaagagccctatcggcagattgttgtgagtggatgtggctgaaagatgccaaaacaaaacagaatgtaattattcttttcatgttctactacattaatattatgcaaattaagtgaaaactgtttgtctgatgaaatatttaatatattttatgatttaataatttatcagagaggttttcaagtaattttataattgataaaattatttatactgaatattttaaagtattatatctgatttaattcctctttttagactgttttaaaaatatataatctcttactatgctgtaaaataggctgttgtcaactggtgagtttgggagtagaatgataccttaaatgcaattcattcattatgaatttgttaataaataaatattgatagtggttaattcattaaaaatcactaatttcgcacccgtaaaaatcattcatgcaaaacattagaaatattgcgattatcgcacacgttgaccacggtaagactactttggttgataagattattcatgctacaaacattttcagagaaaatcaggaaagtggagaattaataatggataacaacgatcttgaaagagaaagaggaattaccattttatcaaaaaatatttctgttacttataaagatacaaaaattaacgttatcgatactcctggtcacgccgattttggtggagaagtagaaagagtattgaaaatggcagacggtgttatcttgttggtagatgcgttcgaaggaccaatgcctcaaacaagattcgtattgcaaaaagctttagaattaggtcttagacctttggttgtgatcaacaaagtagacaaaccgaactgtcgtcctgaagaagttcacgatcaggtatttgatctgttcttcaaccttgaagctactgaagagcagttggatttcccaacattctacggttcatctaaacaaggatggttcaacacttcattagaacaaactgacaatattttcccattattagacggtattttgcaatatgttcctgagcctaaagtagaggagggtaacttgcagatgcagatcgtttctctagatttctcttctttcttaggaagaattgcgatcggaaaagtgatcagaggagaaattaaagaatctcaatggatcggtcttgctcaggcagacggaaaagttgtaaaaggaaaagtaaaagaattatacgttttcgaaggtttaggaaagaaaaaagtaactgaagtaaaagctggagatatctgtgctgtagtaggtttcgatgctttccagattggagattctttcgtagatcttgaaaatcctgagccattgccaagaactgcaattgatgagcctacattgaacatgacg

SEQ ID NO: 2289 - DNA, 23135 bp, synthetic construct
  source 1..23135: mol_type = other DNA
  misc_feature 1..23135: note = Synthetic
ataaatttgatctgcaaccgcatgaaactgatattaccgagcagacaaagcatgtgataaacagcgggggagtaagttatgatctttcatggaaggaatataagcataagatttcagtatatggttctatacagcatacggatagaaacagttattatggagctcaacgagacttgaatgcttatggtaaaactacagatcttacttgggtagttggtgcaatgtatgtgggcaatatgaagaaatgtttatttgctccggccacattcaccggaggggtggaatatcaggataattcaatgcatgatattatgaccggttatggtagagatatgcagcaggatgtacgtattgtcggtacatttattcagaatgaatggaagatgaaacaattcattttattaataggtggacgtctggataaacataacctgattgataatccgatatttagccctcgtataaatttgttatataaaccgaccgataaattgcaggctcgtttgacttactctacaggattccgtgctccgcaggcctatgatgaagatttgcatgtaacggccgtaggaggggagggaatgttaattcgtttggtagaaggattgaaacctgagcgctctaatagttttagcggttcggtagactggactgcaaatatcgggcattttcagtccaatttattggtagaaggtttttatacggatcttcgtgatgtgttcgttctggaatctatcggacatgataatggtaatttggtaaaagaacgtcgtaacggaagtggtgcacgagtgtttggtgcgaatattgatgcgaagattgcgcatggtaaagaagctgctttgcagcttggatttacggtgcagagaagtcagtatagatcagcagaagcatggagtgaggatgaagctgtggaaaagataaagcgtatgcctcgtacaccggattattatggctattttacctttacaagtgctccattgaaaaattttgattttgctttatccggtacatatacaggtaaaatggtagtgccgcattttgctccaagtgacatccctgctgaatttgcgaatatgtatattaaacaagatcgtttggaaaggacacccgatttctttgatttgaatattaaattaaactatacttttgtgttgcatgatcatattaagttgcaaattaatggaggtattcagaatatattcaatagtttccaaaaggatttggataaaggagaatatcgtgattccggttatttttatggtcctactcaaccaagaacttattttattggagttaagattatgaattaggaaaagagctattgatatgtgaataataaagtgaagaacctgctgaatataattattttataaatggtagcaggttcttcacttttataaatggggattatctttcgaaaactctgctgcgtgctaacatctatgctccgataacgccagctttatcttttaatttagatgttgttattatagagtctttgctcaccaagttcaaagaatatttgcgaatggctgattttataggtcgggtaatataatcgccggtggcagaaactgttcctcctataattaaaatatttattatttagaaagagttagatgtgctattctaagttgttgtattatatagaattgaattaattaaaataattagaataacgacttactttcttaaaatagtaagtcgtatatcgtgaatctattttggcttgacttcattaatgagattcttaccctctgtataagatttgatattttctaatgtagtggttgcaatatttcgcatagcttcatgcgtaaaaaatgcttgatgggaagtgacaataacattaggaaaagataaaagacgtgctaatgtatcgtcatcaataattttatccgacttatcttcatagaaatattcactttcttcttcataaacatctagtccggcataaccgatttttttgttttttaatccttctatcaaagcattggtgtgaatcagttgtccacgaccggtattaataagcataacactatctttcattttactgatagaatagtcattaatcagatatttagttgtatctgtgagcggacaatgtagtgagataatatcggaattatgataaagttcgtctaatgttgtataaacgacttgatgttcacgggcaaaattatagtctggatataaatcataagctaatatattcattccgaatcctcggagtatttgaatcaggattttagctattttgccggttccgatgattcctactgtttttccatgcatatcgaaccccattaatccgtgaagagaaaaattcccatcacgagtacgccatgttgcgcgtggtattttacggttaagagacagcatcagggcgactgtatattccgctactgcataaggtgaataagcaggtacgcgcactacagtaactccatttgcctgtgctgcggctaggtctacattattatatccggcacagcgcagagctaataattttactccattgtcagccatagctttaagtacttctgcatctgctatgtcatttacgaatatacaaacagcatccgccccctgagtaagcatgacgttgtttctattgagatgacctttgaagtatttaatctcaaatccaaactttttatttaccttatcgaaagatatttcatcataaggctttgttccgaaaaatgcaattgtgtatgtcatatagtcttttttattaaaacaatgagttatataggaaagtttgaataaagatggataataagttgattatatatctgcttggatttagaaagaagttttttctcttttataaatattgtaatagtttctcttgaaacaatcagcttaaggcatataaaacagataaaatttaatggttattgaacttatttgcacaagactattgtgcgtgtgcaatattgtcgtatctttgcgcctgaattaatttaaaaactgttataatgaagaaaatttcattgattagtatcgtgttgctaatcgtttcaactacaacttttgccggtggacttctcaccaatactaaccaaaatattgcattcttaagaaatccggcacgagatgcttctattgaaattgatgctgtatattcaaatccggcaggacttgctttccttgctaaggatggttttcatatatcactaaacggacaaagtgcatttcaaactcgtacgatcacttctagttttagaccgttcttgatgaataccgatggcagaacaacaggtacagacggtagtcgtgtatataaaggtgaagcatctgctccttttattccatctgtgcaggctgcgtataagagaaataattggactttctctgctggatttgctgtgaccggaggtggtggtaaggctacgttcaatgaaggacttggctcttttgaatcacaggtggctttacttccgggaatgttggaagcggcaggacagaaacttgtaacagaaggaatgcttcctgctaatatctttgcaggaacgaatcaatattccgtagatagttatatgcgtgggaaacaatatatatttggacttcaattgggagcgacttataaatttacagattatctctcagcttttgttggtgctcgaataaactatgtaagcaatggttatgagggtcatatccgtgatattcaggctaatataggaggaggcaacatggttaatgttaattcttattttaaagattatgctaaactttttggagaatatgctgttcaagctcaggcagctggagacatggctgcatataagaaatatgcaacaatagcagcaactgcgcaaggagttgccgatcaaactgctgataagaatttggattgcgatcaaaccggttggggagtaacaccgatattaggacttgactttaagtggaagaaatggaatgtaggtgtgaaatatgaatttaatacgaaactgaatgtggagaataaaactcgtgtagatgatacgggattatttaaagacggtgtgaatacacctcatgatatccccagtatgttgacggttggtgtatcttatgaaatacttccggtacttcgtgcatcgataggttatcaccatttctttgatacacatgcaaagatggcgagtgataaacagaaatttatcagtcagggtacgaatgaatatttaggaggtattgaatgggatgtttgtaaatgggctcaggtcagtgcaggaatgcagcgtactaaatatggtttagaagatggttatatgtctgatatgagtttcactaccagttcatattcttttgggtttggtgcaggattccggttaatggaagatttgaaactgaatattgcttatttctggactaattatgatacttataataaagtaactgctgactataatggtacaggattagattttaaagatagttttacccgtacgaataaggtattcggtatcggtttggattatcgtttctaatttattcggataatagcttattgtaagagagggttctaaaaaatcctctctttctttttattattctcttataaactgttatctttgcaatccaattaacgtacgatgccgtgaatagcggtcgtgtattctagaacaccacgtaaaaaacaggaaaatgaaaaataaagtatctgtaccctttatgctgttgggaatacttttttgtgtatgtctcgtagcatctaatttattggaaaccaaagttgttcaactttggggcattacggcaactgccggattgatcgtatttcctatttcttatatcattaacgactgtatagccgaagtttggggctttaagaaagcgcgcctgattatctggagtggttttgcaatgaacttcttagtaatcggttttgcgcaattggctgttatgcttcctgccgcacctttctgggaaggtgaagagggcttcaactttgtgtttggtatggctcctcgaatagcagttgccagtttgacggctttccttgtcgggtctttcctcaatgcttatgtgatgagtaaaatgaaagttgcttccaatggaaaacatttttctcttcgtgctattgtttctactttagttggcgagagtgcagattcattaatcttctttccgattgcgttcggcggactgattccggtgaatgagttactgataatggttgctacacaggcggtattgaagtcactttatgaagttattattcttccggttaccatatatgtggtgaagtatataaaaaaggtagatggtagtgatgtgtatgatgaacacatttcttataatgttcttaaaatcaaagatatttaattcgtatgaataaggaaacagcattggtcgtgttcagtggtggacaagactcaacgacttgcctgttttgggctatgagagagtttaagaaagtgtatgcattgagttttatttatgggcaaaagcaccggagcgaagtggaactggcccgtcatatagctgaagaggctgaggtggaatttgaagttctggatgtatcctttattgggaaattgggaagaaactctttgacggatacgtcgattccgatggatcaggaaaagccgacggatagttttccgaatacttttgttccgggaaggaatttgttctttttgagtattgcagctgtatatgcccgtgaaaaaggaataaatcatatcgtaaccggagtttctcagactgattttagcggctacccggattgtcgtgatgcttttattaaatcattaaacgtaacattgaacttggcgatggacgagcagtttgttatccatactcctttaatgtggattgacaaggcacaaacatggcaacttgcggatgagttaggggtacttgagttgattcgccatgaaacattgacttgttacaatggtgttcaaggtgacggatgtgggcattgtccttcttgcaaattacgtaaagaaggattggataaatatctggaagcaaaggataaaggtataaaattgtaataaaatagtaggaatggcagatttaaaagagcagctctctcttttaggaagaaagacggagtataagcaggattatgctcctgaagtattggaggcgtttgataataaacatccggagaatgattattgggttcggtttaactgtcctgagtttacaagtttatgtcccatcaccggacaacctgattttgcggagatacgcatcagttatttaccggacatcaagatggtagagagtaaaagtctgaaactttatctattcagtttccgtaatcatggtgcttttcatgaagattgtgtcaatatcatcatgaaagacttgattcgtttgatgaatccgaaatatattgaagtaacaggtttgtttactcctcgtggtggtatttctatttatccttatgctaattatgggaaacctggtacaaaatatgaagaaatggctcatcaccgtatgatgaatcatggtatgaaatagaagcctgattattatgcatacggtcgattgattttaaaggtgcggtcctttgtttacaaactcctatcgtttgcaaacaaaggaccgtatgtgtaaaaaacacttaatgggaagattctttttgcatcttatcgaccaattgattatagatatctttggtcttttcagcctcttttgtatttagcatatccttttccttttcttagggttgaaagagctttttgtactttcattatttgtcatttttctatgatagctttgtgctttgattaacatgaatatgaccactgctgcaataattcctatttgcaaccaatcagcccatacgcccaaagtcaatgacatactaatccattgccaaagtataacaaaaatacctaaaccaataagcatgttacgcatcatggaggaaagtccatcgatgtccaccttggctttttcttctttcgacatagtattgtaacctgcaatcagattaggaaaacgtttcaccaaaagaccacataaaatgagaatgcctccggttataaagtttacttccataattctaatacattaatttgattaattgtctgcagattatatcgcttgcaataatgatgacggcatatgataatcctaatttccaacctttaagattacatgaaactttgaaagcctgatacatccaaataagaactatcaccataaataagatggatggaaacgtaatgaatgctccttttattatgtccggctgttgcataatccattcaggtgtggcagtagtcggaatattcattagtttctgaactgattcgggaaagaaaaataaattcatcaatataaaaggtagttgagcgaaagcaattgttccgaaaacgtcgatacctctgatgtgcgagtgagaaagtaacttgccggctacaaagaataatatggaaggaattaaccatataattatatgttctccggcaaagcaccaccatgcattattcgaagccggaccgaaatgcagtagtccgtgataatggatcggtgctgtgatggacatagcaattgagataataatacctgcaatgccccataagagagcttgtatacccgctattttcaggaacggattagacagtgtactgaaaaaatgttttacgtttgccatagttatgatattttgttgagcttgataatcagatcgtccaataaattacgtacggtaggatagcttagtcccatactctttgccatatcctttaggctaccgcttgctttcacgaagtctaagacaaaagtttgttccttttctgtgagacgggctaggggaggaagttcaaattctccgcatactttagtgccgcattgttcgcaaaatagttcgcttacttttaaagatgtatcacatccggggcactgtaaaggcaatcgtttcttaatttccattttgttaatccataagtattgttttgcaaatatagaatattattttaatattatcaattatatatttaataaaattgaattatatattcgttttattcattttgtgaacaacgttttctataatctgttctcatgtttggagatctgtaactatgctgttaggattatatttaattgcgatattgaaattagggagaacagaaactaaaatctactctaaaaaatattttcgtttcaattctttctaaattttatttatctttgcacaaaatgtcggagcatatccggcattgttgattagacataatattatcagaacaagaaactggcactttcaaagacaaagataatatgatgtctgcgctagcttgtattgcaataaatataagttctggtgcgggcatgctgtattctcttttgtcaggtatgccagtacctttgttttgggattacaagtatgcttgcacctttttttaaataagggtgagcatacacaaagacaaagagtatgaaaaacccggaaacacaagctttacgcagagctttgacgaaagtgcgcagacaaaacaacaaagaaaaggctgaaatattaaagccgtttttagagatgctggatttaagtatcagttctgatatgttattctttagcaaagatgatccagaaagtattttccctttacctcttgataatatatttggtttgcaaatggatgaagattatctttatctattttgtcagaacggatatgtacatattattgggctgagagaaagaggacacttggttcaatttctggaaaggaaacgtccaagtgttttggagcaatttaaatattttctttggagttgcttcggtaaatcataggaatgatattataccatatataatatggtaatccaacttattattatcaagattttctttagtgattaaagattgaaaaataaaaaagcccccgataaaggacgagggcaacctaaatgttttcacaacggaataatccttattgtgacttgcttcaaattagttttgcaaaaataagaaataattttctacaaaacaaccttctgtagaaataaatttgtattttttgaaaagttttgataaagattctattatgaaaaagattttaggccttgatttaggtactactagcataggatgggttttggtaaatgaagctgaaagtagtgaagagcaatcatcaataatcaaacttggtgtgcgtgtaaatcctttaagtgtcgatgaacagagaagttttgaacaaggtaagagtattgcaacaaataccgatcggacattgaaaaggagtatgcgccgtaatttgcagcgatataaattacgtcgtgagaatctgatagattgttttaaagagaatggattgataactgatgagactttattgtgcgagaatggtaaccaaactacttttcaaacctatcggttacgtgccaaggctgtaacggaggaaatctcattggatgaattggcacgtgtttttttgatgataaataaaaagcgtggctataaaagcagccgtaaagtaaaatcaatggaggaaggacagaaaattgatggtatgtcggttgctatgcaattgtatgaagaagatataactcctggtcagttagtattatcattatttaatcaaggtaaaaagtatgttcctgatttttatcgttcggatttgcaaaaagagtttgatagaatatggacgtgtcagcaacaattttatccggaaatattaacggatgaatttaaggaattgctgaaaggaaaaagtaagtcgaatacaattaaaatatttctaggaaagtataagctgtatacggctgataataaagggaaagataaacgattacaactttatcaatggcgcgttgatgctttgacaaaacagctttccattgaagaagtagctttggtgattagtgaactgaatggagctattgataactcgagcggttatttgggagcaattagtgatcgtatagtaaagaactatattttaataagcttaccgtaggacaatttcttctgagagaattagaacgcgactctaattggagtcttaaaaataaggtgttttatcgtcacgattatttggatgaatttgaagctatttgggaaaagcaagcgacgtttcatccggagcttacttctgaattgaagaaagaaattcgtgatattattatattctatcaacgtccactaaagagccaaaaaggattagttggtttttgtgagtttgaaagtcgccaaatggcaatttgtatagatggaaaacagaaaatgaagacagtgggttgtaaagtatgccctcagtcatctcctctttttcaagaatttaagatttggcataccctcaataatttgcgagtgattgaaaaatcatcgaacttatcgcgtttcttggaacaggaagaaaaggaaactctatttatggaattgagtgttaaggataaacttaataagaaagatgcccttaaattgttatatagaaattataaggatttagatttgaattatgaagatttagaaggagattgcactcaatcgatattgtttaaagcgtatcaaaagattattgcaatgactggaaacggagaatatgacttctctaagatgccgtctgatgaaataaaagaaaaggtaaaggtcatttttgatggattaggatataatacggatatattattttttgattcgtcaaaagaagggcatacttttgataagcaaccgatgtatcaattgtggcatttgctatattcttatgaaggagacaaatcaaatacaggcaatgatagtttgattcgtaaaataacagaactttgcggttttgaaaaggaatatgccaatataattgctaatataacatttcaatcggattatggcagtctaagcacgaaagctattcgtaagattttaccttatatgaaagagggaagttgttataatcaagcttgcgaatttgcaggttatcgtcattctcagcgttccttgacaaaagaagagttggatgagaaagaatataaagatcatttggatcctctccctaagaatagtttgcgtaaccctgtagttgagaagatacttaatcagatgataaatgttgtgaatcatgtggttgatacatttggaaagcctgatgaaatccgcatagagttggcacgcgaattgaaaaagagtgcgaaagagcgcaagattatgactgagaatataaataaggcgacaattgaccatgataagtatcggcaaattcttcaaaaagaatttgggttggtgaatgtaagccgaaatgatataattcgttataaattatatttagaactaaaggacaatggttataaaacactttattctaatacgtatatacctcaggaaaaattgtttagtaaagaatttgatatagagcatattattcctcaggcaaaattatttgatgattctttttctaataaaactattgagagcagaaaggttaatattgagaaaagcaatttaacagcctatgattatgtattgaataaatatgatatcgaaggtgtgcgtgattatgaagtccgtatcgagaatatgtataaaaatggtatgattagcaaaacgaaacgtaataaattattaatgaaagaggctgatataccaaatgatttcatcgagcgtgacttacgtgattctcagtatatagctaaaaaagcccgtgagatattagaagatttggtgaagtttgttgttcctactgtaggttctataactgaccgtttacgtgaagattggcaattggtagatgttatgcaagaattgaattgggataaatatgataaattagctttaacggagattatagaagacaaagatgggcgtaaaattcgacgtataaaagattggacaaagcgtaatgatcatcgccatcatgcaatggatgcactcactattgcatttacccagagacgttttattgagtattttaataatatgaatgcgcaaaatgaaaactccggtaatacgattgctactaagcataattatatgtaccgtgacaatcatggcagattgagggttaagccgccgatttcaataaatgaatttcgtgcggaagcgaagcggcatcttgaaagtgttctaatttctataaaggctaagaatagggtagttacaccaaatattaataggacaaaagcacagaatggttataataaaaaagagcaattgactcctcgtggacaattacataatgagactatttatggtagtataaaacaatatgtaactaagatagagacagttggtggaggatctggtgctatgcaaatagcaaaagttgcgaataaaaaatatcgagacgctttattagcacgtcttgctgtttttgataatgatcccaagaaagcctttaccggtaaaaatagcttggagaaaaatcctatctatttagatgaacttcatactcagcgagtgccgataaaaattaagactgtaactttagagacaatttatacgatacgtaaaagcatttcaccggatttaaaaattgataaggttgttgacgttaaaattcgtaggcttctggaggaacgtttggcagactatggaggagatacaagaaaagcattctcaaatttagaagataatcctatttggctgaatgaagaaaaaggaatttctattaaacgagttacgataaccggagtaaataatgcagaaccattacattgtaagaaagatcataaaggtgaacttatattggattctgaaggaaaaaaacaacctgtagactatgtaaatacaggaaataatcatcatgttgctatttatcgcgatgaaaagggagaattacaagaaaatgttgtttccttctatgaagcaacagctcgcgctattttaggtgaagctattgtgaataaagcttataatgattctgaaggttggagtttcttattttccatgaaacaaaatgaatattttgtttttccaaatgagaatacaggctttgatcccaatgaaatagatttattagatccggataactatgcattaatcagtcctaatttgtatagggtacagaagataacctcaaaagattatgtgtttaggcatcatcttgaaacaacagttgagaataaaaaagaactgcagaatattacttggaagagagttacttcacttactaactttgataaaattgtaaaggttaggattaatcacattgggcaaatagtttttgttggtgaatactaagttgtggtggaaaagaagattaagtatcttgcagtaggactaataagtagatcgaactttattaagtcatagctgatatccttgtatattttataatcggcagtaataaactttaaatactagtactatgataaagaaaacactttatttcggaagtcctgtttatctgtccctacggaatgcacaattagttataaaacttccggaagtggagaaaagtgcgtctttgccggatacattcaaaaaacagtcagaagttacgaggccggttgaagatctaggtgttgtgatattagataataggcagatcactataacttccggtgtgcttgaagctcttttagagaataattgtgctgtaattacttgtgatagtaagagtatgcctgttggattaatgctacctttatatggaaatacgactcaaaatgagcgatttcgtcaacaattagatgcttctcttcctctaaagaaacaactttggcaacagactgccaaaacgaagattgataatcaagcttctgttttgaatgattgtgtaggagaagaaatgaaatgtatgcgcgtttgggcaaatgaagtaagaagtggagatcctgataatttagaagcgagagcagctgcgtattattggaaatctttatttggttatattgaaggattttctagagatcgtgaaggaattccgcctaataatttactgaattatggttatgcaatacttcgcgcgatagtggctcgtggattagtgacaagtggtttgttaccgacattgggtatacatcatcataatcggtataatgcttattgtctagctgatgatataatggaattttatcgtccttatgtagacaggttggtttatcagttagtgcagtcttatggatctgaattggaattgacgaaagaaataaaggggagtttactttctattcctactttggaagtaaaaataggaggaaaacgtagtcctttgatggttgctgttgggcaaacgacagcatcactttataaatgtttcagtggcgaacttcgtcatattttatatccggaaaaataatggatcgttttagtgaatatcgtgttatgtgggttcttgttctttttgatttaccaacggagacaaagaaagataaaaaagcttattctgattttagaaagaatttacagaaagatggctttactatgtttcagttttctatttatatccgtcattgtgctagtagtgaaaatgctgaagtacacataaaaagagtgaagtcctttcttccagagtttggtcaggttggaataatgtgcataacagataaacagtttagtaatattggattgttttatggaaagaaagctcagtgtgttaatactccggggcagcaattggagttattttgaaagtaaaaaatcccatttcaagatgggattttttgtaggaaacaacatccttttttattttctaaatttatgtgtaatgtattaatacacagatagtaatgtgggttaagttgtttccaatggttcaaagatactaatttgaaagcaaatcacaactcgccgcttctacttccgcgcgtaacttctgttgtttccaatggttcaaagatactaatttgaaagcaaattacaacacattcgtcaataagttcacgaagtagttcgctgtttctaatgtccccaaaaatattcatccaaaagcaaactatagcatactaagctttcgtatcatttatgtaagttatccccaacgcttcaaaagctctaattaaaagacttatattaatacaattccaatccgaattcctctttcagttttaatagctcgggattcttttgactcatcatctggaaacgttccactctgctgtatgcgcggatattctcagtcggggcacttacgcggacggtcattgttatcttccggttatgcaacttattccgcaaatggtcttgtatttgcgggataagaggagtcattattttctctacaagttcgttgtccacagctacttcgaaagtcgtatcgttcagcaactttggtttcatgttcatcattcgcccggctgttgctttctcttctaccggaagttggttggcatactcgcgccagtaataatccaaatccttttcgttgaaaatgaaatcttccgctatttcggtctgtaccggtttaacggttactgtctgctgttgttttacttctctgcttgccggatgtttgatagatacgccaagactgcccgccttgaatacgggaatctttttctcctcactctgttgtggaataggattttgccgtatcggtggagtattggtcggctgggcttgaggtgctacaccttgctgcacagtttgtgactgtacagatgaagttgatgcatccggagttcttgctgattgttgtgcctggacagatggttgggcttgtgccggctgagcctgagcactttgcttattgaatatgggttttatagcttgttcagggctacgcccatgagctgtgtcgtctgcatccgccgtcagttgtgccacctgaatcagggttatttctaccagcaggcgtttgtttttgctggcacggtagttcaggtcgcagtcattgcaaagtttcattgccttgtaaagaaactgtggcgggcatttctgtgcttgctgttggtagcgttcacgtatgcttgcgcccacttccagcagtgggagggtggaggcatctttactgacaagcaggtcacggaaatgagatgaaagtcctgtaataaagtggcttccgtcgaatcctttatttagtatatcgttgaagataagcagggattcgctgatcttattatccagcaggcagtctgtcaggcggaaatagtattcatagtccagtacattcaggttgtcgataacattcttgtactgtatgtttcctcctgtgaagctgactacttggtcaaagatggataatgcgtcgcgcataccgccgtccgctttctgggcaatgacgttcagcgcttccggttctgcggtaataccttccttttgtgccacatattgcaggtgctccactgtatcgttgaccgtaatgcggttgaaatcgtatatttggcaacgggagaggatagtaggcaatatcttatgcttctcggtagtagcaagaatgaatatggcatgatggggaggttcttccagtgttttcaggaatgcattgaaagctgcctgcgaaagcatgtgcacctcatcgataatatatactttatatttccctatctgtggtgggatacgcacttgttctatcagtgaacgaatgtcctctaccgagttattggatgccgcatccagttcatgtatgttgtatgagcgttgttcgttgaaagcccggcaagattcgcattcgttgcatgcttctccgtctgccgtaggattcatacagttgatggtcttggcaaagatacgtgcgcaagtggttttccccacacctcgcggtccgcaaaacagataggcgtgagccagtttctgacctgctatcgcatttttgagtgtcgtagtcaatgccttttgtcctacaacggagtcgaaagttgaaggacggtattttcgtgccgatacaatataattctccataataagggatattctgctgttttttctgtttttgcaaatgtacattaaaagaatgaagaatgaagaatgaagaatgaagattttaaataaaatagttatctttgtcccgtattcaattatcaatcagccatgagtaggttactaagcgtctggaattttatccgcaggaataaatactatattaccatcggattgtttatcgccattatcggttttctcgatgaaaacagtctgcttcgccgcgctaagaacaaacgtgagattatgcgtctggaggcggagatccgtaaatatcaggctgaatacgaagaaagtacgaaacgtttgaatgaattaatggcaaatcctgcggcaatggagaaggtggctcgtgagaagtacctgatgaagaagccgaatgaggatatatatgtatttgaagaagaatgaaacaatatcaatcgatgatttttggagccggagcgattctggcgttgttgggagcggcggttatgattacaggttgggagtatgctccttatatatattgcgtaggagcgttgcttgtcgcttatgtacagttgaccaacggctataaaggggataatgtcactatcaaaagattacgtaaacagcaggtattcggtgcggtattgttattgcttaccggcttgttcatgtttaccacgcagcataacgaatgggttgtttgcctgactgtcgctgccgttcttgaattgtataccgcttaccgcattccttatctggaagaaaaagataaatagtttcttatgatggacgatatgcctgattctcttcaagtcagagagattgaattaagcaacggatttacggtttggttgaatgaagaccacaaccagcctaaagtattcggtgcggtagttgtcaaagccggagctaaggattgtcctgatacgggtatagcccattattttgaacacatgatgttcaaggggacggacaagatagggactacggattacgaagcggaaaaggaaatactggatgccattgccggtaaatatgatgaactggcagcgtgtaaggacgaaaagcttcgtccggagttgcaaaaggaaatcaaccggttaagtatccgtgctgccgaatatgccatacccaatgaattcgacaggcttacttccatgtttggcggcagtcagctcaatgccggaacttcttatgattataccgtctatttcaatgtcttttctccgcaatactttgcccattgggcggagctgaacagtgaacgcttgctgaatcctgtattccgcctctttcaaagtgaactggaaacggtttacgaagagaagaatatgtatagcgatatgatgggaatgttggcaatggagcgtttgacccaccggtatttttcaccgcatccgtatgcctatccgataataggcagcacggagaacctgaaaaatccgcaactgacgcgtatgcgcagattcttcgaagattattatgtggcatccaatatgggattgattctgagcggtgatttccatgcggaagaggtgattcctatcttggaaaagaccttctcacgcatccgtagcggtaaagcaccggtaagcccgtctgtcgtgttgccggattttaggggcaaggaaaaggtgaaggtgaaacttcccgtgccttttgtcaagatgatggcgctcggattccgtggtgtgcctgccaatcataaagataaggtagccattaatattgcgatggcactgcttaataatgagaacgggacgggatatcttgaccagctttcggttaatcataagatagtggcggcgatgtccatgaatcaggggctgaatgaagccggtatcttggcagtggctattgtgcctaaactcatgttccagtcatacgcttcggcggagaagttggtatggcgcgagataaaccgtgtgaaaaaaggagatttcacggatgaggctttttgcagcttgaagctggagcaacggaggaattatgagttggcactggaagacatcaatgcccgtgccaagatgatgatgacactctattcgcaaggaaagagttggaaagaatatcaggaagagatgagcgggatagatgctttgacgaaagaggacgtggtgaaggtggcgtgcaagtatttcacggataattatctgtatgccacgaagaaaacgggcaattacccgaaaaacaatcttcccaaacccgattttgaaccgatagtaccccgcaacggtgatgtggtatccgaatatgcgcagaaactgaagaaacttccggtgaaagagacgtcaccacgttttgtcgactttgccaaagatgtaaagaaagtgactttggctcctttggcaacactttatcttacaccgaatccggtgaataagattttcacgctgaggctttcttatcatgtaggctttatagaatatcccgccttggtacaattgaatgcttatctgcctttcttgggtacggataccatggcgtttaaggaattccgcaataagctgcaatatttgggcagtgtactcgagtatgatgtggaggaacataaattccatataaaactatccggctttgatgaacattttgccgaatccgtccgtctgctggggctgttcatgcaacatgtcgaggcggacgacaagcagttgaagcagttggtgaatgaagaaaaagtagcggcaaaatcattcttcaaatctagtgaagatgtggcggaagccttgtttcagaaagtgaagttcgggaacggatcttccaagcttaccaaactttcactgaaggaagtgaaacgcctgaaaggtaaggagttgctggaactgtttgataaagtgaaacatacggaatgtgttatgcattattgcggcacgttgggtgagagtgaagtggtggatacggtcagtgagtggatgaatccggataagattactttgcctgcctccaaccgcttacgcgatttgcaggtgtatgaccgcccgaaagtttatttcttccatgacgggaaagtatcccaaagtattatttacgggtatatctgcggtgatacgttgaaagacgagcatacacgccatacttccaaactgttttccggctatttcggtggagatatgtcttctctgatgtttcaggaaatcagggaatttcgttcgtttgcctatcgtgtgagggcagaatatgaattgcctttccggcgttgtcccgacaaatccggctgcttcgtaaccatgttgtccacgcagagtgacaagacgacggatgcgcttgaggtgctggatgctttaataaaggatatgcccctgaaacccgaaaagattccggccgtacgtcaggcgttggtaaacaatgtcaataacaatttcccgtctttcagggagttgtcggcacgggtttctcaatgggaagaagacggtctggcttcggacccgaatgaaacttacctgcatagtcttttggcgacggatatggaagacgtcgatgctttctatcattctcaggttcagggacgcccgatggtctatgccattgtaggaaatgaaaagagcattgatatgaataaactctcggcttttggagagattatcaaagtaaagaaggaagatatctacagataagcggaaagcatcctttacaaacttatttattagtgaatgttcaggtacttattagctcgttttcacgggttaacaagcgtttttgtgctgactcattgtctgtctcacaacaggtgcattagctattgcacatattgtgatatagctaacgcacctgttgtggaatagctgttccacctattgtgagacaactacttgataaagtatgttgtattagttatccctaatgtttagactactttgcagggaggcgacagatagtttcgttcgtttttgaaaccggttgttcttctatgaaataagaaaggctcaccgtgtgatggcaagcctttcagatgaaatatgtgaataagattatttcttgctggtagcagaagacggattatatcttttgttcaatccttctacaatttcgttggtgatgttgtatgcaggatcggcataaagcagattgtcaaaaccggtattgcttaagataaggctgtaccctttgtccttattatatattttaaggaaagagttgatagaatcgcgaagttgcagaccgttcttctggttttcggcagccagttcattcgtcagtcggttttgcaattcctgcaagtcttgttgcttctttatcagtctggcattctcttgttcggcacgttcgcgggttgcgaatgcgttgttttcgagtttacgttggaattcttttgcatcagcttccagttcgcgacctttttggttgagtgtagcgcggatgttttcttcctttttcatcatcatctcattcaggtcattccagtaattgtatttggtcagtagtgtgtctatttcaacatacgctatttttaatgtacaagttccggttttaccttcaggaacattagccgtttccggctcgcctttcttgttattgcactgtgcaaacaagagtataacagtcaaagccaaaattccattgaagatgttagtcattcgtttcataataaatattcgatatagtttttaattaatttatttccttatccgtctttcctttttctctttccggaacagccagtttactttcttttctcgcttccctgtcttgagactgcacacatccgatacctttttcccgtagagccttacttccgcttacatgcgtattaggaaactttttcttcttggtgaaaaagatattaacacctaataatgctatacaaatagcaactattaacaaagttatgaggatagtgtcaagcatttctgttatttttgcgatgcaaagatagacttttgcaaggactatgccttctctttttagataaaaattgaaaacaaggttctagtataggaattaattaactaaatttagcgcctcataaatggaagtgttaaattataaataggaataaattatggatagaacagaattaaaaccggcttccgtttttcattattttgatgagatctgtcaggttccgcgtccttccaagaaggaagaaaagattattgagtatctgaaagctttcggaaagaagcataatttagaaacgaaatttgatgaggtggggaatgtcttgattaagaaacctgcaacaaaaggaaaagaacatttgcagacagtcgtgctacagtctcatgtcgatatggtttgtgagaagaacagcgatgtagagcatgacttcctgaaagatccgatacaaacttatatagatggtgaatggttgcgtgcaaaaggtactactttgggtgcggacaatggtatcggtgtggctacggagctggctatacttgctgccgatgatattgaacacggaccaatagaatgtcttttcacgattgatgaagaaaccgggctgacgggtgctttcgctttgaaagagggctttatgaacggtgatattcttcttaatctggactcggaggatgaaggcgagctgtttatcggttgtgccggaggtatcgatacggtggccgagtttgaatataagaaagtagccgcaccacaggattatttctttttccgtgtggacgtgaaggggctcacaggaggacattccggtgatgatatcaataaaatgcgtgcaaatgcgaataaggttttggttcgctatctgacacgtatttctaagaagatggatatgtatttgtgtgagatcaatggaggaaatcttcgtaatgccattccccgtgaggcgtatgcagtatgtgccgtacctatgcctgagaaagaaaatgtccgtattgaattgaatatctttgctgccgaggtagaagatgaatatgccgtgaccgaaccgaatatgaagttgttcttagaatcggaaactcctcgtaaagaagcaattgaccgtgatacgaccactcgtttactaaaggctttgacggctgttcatcatggaatatacgctatgagtcaggatattgaaggattggtagagacctcttctaatcttgcttctataaaaatggtggaaggcaatatcatacgtatagcaaccagccagcgtagttccatcctttcttcccgtgacgatatggcgaatacggtaggtgctgtctttgaattggcaggggctacgataaccgtaggagaaggttatccgggttggaaaccgaatccgtcttctgctattctgaaagttgcagtcgaggcatacaagcgtttgtttggagtagagccgaaagtaaaggctattcatgcggggttggagtgcggtttattccttgagaagtatccttctttggatatggtttcattcggaccgactcttcgcggcgtgcactctcctgatgagcgtatgctgataccgacagtggataagttc

SEQ ID NO: 2290 - DNA, 23042 bp, synthetic construct
  misc_feature 1..23042: note = Synthetic
  source 1..23042: mol_type = other DNA
aagaatctgcctttcgaactgacaggtgcccagaagcgtgtactgaaagaaatacgccgggatgtggggagcggtaagcaaatgaaccgtctgttgcaaggggatgtaggtagtggaaaaacgttggtggcactgatgagtatgctgatagcgttggataacggttaccaggcttgtatgatggcgcctaccgagattctggctaaccagcattttgaaacaatccgcgagttgttgtacggaatggatatacgtgtggaattgctaaccggttctgtgaaaggaaaaaagcgggaagccattctcaccggtctgttgacaggagatgtacgaatactgatcggtacgcatgccgtgatagaggataccgtgaatttctcttcactggggctggtcgtgatagatgaacagcaccgtttcggtgtggcacaacgcgcacgtttatggactaagaatgcacagcccccccatgtgctagtcatgacagctacccctattccgcgtacgctggccatgacattatacggtgatctcgatgtttccgtcattgatgaactgccgccgggacgtaaacctattgtgaccattcataaatatgatgcgcaccgtgtaagcttgtgccaatccgtccataggcagattgcagagggcagacaggtatatattgtatatcctttgattaaggaaagtgagaaaatcgatttgaagaatctggaagaaggctaccttcatatttgtgaggaatttccggattgtaaagtctgcaaagtgcatggcaagatgaaagcggctgagaaggatgcgcagatgcagctttttgtttcgggcgaagcacagataatggtagcgaccactgtgattgaagtaggagtaaatgtaccgaatgcttccgtgatgattattgagaatgcagagcgcttcggtttgtcacagctccatcagttgcgtggtcgtgtaggtcgtggagcagaacagtcttattgtattttagtgaccggatacaagttggttgaggaaacccgcaagcgcctggaaattatggtacggacaaatgacggctttgaaatagctgaagccgatctgaagctacgaggtcccggtgatttggaaggcacacagcaaagcggtattgccttcgacctgaaaattgccgatatagcgcgcgatggacaactgctgcaatatgtgcgcaatgttgctgaagaagtggtggatgctgatcctaccggtattcgtccggagaatgaaatcctgtggcgccaactaaaggcacttcggaaaactaacgttaactgggcttccattagttgaataacggttaaacatacactttatttgcatttttatgttgtaaaacatataagtccttatcttgccgatatacagggagttaggaggtgatttaatatgtgccttttagtcccttaccgaaaaaatagttaagaacagccttttcatttagagaagaaatactacctttgggagaattttttaaaagaatgacgaaacggaatgaatttcaattgcattaaaacgatcctaatagctgcgacggcaatggtcagcctgaattctttttctcaggatttgattgcccgacaagcccccatcgacaggaaactaaagagcgttgactcgttggctttacagaaacagatacgtgctgaacaatctgcttatccaggtctaagtctatatccgacttggaacaatgagtatgtacaagcttatggcgatgctatcgttcctgaaagttataaagtggacctgacaggtttctgtatgcctaccacgcatacgaagattaccgatgtattcggttatcgtcccagaagacgcagaatgcactatggcttggatgttaaagtattcatcggtgatacgattcgagctgctttcgatggtaaagtacgcgtagtaaagaatcagggacgccgtggctatggtaagtatatcgttattcgtcatgacaatggactggaaactgtttacggacacttgtccaaacagatcgtagaaattaatcaattggttaaagccggagaacctatcgctttaggtggcaatacgggacgttctaccggttcgcatcttcactttgaaacccgtttcctgggaattcctatcgaccccgctttaatgtttgactttgaaaagcaagacgttgttgctgatcattatacttttactaagaccaagacttcaaaaggaactgctcgcagcatggcttccggtgaaggtttgttctataaagtgaagagtggcgatacattgtctaagattgcatcccgtcagggagtatctattgacaagctctgtcagttgaatcgcattacacggaaaacaatcttacgtccgggacaggtattacgttgttcgtaagatatcaataaacccataaagaagagggcactttaatataatttagagtgccctcttttcttttttctttaattattcctacctttgcaaccaatttgtaaggaaatgaaagataccaaacaacaatttgagcatgtcattgccatctgtcgtgatttgttctccaagaaactacatgattacggtccggcatggcgtattctccgtccggcttccgtgactgaccagatattcattaaagccaatcgtatcaggagtattgaaaccaaaggagtgacgttggtggacgaaggaatacgttccgagttcattgcgatagtcaactatggcattgtcggattgatacagctggaactgggatatgcggaatcagccgatatcacgaatgaagaagcaatggcgttgtatgacaaatatgctaaaacttcattggatctgatgcttgctaagaatcatgattacgatgaggcatggcgcagtatgcgtgtcagttcatacactgatctgatattgatgaaaatctaccgtacgaaacagattgaaagcctgtcaggacagactttggtctcggaaggagtggatgctaattatatggacatgattaattattccgtattcggtttgattaagattgaatttggagactaaacagaaacatataatctggaagagctgggtgaatgtttgccgttttttattggcggcggtattcatcttttccggctttgtgaaggctgtcgatccgttaggctctttttataagattcaggattatctgacggctttcggaatggccgcgtggtttcctacatatttgcaactactgtttgccatcgtattgtcggcgttggaattctccgtgggagtattcttgttcttcggtatacggcggcggtttgctacgactctagcattgttgctgatgatcgtgatgacaccgctgacactgtatctggcgttagcgaatccggtgtccgattgtggttgtttcggtgatgcatgggtgttgacaaactgggaaacgttcggcaagaatgtagtattgtttattgctgccgtatctgtcttcaaaggtggaaaacaaatcatccgctttattacggcaaagatggcatggatggtttctatgtatacgttctttttcgtatttgtgctttcgttctattgtctggacaatctgcctatcctggatttccgtccttacaagatcggaaaaaatatcaaagaaggcatggaaatacccgaaggagcaaaacccagtgtgtttgagagcaagttcattctggagaaggacggaaaaaagcaggaatttacactggataattacccggatagcacatggacgtttgttgaaacacgtacggtgttgaaggaaaaaggatacgagcctccgattcacgacttctctattgtaagtctggaaaccggagaggatctgaccgatagtattttatcagataagggatatacattcctgttagtagctcatcgtattgaaaatgctgacgatagcaatatagaccttattaacgagatctatgattatagtgtggaacatggttacggcttttatgccctgacttcttcgccggaggaacaaatagagttgtggcgtgacaagaccggtgcagaatatcctttctgccagatggacgacatcactttgaagaccattattcgttctaatcccggactgatgctgataaaggatggtgtcattctgaataagtggagtgataacagcttgccggatgaatacgtgctgacggatagtctggataaactggaactcggtcagcagaaacaagaaagtgatttgcgcacgattggttacgttcttttgtggtttattattccgttgctgatggttatcggtgtggacatcctggttgtgaagcgcagggaaaggaagagagcgaaaaataaagtgattagcgatggagtgatgagtgataagcaagagcttcctcagccataaattacaaattatgaatcaaaaatacattaacccttttaataaataaaaaacaaaatgagaaaaaacattgttgcaggaaactggaaaatgaacaaaacccttcaggagggtattgctcttgcaaaagaactgaatgaagtattggctaacgaaaagcctaactgtgatgtaatcatctgtactccttttatccacctggcatcggttactccgctggtagatcccgctaagattggcgtaggtgctgaaaactgtgctgataaagaatcaggtgcttatactggtgaagtttcagctgctatggttgcttctacaggtgctaaatatgtaatcctgggtcactcagaacgtcgtgcttactatggcgaaacagttgccatcctggaagaaaaagttaaattggctttggctaacggcctgactccgatcttctgtatcggtgaagtgttggaagaacgcgaagctaacaagcagaatgaagtagttgccgctcagttggcttctgtattctctctgtctgctgaagatttctctaagatcgtattggcttacgaaccggtttgggctatcggtacaggtaaaacagctactcccgaccaagctcaggaaatccacgctttcatccgttcattagttgctgacaagtacggtaaggaagttgctgataactgctctatcctttacggtggtagcgctaaaccgtctaacgctaaggaattgttcgctaatcctgacgttgatggcggcttgatcggtggtgcagctctgaaggtagcggacttcaaaggtatcattgatgcttttaattaatagataatggaagactgataattgataaccggtgaagtgccggttgtcggttatcagtctctataatcatattatcaatcgtctattattatattattcattatgaagaagcttggtttacttttaattgcatgctttgctttcgccgcttttgcttcggcgcagaataacattgtgaagagtttggaacgcaatgtgccgggacagggtaaggtaaccatccatcaggatgcccgcatcgaggccttgataggtcaggaatatatccccaacggaacggagaacagagtgcttaaaagtcagggtttccgtgtacaggtgtatgccggaaacaataccagtagagccaagaacgaagctcacgctgtgggctcacgaatcaaagaatatttcccggaactttctgtttatacctctttcaactctccccgctggctgtgccgtgtaggagacttccgcagtattgaagaagcggatgccatgatgcgccagttgcgtgccacaggcgtattcaaagaagtttctattgtgaaagagcagataaatatccccttataaaaacttactcatgttaggaaaagaagaaatcgtatctcctgcactggatgaactgaaagaacactatcagcgtattataactttattgggcgaagatgccgaacgcgaaggactactgaaaacccccgaacgtgtagcaaaggctatgctgagtttgacaaaaggctatttcatggacccgcatgaagtgctccgctctgccaagtttaaggaagaatacagtcagatggtgattgtgaaagacattgatttcttctcactttgcgaacatcacatgcttccgttctacggaaaagcacacgtggcttatatccctaacggttacattacagggctgagcaagattgcccgtgtagtggatatcttttcccatcgccttcaggtgcaggaacgcatgacgctccagattaaagaatgtatccaggaaacactgaaccctctgggcgtaatggtggttgtggaggccaagcacatgtgcatgcaaatgcgtggggttgaaaagcaaaattccataacgaccacttccgattttacaggtgctttcaatcaggcaaagactcgtgaagagtttatgaatctcattcgccagaattcatttacataacagtctcgtacgttatttcatgaaaggaaactacagttccgtgaagggaaatagttgttcccattaaaggaaacgcgcgtttcctttaggagaaactgttgcttctgtatgaggaaactatcgttctcattaggagtaaggtgatttaaccgagtacaactctgtctcctaatcgtttggccataatacttttgatctcacgcagttctgagtagcgtttcatgatagaggtgcattgttcttcatcattggctacggcagggtcttgcaaggcatacatcatgtgtttcatttcttcactgatgatggcgaacttgaaattaatcatgagcgtaggtaccaattcgaataggcgttcctcatcggtcaccaacctttgggctttggagtgatacttactcagttggtagcggtcggcaatcaactctgtacttagcttactgataatagggtcgggatgtgccaggaaataccgttctgcggtgaacccttcattatgtatatgctctgctgcttctgtcaacatctgcctgtgcagcgggttgtggaaagccagttcatcctccttcaagtcattgactacgtattccgttaccgtgatgggaatttctttcccttcctcatcgggaacgttgcacaatactttctctccgtagcgtactaccatttgcaggataaggcgctcgtatttgtagaattcctgtccttcttttccttcctgtgggatataagatacgtattcggcagcttccggtggaagcggtgcaccaccgtcaggcatttctccatccatgggataaggaggcatgtcttcagggtagggtggttgcattccgtcgggaagcggtgcttgtgcagcgtcgcgggctgcattattctttcttgtttcccggtttctttgttccgcctgcttctccgcctgcgtttcgcgtcgtttggcaacttccgaaaccaatagcttgtcttctatacgaagcagctggctacattctttaatatatacatcacggacaattgcttcaggaataatagatatactttgtacaagattaccaattaactcagcacgcttgataggatcttttcctgcatcttccagcagaagattggttttgaaacgtataaagtcagtttcattatcttgtatgaatttctggaattccgtagcgttgtgcttgcgggcgaaggagtccgggtcttccccgtcgggaagcaggcaaactttgatattcattccttcttccagcagcatgtcgataccacggagagaagccttgatacctgccacgtcaccgtcatagagtaccgtaatgttattggtgaagcggtgaatgagcttaatttgtcccggagtcagtgccgtacccgaagaagctaccacattttccacacctgactggtgcatggaaataacgtccgtgtatccttccaccaggaaacaacggtcttgtttcacaatagcctgtttggcaaaataaatgccatacagctcactactcttatgatagatttccgattcgggagaattgacatatttaaccttgactcccttcgtcgcactgctaagcacgcgcccaccgaaagcgactaccttaccggaaagtgtgtgtaccggaaaaataacacgtccccaaaagcggtcacgcaagcggtgatcgtccgtttcgtagcaaagccctgtcttgacaagatattctttcttgaatcccttctttatggcttcctgagccatggcatcgtgactttcggtgcaatagcctaactggaacttttcgatgatatcatctcggaaaccacggttgcgaaagtatgccataccaatgctacgtccgtccacatggtttttaagtatattttggaagtaatcacgtgcaaagttattcacaatgaacaaactttcacgttcgctctgcatcagcttctcttcactagacagttcgcgctccttgatttcgataccgtatttctttgccagatatttcagagcttcagggtagctcatctgctcgtgctccataatgaagtgcactgcattgccccccttaccgcaggaaaagcatttgcacaaccctttggaaggcgacacgtagaaagatggcgtcttgtcatcatggaacggacacaagcctacataattcacacctcgcttacgcaacgtaacgaagtccgatacaatgtctacaatctgtgcggcatccagaattctgtctatggtaggttggtctatcattggataattgtttttgcgaatgcaaagataaaaaaaatcccccgttgaggacgagggaacctaatgttttcacaacggaataatccttattgtgatttgcttcattttagtctgacaaatatatgaaataaattgggaaaagcaatagaatatagaaagttttttactatatttgacaaaacatcaaaataatatcatgaaaaaaatattaggattagatttaggttgcaatagcattggttgggcattggtcaatgaggctgaaaatactgaggaaatatcgtctattatcaaacttggtgtaagagtgaatcctttgactgtggatgaaatgcagaattttgaaaaaggaaaaagtattaccacgaatgctgacagaactcttaaaagaagtatgcgtcgtaatttgcaacgttataaattgcgtcgtgacactctcattgaagtgttaaaagagcacggttttactttctgaacatggtaataaaacaacatttgaaacatatcgtctaagagcgaaagctgcagttgaagaaatttcattagagaagtttgctcgagtgttactgatgattaacaagaaacgtggttataaaagtagccgaaaagccaaaggaagtgaagatggtgtattgattgatggtatggatgtagctagaaaactttatgaagagggcttgaccccaggggaactctgcctacaaatacttgaagctggaaaaaaaaatctaccggatttttatcgttctgatttacagaatgagtttgacaggatttggaacttccaaaagcagtttaatccggaattattttgtgatgcagtgaaagaagaagttagaggtaaaaatcgtagtcagacttgggccattctagcaaagttctttgtttggtcagaaaaagaatctgtttggaatgagaaagaggcaaggacagaagaaagagtaaaggagtataagcttgtcggtcttaaacgagataccaaagggaatgaattaaaattggaaaattatcgttggcgtgtacaagctctttctgaacaactaaatccggaaatagttgctattgtactacaagaaatcaatggtcagataagtgcttctagtggttatctgggggcaatcagcgatcgtagtaagcagctttacttcaatcgtcagacggttggacagtatttgatgtctgagttggaaaaagaccctaatgtaagtttacgcaaccgagtgttctatcggcaagattatttggatgaatttgacaggatatgggagaggcaggctgagtttcatgaggagttgactgtggaactaaagaaagaaattcgtgacatcattattttttatcaacgtcgtctgaagagtcaaaaaggattaataagtttctgcgaatttgagaagcgagaagttgtagtagaagaggatggcagaaaaaaaataagacagtgggttgccgagtgattccccgttcgcatccgttattccaagagttcaaaatatggcagaccttgaatgatattgaagtttttgcgtgggataaacagagtaaacgcaagaaagcggataaatcttctatattgtttgataactcggaagatgctttgctcgtagaaggaaaacggtttttgtatcaggaagaaaaagagttgctagctaaggaactttttgtaaaagagagtatgaaaaaggctgaggttctgaaactgttgttcgaaaattaccaggaactggatctgaattttaagcagattgatggtaatcatacaggattcgctcttttctcagcatatagcaagatgattgagaagtatggttatgaacctgtggattttaagaaatctgcagatgagattatagaaaagctggaaaccatattcactaatttaggatggaatacagaactactttctattgatttgagtaaagaggataaagaacttgagaggcagtcttatttcagactttggcatttattgtattcttttgagggggataatacaccgactgggaatggtaaactgcttgagaaaattatgcaactttgtgacgtggaaaaagagtatgctgtagaacttgctaatgtgtcatttcaagaagattacggaagtctgagtgcaaaggctattaaaaagatactaccttatttgaaagaaggtaatcaatatgacgttgcatgtgactatgcggggtatcgtcattccaaatcctcattgaccaaagatgaaatagaaaataagatattgaaggacaaattggaaattcttcccaagaatagcctgcgtaaccctgtggttgaaaagattttgaaccaaatggttaatctgattaatacactcattgatacctatggtaaatctgatgaaattcgtgtggaactagcccgtgaactaaagaaaaatgctaaagaacgagaagaattaacaaaatccatagcacgaaatactcgtgaacatgatgaaatccgtcagttactgcgaacagaatttggcatgatgaatgttagccgtaatgatattatacgttataaactctatgaagaattaaaagataacgggtataagactttgtattctaatgagtatattccgagagaaaaaatattcagtaaagagattgatattgaacatgtcattccgcaagctcgccttttcgatgattcactgtctaataaaactttggaatacagggctatcaatatagaaaaaggtaataagacggcttatgattttgtaaaagagaaatatggaaatgatggtttagagaagtttctcaatcgttgcgagaccttattcaaggataaaaggacaaagcttaggaaattaaaaatggaagagaaagatattccggaaggatttatcgatcgggatttgcggaatacgcagtatatctccaagaaagcttttgctatgttgaatgaaattagtcgcagagtggtggctactactggttccataactgataaattgcgtgaggattggcaacttgtggatcttatgaaagaattgaatctgcctaaatatgaaaagcttggtatggtagagatgtttgaggacaaagatgggagaaagatcaaaaaaataacggactggactaagagaaatgaccatcggcatcatgcggtggatgctctgacggtagctttcacaaaagatgtatttattcaattctataataataagaatgctgcctggatgcccgcctccaaggaacatgctaatattacaggtataaaggctcgttactttgaaaatggaaaggctcttgctcccatgcctttggcgcaatttcgcgccgaggcgaaacgacatttggaaaacttgttggtatctattaaggctaaaaataaggtaattacttctaatgtaaaccatacaaagaaaaaaaatggtgaaaacaggaaactgcaacaaacaccgagaggacagctacatttagaaactgtttatggaagtcatcggcaatatgccacgaaaatagaaaaggtgaatgctgcttttgatgctgctaagattgctactgtaagtaaacttgcttaccggaatgctttacttaaacgtttggaggcttttggcaatgatccaaagaaagcatttactggtaaaaatacattggaaaagaatccgttctatcttgatgagaatcaaacagaaatggttccggaaaaagtacagacggtagagtttgaaactgtttatactatacgaaagccgattgatcccaatttaagtatagataaggtggtagatgtgaaaattcgtagtgttttggagaaaaggctaaaagagtatggtggagatgccaaaaaggcattcgtcaacttggatgaaaatccaatatggttgaatgaagctaaaggaatatctattaaacgtgtgagtattcgaggaattagtaatgctcaatcgctgcatgagaagaaagataaagacggtaacttgattttggacaaagaaggaaggaaaatccctgtggattttgtgaatactggtaacaaccatcatgtggctgtctataaaaagcctgtcttggacaaagtgggacagatggtacttgatgaagaaggtaatcctaagtatgaacttgatgaagtagtggtttctttctttgatgcggtgacacgggtaaatcttgatcaacctattatagataaggattatagaagaagtgaaggatggcagtttctgtttagtatgaagcaaaatgaatattttgtatttcccaatgagaagacaggattcaatcccaaagaggtagatttattgaatccggagaattatgcgatgataagtcctaatttgtttagggtgcaaaagtttacctataaaaactatgtttttagacatcatttggaaactactattaaagatacaagttcaactctaaaaggtataacatggactgattttcgtagttcaaaggggttagataaaatagtgaaagtcagagttgatcatattgggcaaatagtatcgataggtgagtattaaaatagggtaatgaataatattaggttgtttcaagataagaaaatccattttgcgtggaatgaagaagagcaacaatggtaattttcaattgtcgatgtggcggaggcgttgactgatagtgttaatcttaaacagtatataaagcgaatgtgttcacgggacgaggtttatcattgaaccaaggtacactttatacctcggttcaaatgatagtataggatgttaaaaagagcaaaattcaagcagtatatataaaggattatttcgtattatacagtctatttcttctaaaatagtacactttaaactttgactagctcaggtgagggatgaacgtgtgcaagagatagagaagtcagagcttacccaagagtatatgaaagaactctatgagcagaaggttatcctaagggttggattgtcagacgtgtggtatagttatccgtcttcacaatgtttggcgaacatgttacagtggaaatcctctcaaaagagtagtcgaatacatctaaaaaagtaagcaagttgtaaatcgtggaggaatgtaactagagtagttcatgagcaagcagagaaggagttaggaagaagcaatatatcttttcgaaacttcttagcaaatttaggaaaaggagaaaaaccgccccaattgtcttttgaagcggatagtgagtagtagataatttaaaaagtagaatactatgattaaaaaaacgctttatttcggtaatcctgtttatttatctttgaggaatgcacagttggtaatcaaattgccggaggttgtgaaaaatgacaccttacctgatggcttcaaacaacaatcagaggtaactaaaccaatagaggatcttggtgtagtagtactggataataagcagataactattacttcaggagtattagaagcgttacttgaaaacaattgtgctatcataacttgcgacagtaagagtatgccggttggattaatgcttcctttatatggaaacacgacacaaaatgaacggtttcgtcaacagttggatgcctctcttcctctgataaaacagttgtggcaacagactgtaagaatgaagattgaaaatcaagcagctgtattgaaaaaatgcgcaggtgaagaagtaaagtgtatgactatatgggctgctgatgtgaaaagtggggactctgataatctggaagctcgtgcagctgcctattattggaaaaatttgtttaaaataaaagggtttacaagagacagggaagggattccacctaataatctgttaaattatggatatgcgattctaagagctgtagttgcacgtggattagttgccagtggacttttgcctacattaggaatacatcatcataatagatataatgcttattgtctggctgatgatattatggagccatatcgaccctatgttgatgagttggtctataaaatattgcaggaggggatgaattgtaatgaactgacgaaagggttaaaagctcagttacttactattcctacactagaagttattatctctggtaaacgtagtcctttaatggttgcggtggggcaaactactgcatctttgtataaatgctttagtggtgaattgcgtagaatattatatccggaaatgtgagatgaaccgatttagtgaatatcgtattatgtgggtacttgtattatttgatttgcctactgaaacaaagagggataagaaagcatatgtagattttaagaagaatctgcagaaagatggctttactatgtttcagttttctatttatgttcgtcattgtgctagtagtgagaatgcagaagttcatataaaaagagttaaatctttcttgccggagcatgggcaggttggaattatgtgtattacagataagcaatttggaaatatagagttgttttatgggaaaaaatctttggatataaatactcccggtcagcaattagagcttttctagaaaaagaaatcccacttaaatgcgggattcttaattgaaaacagcatcgtttttgtatttcaaaaatggtttataactaattgaaaatcaatttgtaatgtaggttgtactgtttcctatggttcaaagatactaaaatgaaagcaaatcacaacagactcggcaatagtttcgaaattcggaatactgtttcctatggttcaaagatactaaaatgaaagcaaatcacaacaggaagcagtacatggtcccattcgattggactgtttcctatggttcaaagatactaaaatgaaaataaatcacaacaatcgagcatattcgtatctacgccaacaggctgtttctaatggttcaaaaatacaaagatgagaaacaaattacaacagaattttatttcattcctgcctatatttgactatttttaataattttagaaataagtatgctcccccaatcctaaatatcatcccctctctttattaacaaattgaagagagaagccccacttccttttccgtaccccctcctctcttcaatcccttaatcccacctgtctattttatcttttccctaattttcgtcagatactgcttcatcccttccgcatccttcgtactgataatttccagcaaattcttcagctccagacgaatattttccacttgcgagggagtgcgcggattaaagagaatttcctgaagcaagtaatcatcctcactcagcaaacccttggcaatagccatatgcttcttgaacgtagtacccggagcctcctggtgcttcatcaccgctgcaaaaacaaacgtagagacaaaaggaatagacagagaataagctaccgtctcatcatgctcgtcgaaagtatattcgaagatattgagacggagcgtctggtaaaggtccttgaagaaaatttttcccaggtggtcaccttcactgatgatgatagcattctcgctgctcagattgctgaggctggcaaacgtagggccaaacatcggatgcgacgatacataacgaaagccactttcctcatagaatttcttcaatcccgtcttcaccgaggcgatatcactgatgatacaatccttgggcagcacaggcagcactttgcggaatgcgtccagcgtatatctcaccgtggcggcattgattaccaactccggttcgaagtcctttatctcttccaacgtggtgaaacgatacgtgttatagacaaaacgcaactggtgcggattcacgtcgaacactgccgtttcatgttggaaacttagaatatctgtaaagaaagagcccatcttgccggctccgagtattaaaatacgcataaatttagtgtttaggtattaatgattagtgataagtgaaagatagcgtagctattaatcacttatcaccagtcgctaatcacttgtttataatttccatttgttgcctcacactctcctcgtgtatcagctcgaataccttcttgataaattccgaatccacgcccagaagcacaccttgagaaccgcgtttatccagaatttcattgtaacgtcccgtttgcagaatcgtcatatcgtgttctttcttgaacgtaccgatttcacgtgccacacgcatacgcttggcaagttcctgcatcaggttgttgtcgcactcgtcaatctgcttgcgcagttcgctgaggttttccgtggtctgtgtctctttacggatgacgagtagattcaggatgtaatccagtacgtccggagtcacttgctgcgaagcatcactccatgcacagtcggggttgcagtgactttcgataatcagaccgttgaaaccgaggtccatagcctgctggcaaagcggtgcgatgagttcgcgcttaccaccgatgtggctgggatcgcagatgatcggcaggttcgggatgcggcgacgcaactcgatggggatatgccattgcggcagattgcggtacaacttcttgtcgtaactgctgaaaccgcggtggatggctgccagacgtttcagaccggcattgttgatacgttccagggcaccgatccagagttccagatccgggtttaccgggttcttcacaaacacaggaatatccacacccttcagtgcatcggcaatttcctgcatggcaaacgggttggcagtggtgcgtgcgccaatccaaaggatatcgatacctgctttcagacactcgtatacatgctttgaggtggctacttcggtagaaacgtacattccggtttcttttttcacctctttcagccatgccagaccgtctacgcctacaccttcgaaaccacccggtttggtacgcggtttccagattccggcacggaatatcttcattcctttttcggccagttgtttggcggtgcacattacttgttcttctgtctcggcgctgcaaggacctgcaattaccatgggacgtttgtcctcaatacccggcagcaaaatcgattctaattcaagttccatattcttttatttttgttcaattatatttttattgtatagatatttctcagtgtcttctgagccctctgcaacccccgtcgataaagcctttcgaacgtgttaataaatacaggcctcgttttttaaaaacgttgcccttattttttaaaaacgtcgggcacgttttttaaaacggtgagtgacttgtgttacaggacttcttttttgtaaatatattacttcatctccctgatgcgcttcaatgcctcttccaatttatggtctttgcagcaaagcgagatgcggatataccgttttccgttacttccgaagataaatcccggcgtgatgaacacgcgtgcgttatgcaacaccttttcagtcagttcttccacatcggcgcagctatcgggaatttttccccagaggaacatacccacctgtttttcatcgtatgtacatcccagtgcatgcatgatttcccctgccagatggcggcggttgcggtagttcttgttatttccgtcgtaccattcctgttcggcttccagagcgttggcggctgccagttgcatggcgcggaacataccgctgtcgatgttgctcttcactttcaggatccattgcacaaagtcggcgttgcttgccagcataccgatacgccaacccggcatattgtggctcttgctcatggagttgaactcgatgcaacactctttggcgcccggcacactgaggatgctgagggggtggtcgtttaggatgaagctgtacgggttatcgtttacaatcacgatgtccttacggcgtgcaaagtccaccagttttgcataaagttccggggtggcgttagctccggtcggcatgttcggatagttggtccacatcaactttacgcggctcatgtccatcttttccagttcgtcgaagtcgggcatccagccgttttcctctttcaggttgtagttgatgacttccgcgcccagtatcttgctcaatgaggtataagtgggatagcccggattgggaaccaatacctgttcgcccggattgacgaaggccagtgtgacgtgcaggataccttctttcgagccgatgagcggctgtatctcagtattaggattcagttccacgccgtaccatttcttataccaggtggcaaagctgcggcgaagttcggggataccgacataaggcatatagccgtgtccgtcagggttttgtgcttcgcggcacagggtttgtatggttgcttccgagggaggcatgtcggggctgccgattccgaggctgattacgtcttttccttcggcattcatttgtgccacctctttcaacttcttggagaagtagtattcgctcacgctggccaaccggtcggcgggcttgatcttagatgtttgattttccgtctgcatattcgcctaatattttaagttctttggttagcggtgtgatggccgcgatggattgtttatatctcagtaggttgtcgaaaacaacgtctacgtaaaattggtattcccattcccgcccgatgatgggcagtgactgtattttggtcaggttgatgctgtagaacgaaagaatggacagtacttgcgagagactcccttccgtgtggggcagtgtgaataccatgcttgccttgttggtttccgggtgtggatggcggcgtatttcgtctacttgccagggatcggcaaccaccagaaaacgggtgaagttgtgcttgtttgtttcgatgccttcctgcaacaccttcatgccgtaacgctcggcagcagccttggagcagatggcggcgtgtcctttcaggttctcccgcttgatgatttcggcgctgagggcggtgtcttccgcttccactactttcatcttcgggtgctgggcaaggaactcgcggcattgcatcagtgcgatggggtgggagttgacttccgtcagatcgttccaatcctcatcgggcaggcagacaaagctgtgtgaaatgcgtagtttgtattcgcctatgatttgtgttccgctctgccgcagcaactcgttgttgtgcaacaggctacctgcaatggtattctctattgccaacattcctatggtcttgctgtccttcttcacggctgcaaacacgtcctcaaaagtagcgcaacagattaactctatttcttctccttcgaagtacttgtgtgcggcaatgtcgtgatacgaccctaatgttccttgaatggctattcttttcatactgtttctttaaaataaaaaatcccgcttccatacaatggagcgggattaagtatattactttagttctctattcagttcttaagcatcactgtcacttgacacatacaaactcccgctctactttctggctaaagtaaaagtaaaaaaagaagtaatatgtataagtaaacaaattcatactttcgttttctttttgtttttaatttcgtggcaaaagtaatacttttctcttatatgcaagcaaaaaatgatattttttttatttcttcttcaaaattagctttcagacgagtacttccggttgtctttttctgccggaaatccatcaatcgtcgtgcatgattcccttgatttgctcccatttgttcacggcatcgttggactgtgccttgcccggagtgctccggccttcgcggatgtatttttgcaacaggtctttcagttcgctgactatttcgggatgttcctgatatacatttttgctttcggtgggatcgtctttcatattatagagttgtatcggggggagctgggcaatggcttccttgtcaacacccggtttggggtaactccaaccgccggaactgggggaacacaacagtttccagtctcctttacggatggcaaactctccgcggatggagtggtgcacggtggcttcacggatggttggcatgtggtgcggattccggatgaggggaagaatgttgtagctgtcttccgcttcgttatctttcagggtataatggttgagggcggcaaaagaggcgtagaagtcgttgaggcagacggtttgcgcacaggtgcctcgacctgcaccgttgacccattccacgatggtgggtacgcggtgaccgccgtcgaagagatcggctttcatgcctcgccagatgtagttggcatgatgccctttagcggccatctcagggatacctccggcgggagagcaaccgttgtcggtggtgaaaactacgatggtattggagtctatgccgttgcgtcgcagggcttcgcgcacttgtcccactacatcgtccaccatcaggacgaagtcgccgtaatcacccagtccggtttttcctttgaaggcttcggcgggcaggatgggggtatgaggggcgggcaggggcagatagaggaagaaggggcgttcgtcttgcgcgtgacggttgatgtagtctactgcgcggtgagtcaggttgggcagacagtcctggtggttgaagtcgttggctatggcacctgcacgccagaagcccggtttctttcctgcgggtacggtacctatttgagtggtggtgggctggcggttttctatatatacatagggggccatgtcgagggagccgcagaagccgtagaaatagtcgaagcctaagtcggcaggaccgttggtgatgggtttggagtagtccacgtcttcgtcgttgagggcgttggcgtcgggtttctcatgtcccggtttcgtgccccagttccagcctaaatgccatttgccgatgcaggcggtggtatatccgtttgctttcagcatggatgccatggtgctgcgggtggtggggatgatagggcgggagtagccgtagagtacaccgcttttgaggctggaacgccagttgtaacgtcctgtgaggatgccatagcgggtgggggtgctgacggctgaacaggaatgagcatcggtgaacattacgccgttggcggccatctggtcgatgtggcgagtttggatatgcgagtctttgttgtaggcggagacatctccatagcccatgtcgtcggcgaggatgaaaatgatgttcggcttttgctgggatgctgactttgcttgttctgcggtttgtgcagacacatgctgtccaaggcagaagggaacggataataatccgagataggtgaggtttttcatgatatgatgttttgggtttgattttacttggttattatgtacaaaattagctgttcgatggaaagggctttattagttctgtctcaaaagtttgagatattgttgcaagtgcggagtggttattatgaatttaaacaagggaagaattctgttaatgtattattctttttctgatcccataaaaaagcattcttccttttggctattccctgcaattcatctatctttgcattagccgaagagaaatgcggcgtgatgaagctatttttgacaaggagaaaactggtaattttatttaagtcaagaaacagaacttcaataaagatgtttcacgcagaccatatagggtcgggcgtgcaagcgtatttattggttctgtgggtataccagtacctctccttggataaatatgaactatacgtccgacttctttttgtataagggggatgagggcgattttaaatatttaaaatccgaagaagacatgaataccccgaaggatgaaatgataacagaggccatccactgcatggtagaacagagaaaacacgagatatgggaagtgctctacccattaagtataaaatatggttttacgctcgactccgactatgccagcatcaagctggaacctccctgtaaagactttccggaagaaaaatgcggatgtaaattaccgcttgattccgtgtacagtgcctttgtgaaaggtgattttctttatgtgatgtgccgcgggaaagtgtattttatcctcgatctggaaagtggtttgtggagactgtatttgccaatgcaccgacctccaaggctgaaagtactgtggtggaggattcaagagacaacaagggatttggtgtggttggtgagacattggaaggactgaaataattcacgacatagtcacacctcttctactcgtgccaactcccagccggagaactgcatcacgatgcaatgcagcgttgtcctttggcacatcaactgtaccttagggccttcggcatagcggtgaatttgtgctacggcatccttccactgggcttcgcctttggcgtcatagtccttggcaggaagatattttaactccagaatgtagctgtgttccacttcgggatagcgttgtaggtcaggcatcaggaacaaatcacaaaagccgtggttcaactctacttcgggcgcagtaaggtaataggaattgatgctgagataggcttggaagaagccctgaatgttacgctcaccttcaattagactgcgtacggaggaattctctttgtaatcgtaggcaatcttctccatggcaggacgccagtcaccatcgaaggccatgttatcgtacaggttcttcaggtcgttcaggctgatgcgctccttattctgatattgctccagcatataatcgtagtattgtttacgtacatt

SEQ ID NO: 2291 - DNA, 23012 bp, synthetic construct
  source 1..23012: mol_type = other DNA
  misc_feature 1..23012: note = Synthetic
ataagatttgttcctcaaatccgatatagctgcaatgaatacgggttgttttttcgggaatggaaagagaaaatttaccgtcaatatcagtaactgttcctaaggaaacctctgatgatccgttctttttcagttcatccgtatgaacgtagaccgaagcaccaatcaacggttcgttatcttcaccggagattactaccccagtgatagtacgattagccgcactggccattgccagtgcgttaacaaggaagcatataataatgcaaagatgttttttattcattaattgtaaataaacgtaagtgattgaatcgaattatttaatacctaaagctgtattgatacgtaaaatcatatcttcgtaatgataacgtgttgctgtatcagacgttccgaggcggctctgcaataatttcttaatccgcagtaactctccgcgtttcacggatattgcatccgagatacgattcagttggctgccgtagaagttgagaactcggtgagctcccattttatcttcctgtcggagcgaacgttgttcggccgcatagcagctgcagaaaggagtggcatgatcgagcaagaaatgatcgtctgcaatctttttattgattttcacagcttcgggctctgcggcagctgtgagtaatgcatccagaaagtttttttgcaaagagcgttccatcacattgggaatacctcctcgttcggtaatgccgaaaatattcttgtggagtccgtccattagttccactacggtaaacgctttttttccattgactgattcattttcaatcatacgcatcagacgggtgttgccaagcaagtcccaaaggatgtaggcttgtgcattcttcagtatctgcgtcggggcgttttcttgttgtccaaccggggtgttacggagcaaataggtatattttcctacttccgtatcgaacaaccatttaggataagtcagtacttcatctgtcagaaacttcaaggaagcctgttgcttctctttctcaacgaatgtgtaggtctggacaccatctcctatgactgtattttcgatatagatgccaccaatgttggccagtacgtgatacagatagttgttccattgattgataattgcgtaatagaggcgtgaggcttcttcgtaagtctgccctttttctccggtagtagtccattgaaggatttgcggaacgatgcgtttcaggttgtcaatgccaagtaaggaagaacgtacgggatcatcgcctaaatcttcattctgtgcacgtggatcaacggcatcacgtacatcctgtgcttcactatatttataaagacggtcggtatgcttgctcaggaaatcaaataagatatctttttcttcttccggactattctttccgtaccagcgatatccatattcgatggcaaagatatcgtaaggaccgatatgcggggaaagaaccttcacgccatctcccggttgggctatgtagttgaagcgggcatagtccataatagaagaagcggtggaatttaatcgggaagtgaacgttgcggaacgtaaggaatcagttgggaacgctgccgatcccatcatgttgtgacgcaatcccaaagagtgccctacctcgtggcaggcaacaaagcggatagcatcacccaatagtgaatccggcaactgcacgctgcgtgcttccgggcaaacagttccggtctgtactgtaatccattcgcttaccatagagagcacattgtgccaccacatgatgtctgcttccagaatctctccggaacgggggtctaacaaagaaggtcccatcgcattcttcttttccgaagctgcgtaggtcagtacggaatagttcacgtcatccatatctatttccatactatcggtaacttcaatggcgatgattgcattcttgaatccggctttttcaaaagcgatctgccagtcttcaatacctctttttatatatttgcgccattgataaggtgtggaattgtcgatatagaatacgattggtttggcgggttctaccacctttcctttcaggtaagcttcccggtcttccagtttgggttccatacgccaacgggtgataaactgctttttatccgttctttgctgtgcatcgctgaaactcaatagcggattggtgaaataacctattttctgattatcaaaacgtcccatcatcggagtttcaggcagcagaaggatagaagaactgacttctaccgttacatatacgcttgttgttccttccgtcactttagtagtcagctcggaagtggcaactacattgttcggaaaggatttcacggataagatacgtgatagatttttaatagccgatgttcccagattgatattggtaaatacattattaatgctggtttccgtaccgtcatagatgtcgttgatcttgatcaccaatgctgtagagtcctgattgacagcctctatcttgaatgcggcaataagcggtgatataaaattgtccttaaccgaacggaaaatagcatccgtctgaggagccagaggtaacgggcgttgttggcggaacatcagtttcccggttgctttgtcccattccatgcaaatcatttgattttcataatttacaccccggtttactccagcatcgttcaattcagccggtactcgttgtaacttgttgacaacaagtaaatcgcgccctagcaatgatgtgggaacctcaaaataataatcgttctttttttgataaacggcaaacatcccttttttaacactgctgccttccactaatttctcgtagtcgctttttactctctcttcttctgaattttttttctttttctttttgaaccaactcagattttctgtagcaggggtagttgcaagtgctgagtacgcttctccactcagcaatatacatgcaatgaccgctgccattacctttacatacattctcattaagtccttttacttttaattattattaaaaacagccgcaaaagtaataatattaataatataatgattacagtttagttgcgaatataataataaaaggaattattaactaggttcatctgctatcattcttcccggatatttcgtaatctagttggaataatgtacatttgcaggagtaaaaaagtgaagaagataatgaaaagatatattgctgctttattattggcctgttgcgtggaggggtatgcacaggaaaaaaagcaggctgcctttgtgccacctttcgactttccccttacattgagtggaaacttcggagaaattcgttccaatcactttcatggcggattagattttaagacgggaggaacaatcggcaaaccggttcgggcacttgctgacgggtatatctcacgtatacgtgtcaccaatggttcggggtatgtgcttgacgtctgctatcacaacggctattccactatcaaccgccatttgagcgcttttctgtctcccattgccgaaagggtaaagaaacttcaatatgaaaatgagaactgggaagtagaaatcattcccgaacccgatgaatatccggtgaaagccggacagcggattgcgttgagcgggaataccggatactcattcggaccacatcttcatttggatgtattcgagacggagacgggagactatatcgaccctatgcctttctttaaaaagaatctgaaagatacacgtgccccgaaagcggatggtatcatgctttttccgcagcttggcaaaggagtggtcagtggaagtcaggaaaataaaacgattctgccgaacagtgaacatccggtggaagcatgggggggaatcggcacaggtatcaaagcgtatgactacatggacggggtaaataatcattatggagtgtattccgtagtgcttacggtagatggtgccgaagtgttccgtagtaccgtagaccgcttttcgcaggaagaaaaccgaatgataaattcctggacgtatgggcagtacatgaaatcctttattgatcccggaaatacattacggttgttgaaagcctcgaatgataaccgtggcttggtaacgattgacgaagaacgggattatcagtttcaatatacactgaaagatgcttttggcaatacttcccgctatcactttacggtacgtggcaagaaacagccggttgaaccgttgaatcatcgggagaaatatttctttgcctgggataagacgaattatctgcaggaaccgggcttgagtctgattgttccgaaagggatgctatatgataatgtacctcttcaatatcaggtaaaagcggatagcggagcggtcgcatttacctatcaattgaatgataagccggtcccgctacatgcaagctgtgaactgcgaatcggattgcggcgcaaaccggtggcggacactacgaaatattacgtggcgcgagtgacccctaaagggactaaatacagcgtaggagggaagtacgaagatggatttatgaaagcatctattcgtgaactgggcacatatacggttgctttggacactgttcctccggaaattatacctgttaacaagaacttgtggggacgaaacggaaagattgtctatcggctgaaagatgaaggagcaggtatcgcttcctatcggggaacgattgacggtgaatatgcacttttcggtcgtcccaatattgtaaagtcttactgggaatgtgtgcttgacccgaaacatgtgaagaaaggcggcaagcataccgtagaaatgactgtcacggatgcttgtggaaatcagaccgtttcgaaggaaacttttgtttggtaaactattaaaatgtattatatatgaagaaaagaatcattctatctgctgtcctgtctttggcggctctggcgaattctttcgcttgtacgaatctgattgtcggcaaaaatgcctcgactgacggttcgactattgtttcctattcagccgattcgtatggtctgttcggtgagctttatcattatccggctgctacatatcccaaagggactatgttgaaagtctatgaatgggatacgggtaagtatctgggcgaaatcgaacaggcacgccagacttataatgtgactggcaatatgaatgaatttcaagtgactatcggtgaaaccaccttcggtggacgtccggaactggcagattctaccggaatcatcgactacggaagtctgatttatatcggattgcaacgttcacgttctgcccgcgaagcgatccgtatcatgactgacttggtacagcaatatggctattatagtggaggtgaatcgtttacgattgccgatccgaatgaaatctggattatggaaatgatcggtaagggaccgggggtacgtggtgctgtctgggtggctgtacgtgtaccggatgattgtatctcggctcatgccaatcaatcccgtatccatcagtttgacatgaacgacaaagaaaactgtatcacttctccggatgtgatttccttcgctcgcgagaaaggttacttcaatggtgtgaacaaggatttcagctttgctgaggcttatgcgccacttgatttcggtgcccgtcgtttctgcgaagcccgtgtgtggagctatttcaataaatttactgatcatgggaatgactatcttccttatatagaaggaaagacagatactccgatgcctcttttcgtaaagccgaaccgtaaactttccgtacaggatgtgaaagatatgatgcgtgaccactacgaaggaacaccgcttgatatttccaatgatttcggtgccggtccttataaaaccccgtatcgcctttctccactgaatttcaaggtaggtgataaggagtattttaacgaacgtccgatttcgactcaacaaagtggcttcgtatttgttgcacaaatgcgtgccaacaagccggaccccataggcggcgttctttggtttggagtggatgatgcgaatatggccgtatttactcctgtttattgctgtacgacgaaagccccgttgtgctatacacgtgtagatggcgcagactacatcacgttctcctggaattccgctttctggattttcaactgggtgtctaatatggtctatccgcgttatgatctgatgatcggtgacgtgcgtgcaactcagaaagagatggaaacgacttttaataatgcgcaggaaggtattgaagaaatggcagctaaattgctggcaaaagataagaatgccgcaatcgctttcctgactaactataccaatatgaccgctcagagtacttttgatacttggaagcaactgggcactttcctgattgtgaagtacaacgacggagtagtgaagcgcgtgaaggacggacagtttgaaaggaattctatcggacagcctgccggtgtcattcgtccgggatatccgaaggagtttctggaggaatatgtgaagcagacaggagagagatatttggtgaaatagttgtcaattattcattaaataactaggatttataaacttattcttttacatttgtgtgctcaagacttggtatatattcaaggattgacagagaatagagaaataatcattaaccaataaacaataatcgaaatggaaaatcaggaacttatcaagcaggtcactgagaaagccgaaaaatggctgaccccggcttatgatgccgaaactcaggctgaagtgaaacgtatgttggagaacgaagataaaaccgaattgatcgaagcattctacaaagatcttgaatttggaacgggtggtttgcgtggtatcatgggagtaggtagcaaccgcatgaatatctatacggtaggtgctgctacacaggggctttccaactatctgaagaagaacttcaaagatctgcctcagatttctgtagtggttggtcacgactgtcgtaataacagccgtctgttcgctgaaacttcagccaacattttctcagctaatggcatcaaagtatatctgtttgatgatatgcgtccgactccggaaatgtctttcgcaatccgtcacctcggttgccagagcggtattatcctgactgcttctcacaatccgaaagaatacaacggttacaaagcatactgggatgatggtgcgcaagtactggctccgcacgatgctggtatcattgatgaagtgaataatatcgcttccgctgctgatatcaagttccaggggaacccggatctgattcagatcatcggtgaagatattgacaagatttaccttgatatggtgaagacagtttctattgatccggaagctatcgcccgtcataaggatatgaagatcgtttatactccgattcacggtacaggtatgatgctgattccgcgcgctttgaagatgtggggattcgaaaatgtatttactgttcccgaacagatgatcaaagacggtaacttcccgacagtaatatctccgaatccggaaaatgccgaggcgctttctatggctgtcaatctggctaaagaaattgatgccgaccttgtgatggcttccgatccggatgctgaccgtgtaggtatcgcctgcaaggacgacaagggtgaatgggtactgatcaacggtaaccagacttgtatgatgtatctttactatattctgactcagtacaaacaattgggtaagatcaagggtaatgaattctgtgtgaagactatcgttactaccgaacttatcaagaagattgctgataagaataacatcgaaatgctcgactgctacaccggatttaaatggatcgcacgtgaaatccgtctgcgtgaaggcaaaaagaaatatatcggtggtggtgaagagagctacggtttccttgctgaagatttcgtacgtgataaagatgccgtatcagcttgctgtctgattgcagaagtagctgcatgggcaaaagataacggtaagtcattgtaccagttgttactggatatctacgtagaatatggattctccaaagaattcacagtgaacgtagtgaaaccgggcaagagcggtgctgaagaaatcaaagctatgatggaaaacttccgtgctaatcctccgaaagaactgggtggctctaaagtgattctgagcaaagactacaagacgctgaaacagacagatgctgaaggtaaggtgactgaccttgatatgccggaaacatctaatgtactccagtacttcactgaagatggaagcaaagtttcagttcgcccgtcgggaacagaaccgaagatcaaattctatatggaagtacaaggagaaatgggttgtcgcaactgtttcgcttctgctgatgctgctgcaatggaaaagattgaagcagtgaagaagtcattaggtatttgattccgttcttcttctgatatttctgaatagagaaataataaataacgcctccatagtctcgaagattatggaggcgtttcttttatgtaaccgccttttcatcggtctttcatttcctttgcattctttaagttcccttgctaatccttcttatggaaatcttgttctatctaaatcatctcaatttaaacatgcaggctacggggatacacggttttgttgatgctttagagtgatacgtaacgtttcattttcataagttgttcgtttgtagtttgtgtgtacttcgtggcctgctttcttactaattccatagatgtatagaaaaatatttttcatgcgtgaatataaaaaagcccccgtagaaggacgagggcaacctaatgttttcacaacggaataatccttattgtgattcgcttcaattagtatgacaaagataataaaagaatttgatatataattctttttgtaggaaaaaagtgatatatttggtggaaaatgtaaaacacacaagtatgaagaagatattgggattagatttgggtacaaatagtaccggatgggctttggtaaatgaagcagagaatacggcagaaaaatcgtctattacgaagttaggagttcgtattattaagtatgataatttcgtgaatactgaaacagggtcagagagcaaagaacctgaaaaggatttctgtggaggtaaggggatatcccctaatgccggtcgtacaaaaggcagaagtgctcgtcgtaatttgcaacgatataaattacgtcgtgctaatctgatagaatacctgaagaaatgtggattgattacagattccgcagtattgtgtgagaacggcaatcgaacgacttttcagacttatcgtttacgtgcaatggctgtaacggaagaaatttcattagaagaattgtctcgcgtttttttgatgataaataagaaacgtggatataagagtagccgtaaagcaaaattgcctgatgaaggacagttgattgatgggatggcagtagcagaacagctatatgaaaatgatttaactcccggtcaatttgttttttccatattacagcaagggaaaaaaagtattccggagttttatcgttcagatttgcagaatgaattaaatcgaatttgggatcatcaaaaacaattttatcctgaaatattgactgatgagtttcgaaaacagatagaaggggaaggaagaccgaatacagctaaaatgtttttaggtaaatataagatatacacggcagatattaaagggaaagataaacgtttacaggcttatcaatggcgttcgaatgcgttgacgagccaattgtctatagatgaagtcgcttttgttgtcagtgaactaaatggagccattaataatgcgagcagttatttaggagcgattggtgatcgtagtaaagaactgcgctttaataagttaacagttggacagtacttgatgaagcaactagataaggatcctaattatagtttgaaaaatcaagtgttttatcgtcaggattatttggatgagtttgaagctatttgggaaaaacaagctcaatatcatccggaactgactcctgaattaaaaaagacattcgtgatattattatattttatcaacgaccattaaagagtcaaaaggggttggttagtttctgtgaatttgaaagtcgccagatagaggttaatgtagatggtaaacagaagttaagaactattggatgtaaggtatgtcctaagtcttctcctttatttcaggagtttaaaatctggcacactcttcattctttgatagtgaaagagaaaaaaacgaatgcggagcgtttcctgtatcaggaagaaaaagagactttgtttgcggaattgaatataaaggagacgttatcaaaattggatgctctgaaacttttatataagaactataaggatttagacttgaattacgataaaatagaaggtaatcgtactcaagcggcattgtttaaagcctatcaaacaatcatttctatgacagggcatggagaatatgatttctctaagatgatgtcggatgaggtaatggaaatagtagaaggcgtttttagtggactgggttataatacggatatattacattttgatgcggaaaatgaattatttgataagcaacccatgtatatgctatggcatcttttatattcttatgaaggagataagtcgagcacgggaaataaaagtctgatagataaaatatttaagttatgtggttttgaaaaagaatatgcaagcatcattgctaatataatttttcagtctgattatggaagcctgagtacaaaagctatacgtaaaattttacctagaatgaaagaaggtaatgaatatagtttggcttgtgaatatgctggttatcgtcactctcaacgttctttgactaaagatgaattagataataaggtatataaggatcatttggatcttcttccacggaacagtttgcgtaatccggttgtcgagaaaatcttgaaccagatgattaatgttgtcaactttgtggtagatgcttatggaaaaccggatgaaatacgtattgaactagctcgcgagctgaagaagagttccaaagaacgcaaggaaatgacaatggcgattaataaaacgactgctgaccatgaaaagtatcgtcagatacttcaaaaggaatttggattaacaaatgtgactcgtaatgatatcattcgttataaattgtatttagaattgaagagtaatgggtataaaactctttattctaatacttatatacctcaggaaaaactttttagtaaagagtttgatattgaacatattattcctaagaccaagttatttgatgactctttctcgaataagacacttgaaagtcggagagttaatattgaaaagagtaatctgacagcttatgactatgtattgggagtatatgacgagaaaggtatcaatgattatgaaattcggatagaaaatttatataagagtggaataatcagtaaggccaaacgtgataaattgatgatgaaagaggtggatatcccaagtggatttatagaacgagatttacgggattcacaatatatagcgaagaaagctcgggagatattggaagaattagtgaggtttgttgttcccactaccggaactatcacggatcgtttgcgtgaggattggcaactgatagacgtaatgcaagaactgaattgggaaaaatatgataaattgggacttactgagatagtcaaagataaggatggtcgccaaatccgtcgtataaaagattggacaaaacgtaatgatcatcgtcatcatgcaatggatgcgctgactgttgcctttacaaaaagaagttatatacaatatctaaataatctgaatgcaaaaagtgacaagtccggtagtatttatgcaatagagcaaaaagaactttatcgggataagcatggaaaattaagatttaatccaccgatgccgcttgatgtgtttagggcggaagctaaacgtcaattggagaatacgctgatctcaataaaagcaagaaataaggttgtaacgcagaatgtgaatatcacaaaaacgaaaaaaacagagagtggttatcgcaagaaaattcagttgactccacgtggacagttgcataatgaaacattttatggagcaataaagcggtatgtgactaagttggagagtgtcggttcgggttttaatgtggaacagatagcactcgttgccaataagagatatcgggaagctttgcttacacgtcttgcagcttgtggaaatgatcctaagaaagcttttactggtaagaatagcctggagaaaaatcctctttatttggatgaactgcatactcagcaagtgccgacaaaggtgaagacggtgactttagagactgtttatactactcgtaaagatatatcttcggatttgaaaatcgaaaaagtaatagataggaaggttcgtagtatattgaaagaacgattaaagaagtttggaggagacccaaagaaagctttttctaatctggatgcaaatccaatctggttgaataaggaaaaaggaatttctattaaacgggtgacgataacagcagtaagcaaggctgaaccattgcatgcaaagagagatcattttggtaagtatatattggatgctaatggggcaaagcaacctgtagattatgtaaatacgggaaataatcatcatgtggctatatatcgggatgaaaaaggtgtgttgcaggaacgtgttgtctcgttttatgaagcaactgcttcagcttctgttggtttacctgttgtggataaggaatataggaagtctgaaggatggacgtttttgttctctatgaagcaaaatgaatattttgtttttccaaatgagaagaatggctttaatccaaatgagatagatttgatggatccggataattatgctttgatcagtccaaatttgtttagagtgcaaaagattgcatcgaaagattatgtatttaggcatcatttggaaacgacagtagaagataggaaagaattgcaaaatattacttggaagcgatttcaatcacttactaatttagataaattagtaaaagtacgagtaaatcatattgggcaaatagtatcggttggagaatattagatttaagagatgttctactttaaatatgattactatgattaagaaaacactttattttggaaatcccgcttatctgtcgttgcggaatgcgcaattggttattaaattaccgggggtagagaaagcggaatcgttaccagatatgatgaaagctcaggcagaggtaacaaaacctattgaagacttgggagtggttgttttggataacaaacaagttactatcacttccgggttacttgatgccttgctcgaaaataattgtgcggttatcacatgtgatagtaagagtatgcctattggattgatgcttcctttgtatggaaatacaacacaaaatgagcgttttcgacagcagttggatgcttcattgccactgaagaaacaactttggcagcaaactattcagatgaaaataaataatcaagcatctgttctgaaggattgtgtggatgaggaagtaaggtgtatgcgtgtgtgggcatcagatgtacgtagtggtgatcctgataatttggaggcacgtgctgctgcttattattggaagtcattgtttgcagatattgaaggatttactagagaacgtgaaggcatatatcctaataatttattgaattatggatatgctattcttcgcgcagtagtagcgcggggattagtgacaagtggattattgccaacattaggtattcatcatcataatcgctataatgcttattgtttggcggatgatataatggagccttatcgtccttatgtagatgaattagtctttaaattggttcagattaatggaaaagtgttagacttgacgaaggagataaaagcgaagttacttgaaatacctactttggaggttaaaataggagggaagcgaagtcctttgatggttgctgttggacaaacgacggcatcgctttataaatgtttcagtggggaagttcgtcgaatttcgtatcctgaacggtaatggatcgatttagtgaatatcgagtcatgtgggtacttgttctttttgatttgccgactgaaacaaagaaagataagaaggcttatgcggatttcagaaagaatttgcaaaaggatggttttacgatgtttcagttttctatttacgtgcgtcattgcgctagtagtgagaatgcaatggtgcatataaaaagagttaaatcttttctccctgaatttgggcagattggaattatgtgtattacggataaacaatttggggacatagagcttttttatgggaagaaaatccaaaatgtgaattcaccaggacagcaattagaactgttttaaaataaaaatcccgcattgacgcgggattttttgatggaaacaactctcttttttcttttctgaacttctttgtaaattgttgattcacaatgggtaagtgataattagttgtgtccaatggttcaaagatactaaattgaaagcaaatcacaacgttttgaccttcaggtagcatcttctttgtgttgtgtccaatggttcaaagatactaaattgaaagcaaatcacaacgcaaaagcacggtgctgaaactggcagatgttgtgtccaatggttcaaagatactaaattgaaagcaaatcacaactacggctaagctgttccaagcggaggtatgttgtgtccaatggttcaaagatactaaattgaaagcaaatcacaacaagccgaggcaatgaacagtacctatgtagttgtgtccaatggttcaaagatactaaattgaaagcaaatcacaactcaatatcaacgtaccaataacttgtcgttgttgtgtccaatggttcaaagatactaaattgaaagcaaatcacaaccattaagtttattctcgactgttttctccagttgtgtccaatggttcaaagatactaaattgaaagcaaatcacaacgaccaagctagtcactacctatccttatggttgtgtccaatggttcaaagatactaaattgaaagcaaatcacaacgttcaatgcgcctggattaaacgtgtactgttgtgtccaatggttcaaagatactaaattgaaagcaaatcacaactctaccacctacggtgctccgtcggctccggttgtgtccaatggttcaaagatactaaattgaaagcaaatcacaactagttcgataatagcgcattctaggttgtgttgtgtccaatggttcaaagatactaaattgaaagcaaatcacaacaggattatttacgttcttcacataagtgcggttgtgtccaatggttcaaagatactaaattgaaagcaaatcacaactgacgaattcatttgtcacggaaaaaaatgttgtgtccaatggttcaaagatactaaattgaaagcaaatcacaacaaataaaagccgtatctttgcaacatcgaagttgtgtccaatggttcaaagatactaaattgaaagcaaatcacaacatctatgaatcaattagtattcctaacacgttgtgtccaatggttcaaagatactaaattgaaagcaaatcacaacgtcactccactgtaccaaccatcaaccccagttgtgtccaatggttcaaagatactaaattgaaagcaaatcacaactaccaagcggaggtatatatacctttggatgttgtgtccaatggttcaaagatactaaattgaaagcaaatcacaacccttgcaggaaaaaacctacgctttggaacgttgtgtccaatggttcaaagatactaaattgaaagcaaatcacaacgattacgccgtctttcaccacgagaatgagttgtgtccaatggttcaaagatactaaattgaaagcaaatcacaacccgaagacaacatcccaattgatgacgttgttgtgtccaatggttcaaagatactaaattgaaagcaaatcacaactctgatatcttcattattttgattttatagttgtgtccgatgattcaaaaatactaaaatgaaaacaaactatagtaacaaattttagttatatttctctgcctgttatttctgctgcctcaagtattgtagtttgttcatatgatgttaaattgctaatgatgtgagattatactttgtctattaccctttctttatctttatccaagtccatcgatgccagatggtttccaatggtccttgtttgtgcttcgacagccaccatttacagaactgtacctgtaataggaacagaatgattccgataatcagactgagcgtatatccgcaatagggagccagataaaatccgaatgggaagtagatgatagctcccataatagattgtgtgatgtagttagtcagactcatttttccgtaaaagcgcaggttggaaacggttttctggaacttagccttctgataaagtaagatgaaggaagcaatcagtacgatggtaaatgcgaatttctgccacatatcgaaagctgtccctacggtctgttgaatcaggctactgtcactttgcatgatctgctctttcaaagagtaaagcggagcgaaactgatagctgcaatgatcagtgctttggtccagaatttcagatgagactcggaagtgacgaacagttctttgcgtccgatgtacagaccgaacaggaaaagtccggcagtctgcaagaaacgtccggcaccaatggcccagaacaagctcgctttctgtcctaatgtgacgttgccaatgaggaattcccaaaaagttccgtttttggtgtaatctgccacttcgctatacatggctccgacattcagatcgggcagggtgtaggcaggattgaacagactcattatataatggaaccattcaataggctgtaatgaaaataagatagcggtgattaaaatagccttatcgctccatttgcgtacaataaataatatgataccgacaacaacaaacagaagcaaaacatctccagccggaaagaaagccgcgttaagagtggcaaaaccggcaagtaaaaccagtctccataaaaaacggtagccgaaatctttgcctttcaactgctgattatgcgattggatatagaaagtaaatccgaaaagcagtgcgaatatggcataagattttccggcgaacagtgaaaatactgcattaaacactccagcatctaaaatgctaagccattcgggagaactttccggataaacggggaaaatgaaatgttccagattatgtaccaagaggatggccataactgcaaatcctctgagggcatctactacttcaattcgtggtgtcttttttaataattccatggggttgatttatgattgttttttagttagtattcgttttacccatttattggcgggcttttcgaaataatagtaagaaagtaaactaagtataatggtgataccgaaaatgaggggaacactgatcatccatgacacctgccattgatagagcgctgccattttcgtatatgtgagtataataaacaaatgtatcaggtagaaactatagctgatttctccacctattatcagaaaccgattggataatagccgggatatacctcccttctggaaggcaaagatgagtatcatcagagaaacaggtaaccagtaatagcaagaataacggtatactttaggtatatctgcggcacaaagataaaaaagaagaaataaagcgacggatgctacttccaacaatgttcccgtggaggaagaaatttttttattgtgtaatgactgatagatctgataaagtaatactcccacaaaaaaatccggcaggcgggtgatgggattgacataccaatatgctttgatttgttcgtcggcagtcagatacatacctgccagcatgaccggaagacagattgagagtacaaccaatagttttcgcctgctgcttaagaaaggaatcacgaaaggaaagcagaaataaaataactgttcgcaccccaagctccatgaaggactgttgaaagagaaaaaataatcggcagaggggaagaagggctgtaacagaaaggtagaggcgacaaagtgtttgatccagtccgtcgtatcgctatattgaacatatcctcctatacatgcggcaattaatagtgtaagtagatgcaggggataaatgcgggcaatacgtgctacccagaacgtgcgtttagtagtcgtttttgtcagtagtttttcctgataattgtaggcaataataaacccgctgaggacaaaaaagaaactgactccgacaaatccttctttaaagaagtgggcatcgaaacttgtatccagaacatagcaatgtgctccgaataccatcaaggcaaagaatattcgtaaagatgttaatgtgttgatcacgatgtttatctgtttcttttttgtattcggctgtaaaagtacagtttttctgtgatataaaaattcacatagattaaaaagaactcaggattcggagcgcaggcggcttaaatgttgtggagtcatcccaagaaaggaagctatatatcccagttgggcacggtgaattacatccggctgttcgcgtagaagttgttcgtagcgttctttggccggtaggtatagtcggtttatgtggtgtatgtccatgtagagcagacattcctgatggataatgcgtccccagttggcaatttcgatatttgtttcataaatctgatttaattcatcaatgcgtatggcatatagttcgcaatcttccagtaattctacatattcgtatcccggttggttgtggtataagtctttcatcgcaaaagtgatatcgccttcgcgtgagaaccagatcgtgatttcttcaccgtcacgcaggcaataggagcggcaaaatcctttctcaataaagtagacgtgacgatctgatactccgccgtgtatcagtaagtgtttctttggcaattccagctttttcatgtggctgaaaagcatttccagtgagctgtcagataccggataatatcggcggattcctttgatgatgttctccatgtctgtttatttgtgggagcattccagccaccagtcgatcattttccgtgccaggctcagttttcgtggaagttccggcaaattatctcttgtatagaaatcaccggagcttaattcttcttcttgcaatttgatttctcctccggcataatcgacaatgaatcctaccattaatccgctggggtagggccagggctggttgccgaaataagtgatgttcttcacgtccagtccggtttcctctttcacttcgcgggctacacattcttccagtgtttcgcctgtttcgaggaatccggctacaaggctgttgaatctgcctttaaagttgcgggcatgaacgagaagtatggagtcgcctttgcgcactaaaacaaggacggctgtcgagatagccggatacacttcacggccacaactcggacagcgtttcatgatggattctttttgttccatcggagtgccgcaagccgagcagaacagactgtttctgtcccaatgcagtatttcgtgggctttgcctgctgcctggtaatgtcccagcgggaggtattcgtaagaagcgcgaagccctatcattgcatattgttctgtctcttcaataggttgggatacggaataggctttgcagtttcttccttccagtgtggtgatattgtgtactgtagtcttgtctttgataaggataggaggaatttctccgtagggaatggcaaatgtaccgttcccctccttttcaagcagtagttcatctttgtaaaagacaaaccacagggattcagctgtttgattcattttatatttttctattttcttcgcgctgcgaagttataaaaactgtatcgatatatgtagggtttaccggataaaatatgattaacttaaaaatatactttgttccactccaatctcttgaatgaaataattatcgtgtgagatggctatcacagtacctgcatagtttttgatggtagcagtaataatttcgatgctttgtatatccaggttattggtcggttcgtccagtataaacatatcgggcatattattactgatcatcaggcaacaaaaggcaagtctcattttctctccgccgcttagcttccggcaagatttatcccattcggaagccggaaataaatatcggttcagaataatctttatttcgtgctccggcaggttgcggctattgaaggcataggcttgttccaaaatactgtttcgatcattgatgatcgaatattcctgatttagatatacataggtgaaatttgcctgtatgagcgtgcctttcagtggttgaagttgtccggttatgattttcagcagagttgtttttccgctgccattgcctccttctatacgaaggcggtctccgcttttcaactgaaagctgagagggactcgccaaagttgtggctgatcgggatgataaccgaagttaatctcttttgccgtaaccagtattttaccggtatgaagtccgggactgttaaagtcagtctttagtgcagctgtcggcgagagtgagcttcggagttggttacgctcgtcagttaacttctcggttttttcctgatgtgcaccgcttagtttggcagtactcttttccgatttgctttgcaaaccgttcagtacaatacgcgggacaccttttttcaggtttcttttttcaccacgtacattttgtttatccctccgttcagctgtttcgcgggctaccttgcgggcagtgcggagcgctttctctttttcttcgatgcgttgttgcagggcttcttgcatcagtgttttttgttctttgtaaaattcatagtttccaccgtaatagctgatctgatgcttttccagttcacatatttcgggaagaagattcagcagtgtacggtcatggcttactaccaacagcgtggaacgccatttttccacccagtcatacagacgttgtctgcctgacgaatcgagatgattggtcggttcatccatcagtatgacagacggattatgaatgtccatacctgcgaggaatacacgtgtcttttctcctccgctgagcagattcatcgggtaggatagtgggaattggcccaatccccacgaatcgagggcggcgacggaacgttcttctatattccagtcgtcgttcaatatgctgaaattttctattgaggcatctcccgcaaggatagcatgtagtgctttctgcttatggtctatctgtaaggcttgcgcgatggtcaacgaatcatattgcccgaaatgttggggaatataatagaggtcgtccggtcggacgatgacgccggaagagggtgttaattgtccggcaataatttgcagcagggtagatttgccacagccgttattgccgactaatcctaacttctgccctttactgatggcaaagttaaggtcactgaataatacttctttatccggatggatatagctgatttgttgaatactaataggcatgatggtctattgggtttgaggttgaaaactgggtgaggataatcacggggcaggggaacgacaaacacaatactggctaaacaacacgaatttcgtgatgcttaacgataaagaaaaagcatagatgaaaagtgatgtttactagagtgttgtcttacttagaaattctcattgtggtaagtatatagtttaacttgggcacaaagatagtactttcttttataatattgttgggttttggctggaaaaatggattctttgaactaattcaaaatatggaataaaaaaatgaagagcagagactacaattaaaaaatgtcccgctcttcattttcactacctactttatttacttattacatcttttccactcgaaaatcaaaccataatttcattttaaaaccgtcatccccttttttaatgcgaatactgcttggctgactgtggggaccaagttcaggaatggattttccggaacgcatggcgggaatatcataaagaaaagagatgtcaccttccgggaattcccacattgtgttttcaccattacgtcgatggacaggttccagcggagtaaatacacggaagaacaagccatcactttcagagtaaacagtgaaaggtacgcgatctgattctaatgttgcccaataaacattggcatgataacctttgaattccggatagattaaatgatcaaaactttcaccggttatggtattattgtattctttctcccaaatgccataattggtaccttttatacgattcttccatacacggtaagggccacgtcccatccatttcatgcctttcacttctttttccggaaaagagaaagtgagtccgagattatatattttcttatcaaagaaggctccctcaaaaccgtgacctttaggatcattcagcagtacagcttccatacctaataatccgtctccggacatacgccagacaattgaatctattcctccttcatatttggcaatgtaacaggcgtcattaccttgcatgtactcatagccttctttaaaattagctttcataccgacaggtaatggaccgttatttaacgggatgatttcatccttctgttttatttcgataagtatcccatttctaaaggtggcagagataccattagcaaacaaagtgacctctccattctgctttttaatacttgcggatgaagtactaatatgtttattatattgcgttgcaaaatattcattggcatatttgattggccaagtccaattgcagatagaatgtccctgtttatcataagcttccagttccagcacatccccttggaaaaaaacagcaggtaatttcatatgtaccttgccggtttcacccggagcaatatccggaagggacactgcaccttcggaaagcagcgtttgtgtccccttctttaaaggtgatgaaagggaatagactcgatatttcatactgcactctttcagattcgtaaaaagatagttgttacttatcatgaaatctcctttaaaagatggggtgataaagaggttctggaattgtat

SEQ ID NO: 2292 - DNA, 23012 bp, synthetic construct
  misc_feature 1..23012: note = Synthetic
  source 1..23012: mol_type = other DNA
cggcggcaaggctgatgcacatggccaccaccggctgcacgtaggagtacatgcacactaacatgggcttcaggcgcttctgccctatgggtatgaggaaataggagatgaaggtcgcgcacaccacgacgaagagcacctgccacacgatggccggggtcattgactggaaatccgtccgcagcaggccgggtgcgaacggcagggcatacacggtggaaaatacgaacatccacttcatgaaggtgataacgctgtatttccggataagcggcttgaaaatgcccacgtagcaggcaaaactcagggtattgacgaacatcagcaacactcctacgagggtggtcctgtccgcccctcccgtagagccgaccgagttcagcacgatgaacagcaccccggagaaactgacagccagtccgataatcccgtgagccgtaatccggtccctgagcgcgatggccgccactatcatcgtcatcaccggggtcatcaggctcagcaccgaggcatccacggcggtaatcatggttatcgcctccaaaaacgagaactgcgtcagaaacaaccccaacatcgacgccagcgcaatcttccacaggtccctcacctccaccctctccttgatgcgggtcaccgtcgaggctatgcagaaaagcagcagagccccgaccgagcgcagcaggaacagcgacatcggcgacacattgccgtcattggcaatgttcttgcagaaaattatattgaacccgaatattaggtaagccgtaaagcaggccagattcccggtcaatgtatctgtatctttggttgcagttctcatctctcgctattgctgaaaacggccgcaaaaatacatatactcgctcaattgtagacggatttcgaaagaatcaataggtctttgcaacggaatgctgagtactgtagaacagcaaggcgcgagagcattagaaaaatctcaactttttaccgcaaaacggcaaatacatttcagcaactcacatttttgtgatatatttgcattgtcaaacaaaacatctaagttctatgaaatggaatgaatttgcgaaattagcaagaagcagagggtggtactgctaccggagcggcggcaaccacgacatttaccgacatcccgagcggagcggttccctcgtaatagagcggcactggtctcaggaaataaggcccggactaatgaaaagattgatgaaacagataggggaagaatgattcccatatctaagacaaaaaggatatgaaaaagacattggctattattgagaaagacgagaacggatacggcatttatacccctgacctgaaggacacggtcattagcggttcagggatgagtgtagaagatgcaaaagcagactttctgaccgcttacaaagaagtcctgaacagctacaccgagaatggggaggcagttcctgacgagctgaaggacctggcatttgagtacaaatatgacgtgtcggccttcttcaaccagttcgactgtatcaacgcatcaaagtttgcggcactcgccgggatatctccgtcactgatgagacattacaaatcaggcgaccagtacatctctgagaagcagctggagaagattgaaagagcggcccacgaattaggccgcaggcttctggccatttccatgtgatgttttgtttgacgacttcatctatggatgcagccccggacaatcaagcccggggctttttcagttcatgctttcatatgatctgaaactcatcatggcgaggacgaagctgagcgagattatgtacatcttcttcgctgccttagcttcatccgtcattccctctattccctttattactctctcaaaatcatcatcctcatttactcccccatttacatcctcattgcctttccctactataaagcaagttattgaaaactaaggatatggaattattagcagcaatccattgcgggcttccaaaacctaatctttggcattctgatatcatgcgaagtattccgcttcccacgatttccacatatttgcgaatcagacaacaatgggctatatctgggttcctaccgagccaccgaaggatgaggtttcgacaaagtattaaccgttatgccctcaggtaaagttcccggattgataatttctaatctgccagcatacaatactttggtaaatttttaccgaagtattgtacgaaatatgacagcaaggacaccaattgttactgcgtcacaaacactctccagctgccatccttcccgcctcgctcaacgtattttttctttatgagttgatcgagcagtttctgaatggcagcgatgctgatgcctgcgatttctttcatatcggccaaagtaagtgtcggttctgttcgcatagcattcagaatctttgtataattgggggttcggaatgcaatgcgctctccatcataccaccacacattttcattcttttcgcttacaaacaatacatcgttataaacctctgtcgcaaccaaattattgaaatatttcaaaaatggacgaatatccttaatctctgcgtgagccccatcaccagggacaggaccgacttcaagatcggcttgatgcagagcctccagatattcactcttcttgcgactgcgaacaacgaccatcggataattatggcgagctagaataaagtttaccatcagcctagcaatacggccattcccatcctcaaagggatgaatgcgtatatagcggtaatgaaataacgctgccaactccacaggagagagttttccttcttgctccgccttgttataccaatccaccaagtctgccatcaggccgggtgtttcttctggcgaagcatactcaaacctatcaccgtatcgtgtaatgacactattgggtcttctcttatactgaccagcgtgtattacataacttgtctgcacggtgccgggaagatttcgatatacagtgtagtcctcacgaagcagagtcttgtgtaaagttctgataaaattctgagtcaaaggagtttctttcaatctcgcttcttcagtcatcatacgaaggccaacgttacttgctgccatctcctgcacatcacgcacatctgcctcaccaatcactttaccaaagagcaacaaaatttccgtttgaccataggtcagtgtattaccctcaatatggttgctgttgtagttgaagtccactgtaaaacgacggctaagcctttctctatccttatcggataacggttgcaactcctgccacgcagccaatgctttcttaatatttaggtatttcatacgcctgagcatttattatcaacgatgcgaatatacaaaaagttttaatatggttgtacagatacaaccttttatagttttttgacagcatattggatagtaagatcagagaattatcgtgcagagtttgcccttgatgtcctgtagataaggagcatccagcggcttccggtttcgtctatattatataatacggatcagtagaaattaagtgtggataaatttttgtcggtgtacaactgcatgctgtgcagcaccttgtttttgtatattattgattataaaaccattataaaacacaactgatcttttcgccatgttttttcaggtcaggaagagcacgattctttctcaatcatctgtatgacagtaagttgcaaaacagcagtgcgctcctgcctaccgttgctgccgggctgtcttcgccaatggcctttattcatgtctccgaagcggtatccagtcccgtccgtttaatcggactgcgttttgcaaatctttcgtaaacacatccctgacgaatacggaaaaagccttgcgcagcattttcaactgcttctttgtcaaatccccttcaagagcgaagaagctcctgtctatggccaggtccatatcctcagagaatcggaaaatcagattccagattttggacagggacgatccgcctttaaacaccaacgcatgggcataaggcagtgtaaatacacttgacgggcattcgcaccttcaccggcggccttaccggagcgagacagtaacggaggaaccccagacaagggaggcgccgccgtcagtgttccataaacattcgcgggcggtgaggcggcctgtcgcggtgtccagtacgaccactatgtacgagagcagggtctcgtcctgcgccgaaaactcccccttcatgggagaatccaccctgatgaccggcagggcgacggtgctgtccaccccgtgccaggtgtagaactcattgtagttgcagtcgccgtggaaatacgcctttatctccggatgcccggcgatgaaacgctccagggcacgccagtttcccgacggcaggctgtcgatgctcccgacggcgcaagtgtcggacagcaggttctcgaagcggtccgcgggattgatgtcatagggacaatgggggttggtgaaatgctttgcgtccgctccaggaggatcatgtgtgaacagcagcacgggaaggtcatctcctgccgtcacggcactgccgtaccactcccgcatgcacgagtcaggccacatgcccatgaacacgaagcgtacgctgtctacgacaaatgtgtaatgcgtcctgtccgtcccataatcgaaagtctccgcactgaccgtagtatccggatgcatcatcatatcgtagatacctgcagcactggaggcatcccgctcagggcacatcggcttcggatatccgatggcattggagatgtcgtgattgcctgggacaaggtacaggcggtccaggtattccgcccagtcccggagaaactgcctccacgatgccgacgccggctgtactccgctctccatcctgttggcgatatccccggtacagacgatgaagtcgggctttccgaacactctgcccccgcctgccccgccgtcatccggcagtaccgcattttccagaaggccgaacgaccgcagcatcgcccggctcaccgagtctgccggaacactctccgcaccgcggaactccctgtctatgccgtaatgcaggtcggagcagtacacaaaacggagaatttccccgtcctgcgccccaacacagccgcagaacagggaaatactcactaacactaacattaacctttttaccattctatcttagagccctcaactttctcggccgaagcattgctgctgccttcggttgccgtcatgatgtaccagtcaccggtaccgtccacatccctggcgaaggagcctttgtccttgctgtcgaacattccgtcatcctcgccccaggtctcgccaagggccttgctcaggttcttgaacagatctatcgaggttccgtccggagcgaacagctcgatcttcaccgacttgtcggccgagagaccgaactcgaaaatcgggaaatccggattctcggtgctctccgccttgtcggatttctcggaccagacggtcaggaagccgtgggcaggcacaactgttccggccgcagccgtgaaggtatcctcgtcatccttggtgaaatacactccggcgatgtcaatgtcggcatcggaagtgttgtacagctcgatgaacttgtcattgccgttcagttcgttcagtctcaaagctgtataatcggccgtaccaggctcgtccccgccagcggaagagttgctctcgccgggagtaggctcggtgcatacgctccagttgtcggagccgtcgggaatacgggcatatgaggagccgtcgtccattgcgggatactctaccgtatccacgatatcaccattggcatccagcactgtcactacgtctccgccgccaccgagaccgaaggtgaaggtctcgtccttgtagaagaccattatggccccggcctcaaggactgtaccgtctgcgattacatattcctcctctgagcccttgtcgtcctgcagcctgtagccgctgatatccactgcctctacggaagtattgataagctcaatgaagtcagtctgctccccgtcgatagtggcgccctgcacctcattgatcagcacggaagagtctgatgtacccagctcgtctccaggctggtccggattatcgtcaggagtgccggtgttggaacgaccctttgtacctccctctatgacttcccaggaagagccgccgtcctccgtgcgggcgtaggtgaatccgtcctccatcgcaggcacgatgacctcgtctatcttcgcataagtctcgtcgagcactgtgatggcatctccgtcacctgatattccaaactggaaagtaccctcctcaatcactaaaaagccctttgccgggatagtagaaccatccgggaatgtgtattcctcgtcagtccccttattgtcctgcacgtggaaacccgtcaggttcatctccgtctctccggcattgtacagctctatccagtccgtaccgcccgagcatatctcattgataaaaagaccctgaacgtccgaaggctctgttccaggctccctgtcgtccttgcagcctgtgatggtaagtgccgcagtcagtgcagcggccatgaaaaagaatctactgcttttcatatctatttgaatttaacctttttactattagaatgacaccataagcctaagctgcagcacatggaagtcgatgccctccggcctggcctggctcagaggcatgttgccggcggtaatctgtcccttggagtcggcgtacttgtcgttgtccatgaacagatagttgagacctatgagaatattgcttaccggataccagttcaggttggcactgtaggaataggccgagccgccggttatcggtgatgacatgtcgtgaaaatcattgaggttcaaatggctgactctcgcgctgacctccaggttacctcctttgcggttaaccttgactcctccgaactcggcatccgacgggctgtagcgtctctgctcccctatgatcatgtatgacgcggtggcgtaccagcccatgaactccgcatccgcaagcggctcgcggacatcgccgttgtatttgtagcggtccagggtagtgaaaagatactcgccgtatgccaggaacttgttccacctgaaggccagctcagccccgaaagtggtgtaatggttcacgttgcccacctcggcctgcacgaaacgcctgcggtcggtgcggctctcggggaaagtccggaacagggcgatacggtcctcctcgccaccggcatccggtctgcgccaacttgcataaccgccgacgtgcagggtgatatcgtcattgtttataatgggcacggccacccttccggtaaatccgtaaccgtcactgcccctgttgcgctccttctgtatgatgtcgacctgttgtccgaagactccgccggatacccaccagtatttgccccaccatgtcaccgccacaccgagacgacggcctccggccagagcctcgaccgccataggccgctcatttgccataatatagcgggaactggtcactctctccatactcatcggctccttgaagtgaccggcctggacggacagatgctcgctgaaattgtaccctaagtacatatccttgatttccacctcgttgtatgcgaaatccaggtcgaactccgcaaaccacttcccgtacagctcggccttgaccgcgaacctcgcccggcggatactggcaccgttgctgaaccggaacaccccgtcatcctcctccaagtcattgtttatcttggatgtaagtccctccacggactccgtaggcagatagaacgacacatccgtgtagatgcggttgtcgaaccatagatggaacttattgtctttcgtagagaaattgagcttgccgtccttgatataggctccggccttcagttccctgttctccagtccctgaagccaggggcctgatgtgagagtgtccctgccatttgactgtgcggatgccgtaacggcggcggaacacatcatcgatactgcaactgcagctgaaattaacctgttcttatccataacgtaaataacggccgcaaaagtatggagtccaggtttcaaaaatatgacaggtcattgtcataaatatttccggactgttaaaattgcattacggaggagggcctttccttgtcggagttcatttaaatgcctattttcgcggaagaaatccaaaacatcagaacaatgatcagaatctacggcatgcacacctgccccgactgcgcctgtatcgaagaacaggtcaggaacaatgacggatacgagataatcgacatcggagagcacgtacggaacctgaaggccttcctccgcctgagggacagcagcccggtcttcgacgaggcccgcaggaacggcagcatcggcattccctgcttcgtgctggaggacggaagagtcaccctctcccccgaagaggcaggtctgcacctgcacacctcagaagctcaggcaaatgcaaagcgaagccccggaatggaagatgccggaagcacagccgcagaaggggcatcgtgcaacctggacgggagcggctgctgaaacgacagcagaggcaaccgcaaaagcaactaccggccaacaccggccataccgtaatcacacaaagtaggatagcggctccagccacctgagagacccgaagcaacggtaagcagagcagcgccccgattcaacaacgcactaacgttcaattagttataaatacaccctgtcaccaagggcctgtccgaaacctacgaaaagttctagtcaaattcacaatccactgtttttctgcgcattacaaaaacggaccgctcctgcgcttaccgttactcaacttctacctattacgcgcacaacataaaaaggcgaaccgtgaggcccgccttaaatgttttcacaacggaataatccttattgtgaattgcttcaaacttgaaaacaaatatagcccatttttccaaaatgagcaattttttcttaaatttgaagcatattcatttaatgccaatacactatgaaaaagatactaggcctagacctcggagtttcaagcatcggatgggcactcgttaacgaagcggaaaatcaagccgagaaatcgtctatcatacgacttggagtcagagtcaatcctctgaccgtggatgaaaagggcaatttcgaaaccggcaagtcaattacaaccaatgccgaccgcacactgaaacgcagtatgcgccgcaacctacaaagatacaaactgcgcagagccgcacttatagatacccttatgtcatacggatggatcaacgagggcagtatccttgcagaatccggaaaggataccacattccagactctgaaactgcgggccaaagccgcagagaaggagatttcactggaggaactggctcgagtatttctgaacatcaacaagaagcgcggatacaaaagttcccgtaagctcaacaagagtgataacaccgatgagggaagcctcatagacggcatggagaccgcacggattctgagcgaagaaagcatcactccgggagaatattcctatcggtttttatgcgaaggcaaagaagagaagaatctgccggaattctacaaatctgacttggaaaacgagtttgaacggatatgggcattccaaaaacaattctacccggacatactgactgatattttaaaagagaacctaaaagacaggaacgagaaacagacatgggccatctgtgaaaagcctttcaacattgccggcacaaaacgcacaacaaaaggcaaagagctggtaatagagaattatctatggagaagtcaggctcttaaagagcaattgaatctggagcagctcgcagtagtcctgcagaaggtaaatgcacagctcaggaactcagacagctacctggggagaatcagcgaccgtagcaaggaactttatttcaagcaccggacagtcggacaataccagttggcgcaactgatgaaagacccgcattcaagtctaaagaatcaggtattctacagacaggactatatagaggaattcgaccggatatgggagacccagtccagattccaaccggaaatgacctcagacaaaaaagggacatcagagacatcatcatattttaccaaagaccgctaaaaagtcagaagagccttgtttcctactgtgagtttgagaaaggccggaaagtgtgtcctaaatcctctcccgtattccaggatttcaagatatggcagatgctcaacaacctcaaagttgatggggaatatcttgacctcaaatccaagcaactgttattcaaagaactgagcatacgaaaagagctgagcaagaccaacacattaaaactgcttttcggcaagtccaaaggccacgatatgaatttccggaaactggaaggcaaccgtactcaggccgccttgttcctggcatattccaagattctctcactttcagggcatgatgaggttgatttttcaaaaagcattgacgaaattatggacaagactgcatcagtattctctgcccttggtatcaatactgacattcttgccttcgactcatcaaaatccgggaaagagatggaaaacgagccactgtacagactatggcacctcatgtattcctacaccgaggacaactctaaaacaggctatgattccttggtcagcaaactgcaagaagaattcggtttcacccctgaatatgggaagattctcgcatccgttacttttgaggacgattacggcagcctcagcacaaaggccatgtgcagaatacttccctatatgaaagaaggaatggaatacagcgcggcatgtaccgaggccggctacagacattcgcaaagatcactgacaaaagatgaaatagaaaacaaggaatatagggacaggctggatattctgcctaaaaattcattgagaaatcccgttgtagagaaaatcctcaaccagatgatcaacgttataaacggggtcatcgatacttacggaaagcctgatgaaatccgcatagagctggccagagaactgaaaaagaatgccgctgagcgccaaggcatgaccgaggccatcaacaggtccgccaaggagaataaggaaatcgaggagaagctgaaacaagacttcggcatgagtcatgtttcccgcaccagcatcatacggtacaaactctatatggaactgaaggacaacggtttcaagactctgtacagcaacacatacatcccctacgaggatctgttcagcaaacgttttgacatcgagcacataatcccccagtcaaggctgttcgacgactcattcgccaacaagactctggaaagcaaggacatcaatatcaccaaaggcgacatgactgctctggactttgtcaccgacaaatacggtcaggaaggagttgaaagatacaaatccactgtagatatgctcttggacaaaggggcaatcagtaagacaaaataccacaatctgctcagaacccagaacgacatcccggagaatttcatccaaagagacctgcgggacactcaatatatctccagaaaagccctggagatattaggcgacatcgtcaaatccgtcgttgccacttccggagagataacagccagactacgcgaggactgggggttggttgacgtcatgaaggagctgaattgggacaaatacgacaaatcggggatgaccgagtattacaacgaccccgacggccgcacaatcagccggatcaaggattggacaaagcgtaacgaccaccgccaccatgcgatggatgccctgaccgtcgcttttacgaaaaggagcattatccagtacctaaacaccctaaatgccaaagacaaagagctacagcaggagattgcctcaaaaggcaggctgctgcctccaatgcctttcgacgagctcaggtgcgaagccagaaagcatttggacgatatccttgtctctataaaggccaagaacaaggtcgcaacccgcaacaccaacaagacaaaacgaaaaggcggattcaacgagaaagtccaactgactccccgaggacagctccacaacgaaactgtctacggcagaatacttcagtacgattgcaaagaagaaaaggtcggaagcagctttgatgcggacaaaatcgccactgtagcctgcgaacggttccgcaacgcactttaccaacggctcgcgcaatacggagggaatcctaaaaaggctttctccggctcaaacagtctggataaaaatcctcttttcacagacatcctgcacagtaaggaagttcctcaaaaagtaaaaacagtcaggctcattccagtctacacaatacgtaaacaaattgatcccactcttaaaatcgaaaaggtcatagacagtcatatcaggcagattctgtccaacaggttggaagaatatgggaatgaccccaaaaaggcattttccaacctggatgagaatcccatatggctgaacaaggacaagggcatacagattaaacgggtaacaatcagtggtcctacaaacgtctacgcactgcacgacaagcgcaatattttcggcgcacccatcataaactgcgacggagccaccataccgtccgacttcgtcagtctgagcaacaatcaccacatagccatattcatggactccgacggcaatctgcaggagcagccggtaccgttcatggaagcagttgcaagagtcagcctgggagacccggtcattgacaagacctataaggtcaaggatggctggaagttcatgttttccatgaaacagaacgaatatttcgtattcccgaataaagaaactggatttgaccccaattccattgacctgctgaatccagtcaattatcctgtaatcagcaagaatcttttcagggctcagaaactttcgtcaaaatactatgttttcagacatcatttagaaacaaatgtcgatgaacccaaagaccttagagacgttacttggaaaagaatacaaaacgtgaatggactcaaaggcatcgtgaaagtacgcatagaccacttgggcaacatcgtccagacaggagaatactgatgatatgataaagcgcacactatatttcggcaatccggcatatctgtccctcaaactggaacagctgatagtgagaatacccgacagtcttgactgcatggagactgtccggactattcctattgaggacataggcatcgtcatcctcgaccataagcagataaccataacacaaggtcttatagagaaactgctggataacaactgcgccctgattacctgctcgtccaaccacctgcctgtaggtctgatgctgccgctatacggcaacaccattcagaatgagcgtttccgataccaactggacgcatccctacccctccgcaagcaattatggcagcagactgttcaggcgaaaatagccaatcaggctgcagtcctcaaatacgccaccggctccattcacaacaacatgcaggtctgggccacagatgtccgcagcggagactctgccaacatggaagccagagctgccgcatactattggaaaacattgttccaggacatagacggctttgtcaggggcagggacgaggacgagcccaacaacctgctcaactacggatacgccatagtccgtgcggtcattgcccgcgcattggtctccagcggtctgctgcccacactcggaatccaccaccacaaccgctacaacgcctactgccttgcagacgacatcatggaaccataccgcccgtacgtggataaaaccgtatttgacatctgccgcaaaggcggacctctgaaactcacaaccgaactcaagcgggaactgctctccatccccacaacagatgtcttcatcaacgacaaacgcagcccgcttatggtcgctgccactacgacaacagcttccttggtaaagtgcttcactggggaaatgagaaaaatctcatatccaattatgacttaaacacctatgaacgaacggataagcgagtatagaatcatgtgggtactggtctttttcgatttgccgactgatacgaagaaagaacgcaaagcggcggctgagttcagaaaacaactgatcaaggacggcttcatcatgttccagttctccatctatatgcgccattgtccaagcgcagagaatgcaaaagtccatatccgcagagtgaaatccattcttccgccattgggtcaggttggaattctatccataaccgacaaacaatttggggcaatggagcttttctccgaaaagaaggagcggcaaccacccattgactatcttcaactggaactcttttaatgcctacagtacaaacaaaaaatccgacatcactgccggatttttaattctgcaaacacctcgtaaatacctattgttgtgttcattactgacattctgctgtttgcagtccgtcaaagatacaaagtttgaaagcaattcacaacttaaattaaattcataactttgtacagactgctgtttgcagtccgtcaaagatacaaagtttgaaagcaattcacaaccggccgtcaactttaaaataattgaattatgctgtttgcagtccgtcaaagatacaaagtttgaaagcaattcacaactcacttcttacgcgaacagtatgtcgcgctgctgtttgcagtccgtcaaagatacaaagtttgaaagcaattcacaacagatagataaaactgatgctgaagctgcttgctgtttgcagtccgtcaaagatacaaagtttgaaagcaattcacaactttcggccgttgctgatttagctcccttgtgctgtttgcagtccgtcaaagatacaaagtttgaaagcaattcacaaccaatcttttgtttctacctctcgcactgtcgctgtttgcagtccgtcaaagatacaaagtttgaaagcaattcacaaccagaggcaagagcggtatcaagttcgaccagctgtttgcagtccgtcaaagatacaaagtttgaaagcaattcacaacgcgaccgtataatatattctcggacttttggctgtttgcagtccgtcaaagatacaaagtttgaaagcaattcacaacctggcaatggacagcggtgcggacctctccgctgtttgcagtccgtcaaagatacaaagtttgaaagcaattcacaacacaaagtcttctcttgtttccacaaaattagtagaatcttattgaaatagcatatcaccatctttgattaactcaatttaacaaagcgcacaacatcaaaaacacaaaataatttgactgaaatttaatcactacttttgcaatctgttatgtatgaaagagataaaaatatctgagcagaattggaagggttatctggctactgcaagaacaaagccgtcgctactacttaaaggcagcactccccgccttattgacgaatggcaagtcgctccagtcatatgggacgcagtgcgtcatgcagttgatgagcggagagggaaaggacagttcatcctgacaggttctacagtaattgatgatgatgagataatgcataccggaaccggtcgcattaccaagatggcaatgtatccgatgagtctgttcgagtctcttgaatcaaacggttctatctcgttgcgctgcctttttgatgaatcggattacgatattgacggcaagatgtcgcaactctctatcgagcaactgatatttgccgcatgccgaggaggctggccggcatctcttgatgagatgagcgcaatggcaaaactgcttatcgcaaaagattatgtagaagaaatatgcaataaggacatttcaagagtggacaagacacatcgaaatcccacattggccagactgattctgcgctcctatgcacggaatatctgtactctggcaaagaaaacgtcaatggttgccgatgtcgcagaggagatggaagggacatctatgcccacttttgatgattatgtcggggcattggagaggctgttcgtaatagatgacatagaggcgtggtcgccagctattcgttccaagacagttatacgaacaggggaaaaacgctgtttcgtagatccttcgattgccgtggcttctttaggagcatctcctgagagtctggaacttgacctcaaaacatttggattcatctttgaatgtctgtgtttccgggacttgagggtctattcgcaagctttgggtggacgtttatcatattatcatgaccgctatgggttagaggcagatgcagtattgcatcttgatgacgggcgatatgcattgattgaatgcaaactcggcagccaggaaattgaggatggcgcaaaacaccttcttgagatcaaacgccttgttaccgaaaagaataaaacagagaagcaaataagacttcgtgaacctgatttgctgattgtcctcacaggtggggaaatggcatacacccgcgaggatggagtgaaaataattccaataggttgtttgagagactgattacattgttataaaagaataaaacatacttccgaattgcttggcggctcttcatggctggatcattcagatgattggcatgttggtttaaggacattgattgaagatccatatgaaggtggttccgataacctgaatggacggtatcgttttcaatgtacaagataatggaaagatcataaacaaacgtgagtattaactgtttgcaacccgtcagagatacatggaataaggccgcctcatcgatatcaccttgacatgcaactctatgtcggattttccatccgcccaattcccacaccgccacctctatttcccaaaaactgccaaaattgaagtgtcggtgcactacgcaaaattgagcatctgactatcaagaagttacaaatcggtctgcacatttgctcattttcaaaaccgtcaaatgtgcactatattttctaatgcactgataatcaatacctattttacagccactgcaccactgctttcaaaaattcgggtcggtttccgcttctcatcctttgtcgtggtagcaggtataaggcggaccgtttccgggagtggcttcactcagggaagatgaagaaacaatcactctgagcatctctctggtcctgcataccgtcaccctgtcatcttccggatccgcccgccattctggcctttttctccccgtcgaaggtgcgcatatcctaccggcctggctgtttgcagcccgtcaaagatacccagcctgaaagcaattcacaatggcatatacatcacattgaagatttttcactatctttgacaagcatatttacagacagaaaaacgaaccggcatgctcaacctactcgcagtcacatgggatgtcaacccatttatcttcactatcggagacttcgacataagatggtacagtctgttttttgtagccggaatattccctatcggctactacatcatgcgctcgttctacaaaagggaaggcctgccgaccgaatcgcttgaccctctcctgatagcactcttcataggtacaatcgccggagcccgcctgggccactgcctcttctacgatccggaatactacctgtcccatccatggaaaatattgatgatacgggaaggcggcctggcttcgcacggaggagcgataggcgtcctgctggccatgtggtggtacgtacacaaatacggaaagaaatatgggttcggatatatccagatcatcgaccgtctcgtaattcccgtctgcttcgccggaatgatgatacgccttggcaacctcatgaactccgagatatacggtacctgcacagacctcccgtggggattcatattcgtaagagacccctgggcagacggtctgccgcatcatccgacccagatatacgaggcactcagctactgcatcctcgggctaatactgttgtggctgtaccgcaccagactcgacaagctgcacacaggtaccatcttcggcatcttcctcatcgttctgttcggcatgagattcctcatagaattcatcaagcaggaccagtccgccttcgaagcaggcatggtcttcaacatgggacaatggctgagcgtaccgttcatactgaccggcatcctgctcctgatatggagtgctgagaaaggtgctcctgcggcaatacaatcttccttaaagccacgcagataatcaccacaaattactgcaattgcagattgtacggatggcacacttttcgatagatacagaatcattatgacagatacggaacacaccatcataaagaaagaaaagattgcgtctccatcggacggactggagatcagtatcctcctgtgcggaccggcaacaggcaagcccaagggcatcgtccagatagtgcatggaatgtgcgaacataaggaaagataccttccgtttatggaatatctggcggaaaacggattctacagcattatccatgaccaccgcggacacggagaatccatacgctcctccgaagacttcgggtacttctacgaaggaggctggactgccataatcgatgatatcaatgccgtcactggcagagcacgcacagaacatcctgaactgccgctgatactgttcggacacagtatgggatcaatggctgtccgctcatacgcaaaacgctatgatgacctgatatctggtctggtcgtctgcggaagccccagccgcaattccggagcgggaatcggaaagctggtcgcacggtcttatgcctctctggccggagaaaaatgccgtccgaagatcatccagtcccttgccttcggttccttcaaccgccgattcaggagtgaaggctctcccaacgcatggatttgctctgatccggaaattgtacggaactacgatgccgatccgctgtgcaacttccagttcacggcacatggtttcctcaaccttttctctctcatgcaggacgcctacagcatctcagggtggaagccacgcaaccccgatatgccggtactgttcatctccggtgaagatgacccttgcatgttgagccgcaaaaaattcatgcaagcggtcagaaccatgcaaagagccggatacacccatatcacatcccgactctatccctccttgcgccatgagatactcaacgagaatggaaaggaagccgtatggcaggacgtcctcgagttctgccagaaccttaccgactgattgacaactgtaccgcacccgacaagaccatgaattacactatatggacaggcaaatccgccggactaacccccaccacctccataccggtaatctacatacactcgttccgcggaaacggggaggatgtatggcaggcttgtcgggaagtgtcaggctgccctccggtggtgctggtgtctgtcaacaatccgggcggagggctggatgacgagttgtctccgtggcccgctccggctgtctggaaggggcaggctccatataagggccaggcagcagcacatctgaaatggatgacggaagaatgcatgcctgaggtagaggtccggcttagggcaatgggtatcctgcagcaaattccgatgattgccggctactccctcgcaggcctgttcgccctttgggctggctggacaagcggaaatttcgcccgtgtggcaagtgtctccggctcgctctggtatcccggattcacggatttcataagggacaatgctccggcagggcatatcggcaaggtctgcatttctctcggagaccgggagagccatacccgccatccccttatgagccaggtggacaattgcaccgccgccgtcgtggatgcaataaaagccaggggcatcgacaccgtattcgaatggaatcccggcaatcatttcgaccaccccgaacgccgcatggccagggcaatcgcagaaatggtcaggtaagttccctcctcccccatcctcctgtccgtcagccgatatccaggtctttgcctcgtattcgggaataaggttcctgaactcgggcaagtaccttagcaggtccatatcctcgtcattttcaatatacttaaaatgcctgcaccctttgtgttcaaagccacttccaaggcactgacagccatgacgagaacaaccgcaaaatccaacaaaaaattggctgcggtcctgcagttccgtctactccccagccagatagcggtcataggccaccatatcaaccagaccgtggccggagagacagaaaagtattgtctttgggataccttcctcccttgccctgagggcttccctgactaccgcagcaatggcatgggcggattccggagccggcacgatgccctctgtccgggcaaacataactccggccctgaacgactcttcctgcccgatgtccacggcctctatccttctgtcgccgagaaggcggctggcaatcgttcccgccccgtgatacctgagacctccggcatggatacccgccggcgtgaaagtatgacctaaggagtacatgggcagcaaaggagtataaccggcctcatctccgtagtcgtacatgaaacggccctgcgtcagcttaggacaggcggcaggctccgcggccacaaagcgcatgcctacatgctttccttggagacaatgccgcatgaacgggtaggacattcccccgaaattggacccgcctccgaaacagccgaccaccacatccggccactcccctgccatctccatctgcttctccgcctccagccctatgacagtctgatgcagagttacatggttgagcacactgccaagagcgtacttgcatccggggacagtagtcgccagttccactgcctccgaaatagccgtccccaggcttccctgatgattcggagtctgcgtgaggatacgccttccggccttggtcgacatacttggagaggccacaacctgagcaccccacacctgcatcagcgaccggcggtagggcttctgctcataactcagcctgaccatgtacaccgccagttccaggccgaagactctggccgcatatgccagagccgttccccactgccccgccccggtctcggtagtaatattcgtaagtccttcctgcttgcagtaataggcctgtgccagggcagagttgagcttgtgcgaccccaccggactgacactttcgttcttgaagtagatatgcgctggtgtgtccagagccttctccaggctatatgccctcaccaggggcgtagatctgtagaagcggtactgatcccatactgcctcggggatgtcaatccagcggtcagagatattcagctcctgtctggaggcctctaccgaaaatatccggctcagctcatccagtgttaccggctgacgtgtagcaggattcaggaccggcatcggtttgtccggcatatcggccacgatgttgtaccatctgcgcggaatatcgcgctcttcgagaaagaatcttttcccaggtttcataagtgtaatgattattaaggtaaaatataaagaaaacggcccgccgtttaagtaaacgacaggccgctataccgtataagtccgtatctctatggccaatacacacattcaggccgcaccatgccgtttacccggaaaggagcgcgccaccaccagaataatgtattgaccaaagtattcatgattatgttttgctgtgcgaatatagctaattatcttaaatgcagaacaccctcccgtcatttttttagccgggccagcatcagcacgtcattgtccgtgggctgcaggctggagaggattgcacgtacctgccttgccgcagaaccggtcagtgtcccctgtttcagggcttcaggggctgcttccaggaactcctccgccggaatgctctggaccagatagccgcactggatagagttgtctccctgatatccgctgtatccgcctataaagtcattgatgatctccgtaggataacttacactttctcctgtcctgaggtcagtaatgacacttgccactggctcccctatgatgatgcgcggcatatattcccgcatttctatcaaggtggacagcaccttgccaggcaacagcgtgttcatcatgctggagccgtccttcaatgtcctggtgtttaccgtaaataccggccgcagcatatctccgtcaagtacatacaaggtatcaggccagtctccctgagagctgaacgacacatccagcacaccgtccacattgaacgacgtactgacaagtgtgttggacggatgccgcgagcgctcccttccggtctccggtatctcccacaggatattgcccgccatgtcctggcaccaggttatggtcgggttggaatcctcctcgtaaggtatcgccacgaccgtcagcgtaccggcccgcccgtccaccataaaactggccggagccgacaccaactcgtccatcagctcatatgccagaggaacttctccgagatattttcccgtcgttatgtcataggtcttgatatgatcagccgcatccattatccataccctgcccccgtcctcatccacaaaagtctgcaaggaattcagatactccccgggaccgcgcccgagatgtcccacgttgcagatgaacttcccggtatgccggtcgaacaccctgaccggagttctgctcatcattgactctgcatcctttacaatataattttcagtaataaggaccgaggcagcttcaaacgcatctatggtatcgctgtccagcgcgatgaactccggctccgaggccagatccgaaaaccgcagggtatctcctgcctctttcatctgtgaataatcgaatgtaaccatgccgtcctcaccgagacctcccctgctgcaggaagccgacaggagcaccgcaactgcaattgtaaaaaattctaccgttttcatttcttaccgtttattctgttatcaaggttgaacatgtatttgccctgctcggtcctgtccgtgaaaaaccagaaggatgccatctcacggccaaatgcacggagtgatgccgtaatctccttatagtccttcacatgcagattctctgacgaaagcgggcagaaaacggttattctgtctgtcccctccacatcggccaaccggcatattcc

SEQ ID NO: 2293 - DNA, 22991 bp, synthetic construct
  misc_feature 1..22991: note = Synthetic
  source 1..22991: mol_type = other DNA
tcgtaatttcacgcgaaactctttgcgcctttgggtattcgtaatgctgtttttgaatcagacatgagtggtacccccgttggttcgtcgtatctttacatcacggccactgacttcgcccgctttggccaactttatatagaggatggttgtgtcgactcgttgagggttcttcccgaaggctgggtgaactacacgaccacgcccgcgtccaatagtgaaaatggatatggctcatttttctggctgaatagagggaaagagctccctgatgtgcctgaggatatgtattattgcaaaggccacgatgggcagaggatattcgtcataccctctaaggacttggtggtcgtgatattaggttattcgcccatgcccgatcatgtcatcgacttcaatgcgcttttgaaggacatcatttccaatatagattaaaatgccataaaaaaatgaagagacgtgcttggtacatctcttcattttctgcgtattcagcgtattctgcgtgaaacaattccttattcagcagagaacttgcaaaccagattcctgtcgccgtaagcgtcatcgatgcgggtgacatgcgggaagtacttgtcctgaacgtcgctcttcatcgggaaaccagcctcttgacggctgaaggggaactcccacttgtcggccatcagcatctcggcggtgtaaggcgcgtggctgatgatgttgttgcccttctcggccttgccgtcctcgatgtccttgatttccttgcggatctggatcatggcttcgacgaagcggtcgagctcggcgataggctcgctctcggtgggctccaccatcagggtctcgtgtaccgggaaggccacggtaggagcgtggaaaccgaagtccatcaaacgtttggcgatgtcaatggcggccacaccaacagtcttattgatgccgttgatgtcgagaatcatctcgtgagccacatggccgtggttgccggtgtacaggatcgggtagtagtccttcagcctttccttcaggtagttggcattcatgatggcacccatagtggctttcttcaggccttcaccgcctaacatcttgatgtagcaataagtgatggtgaggatttgggcactaccgaacggagcggcagaaactgcgccttcctgcttgtcgccaccgcagtggaacaggatgtgcgaaggcaggtaaggtttcaggtgctcggccacgccgatgggacccacgcccggaccgccaccgccgtgcgggatggcaaaggtcttgtgcaggttgaggtggcagacatcggcaccgatatagccggggctggtcaggccgacttgggcattcatgttggcaccgtccatatacacttggccgccgttgtcgtggacaatcttcacgagggtgcggatgccatcctcatagatgccgtgggtcgaaggataggtgaccatgaaggctgccaagttgtccttgtattgctcggccttggccttggcgtcttcgaggtcgatgttgccgttttcgtcgcatttcaccaccaccacttgcataccagccatagcagccgaagcagggttggtgccgtgggccgaagcaggaatcaggcagatgttgcggtgaccttggccgttggcctcttggtaacgacggatggtgagcaatccggcatactcgccgctggcacccgaattgggcataaaactcatgcccttgaagcccgtgatttcacaaaggtctttctccatctcagcgatgagttcgaggtagccttcagcttggtcggcggggacgaaggggtggatgttgccgaactcaggccaactgagggcatacattgatgtggcggggttcagtttcatcgtgcaagaacccaacggaatcatgcagcggttgaggctgaggtcgcggttttcgagtttcttcatgtaacgcatcatatcggtctcactgcggtacttgaagaacatcggggcctgcatgaacttggaggtgcgctgcatctcggcagggatgccgctgaacttctgacagttcgggtcgcaaacgagttcctcatgctccttgccaagggcttcggcgacgacaatgccaatctcgttgatgtcttcgcgggcagtggtttcgtcgaggctgatgccaaagtgctgcttgtcgatgatgcggaagttcatgccgtgtttctcggcggcttccttcaccttgcaggtgcaaacgccttcaggcatttcgaacaacagcgtgtcgaagaagtgcttgttgagttgcttcacaccgagcttggccaactctgaggtcaacttgcctgcgaggcaattaatatggtgtgcgatttcaatcaaaccctcagggccatgatacagtgcgtagaagcccgacatgatggccagcaaagcctgtgctgtgcagatgttcgacgtggctttttcgcgcttgatgtgctgttcgcgggtttgcagggccaagcggaaagcgggattgccgagggcatccacgctgatgccgatgatacggccgggcatctcacgcttgtaggcttcggtggtggcgaagtagccggcatgaggaccgccgaatcccatcggtaggccgaaacgctggttggaaccgagtaccacgtccgcgccccattcgccgggaggcgtgatgagggtgaggctcagcaggtcggcggccacggccacttgcatgcctttggctttccattcggcaaccttggcgcggttgtcgacgatttcaccgaactggttggggcattggatgataacgccgaaatattcttcgcttgcttcaaacttgttgatgtcgtcaatcacgacttcgatgccttggaagtgggcgcgggtcttgatgacttcgatgctctgtgggaacaggtcgcaagccacaaagaacttcttcacgccggccttcacttgggcgcggctacgcgagtgccagaacatcagcatggcctcggctgcggcggtgccttcgtcgagcaggctggcgttggccaaaggcatggcggtgaggtcactgatgacggtttggaagttcacgagggcttccaaacggccttgcgaaatctcggcctgatagggagtataagaggtgtaccagcccggattttcgaggatgttgcgcatgatgacgcccggggtgatggtgttgtagtagcccaagccgatgtaggtgcggaactgcttgttcttggcacccaaggccttgaggtggctgatgacttcgtactcgttcatgccatcgccgatgttgaggtctttcggcagacggatttcgggagcgatgatttcgtcgacaagttgttcttgcgatttcacgccgatgaccttgagcatcttttcagcgtcggatgcggtaggcccgttgtggcgtttgataaagttgtttctaatcattttgctgtgttttaattatttatgattgaattttactcgtattcattaagtttttgttccaatgcgttgacgttttggatggatttgatttcctccgacgggacttgcaccaatttcgctttccaagcattgaaaccagaagtgttttccaagatggtcaggtagaggtagaaaaactccttgctcctcagattcttgtttttgtattgattgtacaaatcataataggtgcgcatgttcttctcctgtcgatggatcaacacccaaaactctttcctgaattgctctttcgcgtccaccgtggtttgggcaactggttctttcttagcttcttgaaccggcttaacttcttgagccggcttggtttcttgagccggtttaacttcttgagctggcttggtttcttgaaccacttgaactggttggggagtttcttgaacaacaggtgtttctataacttccacaacttctgcaagttgcttatcttgaacggtttctgttggagcagattcggcaacggccttttctgctgcgggttcaaccacttctgcgacagcctcaacggtttccgtttcgtcgatggcggcagtgtcttccttgattgagaagtaggacgaggtggcgtcaatcacaacaggctcggattggggcgcggcgggcgtttgatggttgttcctgaaaaggctaaaaagcatgatgccagcggcaaccaaaagaagggcacaggcggcaacaatcaagttggttttcaacttcgggcttatggactttggctcgtattgcgcgaccaaacatccgtcgtagccgcttgactcaggctcaggcttcaatttgaatccagccagattaaaacctaacggcggggtgatgaattctttgacgtcgtggccgtcttcaaagcaggaataggggcaattgggaagaagttcgccttctcccgcgtcaaccctgtattgtttgttctccatagttttcatggcttttccaattgtttattcgtaatcctctaatatctgtttcaatgcgttgatggtatggatggacttgatttcgttggatgggacttggttaagaatctcgctccatgccttaaaccgagttgtgctacccaaaatggtaatccaaaggtaatggtattcgtttccatcgactttcccatagtatttcctgtacaacttgccgtattccgtcatccttttgtcctgacgatgaatcaatgcccaaaactcctctttgaattgggcagtatataattcagtggaatcaagttgaggctcaatcgtttcgctgattctctcttcggcttttgcttggaagggagcggtttcagcggccttttcctcaacaatctcatccttaacaataatggtcgtgtcattttgggcaaaagattcctgtaaagtgtcatcaatggcaccaactggatcaatcgaatcatccatttcaattgtatccattgcaacaatggcaaaatccgtaactcctacttcgtctaataataccgtctgccttatctgggtcatttgagccatgtatgatttggtttgggagaatagggtggtcaatatcagcccgaatacgacaaggacggccacggcagccaaataacgccaaaagttatgcttgggtttggcagtggaactcgtcttctcgaactgcgcaacagttttctcctctttaccctgttcagggtcgattgagttggtgttgggatgttgttggccttccatattacttggatgctttgaggttgctcctcaatccatcaatgttttcaatggtcttcaactggctctcgggaacggtcttcattttgtcgtaccaagccttgaacgaaacataatccttcaaaatgacgaagcggagatagtcgaattcttcgccgctgaccttggacttgtatttgttatagaggtaggtgtaggtgtccatgctggcgttgcgagtgtggatcagtgtccaaaactcttgtttgaacaaggtgttcgggtcgtcggcagcaggcttgggtgtttccacaactggggtcactggcgtttcttccacgactgctggagtcgttggcgtttctttcacgacaggcgctacttccggtgctttcggttccgaaggattgttggtgacagcggcaggcgtttcgtcgaaattggcggtgttggaattgtctttgtttttggcagttttggtgggctgcactttggtttccggctctttttcggtgcgacttggtttaggattcctaaacacgcttacggccaaaacgacaacgagtgcaacgacaaggacgatggcaatcacaaggactaacttccaaagattggacataatcctttgggtgaaaggcactttagtgtattctgcggagagttttccgtcgtaaatttggttgctggcgttagggtcgaacttgaagccggcaaaaacataacctttgggaggtatgataaaatcttggacatcatgcccatcctcgaaggtcgagtagggacatccgggcatttttttgcccttcccggggtcgatgctgtagtgtttctcggcaaattctgtcatttcggattttattgtaaggttttgtttaatgtgatgtaatttgggtaggcaagttgctggtttccaacggtaatgtaaggcttcacctgaagtcccacattaacgggattgctgctcgcgccagctaatttgaaggccaaattcacgatggcatccgccgattcgccgctgaacagttggaacaggtcggtggtgatgggaatagtgaccacgctgttcgatttggcgggaacgttcacgctgttgttcatggtggtgctgacaacttgctttccgttgagggtcaatatgtaatccatcttggccatcgaagcggcgatggagttggggttgcttacatcaaggttgacattgaaagtgacgggcaggcttctgttgctgattgcgttgacgagagccaagccttgcgaaatgttgaggttctctctcgacatgcccttgctcaggttgatgccgagcatctcaatatggttgacgctgttgaaatcgaaggtgcaattggcaaagttggccatttgtgcaacttgagtgagcacgtcacacgaggccaatcctgccgtgacgaataaaattataagggttctcttaagttttgacatgtctgtaattatctaataatcaatttaataaatcacaaaaatccaacaagcgttgggcttgttttctgctcgtctataattttgcaataatacgaaaaaagtcggacatacagcccaacttttggaaaaaaatcttcattggttttaaacatgaattttcaaaaaccatttctgataattcgtgtataatttatggtaattcgtgtaaaaaacattcttttattcctctccacggcgcgaggcgcgtttgcgctcaatctcgtcgaggatgattttgcgcaggcgcaggctcttgggtgtgacttccagatattcgtcgtcgcggatgtattccatgtattcctccaacgagaacctcacgggcggaataagacggatggcctcgtcgctaccagaggcacgcacattggtcaagtgcttggttttgcacacgttgatgacgatgtcgttgctgcgggtgttctcgccgatgacctcgccggcatacacgtcctcattcgggttgacgaagaaaatgccacggtcttgcagtttccaaatggcgtatgggatggcctgtccggtttccatcgaaatcaaggcacccacgttgcgcgaaggcatctcgcccttccaaggctcgtagtccttgaagcggtgcgacacgatagcttcgccttcggtgacggtcaaaagcgtgtttctcagtccgataagtcctcgcgaagggatgtcgaaatcgaggcacatgcggtcgcctttgggttccatttgggtcatttcgcccttgcgtgcgctgacttgctcgatgacgcgccccgagaagtcttcaggcacaaggacggtcaaggcttcgataggctcgcatttcacgtcgtcgatgtatttcacgatgaccttgggctgtccaagttggaactcgtaaccctcacggcgcatggtctccacgaggatgctcaaatgcaggatgccacgaccataaaccatcagtgaatcaggcgaatcggtgtcttccaccttcagggcgaggttcttttcggtctccttgtaaaggcgttcacgcaggtggcgcgaggtcacatatttgccttccttgccgaagaacggcgagttgttgatggtgaacaacatgctcatcgtcggctcgtccacatggatgggcggcagggcttcggggttctcgtagtcggccacggtgtcaccaatctcaaagtcgtctatgcccatcagcgcgatgatgtcgccggcctcgacgggcttcttggtgcgttccttgcccaaaccttcaaaggtgtaaagctctttgatggtggagcgggtgacggagccgtcgcgcttcaccaacgagacgttttgtccggcttgcaaagtgccgcgtttcagacgacccacggcgatacgacccacatacgagctgtaatccaacgaagtaatcagcatttgcggcgtgccttcctcgaacttcgcgggcgggatggtgtcgatgatgacgtccaaaaggtaggaaacgttgtcagtgacgtggttccagtcgtccgacatccagccttgcttcgaggatccgtaaaccgtcgggaaatccaattggtcttcggtcgcgccgaggttgaacatcaggtcgaagacggcctcttgcacctcgtcgggacggcagttgggcttgtccaccttattgatgacgacgatgggcttcaaacctaattcgatggccttttgcagcacgaagcgggtctgtggcatggggccttcgaaggcatcgaccaacagcaaaacgccgtcggccatgttcaggacgcgctccacctcgccgccaaaatcggcgtggccaggggtgtcgatgatgttgattttcacgtccttgtagcgcaccgacacattcttcgaaaggatggtgatgccgcgctcgcgctcaaggtcgttgttgtccaaaatgagttgccccggagcctcgtccgactccttgaagagttgggattggtaaagaatacggtccacgagggtggtcttgccgtggtccacatgggcgataattgctatatttctgatattctgcattttagtagaaattactgcttgatttgaaggtgcaaaagtacaaaaaatcgctgaattgccgaaaagtagtaattttgcgaaagaaaaaaatgaaatatcacgatttcaagaggattctacttttgcttcaaaactaaaacaacagtgctatggaacttacgaaataccttgtggataatttggaaaacagccgtgaatttacgcgccacattatcaattctttgtcgcttgtcgatttgaagcgggtgaaaagagatttggaacgtcattacgctgataatccggaaacaagctatctgatgggccatgttgaaagaaggcttttcccggaacaagttgagaaagtgaaaaaaaagcccaatgccactatcaatcaactgcttcgcgatttcaaggacgaaaaaagcggccttattgctgcatctcgacttgaattgcagaaacggtttgaataccaatcgtttgaggaccaaaagagaatcatagatgcgttcatgttcaggacgacgaaacacgacgtggtttggtgttcaaagtatttgctcagtgattggttttggagggacatctattttgactctatcgtgtggtactgggagcgcgaaatggataattatcctttgctccgtgtggtttgtaaatatgcttcggatgattatctgaaggagaaagtccagcaatttgaggaagagaatgaaggagtggtcgaagtcaaggcatacatgttgtttttgtcgcggcttgcgaaagacccgaattttgtcatcaacaaggacaggttgaagccgtttcaatatgtctgtatttgttccaaaacgaaccgtcaggtcacccaagaagaggccaatacggcattgttgcaagtggtgttgaagagcctttcagagggcttgtttttcaacaagtttcggcgcaagcgcgacggcacggtggtgttcaggtcaggatgtatgatagaattcgctttgtggacaatttccaaaaccggaaacacagacgttttgattcgtttcaacgaatgggtcaaggaaatgtgctataagatagagaacatgcaagatgctgattacgatgagattgtggaaaccgtctcccgtgtgttgagggagtgaaggggggcgtttcttcgagaatgagattttgttgcaaaattgaaactttattccaacctgtatcacgttttgaaacaacgatagtgtaattttgtcgcggaaaactgaacaagaatgaacagcgacaagatttgtgcaaaaaaagacgaggcgacagaaatcgccccgaacttgatgttttcacaacggaataatccttattgtgaattgctgcatatcttgtgccgcaaaaatagggaatttttcgataatgcaagtgatttatgaaaaaaatagtatttttgacaaaattttttgattcgattaaatatatgataccatgaagaaaatattaggactcgacttaggaaccaacagcattggttgggcggtggtgaatgaggcagaaaacgggaatgagaattcctcaattgtaaaaatcggagttagagttaatccattgacagtcgatgaattatccaactttgaaaaagggaaaagcataacaacaaatgctgacaggacgttaaaacgcagtatgcgtcgaaaccttcaacgctacaaattgcgaagattaaacctaatcgaagtgcttaaggagcatggttttatcaacgacgacactttgttgtctgaaaacggcaacaaaacaacatttgaaacctatcgtcttcgtgcaaaagcggctacggaggagatttctttgcaggagtttgctcgtgttttgttgatgataaacaagaagagaggctacaaaagcagtcgtaaggcaaaatccacggaagaaggacaactgattgatggaatggaggttgccaaacgactttacgaagaaaatctcacgccgggccaactttcacttcaattattgatgaatggtaaacggcatcttcccgacttctatcgttctgatttgcaaattgaatttgataaagtttggtctatgcaaatgaactattatcctgaatttttggatgatgtattgagagaagaattgcttggcaaaagcgggaaggtcacaaagtcattatgtgaaaagcgttttggtgtggaaggcatcaaaccatcaaaaggtattgaatggaaatccaaggtttatcaatggcgttgtatatcattgtcagagaagttggatttggaacaattggctgttgttctacaagaaatcaatgcccaaatcaataatgcaagtggttatttgggagatattagcgaccgaagcaaagcattgtatttcaataatatgactgttggtcaatatcaaatggctcagttggagaagaacccaaattatagtttgaagaaccaagtgttttatcggcaagattatcttaatgagtttgagaaaatttgggaaacacaagccaaattccataaggaattgacgcaagaactaaagaaagaagtccgcgacataatcattttctatcaacgtccgttgaaatcgcaaaaaggactgatttctttctgtgagtttgaaagccgtcagattgaagtggagattgacggcaaaaagaagacaaaaaccatcggcttgcgcgtgtgcccgaaatcttctccgctgtttcaggaattcaagatttggcaggttttgaacaatattgtggtttccggaaaagttgttccaaatcaacagacggacttgtttggttttgaagggtcttacaagcaaggtaaacgcttcctttatcaggaagaaaaggaaaaactgtttgcagaactcaactacaaagagaaactctcaaaatcggatgcgttaaaactgctgtttggcaatcaaaagggtttggacctcaatttcaaggaattggatggcaatcccactcaatcagaattgtttaaagcctatcaaactatcattgagatgagtgggcatggcgattatgatttttcaaaaatgccttctgagaaagccttggagattgttgctgaagtgtttgacggattgggattcgacacggacattcttcgctttgactcaagccttgaaggtcatgcgatggaacaacagcccatgttcaaattatggcatctgttgtattcgtttgagggcgacaaatcagagttgggcaatttcaatctcatcgaaaaactgcatgaccgttttggctttgatatagaatacgccactgtgttggctggggtcgttttccctgatgattatgccagtttgagcagcaaggccatccgtaagattctgcctcatttgaaagacggacttgaatacagcgttgcgtgtgaatatgcaggttatcgccattcaaagaaatcgcttaccaaagaggaaattaataataaggtgttaaaagacaggttggagttgttgcctcggaatagtttgcgtaacccggtagttgaaaagattttgaatcagatggttaatgtggtcaatgcggtgattgatgagtatggaaagcctgatgaaattcgtattgagttggctcgtgaattgaaaaaatcggcaaaagagcgtgaggaaatgacgaaatctatcaatgaaacgacacgacttcatgaaggatttgtcaagttattgcaaggagaaccattcttcctcaagcatgtgagcagaaacgacatcattcgttacaaactatatgaagaattgaagttcaacggatacaaaaccttgtattccaatacttacatcccccgtgagaaattgttcagcaaggagtttgacattgaacacataattccacaagcaaagttgtttgacgattcgttctcaaacaagactttggaggttcgccaagtcaacctcgacaagggaaatgcgaccgcatacgattttgtggcagagaggtatgatgaacaaggcatatcggaatatgagaaacggatagaaagcctttataataataaagtaatatccaagacaaagcgagataaattgttgatgaaagaaactgaaattccaagcggattcatcaaccgtgacttgcgcgattcacagtacattgccaagaaggcacgggaaattttggaagatattgtgcgcttcgttgttccaaccacgggcagcattactgaccgtttgcgcgaagattggcaattggtggacgtgatgcaagaactcaattgggacaaatacaaccaattggggctgaccgaaatcattgaaggacgggatgggcagcgtattcgtcgaatcaaggattggacaaaacgcaacgaccatcgccatcatgccatggacgcactaaccattgcctttacgaaacgcagtttcatccagtacttgaacaacttgaatgcccgagtccaaaaaggtgtagatgattatattgacttggatatggtggaactgtcgcggctgtttatggcatagaaagaaaagaactccaccgcgacagccatggaaaactgcgcttcaattcacccatgccgttggatgagtttagggcagaagcaaaacgacagttggaaagcacattgatttcaattaaggcaaaaaacaaggtggttacacggaacattaacaaagcgaaaaactccgtaactacagaaataacagataaggacggaaacaagaaaactattaagggtcaattgacccaaaccccacgtgggcaattgcacttggaaaccgtgtatggaagcagtaaacgctatgttaccaaggaagaaaaggtaaacgcctctttctccgttgaaaagatcgaatcagttgccaacaaatgctatcgtgaggctttgatgcttcgcttgcaacagtttgatggcgaccccagaaaagcatttactggaaagaacactttggagaagaatcccatttggttgaacgaaacgcataccattaggaaggaaatatctcccgagttgaagattgataaagttgttgactcgcatatccgccaaattttgcaattgaggctggatgaatttggcggtgatgcaaaaaaggcgttttccaatttggatgacaaccccatttggctcaacaaagaaaaaggcattgctattaaacgtgtcacaatcacaggcattagtaatgcagaggctttgcactcgaagcgtgataatgagggccgactgattcttgacgaaaacggcaatgaacggcctgtagatttcgtgaacacaggaaacaaccatcatgtggccatttaccgcaaacctaaattggataaggatgggatgccaataatggatgaaaacggtgagattcaatacgaattagacgagaatatagtttcgttctatgaagccacttcacgcgccatgcaaggtttcccaatagtagataaggattacagaaaagaggaaggctggcagttcctgttcacgatgaagcagaacgaatacttcgtgtttcctcgttatgatgagcagggcaatttgattttcaatcctttggattatgatgagatttggtataggaacccagcgaattatgctgtgattagtccaaatttgtttagggttcaaaagttttcttttaagaattatgtgtttagacatcatttggaaacgaccatcgagaatagtgggtataatctttggggtgttacatggacggattttaggagttcaaagggattggattgtatcgtcaaagtccgtgtaaatcatcttgggcaaattgtttcagtaggagagtattaaaaagtaatagtaactatgaccaacatcaaacttttccaagacaagaaaatccgctccgcatggaacgaagaagaggagcaatggtatttctccgtagtggatgtggtggaggctttgacaaattcgcccaatccaaggcaatattggcggaaaatgaaagaccgtgatttgaaagaatatcagtcgtacccattttgggtacaactgaaattggcgagttcggatggcaaaaaatatgctacagactgcgccaacatcaaaggcctattccgcatcatccaatccatcccctcaccaaaggctgaacctttcaagcaatggttagcaacggtgggctacgagcgtatgctcgaaatcgagaacccagaactggcacaagagcgtatgaaggaactctacgagaagaagggttatccaaaagattggattgacaagcggttgcgtggcatggccatccgccaaaacctgaccgatgaatggaaacggcgcggtatcacagccgaacaggattatgccattctaacggcagaaatctcaaaggcgactttcggcatgacaccttcggaatacaaggagtttaaaggcttgaccaagaagaaccagaacctgcgcgaccacatggacgatttggaactgattttcaccatgcttggcgagcgagtcacgaccgagatttcccagaaagaagacccagaaactttcgagcaaagccgacaagtcgcgaaaagaggcggtaacgtggctggtgtggcacgaaaggaaacggagaaggaactgggcagaagcgtgtccaatcccaacaattatctcccaacgcaaaccaacttggaattagaataagcaaccatgattaaacgaaccctattcttcggcaatccggcctacctttctttgaaaaacgcgcaactcgttatcaggctgaacgatgcccaaacacaagaggaagtgaccaaaaccgtgcccatcgaggacattggcgtggtggtgcttgaagaccggcaaatcaccatcaccaacggggcgatggatgccttgctgcaaaacaattgcgccgtggtcacttgcgacgagaagcacatgcccgccggtttgttgcttcctttagaaggccacacggtgcaaagcgagcgtttccgttggcagattgaggcttctctgccattgaagaaacagctttggcaacagaccgtccaagccaaaatccgcaatcaggcctcggtgctcaagcggttgagtggggtagaggtgggctgcatggtggcttgggccaatagcgtgaaaagcggcgactgcgagaacctcgaaggtcgggcggcggcttattattggaagtctgtttttccggaaatggagcgttttgtccgggaccgcgagggtgaggctcccaacaatctattgaactatggttacgccatcgttagggcagtgatagcccgctctttggtggccagtggtttgttgcctaccttcggcatccatcatcacaaccgttacaatgccttttgtttggcggatgacgtgatggaaccgtatcgcccctacgttgacgagttggtgattgatattttgcgcagtggcgtggattgtagcgagctgtcaacggatttgaaacgcaagttattgggcttgcctgtaaaagaggtcgtcatcgacggtcgccgcagtccgttgatggtggcatcctctcaaaccacagcctcgttagcgaaatgctttggcggggaattgcggaaagtggtttatccaatgatggaaatatgatggaccgattcagtgaatacaggattatgtgggtgcttgtgcttttcgatttgccgacggagacgaagaaagagcgtaaggcctacgccgatttccgcaagcgcatcatggctgacggcttcacgatgttccagttttcgatttatctgcgacattgcccaagctatgagaatgccgaagtgcatatcaagcgggtaaagtcgttcatgcccgagtttggcgacatcggtattttgtgcatcaccgacaaacaatttggagaaatggagattttcagcaactgcaagccgaagacagtggacacgccttgccagcaattggagttgttttgaatcggaaaaaatggtcataacaaagaaaaatccaactcaaacgagctggatttttcttttctgaaacaacttataaattgctgaggctctttgttttacccatatcgtgttgtttcaaagagcaaagatacaagataaatgcaagcaattcacaactacaagttcgcttatcctgtctttcagcgagttgtttcaaagagcaaagatacaagataaatgcaagcaattcacaaccgatactaccattggaaaattccttatgacgttgtttcaaagagcaaagatacaagataaatgcaagcaattcacaacagattcacatacaaagccctatccatttttgttgtttcaaagagcaaagatacaagataaatgcaagcaattcacaactgctcaccccatccaataaaactcctccttggccacaatcggcttgaaatattcatcaataatcccttgctcgaccagttctttcggcgtgccttggcgcaaaggctgttgcgaagccactacccacatcacattggcatggcgaagcaaaaggtcaaggtcgtggctgctgaagaggatggtcttgcgtttctcacgagagagtttgtgcatgatgtgtaccaactcgattttgctcggatagtcgaggaaggctgctggctcgtccatgaagatgagaggcgtgtcctgtaccaaagccttggcaatcatcactttctgttgttcgccgtcgctgagcgaaacgaagtttcggttgaccaaatggccgataccgacggtttcgaggctgtcgtagatgatttgttcgtcgtcggctttcagtttggccaagaggccgaggtggggatagcgaccagcggccacgatgtcgaagaccttcaaaaagaggtcgtcgggcttctcagtcagcacgaggctgaacagcgaactgcgctcggtgggggagtagtcgcgcaagtctttcccaaacaacttgacctcgccgccgacgggcttgatgttggccgaaagcgtcttgaacagcgtcgtttttccagaaccgttgggacccgccaaggccacgatgtcgccttcgttgaggctcacgttgatttcgggcatcagggcttggcctttgtagccgatggacagatgatatgtctggaggacttcgcacataatggtctctttaactacgaattacacgaattatacgaatttgataaagaatttgggacgcaagcgtccgaatgggtacgaatgagccaaattcgtagaaattcgcgactttagtcgcaaaattcaattcgttccattcgtaaaattcgtagttccttttcataatctattgtccttgactgaatcgttgccggtggaagatgacccacagcacgataggcgcaccaatcaatgccgtgacggagttgatgggcaggttgccttcaaacgagggcagtcgcgcgatgaggttgcataacaatgccaaatccattccgaggaaggccgtggctgggatgagcagtttgtggtcgctgctgcggaacaggaaacgcgcgatgtgcggcacggccaaacccaaaaaggcgataggcccgcaaaacgccgtgatgatggccgtcaggaaacctgaaaccaagatgatgagcatactgctccgcttgatgttcacaccaaggttttcggcataacgttcacccaacagcaagaggttcaaggtcttgaagagcaaaaacgcgccgatagtaccaattattaccgtggccgcgaaaaacggcagttgtgtcttgctcacgttggagaaactgcccaagccccaaatgacgaaggaatgtagcccttccttttggctaaagaacttcaaaatatcagtgaccgaactcgcgatgtaggcaatcataatgcccaccaacacgaggctgaccatgctcctgagcctcgaactcagcgcaaggatgagtaaaagcaccgcaaaagcacccaagaaagccgccacggtaacaccgaaagtggaccacaaagccaaagtactgactgacagacccgtagcagtgcccaacaatacgactaaagccactccaaggctcgaaccgctactgatgcccaaaagggaagggtcggccaagggattgcggaacagggtttgcatcaacaggcctgaaacagagagtccgatgccagccaaaagtgccgtgatggcttgcggcaggcggtagtccataatgatggtgcgataggtggaggtgtcgccgccgaataccgccgcccaaatctctttcataggaatcgctaccgaaccgaagcacaggttcatcacgaaaagcaatagtccgaccgttactattcctatggaaatcagtatgataggtggtgttttgcggtaggcgatatttgagttttcgatgggcataggcatcaatatctcaattccagcaaacacacattttccacatgctgcgtgtgcgggaacatgtcgacgggttgcacggccattactttgtacgccgaatcaagtagttgtaaatcacgggcttgcgtggctggattgcaacttacataaacgatttttttcgccttgattttcagcagttgttccactaccttttcggccatgccagcacgcggcgggtcggtgacgatgaggtcggggcggccattcgtcttaatgaaatcgtcagtaaaaactttcgccatgtcgcccgcaaaaaaagtgcaattgccaatgccattgatttcggcgttcactttcgcatcgttaattgctgcctcaacatactcaatgccaaccactttcttcacgaaacgcgagaaatattgcgcgatggtacccgtgcctgtatagaggtcgtacatcagttcgtcgccttgaacatcagccaaatcgaaggcagtgcgatagagcctttctgcttgatacacattggtttggaagaacgacactggaccgatacggaacttcaaatcgtcaaatccgggtcggggagaggccattgtttcaatgaggtatggctcgcctttcaagcactcaaacggcaggtcgttgatgatgtcgttgagtttcggattgatgaccaaaagcagggaaacgatttgtgtgaaagccatctccaatgcgggaatcagttcgtggcgcacgatgctgttttcctcgctgatgaccaaaatcaccatgaattcacccttcgagttgcagcggataacgaggttgcgcatcagtccctcatgggcgcgaaaattgtagtaggggagtttcctttccatcgtgaaacgcctgacaaacaaacgaatatcatttgaagggtcagcttgaaggtggcaacgctcaatgtcgaccacgcggtcgaaaagttggggcagatggaagcccaagcccttgcaggcgtcctcgtcgtgggtgcctgaaggtgctccatcggtgagccatttgcggttcgagaatgtgtattccagtttgtttcggtagaaaaactgcttctcgcaacccaaaatcgggcggatttcgggatattcaacctttccgatgcgctcgaaattgtccttcacctgcttttgcttgtaataggtctgccattcgtaggccatgtgttgccatttgcagccaccacacaagccgaaatgttggcaaacaggatcggtgcgtttttccgacatcttcttgaaattcaaaatcttgccttcaaagaagttcttcttgcgcttgtagacctcaatgtcgaccacgtcgccgggtacgccaaagggaatgaagaccacgcggccttcgggcttggccaccgacatgccctcggaacctgcgtctataatctccacgttctcaatgagttctggttgttttctaactttgtttctcatatttctttttctatggcttatggttgatgactatggctacttttacgttatgtgaagctgccatagtcataggccataggctattggctattaaataactcccaagtctttttcgcttgttcctcaaacatttgccagccgttataaacctttgccccccaagtccttcccaattccatgaacgccgtttctttcggattgtaaatcaggtcgataatgatgtgcttgttgctcaaggcttgataatgcaagtcggggaagtcgtcaaatttgggtgccattcccaaaggtgtcgtattaataataaggtgattctggcgcagaatttcatcggtcagggtttcgtaggtgtaatcgcctttttcagggcttcggctgaccgttgaaaaaggtatgtttttctgcttcagcacataacgtaccgcctttgacgcaccgccagtgcctaaaaccaatgcatgttccacttctttgcctttcaaggcccgttccaacaattgtgagaaaccgtaaacatcagtgttgtagccttttaacctcccgttctggatggtcaccacattcactgccccaacttccttggctgttgggtcaatttcgtccaacaatgggatgatggcttctttataaggtattgtcacattgaatccgcaaaggtcgggataggtttccatcacctcgtggatttcttcaatcgacttgagatcaaaatgctggtaacggcagtccaaaccttcatgttcaaacttctcgttgaagtaaaacctcgattgtgagtgcttcaatggatgtccgatgagtccgtagcgtttcattttctgttattttattccaaacaccgcaccaaatcccaaggtgcatatcacgccgacgatgacgctggccaacaccacgccaccgataacggcaatcacgcttttcttgaagtccatgtccaagaagctggcggcaagggtgcctgtccaagcacctgtgccgggcaagggaatacccacgaaaagcagcaaggcaaaatagagtccacgaccagccttggcttgcagtttttggccgcctttttcgcctttttccaagcaccaattgcagaatttcttgatgaatcctacgttgatgtccttgccccattccaacaccttgcgggcgaagaaatagatgaacggcacgggcagcatgttgccgatggcgatgacgatgtaagaccaaatcaggctgaagtcgggattggccgtgtggatgccgtaggccacgggtaaggctccgcgcaattcgatgaggggcaccatggcgatgaggaagatgtataggtaatttttcatgcgttagggttttctcgtttgtttttgtgtttcgcaatcagttcgaggatgtcggtgtcgtttgccagcagttccttgtcaaagtcgaggaagtcctgatagaccaagaagtcagcttccaaggcatcgtcgagggcttcaagcccttgattgtgacagcctttcacgaaataggcataggccaaaagataaaggagcgccgagtcgttgtcggtttgcagcagcccgaacttgatggtattgatggcctcgtcgatttggtccatctcgccgtagaggtcggcgatgtaataataagcgtcagcatcggcgggggtcatttcctgaattttccgcaaatatttcatggacgtgtcgaagtcgttcagtttgcggtagtcggcggcgatggagtagaggtaatcagtttcccaaggctctaaacttgaggctttctcgaagaatctgatggccttgcgactgtcgccacggtcgctgtagacatagcccaaaccagcccatcctgaaccaatcatttcgttgatttccaaagccttgtggaagtgttcctcggcggtttggaggtcgttcaggcgataatagcagtcgccgatggtggtgtgaatcatcgaggtttccacgccgttgcgcaaagcctcttcaagcgtgtcgatggcctccttgtagcgttccaagtcgtagtaaatgtcggcgaggtgcatgttggtccaaaggtcttcggggtcgatgctgagggcatattcgtaggggtcgatggcctcctcgtattgccccatcatgcggtagcagtcgcccacgccggtccaagccatgctgttgtaagggttctggtcgatgaggcgttggaaaaacgccattgcctcttcctttcggccagcgccgaagtagcagcagcggatttcgtggtagatggtgctggcatcgtcggcgaggggcagagccttgttgtagaactcgatggcgaggtcgtatttttggaggcgttggtattcgtaggcgatggcgttgtagaggtcgtgtttctcgtcctcgtcaaaatagggcaaggcggtgaaatagttctccaaggcctgtttcgacttgccaagcatggcgaggcacgagcctaaggtgaggaaatagtcggggtcgtcatcgtcgcgctcgatgtgctgcatgatttcaaaggcgcgttgggcatcattctccagcaggtattgcctcgcatatttgactttcagcacactgctttcggggtgttgtgccatagccatctctaaagcttgtcgcgagcgtttcagttggttgttttgcgtgtaatggtcgatgatatactcaaactcctcgctgtcgaaataagccgagttgtgcgccttcagcatggattcgtacttctcgatggcggcctttcggtcttgttcttcttcaaaataatcttcgaaatcttcgtcctcaaacatgttttcttgtctgaaattcggtgcaaagatagtaaaatctgagagaatggcattgt

SEQ ID NO: 2294 - DNA, 22913 bp, synthetic construct
  misc_feature 1..22913: note = Synthetic
  source 1..22913: mol_type = other DNA
gtattctttacgtttccccaaagtttagtttgtgctgtctgactatataatgaacaaggcacaaacaataagaataacatataaagacactttcttcccatttttcttatttgcttagatttcaacagattgtcttttttgtatatctgtagacaaatatagggaaaaaccactactattccaaaattgtctgcatctttttcacagaatttgccttttttcaattttattgtctttctgcttacttgcgcaggtaatgctataagaaaatgtacgatgaacaactttcttttctactttttacctaaaccggagtatgattgcacgctgctggagtagcattgcaccctgcaactacgaatttatgccgtaaccaaacagtgcgaaatcgcctttcagcgggtcgtcgggaaaaactttcagcaaagcatcggtcagtcggcgtgctaccgacattgttgccgacgaggtgttcagcagtttcaagtggattgcttgctgcaatacgtgtgtgtctaatggaattataagcgaccgtttgtcgatgaaatcgtgccagattcccaaatcaacgggggaattgttgcgcaccaaccaacgcaggaacatacagatacgcttgcacgacgacgaagtgtttttaggcacaatgcccaccacctgccgttctgcaaagaatgcacacagtgcttctatggcaacaatagcttctattttatcggttgttttgccgtttttctcgcttgcaaaatgttttatatagtcggcaatgctgccatagcggttcagcatttcggcaagtacggagaaaaacgagtgcatattatgattggtataaaggcggtaaaagcaagcggaattgtcgggaatatctcgccgaaagccctctttgacaatccactcgtagggatttccttttgcacaatcgagcaggaactgaatacgcggcataaacaccttgcgcgaaccgtagcttaaacacgctgccatgaaagccataacttccttgttttgcgtgccatctacttggtgcataaaccacgacgggtcgccatcaagaaagttctcgttctcgtataaagcagcaaaagctacgagtttctccttcgtagctttgcttattcgttgtgcttgtttcacaattatgcctttattccgcccctaacttcaagatttgttcggcatgttccttcaccttgatttgctttggagtgaagatttcttctatcacaccctcttcgtttataataaaggtggtgcgataagtgcccatataggtgcgaccgcacattttcttttcgccataaacgccaaacgtttcgttcagtgtcttgtctacatcggctatcaatgggaaaggaagattgtatttctcgatgaacttcttgtgcgatttctcgtcctgaacactcacacctattacggcgtagccacgcttctgcatcagctcgtagttgtcgcgaaggctgcaagcctgcgatgtacaaccgggcgtagagtcctttggatagaagtaaagcacaatcttcttgcctttatagtcacttagtttaatctcttttccgtcttggtcggttcccaacagttcgggagccttgtcgcctatattcatactttaatgtgtttaaattgttttattgagttactactgttgcaaagttagtcattatttttatatttattccatttttccgatataatctatataaaattaaagagttggcattgcacactcggaagataagttataatttacaaacgatttgttcttatatgtttttataacttttagtaacctatacaacgttttttacaacatcttggtaacattttgactaatattcaaacaaatgtgttaaaagataataataaagagaatgtttttgtcaataaaagtaccaaccatagtataaaaatcttatttttgcattaatacaatacaaaaacaaacgaaaatagtataatggaacttatagtacttgcagaattactcgtggttttggctatgatatttatcggcgcacgagtgggaggaattggattaggtatttatggcatgattggcgtgtttgtccttgtctttggtttcggacttaaaccaggctcagtaccaatcgacgtcatgatgattattgttgctgtaattacggctgctgcagctttgcaggcatctggtggcttggaatacttggtaggaatagccgccaaattcttaagaaagcaccccgaacagattacttacttcggtccgctgacctgttggctcttctgtattgttgcaggaacagcacacacatcttattcgttgctgcctattatttccgaaatagcacaagccaacaagatacgccctgaacgtccgatgagtctgagcgttattgcagcctcgttgggaataacgggaagccccgtcagtgcagctaccgcagccttaatcagtcaggatattctcggcgcaaaaggcatcgagctgggcactatcctgatagtctgtattcctgcatcgctcattgctatcttggtagcagcctttattcagaaccgcgtaggcaaggaattggaggacgaccccgaatacaagcgcagagtggcagagggtatcatcaacccagaagaagacaagcacaaccttgaaatggcagaagaacaacccaacccacacgcaaaatactctgtttgggcattctttgcaggcgttatcttggtggtcatcttcggtttcttccccaaactgcgccctgaaggcgttacaatgagccagacaatcgaaatggtaatgatgtcaattgctgcagtcatactccttgtcggcaaggcaaaggcaagcgatgcagtgaatggaaacatattcaaagcaggtgtgaatgccgttgtagccatcttcggtattgcgtggatgggaagcactttctatctcggcaaccaagaatacttgaacaatgccttgtcgggtatgatttcaacggcacctttcttgttcacagtggcgttgttcatcatgagcattatgcttttctctcaagccgcaaccgtaactaccctctaccctgtgggcgtagccttgggcatcaatcctatgttcttggtggcaatgtttcccgcttgcaatggctatttcttcttgccaaactaccctactgaggtagcggcactcgacttcgaccgcacgggaacgacacgcgtgggcaagtatgtaatcaatcacagcttccagctgcctggctttgttacaaccatcgtttctattggtgtggctgcaatcatcgtgcagttcctttaaagaataatgaaggtaaaaagaaaactaaacattaacaacttattaaaattcaatttattatgagaagatttaagatttcagttctattggtattgacactgttggtgtcttcagtggtattagcacagaaacctaagattcgtattttggcaacaggtggcacaatcgcaggtgtttctgcatcggcaacaagctctgcgtatggtgcaggacaagttggcgttcagactttgattgacgccgtgcctcagataaaggacgttgcaaacgtttcgggcgaacagattgtgaacatcggcagccaagatatgaacgacgcagtgtggttgaagttggcaaaacgtatcaatcagctgttgaacgaagaaggttacgacggtgtattggttactcacggtaccgacacaatggaagaaacggcttacttcctttcgttgacggttcactctgacaagcccgttgttttggtgggttctatgcgcccttctaccgctatcagtgcagacggtcccgctaacctctacaatggtatctgcgccgtagccgacccatcttcaaaaggacagggtgtaatggtttgtatgaacaacgaactgtttgaagccaaatcggtattgaagacccataccacagactgcgctactttcaaaggcggtctttacggcgaaatgggttatgtttacaatggcaagcctgtttatttgcacaagccaatggcaaagcaaggccttcaatcagagttcgatgtaaagaacttaacttcacttccaaaggtgggaatcgtttacggctacgccaactgttcgccacttccgatgcaagctttcgtagatgctaagtacgacggcattgttttggcaggtgtgggcgacggcaacttctataaagatgtgttcgatgttgctttgaaagctgtcggcaacggcatcaatgttgtacgtgcaagccgtgttccgttcggtcctaccaaccttaacggagaggtggacgatgcaaaataccacttcattgcatctttgaaccttaacccacaaaaggctcgcgtacttctgatgcttgccttgacaaagacgaaggattggcagaagattcagcaatacttcgctgaatactaatcgctgcatataaaatcgtaaaggagcgagaaggaaatatcgcccctttacgatagtaacattgagagaaaaccacttttcctactcacaacataaagacaaagaattatgaaaaagactatacttttaagcgcattgttggcaattgcaacaagcggaatggcacaagacaaccacagctatggtgccggagacggcgatttcaaatcgctttctgaagaagttgcgaagctgaagaagcacaacgacatgtttaacgtttatttcaactacgctgcttcgggtcagatttcacaagatgcaaacaaggactggggcacaagatttgccaacaagcagttgcgcatcgaaataaaaggtaacctgaccgacaagctttactatcgtttgcgccaccgtttgaacaaggcgaacggcgcacagagcgaagacaacttcgccaaggctaccgacattatgatggttggatacaagttcaacgacaaactgaagattgaagcaggtaagatgtgccagatttggggcggtttcgagttcgacgaaaatccaatgtacatctaccaatactccgatatggtagacaatatggacaacttcatggcgggtgtggtactcagctacaagccagtacccacacaagagcttgcctttgaggtgagcgatgcccacaacaacaaatttgcaacagagtatggaagcaaccccgtatcgttggagaagaacggagtccgccaattaaaggcttcaagaaatccgctcacctacattgccaactggaacggaagcttctgcgacaacaagttgctcacacgttggtcttggggaatacagacgcaggctgagcacaaatactctcgcatattggttttaggtcagcagctaaaccttccgagaatgcaatggtacttcgactatatgggcgcattcgacggtttagaccgtttgaagattgcatcaagcgaagcaacggcagtgcctgcacatacaggagaatcgtatttcagcgacgttcactacaactcattcatcacaaagatgaactggcagtttgctcctcaatggaacttaatgctgaaaggtatgtacgaaacagcaagtgtaacaaagatagagcagatgaaggactatcgcaagagctacgcctatatgggcagcatagagtactaccctgtaaaaagtcaggacttccgcatcttcttggcatacattggccgcaaatacgactacagcaaggcttcaggattgaaggattacaacacgaatcgcattgagattggatttatgtacagaatcaaagcctactaaaatctaaaataggaaatagagtatgtcagcttcggcatactctatttttactttatgacactgggtaaaatattgtcataaagctaagtaatacagcacttattcagcctgaatgagatgttttccgtccgaaacgaaacgattagtttctcagacgtaagataatgcgtacagaatggtggctttgcgtcttttaaaccattcgttaaatattgctaactttaaaatgtttcgcactaaaacttcccccaccaactaataatttgctacatttgcattgttaagcaaagatggaagactgaactgtagacaacttcttaccagcactattctatctgtgaaaaagacagagtacaacgaacttaaacacaatatctaattaataaaatttgcatacaatatggcaaacgagacaaacaacaaggaattccgtattgaaagcgacctcttgggcgagcttcaagtaccagctaacgcatactacggtgtgcagacacagcgtgcagtgaacaactaccatatctctggaaagagaatgtgcgactacccagactacgttatcgcaatggcttacgttaagttggctgctgttgaaacaaaccgcgagttgggcgaaatcaacgacgaaatctgcgatgctatggcacaggcttgccgcgaaatcatcgacggtaagttccacgaagactttgttaccgacatggtacagggcggtgcaggtacatcggtgaatatgaacgccaacgaagttattgctaaccgtgcttgcgaaatactcggtcatcagaaaggcgagcacaaatactgcgctcctaacgaccacgccaactgcggtcagtctacaaacgacgcatatccttcggctatccacttgactctaatccgtatgaacaagacgtttgtcgagaaattggcaaagcttgttgcttctttccgcaagaaggcagaagagttcaagaaggacatcaagatgggtcgtacacagctccaagacgctgttcctatgacaagcggtcaggaattcaacgcattcgccaacctgctcgaagctgaaatcgccaacttgaacaagagtgcagaaatgttcctcgaaatcaatatgggtggtactgcaattggtactggcttgaatgcagcaccaggcttccctgaaatctgcgcaaagaaactcagcgaactgacaggtatgccattcaaagcaagcgaagacctcgttgcagcaactccagataccacagacctcgtgaattatagcggcgcaatgaagcgtttggctatcaagctttctaagatttgcaacgacctccgtcttatggcttcaggtccacgttgcggtctccacgagattaatcttcctccaatggcaccaggttcaagcatcatgccgggtaaagtgaaccctgttatcccagaaattaccaaccagacttgcttcaaggtgattggcaacgacacaaccgtaacactcgcagcagaagcaggacagttgcagttgaacgttatggagcctatcatcatgcagtgcttagtagaagacattacatggttgggtgaggctttcgacaccctccgcgagaagtgcatcgacggcatcaccgtaaaccgcgagcacaacgcagctactgtaaagaattctatcggtatcgtaactgctcttaacccatacattggctacaagaacagcacgaagattgccaaggaagcactcgaaactggcggttctgtttacgacctcgtgctcaagaacggtgtcctcacaaaggaacaactggacaagattctttctccagagcacatgctcgattcagaagaaaaggtaaagtaaggcgaaaaccttatcatacataaaactttaaaaactctgtgcagctttgcacagagtttttttatgcgcttatacaacataataccctatctttctttgacagtataccatagtgaacacgacctaaatttattggaaataatgattaatcttaaagcattgaaacaaaagtatcaatagaaaagtgtatttttaaagctctaattttatacgaaaagtgtatttatgcttgcttatttcaaaagaaaagtgtatttttgccacaacagaaacatagaaaaagtgtatttatgctgtatagaaagatagaaaagtttataaaaagccatctacaatcgtctgatgacaagatactcctgatagatggagcacgacagattggtaaatcgtatatcattcgctatgttggacaaaaggagttcagcaattatattgaaatcaatatggaggaagataaactcggcgaccgtttgtttgccgatgttcgtaccgtgcgcgatttctatcttacactaagcattaactttggcaataagatgggagacaaacacaacacgctggtgtttattgacgaaatacaagcatacgaccacttgttcacactcctgaagttcctccgtgaagatggcagatttacctatattgccagtggttcgcgcttaggaattgctctgaagcaaacaagttcactgccattgggcagtatactcatcaagcatatgtacccattggattttgaagagtttctcattgcaaatggtgttgggcagataatacttgatacactatacgacaattttgcaaaaaggaaacctatgcccaccgctatccacaataaactaatgagtttgttcagacattatcttctctcaggtggtcttcccgacgctgtaaataaattcattgaagaagataacatacagacaacccgtgcttcgcaagatgccgtttatcaaaattatggtattgatgctgcaaaatacgagcagatgacaaaccgccgattaagcattcaacgtatctacgaaatgattccttctaatttagagaaaaccaagaagcgtatcattgctaaagatattgagggaaaaacaggtaagcgaatgtccaattatgcagaagagttcgaatatctgattgcgtctggcattgctttagaggttaaagcaattagcacgcctacattccctctgatacaaaacagcggtaagaatcttctgaaactatatatgaacgatgttggcttactaacttccatctattatcgcaacaatccaaaagcagtgctcgatgatgtcccaagtatcaatctcggctctgtttacgaaacagttgttgcacaagagctaaaggcacacggtttctcgctttattactacgacaacaagcagaacggagaagtagactttcttatagatgatgtcgaacatctgagtatcacaccgatagaagttaaatcgggaaaggattacaaaacacatagtgccttgaataaatttgtttccaacaagcattacaatatccaccgtgcatacgtcctttcaaacgaacaagaagtgagcgttgccgatggcatcacctatatgcccatctattatataatgtgtttcaaaaacgaataacctcaatcggtcgttaaaattgcgctatcttttgccgtaaatgccaattgctaaacgttactatgacagtatctatcttgccccacttatgtaaagataatgattttaaagcaattacaactaacgacacttccgatttattgttctaaaatcaagtaaatggggctataaatttaacactaacggaaagggggaaatagagaaaaagagagcggaaaaataggggttgaaaagtaaaagaaccgcttttgcaatgcaaaacaataggttttaccgtgcaaaagcggctcttttggattgcaagaatggctcttttgcagagcaaaaagatgatgatggaacgcaaaatataacctatatgcgaacaaaagtattcgttttacaacataaaaggtgcgattccgttgcacaacactaccctataagcttgcaagaagctatgaacgaagcacttatggtagcacgcaaataatggcgttatttgcaaataaataatttaaagtgcagaaaagtgcccgtaattccgaagttgaggttctgaattttaaccattcaggagctgttttgacaaaagtttagaaacaaagaattaccattgtgcaaccacaaaaaatctattgaacctactacattgcacacgaaagctaaaatgcagacataaaaaaagccccgttataaggacgaggcaacctaatgttctcacaacggaaaaatccttattgtgaatactttaaaattagtaatgcaaagataaagatttattaaataacgtgcaagttttttcaaattaattttctccgaattaaaatattttttgtaactttacacaaaatatcaaaataaccttattaatatgaaaagaatattaggattagatttaggaaccacgagtataggttgggctttggtaaacgaagccgagagcaacaacgaagcgtcttccattgttcgattgggtgtaagagtaaatccactaaccgtagacgaaaaaagcaactttgaaaagggaaaagccataacgaccaatgctgacaggcagttgcgtcatggcgcaagaataaaccttcaacgctataaacttcgcaggcaaaaccttcacgactgtctgcaaaaacaaggttggttaggcaccgaagctatgtacgaagaaggcaaagcctctacttttgaaacttataaacttcgcgcaaaagcagcggaagaagaaatatcgttgcacgaatttgcccgtgtcttgtttatgctgaacaaaaaacgtggctataaaagtaaccgaaaagcaaacaataaagaagacggacagcttttcgacggtatgaccatcgccaaaaaactctacgaagagcaccttactcctgcagaatattcgcttcagttgcttaataaaggcaagaagtttacgcaaggttattatcgttccgacctaaatgcagagttggaaagaatatgggacgagcagaaaaagtattatcccgaaatactcacagacgaatttaaacaacagttagaaggcaagacaaaaaccaatacaagcaagattttccttgccaaatatggtatttattctgccgacttaaaaggtttggacagaaaattgcagcctttgaaatggagggttgaggcgttacagcaacaagttgataaagaggttttagcctttgttatcagcgatttgaaaggacaaatagccaatacaagcggactgctcggtgctatcagcgacagaagcaaggaactttatttcaacaaacagacggttgggcaatatctctgggcttcgttagaagaaaatccgcataccagcataaagaacaaacctttctatcgccaagactatttagacgaatttgagaagatttgggaaacgcaagccactttccacaagcagctaacgccagagctgaagcaggaaataagggatattatcatcttttatcaacgcccattgaagagtaagaaaagtcttatttctgtttgcgaacttgagcaacgcaaagtaaaagcgacaattgatggcaaggaaaaggaaataacaataggtccgaaagttgccccaaagtcatcgccagtattccaagaatttagaatttggcaaaacttaaacaatgttctgctcattgataacgatacgaacgaaaagcgtccactcgacgaaagcgaaagaaacttgctgtatgaagagctaagcattaaagcgaaactaagtaagactgaggctctgaaaatactgaacaagaaaggcaagcaatgggacttgaattataaggaattggaagggaaccgcacgcaagccattctcttcgattgctacaatcgtatcataacactgacaggacacgaagaatgcgatttcaaaaagataaaggcttcctatattcgccgtcatatttccatcattttcaagaacttaggtttcagcaccgaaattctcgattttgacccatcgttagaaaagcacgagttggaaaaacaacctatgtaccagctttggcatttgttgtattcttacgaaagcgacaactcgcgaacaggcaacgaatcattattaagaaagttggaaacaacctttggcttccctgaagaatatgctactgtgctttgtgatgttgtttttgaagaggattatggcaatctcagcgtgaaagcaatgcgcaaaatattgccttatcttcaagcaggaaacgattacagccaagcgtgttcatacgcaggttataatcattcacgccactcgctcacgaaagaagagttagaccaaaaggtttataaggaaaggttggaactgttgccaaagaacagtttgcgcaatcctgtcgttgagaaaatcctgaatcagatgattaatgttatcaacgcaatcattgacgaatacggaaagcccgacgaaataagaatagaaatggcgcgcgaactaaagagcagtgctatcgaacgagagaatgctacacgtgcaatcagtcaaggtaatgctgaaaaccaacgtattcgtgaaattctcgaaaaggaatttgcactttcatacatcagtagaaacgacattataaaatataaactgtacgaagaacttaaaccgaacggcttcaagacgctgtattcagatacgtacattcctaaagacaagctcttctctaaagactttgatattgagcatatcattccgaaagcacgcttgtttgacgattctttttcaaacaaaacacttgaagcacgcgatataaatcttgccaaaagcagtaaaacagccttcgacttcattaaagaaaagtatggcgaggaaggtgctgaagcatataaaaagaaacttgatatgcttttagataatgacgttataagcaaggcaaaatacaataagctattgatggctgaagctgatataccttctgatttcatcaaccgcgaccttaacaacacacaatatatagcaaaaaaagcatacgaaatcttaggtgagttggtaagaaccgttacaccaacaactataatccgcaaaacgaagcgttccgaaaaaataaaacgaagtgttccgcctcgtaaaacgaaacgttcttttttcaggtccccccataatgcaaaacgcctcagatttctctggggcgtttgctgtttattcttcattacatttcagacattcaagtcgaacttcacattctcatcaccatcaagcagcaacctcgtgcgctccaagttattctcgtatatgtgcacattcccgaggttcagcgttatgtttttcagtggcaggtctatctgccgtgccatgagatagaggtggtatatatctgctggcagtccaaggttcgcgtcactgcttcgctggtaggctgacaagaccagttcgccatcgtctatctggaactgtaccaggctcaggcatggtgcctgattgctctctgcacctgtttcgccgaggaacagcacatagttctttgagttgcgcttctcgcagtttatcctcgcaatcaacggcggcagcttctcaaagtaggtcgggtagctgtttaccaacacgcttccgcagtagtcccaccagttgataccagcctcgcgatatttctccacctgccgctcaccctgcatgaacagctgtaattcatttctcaacttcttgcgtgctatgccgtggctctcaaatatatcaagcaggtcggctggagacaacgacaactgctcattgagcagatagcggatattgcctttcttattagtctgaacctttcctcgttccaaaatctttcccagtgtctgatagtatttgttcatcgttcaaacggtattagaatgtaattcaagcaacgtccgtatagagcatgatgtccgtataggacgcattgtaattcatgtgggcattgaactcccgtcggtggcagttttcaaaggggttgccgatgagcttgttcttgcctatccattcacaaagctccactatggaagacttgttcgaagtgaagtaaatgaaccgatgtccggagagaacggtcaacacgtcaaggtaatcagataacttccaatacatcttgtaggtcttgctatccgtactcaggtatggaggatcgacgaggaacaccacacccggcacatccttgtatcgctcaaacacctccttataatcacaggaggtaatggtcagcccgtcgagatagtcgttgcaaaatggatagtcggcagccttgatgttgttgtacagtgtctctttctcaaagtcggagaactcggtagcatacttcattgagaacattaccgacgaggacagcgttatataatcaacatatccgtgggtacgctcatgcctgagtatgcaggacagtacacgttcccgcgcctctcccaatattggcttgtgccgtggtacgtccacgattttcctcagttccgctaacagttcattcgtctgcggaatatgctccagccgaagcctgtaaccgtcgaaatcattatacaccacggtggagtccggtttctgacacttggcgatatgtgataacaatccgctgccgccgaacaggtccacgaaagtcgtactgtcagggaactgctggagtacctttatgtactctttggcgaacatccgcttctgcccctgaaaaggaagcggtgctgaaagatataattttctcattgttgtacaggtttgtttgtacggcaaaggtcgccatatccgacgaggcaaaagaacttttacacaaaatcatactgcaagcggcttgcagtcgctttgaaagcgtttgataagcgtgtacaccttgcgttcactcaccgcatacttttcagatagtcgggctacgatatacgacactttttcgccacgttccagcagcgtagtgtaatcggcatataagtccacatattctacatcctccagtctgataccagacattttgagtctatttatcaattccctgttaaattttaagacttctattatcttcataatcacaaaattttgtatctttgcattgtctcacttattattgtgcatcacacaaaaaaacacctactggtgacgagggtatttagcccccagtcgtaccagtaggtggtaaattgtgttaatagtaagtgagacgactattttaacaaggctgggggcttttttaattcccccataaggtttactctaaatccagctcgcctctttcaatggcgaaatagatatcacgtacccctttgtatgcggcagattgctcttcgatgtcaggaatagaattccaatgcccatctgtgaacgtcgagccgttgtgcccataatctgctgcgcaactttcatcggcaacgtcatcatgggtgcattttgccacatggtcgtgaaagagcaacaccttggcattcttcgggtcgctgatatcagccttgtaggtaactacatgaacaaagccatttataatgacaataccgttcacatctgcttctactctcttttgcattacttttagtttcataattcattcatttattttaatattacactaacatttctccatttatccaatcaacattataatagctttccttacctgtctgaggattaattgaaattttcacttcaagggcagcgaatttgttcgggtatagaacagtagactgcccactgccccatataatcatatagctggtcgtttggttatagatagctattgtttcgcctatcaatgtccgggcgatttcaaagtcagcactccctgccacgccgggcaatgttatatatatagtacgattaaaggagcctttgaacaaagctatagcacttatctttcctgccataaattcgtaatcaccatcggaattgataatcgcatattttgcgatattttgaggagttatcaccagcattttctttctgaaagagccaacgcctgacatatagccgttgatagggtcgagaacaatatcaggattgaaattggcattgccatagtccgtgcttggattaccatttacatctccgcactgggagaacagctgtcccttgtcaaacacccaaccgcccagcaatgcctttcccttgctcacaacaaaaggcttttcgccattatgctttatttcgaagttggctgcttcgaccgacacagtaccattggtcaggtcgataccggtgcgctcaacgctttccacaacgtcagggtccttccatgctgttgctttagctccttcttccagctgcatttcggacaaataagcttcgccatctcttgtgtagcctataaatatctggacatagttatatccgtcttccatatcaaaggtatgagtatattgcttccattgcccccacgtcgatggtatatttggataactcgtcttcggggctgtcatatcctttgaacggcttcttttgatttcaatgtaaggttgctcgcttccgtagactcgcacaaacattgacagcgtgtaggtgcgtccgcccagtgcttttatcacggggaacttgcaaccgttccactcgttctgcgaagcaccgtggcggacgatggcgacataaggattgtcaagatgggcaacgctcgcataattcccaattgtaacatattgagcgcgcgcaagcaccaacaacttcaagggacgcaagcttgcccccttgagcatgttcacgccgctgaaggtctgcttgctgacctctaagcgaattttctctgcatcttgctctatggtagacatgcgcctttcaagcccttgtttgtctgccttgttttgtgctatgatgctttgaaattgttggtcgttggcaagaaacttagcctcgttccatttctgagcactcaccatgaattcggcaatggcagtacgtgtctgccccttgtaggtggcagtaatctccacctttccactccactggttaggactaataccgtcgaagtatagtgtgttgtcgcctactattcttgcgtagcaattatagggtgtaatctcaatgctgctgggcacaacttccatcttgccaaggtacattcgcaccttacctttgttctgcgccaaattttcgatggcacccttgttgttcgtttgaaaaacaaaggtatttggcgtaactacaagggtgagagcatcttcccctttatcgccggggtctccgggcttcccatcttttggtgctcggcgaacagtaaatgtgcgttgtgctattatttctaccattattactactactttattgttattaaggagtgtaagggtgcaatttgcacacccttacctttttattaatacagctccacgcagaatgcttggcttgcgcttagcaagtcagagtaagctatatcgagtgagtagcgggcattcggcgcgtctttcgtgcaggctttatacccactcgttccccatgtcgtatcgatggcgttgtttgctgcaaaacgccacacccgcatattgtgcgctcccaatatcacggcgtcggtgatataggtagcaccctgacgtattttaaaccagtgcaacaagctgccaccttcagcaacgttatcgccgttgggctggaatacgtctatttcgtagggatctgaaccgtcgtacagcgtaccaatggcaaacacctccttgtttgccgttgcgcttgcggtatcggtatcttttatgacacatttgaatatcccgacatttacgacagccgaggctggtactgttatttcgttggtatttattccgctgatgccgttagcattggcggtttcgagtttcacccacacgccgttgcgtagctgataccacgtgtaagatacgttagatgtgtcgatgtcgccaccacgcatcaaatcacaatgtatcttcaacgcttttcccgcgttgtcgaaagtatcgccgtcaggcatgtagaggcttgcaagaatgtttgccccggcattctccatcttcgttatttctaccgacgctaccacttgcgctgctgcccttgaaacagggtcggtataggtagcctcgcaagttatcttcaagccggtgcagtcggtgaggttggctgccaacttcttcgcaagcccggtgcctgccgtcagtgcctgtgttgccgctgtgccatcttgcttgacaaccttccaatttaaatcgctaagatgcgccgtttggtcgccgttcttgccgcttaccagcagcagaggtgtcagtgtaagtggtgatgccgcatagttgggtgcataggttttactatcgcgtgaaaaaatctgcgtgagagctttgtcagttttcaaaacaaaggtaagcgtctttccgtttaccaatttctttacagtaaatgttttctgtgctaaaatttctgccattgttctttattttaaaatgttatatttttcaaaattttttgtccagacgaattaaggaatttacacataaaagatgtatcacccatcaagtcgtcgtaggtaacttttattttatagccatcgttactgtgcctgcctttccatgcggcatcgcccgcttcgtattcgcttacacgctcccatacaaagcgcgtagaaggcagcttgcttgttatttccacgtcgttttcccacacgtggacttcaaaggtggcttcccaacttgtttgcccctccgtgtaggctgcgctgcctgccgatgcatagccctcgacgcgtagcccggtgccgccatctttccccttggcagcatactgcttccattttgacgatagccccgttggttcgtcggcgttgtcatcaacaagcgaaagccacgtgccccctgcatgataccacgcttcatatttcgcagccaccgtgccctccacccagtcgccgcggtaaaggatattcggaatgcgctcgccatcggagcttacccactcgaagtggcggctattcatatagattttttcactcgacaagtggaatattgcattacccttgtttagcgaaaagtcgtgaatgttgcggtacacttcgatagtgccaccctcatccttcgacgtggtaatcatcgtaacattcatgcggttgcggtgcagcagcgggtctatgccatgggcaatatcccacagcgtgttgtgcccgcataacacgacattgtcgcctgccttcggctcgtcgtttcggacgttcttgtcgcagtaggcatcatcggcggtgataatgatatacgcttcctcacttgccgtcttctgtcctacttccgacacgcaacgccagtagtaactgttgctgacgttctcatagacacctgccctgatgttgaaggtttggcacagtgcttggtcgcccggcaaccagtcgttggtaatagccttgtcgccgtcgtccgtatggaggtagcatttccaaccaccatcaacgggcacaaccttgtttatgatggcatttgcacctgacagcacgatgtttccgccgatgtgtttgtactcgtctatttgtaggctgcggaagatagccttgccaatcacctccaaataatctatttgcccatgggcacgcccgttctcatcgagccatacgccaaagccgtttatcgtcttttcaaaaccgagtgtttggatagctttcagtatggcgttgccaaagccgtcgatgcccgtgccgtccttgaaacctatacccatcaagaaggtaattaacccctgcgcaatatcagctgaattcttgctgatgaattccttctgcgagcggcgtgcagaaaagatattcgtatcagcaggcatcgttgtgtctccgctctgtatgatgtctggagcattcagtgctcccactaaggctcccgtgtacttctttacatccttgatggagtcgtccaccttctgcatcatccccgtcgatagcgcatcacttatctcaaggttcatcttaccaggcaggttcacctgccgactaaggcgtgtgatccgactcttgcggaagcccgtatcggggaagtattcattgctctccagccggacacgtctgccgatgaacaggtcggtacttgtgtcttccatccatacatggtctgtcggggctttatagcgcgatacgtccaaggcgtgctccttattgtacttctcaacagctgccaggaactctttctctgctataccatagtactcatcaggcatgcgcaggttccaaagtatgtatttgtcgccaacctttggcacgagtgtaccacctggcagttgggtaccgtcgttgtagggccaaatcgtgataatttcaaattccttagtatcgctatggtagtttacttcaaagtaatgctccgtgtcagttcctaatccagccaactcacttccttcttggaacgacacacgctttacaagtccgcctatctcatagtcattcgggttgaacggcaggtccttatctttgaagtagtagatggtgaagggctttccgtccttatcctttacttcttcgtgtcgcacctcgctgatagtgcccgtacgacgtggatagatattggagaaggcagcctgctcatagtgatgaataatgccgtacttctctacattcacatcaacatactttgcgccacctggcagcatcagtcgggagtggtgatacttttcagggtctatattgcgtgagctacctatcgggaacagtcgactgtagaacttcacattatcggctaaatctctgtcgagcgatgtaaggccattgccgtaacccagtgtaacttcttcgccatgctcacacctacagaggtttagcgtctgaccgtcaaaccaccattcagtatgtacagcgtcggcaagttccttcagtgcctcctggcagtatttgcctgtatagtctattaccacgttatctgtaccctcaacaatacccaccttgaagttctgcagtccgtccatacctgcattgatattcttcacaataaggcgcatgtggtctattgggcgtgccgttagagcaaacaccgcctcgttctcaccatcggtattgttcagcactaagaagcgagatatcagactctctatgccacgcagctgaaaagagtactcccattccattgtactcttctgtgctggcttatacttttccgttgcccagtaacgttcaccatcatagtcgaggtaatcattcacgtcaatggagatacactcgtacaggatgaaggagagtttcagcagattgtcgccctgtatctccttatcctgtgtgctgctgtcgttcggtgagaacgtagcctttacttgtccgctgctatcaaatagtgttagaagcatattcaaatggcgtttaaactttatatgattggttcgggttcacggaacttcaccttatagctacttgcctgtatgccttcggtccatagatacgtcagtgagcgataggcactactgtcaagatagaatactttgatcgtaaggttcagtgtcgtgaatgtaattgtcagccagccattgttgcctgattttaaaaagcggataaacgacatgtatcgttcaagccactgctggcgtgtaggtgcatactgggcgaagtgcaaagtaacgtcacgctcagcattggcaggaaataattgtttggaatacttctttccgttatgctcacgtatgtctacacctacatggtcctttgccttgcttggtgccaggatagcattgagattatctctgccaccttttcgttcttcggttaagaacacaccatactccttatatatatccgtgccattgataagcacttgtccttccaatatcttcgtcatacttatctaacttttactccgtccctaatcatttttttcacatcagcacctatctctttcaatgaagcagcactattgcctgtgttctcttcaatcttccgtagatgctcttgtgctgcactcatcttttttgcgacatcttcaacgcggtcatcaatgcttgcccaatgcatctgaccactaacgaacaacccttcaagctttgttgcctggtcttgactcattgctgtgaatgcgccactcttgccttgttgggttgtacctttgtctgtctccttaataataccttcattacgcaattgttctatgtcattcttagcactattgacataactttcgtattgttctttcagtgcatcgaggcgcttgcggaattctgcatcagttatctttccatcaacacgttcttcattaagttttgcaagactttcgtaccacttctcaagatttttctgaaacttcgcaccaacaagattgttcactgccatcttgtttaccatcgtctgccagttctcttctatctctttgaagacatctttcgaaccactggcgagagcataaagtgagttaaggaagtcgtcaaagacattctgccttgttgttgtagtcaggttctcgtagagagcatctgttatttctttcagcttgccggcttgtgcgatgtagtcattaagcttatcagctacgcgaccaccgtatccgcctttgccagtatcctgcaactgtttccacatatcaacattagaacgtaaaatcttcatctcttcgggagtgagattccacaagttgccgtcccattttctgcctatttgagagctgaaacgatttatttgctcctgactaaaccctttccagtaggcgttgaaactatgatgtgccgagtgatagcctgcctgttcctgtgcaatacgtttgtaattatcgttagtctctttctgtaacttctctgcatctcgtgatatgcgaatagccgaagcaccgcgggaggtcttcatctcgtccgttaggtcctcaattgcctgctccaggagttcgttacgttttgtcaggcgatcaattgattttgccacttcctcctcgttactgttagtaaaccagctgctgggacctttatgactgagcagtccgaaggaaagaacgttaccgatacgtccgacaacagtatccaacaaacctccaataccttttactataatagactcaagtaccttaaataaattctctggcaagtcaaaaatagcattgataagattaccgatagcttccaagatgctatttacaagatcgtctatccagcgcaaagatataagttccgtcagtgagttcagaacaccagtaacaaagcttttgatactattggcaaggtcaagtatcattctgggtatttgtgcaataatgccaaccatacttcctatgccacttgatagaatgcccgacatcgtgccaccaagagaggacaacgcatttcccattgctcctgacacagcactgccaacactctttgctatgccgtctcccatggttggaagaatagaatcaagcgtacctttgagtgcatcaacctgtcctactgactgctgtacgcctccgtatccatctacaccctgccatgccttagcgttattgagagccgttgttaatccagacgtaaagtt

SEQ ID NO: 2295 - DNA, 22910 bp, synthetic construct
  source 1..22910: mol_type = other DNA
  misc_feature 1..22910: note = Synthetic
agctttaaggaaacaaagtaatacaccaaaagaaggtatagctggcgtgtttcaaagggtgttttctaaattgcgttacattaatatgtttggagataaagtcatgacttggcttcgtgataaattgtatagtcctacgttaagattcgctttaaagtataagtttttaacttttcatttttattgtcttcttaattttaaccaaagctagttttgatagcggtatcattagaggtgcttttttcccaacaatagccagtgataggattagtatatcactaaatatgcctaatggtacaacagagaaagtaacagacagtattatttcatttattgaaactaaagcgattgaagttaccaaagaaataaatgatgaatatattggtgaagattctgaaaagtatttggtagaaaatatgattaagaatattgggccaggttcatcaacagcatctttagcaataaacttgttgccaggagaagaacgacctaatgaaattacgtctgctttagtgtccaatagaattcaagaacgtgttggagcaatatttggtgccgaaagtttagtttttggaagtggcgggaattttggaggaagtcctgtttcaatatcattattaggaaatgatattattgaattaaaagcagtgaagtctgaattaaaacaatatctagaaaataatattttactaaaagatgtcacagataatgatcctgctggtattaaagagattcgtctagaacttaatgaaagtgcttatgcactaggtttaaacttgagaacggtaatgactcaggtacgttctgcattttttggaactgaagcacaacgttttcaaagagggcaagatgaaattagagtttgggtacgatataacagagacaatcgttcatccattaagaatttggataatatgcgaattgtggcgccaaatggacaaagagttcctttaaaagaaatagctagttatagtattgagcgaggagatgttgctattaatcatttagaaggaaggcgagaaatccaaatttccgcagatataaaagatcaaaagaaaacgagtccaacagatattatggcagagattcaaaatgaaattatgccagaaatattatcaaaatatcctacggtaacaccatcttatgaagggcaaaatagagagcgagtaaaactatttaattctttaaatgcagtaggtttaacaattttagcgctcatatatatagttattgcatttacatttagaagttacagtcagcctcttttattattgctacttattccattgagtttgccagctgttgcttggggtcattgggttcacgattttccattaaacattctatcaatgcttggtattattgctcttattggaataatggttaatgatggattggtacttattggaaaatttaataataatctaagagagggtatgttgtttgatgacgctttgtatcaagcaggtcgttctcgttttagagccatatttttaacctcaattactactgtagcaggtttagcacctttaatttttgaagagagtagacaggcccaatttttaattcctatggcagtttctattgcttacggaattggattcgcaaccgttttaacgcttgttgtgctgccaattttcttatcgtttagtaatagcgtaaaaacaactgcaaaatggttgtatacaggtaaaaaagtaactagagaagaagtggagcgcgtaacaagagaacaaaatcataacaatgactattaaattttatattacatatgttttatttttaatcggaatagtagttagtgcacaacaagtactaacaacagatgaagcagtaaaactagcattagaaaataatttcaatattaaaattgctaataatgcagttgaagtagccgagaacaataccaatattttaaattcaggttacttaccaacgctaacaggaagtgcaggagcaacttataatttagataatactgaggctgatttttctaacggaaatactacagttttaaatggagcagaaagctcacgttacaatgcttcgttaaacttaaattacaccatatttgatggtttaggaagacaatacaattataaaagtttaaaagaacaatatcaattatctgaattacaagcacgagaaactatagagaacacgattattcagctgttttcggtgtattataatgtagcacaagtatctgaaaacgtttccgccttaaaagagactttaaaaatttcaaaaaacagattagtaagagcgcaatatcaattcgattatggacaaaataccaagttgggaatcttaaatgccgaagtggatattgtaaacgatagtattaatattattaatgctattcagcaattaaaaaatgggaaacgagatttaaatgttgttttgggtgatgttctaaaaaacgattttaatgtagaaactgaagtcaactttgcaatacaatttaaaaaagatagcttatttgaaaaggctaaaaccagaaatacggcattacttcaaactgaaaaaaatatagctattagtcaattaagtattaaatcaggtcaatcggcttacttgcctacaattggtttggttggcagttatggatggaataaaaataataataacgcagcgtcttttgttgcaggatctattaatacaggtttatctgcaggtttaaatttgtcatggaatatctttgatggaggcaatacaataactagagtaagaaatgctaaagtcaatcttgaaacacagcagcttcaaaaagagaatatattaattagtattacgcgagattttaataatgtttgggacgattataataacaaattagccatttataacttacaagaaaataatatttcaacagctcaaaataattttagtcgtacccaagagaaatttaaaattggacaggtaaattctattgagtttagacaagcacaacttaacttgcgtaatgcagaattaagtaggaatttggctaaattttcagctaaattggcagagttagatttgttgcagttaagtggggaattgcttaacacttctttttaattctaaaaacttaaaaaaacacctaaattatgggtttagtcttttctacaaacaacttataaccaaaaaataatattttatgcttgagcatttttttcagtgtccttattgttgggaaacgatatcaatgcttatagacagcagtgtaagacaacaaacttatgtagaggattgcgaagtatgttgcaatccaatacaattaactcctcagtttttagacttggaacttgttggttttgaggctgtaaatatagagcaataattttttgtaaaataatacttgtattatctaaaaagcattgtatatttgcagtccgaaatgatttggtcggtattatgagccgaaagttaaaagctaagttaatcgttttagagattatatcgcgggatagagcagtaggtagctcgtcgggctcataacccgaaggtcactggttcgagtccagttcccgctactaagctaaatgctaatagaatcaacggattgtgtctcacaatccgtttttttatgtcttatattttcttacatttacgtaaagtacacgattccgtacacgatttgtctatgaaattacaatacaacgagcctaaactcttcactggaggagttgatattaccaactggtataaactatctaaagcagaccaaaaaagggcgttatctaaagattggtatgtgtattattcttttagaaaccctaaaacaaataagcttgttaggcagactaatcttaaaggaggaactaatgtgtttaaggataaattacgtcgttgtactgcactaaacatattaaagaaaggtctaatgacacttctagatgagggctataacccatataaagataacttaacttttcttgaatacctcgagaagcgtgagaaggaaaaagtcaagattaaaagcaagaataaaactaaaaagaaaaagaaggttttattagaagttcctatggttatagaatcaacagatgatgctattaaagttgtaacaatatcaattgaagatgcttttattttagggttagaaaccaaagctaatatccttgcaacgggttcttataccagatttaaaagtaggatcaatagatttaaagtgtggttagaaaaagaaggctttgattttaaatgtgatattaatactttaaataaaaaaactgtaatacaatatttaaacactgtattacaaaacacgagtcctagaaatcgtaataatgcaaggactgatattggttctctattccaagtattggtggataatgatgttatacttgataattttgttagaaaaattaatgttttaaaggctatccctaaaaggaataaaacatatactccaacacaacttaaagaagtattaaattatgtaaaaactaatgatcctgtattacacttatttgtgcaatttttttcctataatttcctaagacctatagaagtttgtagattgagaataggagatttagatttggaggacaaaaagctttatgttagagcaaaaaaccaacttgttaaaactaaaattataccagatattttaataaaagagttgccagatcttacaaaatttagaaaagatgattttctttttacaccagatgcaattggtggaacatgggaaactttagaagagaataaacgtaatttttttactaaacgttttaaaaaggtaaaagatcattttgatttaggtatagaatatggtttgtatagttttaggcacactctaattacaaaactatataaagagatggcaaaaaatgcaacgccgtttgaagttaaaagtaaactattattaattactggacatgcaacaatgagtgctttagaactatatttacgcgatattgatgctgtgcttccagaagattactcaaaccttttagaataaatggactacaaatatttaggaattatagaacaatacaattttaatggtctttctaatgatgaacaggacgattatatgtttggaaagcgatatttattacgaagagctacaataaacgaggacttagttcctaatgaaaatgaagttggtgcattttctgtttcaggtaatatatctttaagtggtaaaacttatattctatctcgtgaaattgcagaagaattttatcaatttttgctacaacattatcaaggaggtttagaaggagataatattttgttttttaaaaaatttaatgaagacacgtttgcattaaccgataaaaaagctaaaaaattaggtttaaagaagtttaataaaatttttaaaggagcctgtcctgaaggagatacaattaagggtatggataatgaaacaggagcacttatatttcataataagttttttactctaaatcgtgagcgtgttcaattaacagaatggcttagaaaagaaagagcgttgtttattcaatatttattaggtaataaaacattttttgatagatcactttttaaacagcagcctacactaataaaaatgttcaaatttgaaaatgatttattaacattaattcaattaaatagaaaattcaattttataatagatgaacatttttctgtaaaacctatttcttataaaatttatgataactactcatgtcattttgaaaaacagatacaagttgatttcatttgtatacaattgaaattaaaaacaaattttgtatttgtcgttagtctcttttatttttttagagataaattatccatgaaaatgccttcagctaaattatttcaagcaataattaacgagtgttttaaccttgaattacaaactttaaagctaaccgatactacaaatgccaaacacaaagaaaggttaaacatctttgaaaaaaaatggaataaatttatctctgacgttaaataatattcaatttctacattcctttcattttttctataaatttctatacattttctattttcctttcattttataactttcaatgttttcatttattacaaccagttagatcttattagctggtaatggattttcatcattctatttaataagcatttaacaaaaacaatgtttaattaaataaataaataaagatgaaagcaaaaattaatttaagaattgatttattattaaaaggagaattagaaactttagctctagagagagagactactgtttcaaatcttattagagatatccttgaagaaaaagtatctgattactttgaggagcaatgtgttcaagatttcgaaaaaccagaaccattagttattgatttgtctgattgtttgggacaacgaacagaagagcacataaatcaattaaattctgtgcattattttccaaactatattgatttaagtcaatgtctaaatgttaagcctaactcaaatagagaagaggatgaatagcaaaaacataaacttaattggaaacgatcttctgtctaacgaaaacaaattaaaacagaaagagtccgttcaaggatgtttaataattaaagaggcaaacgaatgggtagatgaagctaaaaggcgccctattcctaatatgctatttagtgaactttggtatgaaaatgaattagcaatattatttgctgacactaatatcggcaagtctattttggctgtacaaatagcagatagtttaagccgtggaaaaccaatagcaggttttaaactagaatgtcaaccaaaaaaagtgttgtacttggatttcgaattgtcagacaaacaattcgaaaaccgttgttctaataattataaggagcattatgtctttaatcataattttcttcgtgcagagataaatacagatttagatattccaaaagagtatagtggtatcgaagattatttgtgtaagacacttaatgaaagtatctccaaaaataatgtagacgtattaattatagataatcttacatacctaaaaagtgacaatgaacgtgctaaagatgcattagagttaatgaaacaattaaaaaaacttgccaaaacaagtggtgtttctattttggtcttagcacatactccaaaacgtgatgaaactaaagctatttcaaaaaatgatttagcaggtagtaaaatgttaatgaatttttgtgatagttcttttgcaattggtgcaagttctcaagattcatcgttacgttatataaaacaaatcaaacaacgtaatacagaacatttgtatcatggtgataatgttgttttgtgtcaaattaataaagaacagaattttttaaagtttgagtttttaggttttggtaatgaattggaacacctaaaaacttttggtacaaattctaaagaagaaagtaataaccagttattagaacttgtagaaaaaggaatttcaaacgttcaaataggtaaggagttaggaatacacgaggctacagttagacagagaagaacaaaactaggaatctaacgtatgactgctaatgatgtatataatgtagctaaagcacttcctaaggaagagcttaataagctgtataatatgatcaaaagcgaagtagaattagaactgcctaaaattaacaatcgaaagaaaaattttcaatcgtcaatgtttacagaaacagagtgtttaaaatacttaatacagcatttcaataaaaaaagaatcccttaaaataaactcgtacaactcgtacatatataattgtacgacctatacgaatagtaatatgacacaacaatacaaatacacactcgataggtcaagtaaaaagcaccaatgccctagctgcaacaaaaaatcatttgttaggtttatagattctgaaacaaaacaatatacaaactcatttgatggtagatgcgatagggaaagtaagtgtggttattttaaaaagccaaacacaaacaaacgtattacgtcttcaataataagtaatacaaagcgtattactcctacgtatcacagtttaagtatggtaatacagtatatgtcaaattttaagcaaaataactttatagcctatttactaacgcattttgtgccagtagatgtaatacaagctattaaattatataaaattggtactacaaatcattggaatggtgctacaattttttggcagatagataattgtaggacagttagagcaggaaagataatgttgtacaacagtaataccggtaaaagggtaaaaaagccatacaaccatataaattggatgcataaaagtataaaacaacatgattttgtgttacaacaatgtttatttggattgcattgtattacaaaacaagaaaattataaaataatttgcattgtcgagtcagaaaagactgcaataataatgagtattatttatccatctaatatttggatggcaactggaagtaaatctaattttaaagaagaattacttacacctataaagcatagaaaaataattgtgtatccagataagtctgagtttgataaatggaatacagttagccttgaattagagaaaaaaggatataatattgaatgcagtaggatgttagaggaatccagtttaaaagatggtggtgatttagttgatctagttgtataaatgttatttggtaaatgagtttttttgaaaataaaaaaaagcgacattttcatgccgctttaaatgttttcacaacggaataatccttattgtgaattgatttcaaattgtttaacaaatatataaaaaaatatgattctaaattacgggtttccgtacagggagtaattattttttttttaaatttatagtaaatataaaaatcgctcagaatgaaaaagatattaggattagatttagggactacatctattggatgggctttggtaaatgaagctgaaaataaaagtgaaaattcagaaattattaaacttggagtaagagtcaatccactttctattgatgagaaaacaaattttgataaaggaaaaccaatttctacaaatgcagatagaacattaaacagaggagcaagaagaaatttacaacgttataaacaaagacgtgaaaacttatttgagatattgttagacaataaattaatcacgaaagaaacaatattaactgaaacaggaaacaacacgacccatgaaactttaagattaagagctaaagcacctaatgagaggatagaactagatgaattggctagggtgtttttttcaataaacaaaaaaagaggatataaaagtagtagaaaagcaaaaagtgaagatgaaggaaatgctattgatggcatgtcaattgccaaagaattatatgaaaataatattacaccaggacaatatgtatatgagttactgttaaataaaaaaaaatatataccagatttttatcgctccgatttacaaaatgaatttaatataatatgggaatatcaaaaacaatttcactcgaatgtactaaatgatgaaatgtacaagaaacttgaaggacaaggacaacaaaactctagaaaaagatttcttgcaattcatggaatttataccgctgagaacaagggcaaaagagacgctataaaactacagcactataaatggagagcggaagcaattactaatcaattaccaatagatcaggttgcttatgttttagtagagataaataataatttaaataaatccagcggatacctcggtgctataagcgacagaagtaaagaattgtattttaaaaatgaaacagttggcgaaaatttacacagacaaattaaagaaaacaatcatacttctttaagaaatcaagttttttatagacaggattatttagatgaatttgaacagatttgggtaagacaagctaaatattactcagaattaactttagagttaaaaaatgaaatccgtgatgtggttattttttatcaacgaaaattaaaatctcaaaaacatcttatttctaattgtcagtttgaaaaacaacataaagctgttcctaaatcttctccattatttcaagagttcaaaatttggcaaaacttaaacaacctagtatttaaaaatacaagaacaaaagaaaaatgtgttttagatgatgacttaagaatttctctttttgaagaattaaatttaagaggcaacttaacggaaaaaacaatcttaaagttttgcaatttaaactcaacttggaaaagtaatttcaccaaaggactagagggtaataatacaaataaagcactctacaatatttaccaacatattgcaacagaagaaggttatggttttgattgggaaaagaaaactacaaaagaaataaaagaagagttaaagtctatttttcctcgaatcaatattgatactactattttaaatttcgaaacgaatattgaaggtcagacatttgataaacaaaccaattatcaattatggcacttactatactccgccgaagatgatacaaaaattttggaggaagatagattggtttatggaaattctaatgtagctctaaaaaagaaacttcatactaaatatggttttaaaccagaatacgctaccatgatggctaatgttactttacaagacgattatggcagcttgtcttctagagcaattcggaaaatcatcccttttttacaagaaggtaacgagtattcagagtcttgcgcgttagcaggatataaccactctagtagcctaactaaagaagaattagaaaaaaggattcttaaaccaagattagagatactgcaaaaaaacagtttaagaaacccggttgtagagaaaatattaaatcaaatggtaaacgttataaatcaaattattgatgaatatgggaagcctgatgaaataagaattgaactggcgagagatttaaaaaaatctgcaaaacaaagggaagaaactacaaaatttataaactctgcaacaaaagtaaacgatgatataaaatctgtaattcagaaagaatttggcttcactcctacaaaaaacgatgtagtacgttataagctatggcttgaactcaaaaacaatggctataaaagcttgtttaccaacaaatacataccaaaagaagacatcttttctaaaaatatagatattgaacatattataccaaaagccattttatttgacgattctttttccaacaaaacactcgcatacagagccgtaaacctaaaaaaagcagatagaacagcaatagattttatagaacaagactatagtaatgaggacattaacaaatatagattaagagtagaaagtttatataaaaacggtgatataaaaaaaggaaaatacaagaagcttttaatgagtttagctaatttacctacagattttattgcccgagatttagtaaacacacaatacatttctaaaaaagcaaagagcatgttatttgaagtgtttcagaatgtggttccaacatctggtaggattactgataaattacgtggcgactgggatttaataaacgttatgaaagaacttaatttacataaatatagaagtttaggattaacagaaattcaagaaagaaaaaacaatgtaaaaattgaaataataaaagattggacaaaaagaaacgaccacagacatcatgcaatggatgcacttacggttgcttttacaacgcacaaccatattaattatattaataatttaaatgcttcaagaaataaagaaagccacttgtttagtattaaaaacacaattaccaaggtgtatgaggatacaacaggaaataagaaaagaaattttattcaaccaattgaaaactttagaactgaagccaaaaagcatattgagtctattttaatttcttttaaaaacaaaaacaaagttgttactaaaaacattaacaaatctaaactaaaaggtaaagataattttaatgctaaaccacaacttactccaagagggcaattgcataaagaaacagtatatggcacctctaaaagggaaatggacaagcctattaaattgagtaaaaaatttaagatagaaacattgaaattaattgttaactccaacttaaaaacagttgtaacaaagcatttacataaatacaataataagccagaaattgctttcgattctaagacaataaaaaaagatcctattctctataagggtttacagttgacagaagttttgtgttttgaagaaatttatacaatacgaaaagttgtttctccagataattttaaaacagaaaaagatttaaataaaataattgataaaaaaacacaagaagttttaaaaaataggcttaatgaatttggaggtaaacctaaagaggctttttcagatttagataaaaaccctatttggttaaataaagaaaaaggaattagtataaagcgtgttactataactggagtttctaatgcagagcctttacattataagaaagaccattttggaagtgaaattttagataaaaagggtaataaacaagctgttgattttgtaagcacaggaaataaccatcatgtagcaatttataaagatgacaaaggtaaattacaagaaaaagttgtttcgttttatgaagccgtggctagagtaaatgaaggattgcctataataaacaaagaatacaatacaggtttaggttgggagtttttgtttactatgaaacaaaatgaaatgtttgtatttcccaatgatgattttaatccaattgaaattgatcttttagatgaaaaaaatgaaatcttaatcagtaaaaacttgtttagagtacagaaaatttcaacaaaaaattatatgtttaatcatcatttagaaacacaggttgtaacaagtgaaattttaaaaacaaaaaaacaattatcaggtattacgtatcactttattcaaagtacagagccattaagaaatattataaaactaagaatgaatcatattggaaaaattgtttatgtaggagaatattaaaaaagaaagccatgataaaaagaaccatttacataggcaatccatcctatttaaaaataaaacaagaacaattggttgttcaagaacctgaaacaaaagaaatcaaaggaactgtaccaattgaagatattgccttgttaatgttagaccattatcaaattacaatatctaaccagcttttagtaaaattacagggtaataatgttgctgtaattagttgtgatgaacatcacttaccatttggaatgatgttaccaatgcatggacattcagaatattcagaaagaataaaacaccaatttgctgcatcagagcctttaaaaaagaagctatggaaacaaacggtggaacagaaaataaaaaatcaaaaagcattactagtattaaatgataaatttgcagaacctttaggagtatatcaactaactgtaaaaagtggtgacactacaaatagagaaggaatagcagctcagttttactggaaacagttgtttgaaaactttaatagacaacgttttggagaagcaccaaataatttattaaattttggatattccgttttacggagtatcgttgctagggctttagttagtagtggtttattacctgttttagggatttttcatagaaacaagtacaatccgtattgtttggcagatgatattatggaaccttacaggccttttgtagataaattagtttacaattatattttagtcaataataataccgaattaaacaaagatgcaaaggctactattttaacaattgcaacacaagatgtgcgtattgatggcttagtaaggcctttgcttgttgctgtaactgccacaactgctagtttatataaatgctttactggagagctaagacacataaaatatccagaattagattaaatgtcaactaacagatatagcgcttatagaattatgtgggtattcgttttttttgatttgccaaccgaaactaaaaaggaacgaaaagccgctggcttgtttcgtaaaaaactaattgatgatggttttgccatgtttcaattttcaatatatcttaggcattgcccaagtagagaaaacgcaaaagtgcatgctaaaagagtaaaatttagtttaccaaaacatggaaaaatctgtattttagaaattactgacaagcaatttggtaacatggaattatttcatggtattagagaagtggatttaccacaaccaacacaacagttgcaattgttttaaataggataggtaaaatctaataaacttctatttatcctctcctaaaagtaaattttttgaatcttaaaaaggaatcccaacctattgattttactcaataaactgggattgaccttgtgattgctcacgtaaaaatacaatttgaaatcaattcacaacccccttacctataataaacaccgagtaaaacttgtgattgctcacgtaaaaatacaatttgaaatcaattcacaacacattaacatcaatggtttgatttagttttcttgtgattgctcacgtaaaaatacaatttgaaatcaattcacaacgacagtagcaaagtatttaaaagagttaaacttgtgattgctcacgtaaaaatacaatttgaaatcaattcacaacctgagtggtgcaagtaaacaacgaaacgaacttgtgattgctcacgtaaaaatacaatttgaaatcaattcacaacaattccttcattttcttttaaaatgtctaacttgtgattgctcacgtaaaaatacaatttgaaatcaattcacaactatcttcattcgcttgtatgtctagtttagcttgtgattgctcacgtaaaaatacaatttgaaatcaattcacaacacatcttgcaaagtttggcattgcttgcttcttgtgattgctcacgtaaaaatacaatttgaaatcaattcacaacggccttcaaatcatcatttcgaaatcttgccttgtgattgctcacgtaaaaatacaatttgaaatcaattcacaacttagtatggatttatctctagcgtaatcttcttgtgattgctcacgtaaaaatacaatttgaaatcaattcacaacactttaaccattactttaattgttcgtttccttgtgattgctcacgtaaaaatacaatttgaaatcaattcacaacaattgctcctttaatggttgttggttttgtcttgtgattgctcacgtaaaaatacaatttgaaatcaattcacaactaagttcccaaattggttaaattggttatgcttgtgattgctcacgtaaaaatacaatttgaaatcaattcacaaccatatcgacaaactttacaaagttctggatcttgtgattgctcacgtaaaaatacaatttgaaatcaattcacaacaaacaagcttgtaccatcacaccactataacttgtgattgctcacgtaaaaatacaatttgaaatcaattcacaactatttattcgtgaattaactgactgatttacttgtgattgctcacgtaaaaatacaatttgaaatcaattcacaacatgccttacttaattagtaaagataaaaaacttgtgattgctcacgtaaaaatacaatttgaaatcaattcacaacacaatctacaagttccaaaatggtatgcctcttgtgattgctcacgtaaaaatacaatttgaaatcaattcacaactgtttaaactgtcttttaagaagtgtaattcttgtgattgctcacgtaaaaatacaatttgaaatcaattcacaacaatcctatggcgcaatgcatagacctgtctcttgtgattgctcacgtaaaaatacaatttgaaatcaattcacaacaacatcgctctccttacactcataatggatcttgtgattgctcacgtaaaaatacaatttgaaatcaattcacaaccattaacttcaaaaccaaaactatgaccgacttgtgattgctcaagtaaaaatacaatttgaaatcaattcacaactacacgtatagcagtttataactcatttttcttgtgattgctcacgtaaaaatacaatttgaaatcaattcacaactcttttaaacgtttaacagcattcttcatcttgtgattgctcacgtaaaaatacaatttgaaatcaattcacaacagtatgagtaaaattactgaacacgatagacttgtgattgctcacgtaaaaatacaatttgaaatcaattcacaacattagcaccgcttttttacatagcagaacacttgtgattgctcacgtaaaaatacaatttgaaatcaattcacaaccatatttagcagtataaaaaatgaaactcttgtgattgctcacgtaaaaatacaatttgaaatcaattcacaacgcgttaaacccaagtttggaaagtgctttcttgtgattgctcacgtaaaaatacaatttgaaatcaattcacaactattcctctggattttctaaaggataaacccttgtgattgctcacgtaaaaatacaatttgaaatcaattcacaactaaatctttccaattttatatactgatgcacttgtgattgctcacgtaaaaatacaatttgaaatcaattcacaacgttctaaacctgtggtattagcatctattgcttgtgattgctcacgtaaaaatacaatttgaaatcaattcacaaccaaccttgctccataacttcaaacacatctcttgtgattgctcacgtaaaaatacaatttgaaatcaattcacaacatgtaattgctcacatgatgccttgcttgtcttgtgattgctcacgtaaaaatacaatttgaaatcaattcacaactaatccgcaccatctaaaaatggataagaccttgtgattgctcacgtaaaaatacaatttgaaatcaattcacaaccaactttacattataaagcaagagattttacttgtgattgctcacgtaaaaatacaatttgaaatcaattcacaacacataggatcaacacaattaaaaagtgatacttgtgattgctcacgtaaaaatacaatttgaaatcaattcacaactaaactacgtaagtgctacagatatattcacttgtgattgctcacgtaaaaatacaatttgaaatcaattcacaacaaacgagggtgaagttgtatttagtccgttcttgtgattgctcacgtaaaaatacaatttgaaatcaattcacaactggaggtatgtttataataagccttttaatcttgtgattgctcacgtaaaaatacaatttgaaatcaattcacaacgatggcgataatgtcacttatgaggttgtacttgtgattgctcacgtaaaaatacaatttgaaatcaattcacaacatagttcttaaccctttgaatgtgaaatttcttgtgattgctcacgtaaaaatacaatttgaaatcaattcacaacagttttgataagtttaattaaggtcgtatacttgtgattgctcacgtaaaaatacaatttgaaatcaattcacaaccaaatctgtataataatcgtaatcttgagacttgtgattgctcacgtaaaaatacaatttgaaatcaattcacaacagattgcatttctataatgatttctggcttgttgagttttaaaagatcaagaatttagacattattttaacttttcaaattcaaccaatatcgagttcctttcagttcaccagttttaattaccattttcttatctaccatatcttttaaatcacgagtggccgtagaagcagaagtttttgcaatacgtgtgtaattttcggcacttaaaccaccatcaaaaccttggtgtcctgcattaaaaaaacgtgtaacaacttttagttggcgttcattcataacttgagtaaagcgatcgaaaaatttggctttctcaattacaaaatcaataagctttaatgtgtcttcttgggcatctaatatggtttgcccgaaatagagtatccaatctgtaatatctgcgtgtttattattgttttctaaagcattgtaatacgcttttttattggcttctatagtttttgataatgaaataagtgcaggttgtcctacactttgtgctacagatttttcagcaagcgcacgtgcaatacgtccgtttccatcttcaaaagggtgaatactcacaaaatacagatgtgtaatacttgcttttacaagaggtaatacgttgtattccgtttttgagtgtagggtgttaaaccaggttataaactgcgccatctcttgttgcatgttttgagatgctggtgcttcaaaatgaatagttggtttgtctaagcgtccagaaaccacttgcattgggtcttcgtgtgtacggtatttgccaatgtcgtttaaatctcgtctaccattggttagcattttgtgccaattataaagttgtttatgagagagttgtttattgtggtttttgtataaatcaaccatcatttcagaaatgccaaattctgctgaagctatcttttttttatcaacttttaaacctagattttttttaatagaagattgtatactgtctctatctagatattcgccttcgatttcagaagttttaagtgcttcgttagataatatttcaataattaattgctctttttcacttttatttacgtgtttaaaagcaccaagtacgattcccgtattttgtgagaatttctgttccaaattttttaaagcatcttcattgtatgaaaaatgaggccattctgttttttgccagttccatatttttcttatcatgagctataaatttattttttatagctcaaatataagtgaattttgagctataaagttagtttttatagctcaaacaattcttgtatttgtaaaatacgtgattttttatgtcaaagctaggggtctctaatgtgtattatgttttttttgtaattgtaatacgtcttaaaatattatgtaaatttgaatagaaattaattataaatcagagtacacgatctcgtacacgattttattaaaatatagcaaaatagtaaggaaaaagagttttttctcaaactcataacccgaaggtcactggttcgagtccagttcccgctactaagtacaaagtcaataaaattaacggtttggagtctccaaaccgtttttttatgcttaattttaacttcataatagataaacaatacaaaagtgcatacgatttgtccttgaagaaacaattttccacaccaaagatctacatggcaaaaggcgatttaaataagcgctggtatgtctatttttcttatcgaaatccaaaaacaaatatgttaattcgtcaaacaccattttatgggaatgcgaatacttttaaaacaaaagaggagcgtctacatttgatgtgacgatttttatgagcttataaattttatatttgatttatggtaaaaaaatatgacaatgaatttaaagttatgatcgtagagcttttaaattcggggattaagacaaaacaagttagtgaggattatggtttaaacttgagtatggttgggcgttggaaacgcgaatataagttacaatcgggtgatttctcaaaaaagaaggagttatctgttgaagctcaagaactcaaggctctaaagaaagaattaaagaatgtaacaatggagcgcgacatcttaaaaaaggcggtgagcatcttctccaagagcgacttataatatatcaattcattttataaaatattgatatatatccagttgagaagatgtgtaaatctatgaagtttagtaaaaacgcttattatcattggtttaaaaacaaagatgttatatttttaaaaacaccgaaaatactttataaaggaacacttttaataagacttttaaacaaaatttgttttttatttgtgatggcattattacttttaatatattttatttcttgttacagcgacatagagagatatagcttttggctatacagctaaatcctaggttataactgcatggttaaatagcgcctcaaataaaagaatattgagagagactatagagaaagccggtcctggagtgcttaaaagtccatctggagcgtgttattttaaaacagcttttttctaaatattaaaaacgacacgaagaataatgtttttttaactatttaagataaattattttatagagcacttcttgccttcgcttggcaataggtaaagattttccattactcatttcacaataattgccaccagacttgtttattttttttactttagagaggttaatgatatagctattgtgaattctaaaaaacagattagaatctaaaatatcctcatacatgccaatgtttttagaggagacaatttctgtatcattacttaagtgaaatacagtataacggccatccgatttaagataaacaatatcaataagtttaacaaaatctatttcgttcatagatggaacagcaataaaatcaaaatttttttctgtggtattcatagaagaattaaccgtttcaatttgacgtgaatttgtgaaagattcccgttccaattcaattacagccttttgtactgccaatacgatctcttttggatcgtagggttttaatatataatcaatggcattgtacttaaatgcttttatagcatattcactaagagcagtaataaaaataatttttgtgtttgttaattctaccatttctaaaacatcaaaccctgttcctttatccaagataatgtccataaaaatgagttcaggttttaaactattgagttgtagaacggcatcatcgtatgtgaaagcattaccaataatctcaatttgagggcaatgcttttgtaagtaaaacaatagtaagttcgaacttctttcttcatcttcaacgataaaagctttgatgttttttgtcattttgagtgagtatgggttgaaaatattgtttagcatttatattgtaaatgtaaacaaatattttaaatgattatctaatttttaattcagaatatttgaaatatcaatatggtaatgggggtatacttttgtttgtctagaggttaaactagctaaagtcgaaacgagtatgagtgcacgcgatcctggatccaatagaaatggttacagccgtattttacggtattctgtaaaatgtatcttgtttagacataaatgaacaacaattctgtttaaaacaacagctatgagtacctattaaatttagagattaaatggtttatctattcatgtcaaaagagtagctatgacaataaatagataaaataaggctaaaaaaaccttatttaatacttcaaattacaaatattaaaaaaaatatttatttttgtttatcaaaaaaaaataattaaaagtaattgaaatagttgttttcttgtaagttatttaaggcccatgctcttttagttatagttatattatagtaatcctatgctttcatctctttataaaaaacactggatattttctttatggatgctatgctctttgctatgcgcttcttctttatatggtcaggaagttgttattaagaaagtagaaactgatatgagcgacagcgaaacctttcctaaggctattcatttagatcgggatggctttttatggtattcggtaaaaggtggtgtggttttagagcaaggaagtaatgatcatttttttgcttttaagcacttaaattttaaatatgcatcaatcactcataaaattcataaagctaaagacaataagctttggatgatttataagggagaacctgaatttcttgattttgacacgggggaatcgaccaagatagcgttgaaccctccattttttacagaagacaaacctgaatttctggatattgcggaaacaccagatggtactatgtggtttacgagcaataaaaactatgtttgttcttacaccgcggatggaactattaggtattacaatcttacaaatagcttgaattctggagtttattttcgtagtttaagcagtcccatttacataaaagaggtttttttagatggatctttattgctaaaagcaggaaatcagtggctcacatttaagggcgggagcgtaaaacacttattagatcttagcgacagtgaagttcaaggtaaagtccaaatttggatagagagtccgacttggagtactaaaaatggagctctttttccaaagaatacctctgggaaatttaaggaaaatggaaatacaggtgcttattattacattcctgaaataaaccgacagattgttgagttttttcatggaaaaaataagggagtactttttaattatgaccctaatacaaatgtgtttttggagatccaaggaacattgcttacgctctacacgttaattttaaaacaggggcgctattctttagagccttttaaaaagattacgtttaataataagattattaagcacacttttcaagaaggaaataaaataataatacaagaaggcaagagtattcatcagatcgaaattcgaaatgcgtcgatctttaaaaaacatttagtcggaaagggtcagagaatctatagttgtagagaattttatgaagactctaaagggggggtttatagtcatacatataaaggcctatttaagtttcgtaaagagggctctaagtggaggggtgaagagcttttgactgggcctaactatcattttagagatggcgttttaggggtcaacgatagcatttttttaaattatagtaagggggttttaatgactataattaatttgaatacgcctccgattgaaaaacaaatattgaacttacgaaaggtctattttgaaaaaaaaccattgtatgtaaatagtctcaagaaattaaatgatagtttgattttcatagcaaccaacagaggcttatatgagttaaatataaatacaactgaatttaaaaatagaaacgcattaaatgatgtctacaatatagaaaatatagcgattaatgaaatgtatgtttcaaaaggcggaaacgagttatggt

SEQ ID NO: 2296 - DNA, 22883 bp, synthetic construct
  source 1..22883: mol_type = other DNA
  misc_feature 1..22883: note = Synthetic
gtaggggctagccttactgtaatcacagaaagctctaaccttaaccttcgcaaagaaccttctacagaagctgaagttgtaggtaaagctgcaaagggagaagccgtaactttagtagagatgacttccaacgattggtggaaagtaaaaactaaagatggtgaagaaggttatgcttacacaagataccttaaagcttagataaaataatctagataatttgatgcccctttcttagatatttctgagaaagggtttttaatttaagtctccaaaaaagtttatatttgcattccaacctaaaaaatcattatagatgaaaggacaaaataaactttttatagcaatattactagggcttattataggaatcggattaggcggatttgttcatttgcaatatccagatagtgcagaaggcttttccaaaaacataaaattgctagggaccatttttatcagacttgttcagatgattattgctccgcttgtattcaccactttggtagtgggtattgctaaaatgagtgatataaaaatgataggtagagtaggtactaaagcaatgttgtggtttttaacggcttctttagtttctctaatgatagggcttgtatttgtaaattggctagaaccaggtaaagtaactcaactcccagtacaagatgcaagtgcggcggcagaaatcgtaaataacagtaaaggcttctcactagaagattttgtaaagcatattattcctaaaagtttatttgaagcttttgccactaatgaagtattgcaaatcgtagtattttcaataatgtttggggtggctctttctcagttaggagaagctcattctaaaccaattataaaggcttttgatatttgtgctcatgccattcttaaaatggtgggttacattatgtgggtagctccattgggagtactgggtgctattgctgcagttgttgctactaatggttttgagatatttatggtttatgcagtttacctaagagactttttctttgcattgggtatcctttggctagtcctatgtgccgttggttatttaatacttgggaacagattgtttgatttattaaaaagaatcaaagagccattacttattgcattctcaactaccagctctgaagctgtttttccgaaacttgtagaagaactagaaaagttcggggctaataatagaatagtctcctttatactacctttagggtattcgtttaatttggatgggagcatgatgtatatgacctttgcgtctatctttattgctcaaatttacggggtagatatgtctattggacaacaaatcacaatgcttttggttcttatgcttacttccaaagggattgcaggtgtgcctcgagctagtttagtaattattgtagctacctgttctatgtttggaattccaccagaaggcatcgctctcatattaccaatagaccatttttgtgatatgggaagaagtatgaccaatgtactaggcaacgcactagcaacttccgctgtttctaaatgggaaggacaactagacgcacctacagaaaacatataaaaagaaaacacttacaaaaataaatccttaaatttgtacttctaaaaagagaataatgataaaaaagatagagtattagcttttttaaaagaggttgaggtagatgacttggtgaataacgtccaagttatgggtaatgatgtctatattgatatgacggcacattctccagcaatgcatgagaaaaaaagctagaagcagcaatgaaacaagcttttgcatctgaatttggggaagaagtggttttaaagttgaaaatcgtttctcctgaaccttcggaagcacaacttaatcagattaaaggaaaagaaattccaggcataaaaaacatcatcgctattgcatctgggaaaggtggcgtgggaaaatcaacagtagccgccaaccttgcaatatctttagttaaaatgggctttaaagtaggtttactagatgctgacatctacggtccatctgtacctactatgtttgatactgaagggcaaaaacctatttctgttgaagaaaacggcagaaatctaatgaagccgattgaaaattatggagttaaaatgctatccatcggttatttttctggagctaatcaagcggtagtatggagaggtcctatggctgcaaaagctctcaaccaaatgctaagagacgctgcttggggcgaattagattttttattgatagacctacctccaggaactggtgatattcatctttctatcatacaagaagtacctataacgggagctgttattgtaagtacgccacaacatattgctcttgcagatgttaagaaagggattgcaatgttccaaatggaaagtatcaatattccagttttaggtttaatagagaatatggcttattttacaccagaagaattacctgataataagtattatatctttggtaaacaaggagcacaatatatggcggaagatttaggcatacctgtattgggcgaaattcctctaatccaaagtataagagaagcgggtgatgtgggaagaccagcagctttgcaagatggttctaaaatcgcagaaatctatacagaaaccactcagaaaatggtagagagcttagtggaaagaaataagaatctacctcctacagaagccgttaaaataactacaatggcagggtgttctccaaaaaaataattaccatattatatttaaagaattaaaataaagatggaaaataatagtctagaagtaagagtagaaaatgcactagaaagcattcgcccttttcttaacaaagatggtggagatatagagctcatcaaaatagaagacactgtagtctatgtgaaattactaggtaactgctctgggtgtcctgtaagtttctctacaatgaagctaggcgtagaaaatacagttaaagaaaaggttcctgaaattacacgagtggaaaatgtagaatagtttataaattataaaaaaaggcttatctgtaataaattagataagcctttttgtcttgtaatttaattcttattcttcacatccatataataaaacattggaatgatgagcaataaaattataggttgaataacaaacctacgaacataaaaagctaaaagcaatcctgagtcaaattccgtataaactagatagagatagataggaaaagtaatcaaaaaaactaataacattaaaacacaagctaacattgtctttgttttatctttaaaaagaaaataaacaatgattagcgaaaaaagtagattaagtatcagcctaaaaagatgtcctaaaacaagttttccccactgaaaaacggggaatactttggctccatccatcattttgaaatagattaaaaaaggatcataaaatagagtttcttctaaaaaacgaacccctattaaaccaataataccgagtataacaaatacaagattacctttgaacttcatctttcagtacaaaaaatttaatccaaataatccataataaaaccacacttccgtaaataatcgcagggaatatataatcatgggcagctttaccataagatggatattcaagtagcactacatttattccaacaatcctaagtatgtttatgatatacagaaatataactcctgcaaaaacaaaataaaagtattaaaacctctataaaatgcaaaaataaatgctataaaaagtattattacagatacagcattacaaccttccaccattctagacatatactccccacctacataataccacaaagtattatgttctggttgaggtatggcttgtgatggataccctatgttattctgtatcaaagtacattggttggctatatgtattgacaagccatctaaaccttcttgagtatttaaataaaactgataaactcccagcaagactaaataaactaataaaaatcttaataggatttttagtgtgggtttaaaaatcttcaaacataaagggcaaaggtaatgaaataacttattattaaagaaaaacctctaaaagttggaaaataaaaactttctagaggttttgtgtttctgttatggtaatttttactacgaattttctaacacatattggaacatcagaggtgcacaaatcgtagcatcactctctacaataaatttaggtgtgtctatatccaattttccccaagtgattttctcatttgggactgccccagagtatgaaccgtaagaagtggttgaatctgatatttggcagaaataagaccaaaatggaatatcatgcatttccatatcttgataaagcattggtaccacacagatagggaaatctcccgcaatacctcctccaatttggaagaaaccaactcccttaccaccacagtttttagtgtaccaatcagctagataagtcatatactctatccctgatttcatcgtagaaggttttaattctcctttgatacagtagctagcaaaaatgtttcccattgtagaatcttcccaacctggtacaacgataggtaaatttttctccgctgctgctaacatccatgagttctctttcggtatttcatagtactgctcaagtacaccagataataacattttatacatatactcgtgagggaaatatctttctcctttcgattctgcttctttccaaatttctacaatatgtttctgaagtcttctaaaagcctcctcttctggaatacaagtatccgttacacgattaagacctctctctaataaatcccactcttgctgaggtgttaaatctctataattaggtactctctcgtaatgagaatgagctaccagattcatcaaatcttcctctaaattagctcctgtacaagaaatgatttgaactttatcttgtcttatcatttctgctaaaatcttacccatctctgcagtggacattgctcccgctaaggtaatcatcattttaccaccatcttttaggtgtgctacataacccttagaagcatctactaatgcagcagcattaaagtgtaaatagtatttttctataaattcagtaatcggtttactcataattttttatttatcgcaaatataaggatttttagatttatacctatctaatctcatttacttaaaagtaaaaagtcgaagtttatacttcgactttttttatcttattactacaattattgattggtaaaaatcaaactgttaatatttgttacttactgccaccaaacaatccacctaatagaccgcctagtcctccactttgttgtttgttgtctcctccacctaagacacttcctaaaatatcattcagcggattaccgcctccttgttgtgattgtccaccacctagaacacttcctagtaaatccgtaagaggattacctccaccaccttgttgtgcctcctgagaaccttgtcctaaaatacctcctagcaaatccgaaagtcctcctcctgaagttacattattttctctcttttgttttcctatatatcccataataacaggagctaacatcgccattagaggtcctattttatccatagaaatccctgtattttgagaaagctgattctccacagttgattttttgtctccgaaaatatgacttagaatgctattaccttcctcttgtctattttctacctggcttacatcatctaagatgctaccgtcgtggtctctttctaaagcattattaagagcctcagcttctttttcatctttagatttatttctaaggtaagaaattaccagtggtgttgccactaccaataaagccataatttgacttttgctaattccaaactttgattctgctttttctgctacttgtgttcctgggtttcctgtgataaggtctaataaactcattttaatttaaatttttatattgttttgtaacctatcaaaaaccattcctaatttttaaatataggtacattactgcatgcttccccgaacatcaaagatttaacaattggctttaatttttcaactaactcaatataagcattttctggaatattttcatctgtacaaccttttactaaaactcttttatcttttagattagaaaaatcataatcatttagagcttgatgcataatgagtagctctaactcatctttatcaccataaattaccttcttagcaactccagataattgagatgcaatcaaaaaataagcccacaaagggacaatggcttccgcagagttatagatgtaaacataagcatctttatatgagtctaactctagccccttcactttttctctgaaatctttttctttgagaaccaactcttggaataaaaatggtttcaaatctatccctaaccttttccctttaggcactaaagaagataaatcaaaattaactaatccgctttctgcgactttatttttaatctctgacattgcttttataaatgagtttagcccatcaattatttaaaattgatattatactttacgtttttgtagtcgtctaggcttgcttttaaagaaccgactgcaagctccgcttttagttccacggggatatgattagcatcgtttgttacccacattgttactccttcttggtctttaaatactcttccactcattaccgaagggataattttaagacattctaccttaccaaatttggttcttttggtttctacatctgcaattctcaactggaaaggaaacatctcatcgtcaatccatacattcatttttatgcttgttcctacttttaatgcagaattatctctacttcttaagtagtagaaagcagaaagcatatcttgtatgcccttgacagattttagagttttagaaccattagatggcgttttcttgtcggttaaaataagggtttggttggaatgattaaaaaccgtttctaaatgctgtctataactaccctcttgcacatttcgcacatagaaactaggtaatgcagtgctgatattgatataactttcataaaggtcttctaccttgaaaaaagcccttacagctcctgtggtcttacctgtgcctttgacatagtaatgaggttcgcctttataggttgtctccttaatattaagtgtagcatagcctgcgtttaatattccataatgaattctataagtcaaagtttctccagacttaatattagtaatttgcgaccacaaacttgccgaaattacaagagtcattaaatataatatctttttcatacttttaaaatttacaaatactttgccaactcaccccataacattatggtttatgtaactaaagttacgatgtagtttcaacaaaattagtacttttgcaaagatatataatttaattccaaagttttttacatattatgattactacagatttactcattataggagcaggaccaacggggctttttaccgtttttgaagcaggattgttaaaactcaaatgccatatcatagatgctttaccacaacctggtggacagttagctgagctttatcctaagaaacctatttttgatataccaggttatccgtctgtaaatgcaggagagttagtagataacttaatggaacaaattaaacaatttcaaccagggtttactctagcagaaaccgccgtaagtctagaaaagatagatgatgaatggtttgaggtaatcaccaataaaggaacggtacaccgtgctaaagcagtagcaatagcgggaggactagggacttttgaaccgagaaaacctcttctagaaaacttagaaaaatatgaggaaaatggtgtggagtattttgtaaaagacccagaagtttttagagataaaaaattgtaattgcagggggcggagattctgctttggattggagtattttcttatctaatgtagctaaagaggttactttggtacacagaagaaatgagtttagaggagcgttagattctgtagaaaaagtacaagaactgaaaaaccaagggaagattaaccttgttacacctgcggaagtggtagagcttaaaggttctaacactttagaaagtattgtgatagagcgtgagggtgagaaaacagaaatagagacagattatttcattcctctttttggacttacaccaaagcttggtcctatcgctgattggggactagaaatagagaaaaactctataaaagtaaacaatgcattggattaccaaaccaatagagaaggaatttatgctattggagatatcaatacttaccctggtaaattaaaactgattttatgtggcttccatgaggcaactttaatgtgccaaagcgtttacaacaggcttaatcctggtaagaaatatgtgctaaaatacactaccgtgagcggtgttgatgggtttgatgggagtagaaaagaggcagagaaagccgttgttaaaaaaatagactaaaaattatggctgatattcaactaaaaattactgatagggagggcgtacagcacgacatagtagctcccacggacatgtctatgaaccttatggaggtgataagagcttacgaattggcagaggaaggtactgtaggcgtgtgtggcggaatggcaatgtgtgcgtcttgccaagtttatattcttaatgatgttccactgcctgaaaaaggtgatgaggaagaagcaatgctttcagaagcttttgatgttaaggataactcgcgtctaggttgccaaatccatataacggaagagatagatggcttggaggtggaaatagcaccttattcctaaaactaaaacaaacgagaggtagctaaagcctctcgttttaatttcctataaaaaaggttctttacattcgctgaactcttttataagccttttaaatacttcatctaccgagataatgtcgtctatgagggcagaaacttgtcctatttcaagttcaccttcgtctaaatcgccttcaaacatacctttcttggctcttgctctacctaaggattgtttcagagtttctatatctctcccattttcataaagtttttctaggtcgtagaagaatttgttttttagcaacctaacgggagcaagttctttcaaagtaagttgagtatctccttctttagcctccactattttctgtttaaatgcctcatgagagcttgcctctgttgtagctgcaaatctagaaccgatttgtacaccatccgctccaagtatcatggcagcttttatctgttgccctgtggcgatacctcctgcagcaataaggggtgtactgatatgttttctcacattaggaataaggcagaaagtggtagtctcgtctctaccgttatgtccaccagcttcaaatccttcagcaacaacagcatctacaccagcttcttcacattttattgcaaattttagagaagaaaccacgtgagctacttttataccttctttttgtaaagtttcggtgtaggttttcgggtttcctgctgaggtaaatacgattttaacttgctcctccataatgatgttaataatttcatctaagttaggataaagcataggaatattaacaccaaaaggcttattagtagcttttttgcatttttgaaggtgttctcttaagacatcagggtacatacttcctgcgcctattagtccgagacctccagcgttagaaacagcagaagctaattgccaaccactatgccataccatacctccttgtatgatagggtattgtatattgaaaagctctgaaattctatttttcatattttttagtttagttgataaagttacaaaaattgaggatatctattaaattgattttttataggtgggtatataacaaaaaacgaggtgctgttatcagcccccgtaataaatgttctcacaacggaatcttccttattgtgaattgctttcagcgacaaatttagatataaatattataatgacaaaatatttattaactttatacacgaaaataaagattattattgtttaaaaatcaatatattaaaaatgaaaaccatacttggattagacttaggaaccaactctatcggttgggcgttggttaaagaaacagagaattcaaatgagaaatctgaaattattaagttaggcgttcgtgtaaatcctctaacggtggatgaaaaaacaaattttgaagcagggagacccttatccaccaatgccgatagaacagctaaaagaagtgcaagaagaaatttacaacgttataaactcagaagaaaaaatttaatagacttgttgattaaacatcggttgattgataaagatacaccactaaccgaaattggtaaaaacaccactcatcaaacattagagttaagagccaaggcagcgagagaacgaatagaattagaagatttagcccgtgtatttttagcgattaacaaaaagagaggttacagaagcagtagaaaagtaaataatgaagaagaaggacaagtggttgatggtatggcagtagccaaaaagttgtatgacgaaaatttaacaccagggcagtacgcctatgaattgctatcaaaaggtaaaaaatatgtgcctgatttctaccgttcggatttgcaagcggaatttgacagcatttgggaatatcaaaagcagttttatgcagatatattagatgacgaattatataatgccttaaaaggacaaggacaacaaaatagccgaaaaagatttcttgccattaaaggggtttatactgccgaaaataaagggaaaagagatgaagtaaagctacaacattacaaatggcgttccgaggctattactcaaaaactaagtatagaagaagtagcgtatgtattagtagaaattaataatgacctcaataaatccagtgggtatttaggggcgatttcagatagaagcaaggaattgtattttaataaagaaaccgtaggtgaaaacctttggaaacaaatacagaaaaatccgcatacttcactaaagaaccaagttttctatcgtcaagattatttagatgaatttgagcaaatttgggaaacacaagctcaatttcacccacaattaacacttgccttaaaggagcaaattcgtgatgtggtcattttttatcaacgaaaattaaaatctcaaaaaggcttattgagtttctgccagtttgaaagttgggaaatagaacgaaaagatgaaaatggcaatgttattctcaataaaactacccaactaccgaaaaggcagacggtaggtaggcgtgtcgctcctaaatcatcacccttgtttcaagagtttaaaatatggcagaatatcaataatttagagatagcaaaaattagcgatgggaattcaaaaaacaaaaaagaaacagaggctttaagtgatgatgaacgaaaattattgtttgaagaattaaaccttagaggaaatctctcacaaaaagaggtgttacaaattttaggtttaaaagataaagaatacaaaacgaattttccagaaggtttggaaggcaaccgaaccaatgccgctttattcaatatctatcagcaaattgcagagaatgagggctatggtgattggactaaaaaatcagctcaagagattaaggaggaattaaaagcagtatttccacaaataggtattcaggctgatattttagactttaatgcagagttagacggaaaagaatttgaaaatcaagcctcttatcaattgtggcatttgttgtattctgccgaggaagatgataaaatcaacgaagaagaccaaatcatttacgggaactctgcagtcagtttaaaaaagaaactttgtgaaaaatttggctttactcccgaatatgccaaatggatagcgaatgtatccttacaagacgattacggaaatttatcaaccaaagcgatgcgtaaaatcattccgtatcttatagacggaaacgattattcagaagcctgtgcattagcagggtataatcattctaatagtttgactaaagaagaaaatgataatagagaacgattgaataaattagaacttttacctaaaaacagtttacgcaatcctgtggtggaaaaaatacttaaccaaatggttaatgtggttaatcaagtgattgaaacctatggcaaacccgatgaagtgcgtattgaattagccagagaactgaaaaaaagtgcagaggaacgagctgaaatgaccaaaggcatcaacgaagccacacgaagaaatgaagatattaaaaaactcattacgaaaaatttcggcattcccaatcctactaaaaacgatgtggttcgttatcgtttatgggaagagttagcacctttagcctataaagatgtttttactggtagacaaattaaaaaggaagatttattttcatcaaaaatagatatagaacacattattccgaaggcattattatttgatgattctttctctaataaaactttagcttttagggaaaccaatcttaaaaaagcagaccgaacggcttatggttttatagaaagtgattataatgcaacacttgacgattatatccaacgggtagaaacgctttataataacgccaaaggaactatttccaaaggtaaaagaaataaactcttgatggctcaaaaaaatctgcccgatggatttattgaaagagatttgcgtaatagccaatatattgctaaaaaagcaaaatcaatgatagagaaagtctttaatgatgtaaatgtgacctctggaagtattaccgatagactgcgtgaagattgggatttaatcaatgtgatgaaagaattgaattttcctaaatacaaagctttaggactgacagagatagaggagcgttatgatattgggcaagaaaaacaaaaaagtagaagtaattaccgattggacaaaacgaaacgaccatagacaccacgcaatggatgcactaacggtggcttttaccacaaaaagtcatgtgcagtatcttaataatctaaacacgatacattcattaaagggcgatgaggtagatttggaattgagtaagttatacggacttaaaaataccattacggaagtggtgaataaaaacgaaaatttattccaccaatgcctaactttagagaggaagccaaaaagcatatagaaaccattttggtttcgattaaaaataaaaataaggtttacaccaaaaacatcaataaaaccaagaaagagtcaggttatcataccaaagaacaactaacgccacgaggacaattgcataaagaaacggtttatggaaaatctaaaagaccgatgaataagcctactaaaatcaataaaaattttagtttagaacaggctcaacttattatcaatgtacaggaaaaagaattggtgcttcgtcatttagctcaatttgacaataatccagcagttgcttttgatacaaaaacactcaaaaaaatgccattacttaaaaatggtgaacctttgaaagaagtgttgtgttttgaggaaatttttacgattagaaaagacattactcctgatttaaagattgaaaaggtggtggatgaaaaaataaaagctattttagagcaacgcaaaaaagattttggaggtaatgcaaaagaagccttttcagatttggataaaaatccgatatggctcaacaaagaaaaaggaatttgcatcaagcgagtaaccattacaggagtaagtaacgccgaagctctacaccatcaaaaagaccatttaggcagggaaattttggacgataacggaaaccctatacctgcggattttgtaagtacggggaataatcatcatgtcgctatttatgaggatgaaaaaggtaaactgcaagaaaaagtagtgtcgctttatgaagcagtagcaagagcaaatcaaggcttacctgttgttgataaaggattaaatgaagatttaggatggaagtttttatttacaatgaaacagaatgaaatgtttgttttccctaatgacgattttgatgtaaatgatattgatttattagatgagaataacgctaaaataattagtcagcatttgtttagagttcagaaattagcgacaaaaaattatatgtttcgacatcatttagagaccaatgttcaagaggtaaaagaattaaatgatatagcatataaatctattagaagtacagaacctctgaaaaacatcaaaaaagttcgtattaaccatataggaaaaatagttcaagtgggagaatattaaaaataatggattatgctttaccgttctatctatattggcaatcctgcctacctcaagttaaaagaccagcaaatgaaaatcatttgccctgaaaccaaagtagaaaaagggagtattcctgttgaagatttgggactattgatgctcgaccattttcaaatcacgatttctcatcagctcattcaatggttgatgggaaataatgtggtggttatcagttgtgatgctcatcatttacctcacggcataatgttacctttgtatgggcactccgaatattctgaacgggtaaaatatcagcttgaagctagcgaacctctaaagaaaaatctttggaagcaagttgttgagagtaagataaataatcagtcggaagttctaaagcgtttagggaactactatgaacctatgctagagtacaaagaacaagtaaaaagtggtgataccaccaatatggaaggcattgcagcacagcattattggaaatatttaattgctccagattttctcagagaacgttttggtgactctcctaatcaattttttaattttggttatgccgtattgaggagtattgtggcaagagctatagtagaaacggggctattgcctgtattggggatttttcataagaataaatataatccttactgcttggcagacgatttaatggaaccttaccgtccgtttgtagattttttggtaatggaatggttagaaaatcaccctgaaagtgaagagttaaccaaagattttaaagcatttatgctaaatatagcgactttagatgtgagaattgaaaataagctaagacctttaatcgtagctgtaaaaacgagtgtagtttctgtttataaatgttatactggagaaaaaagacaaatatctgtgcctgagttttatgaagtttaatcgttttaatgcttatagagttatgtgggttatggtgttatatgatttaccaacagaaaccaaagcgatgagaaaagcagctcaactttttagaaaacgcttggaagatgatgggtttagtcttttccaattttccatttatatacggcattgtcctagtcgagaaaatgcggaagtacacatcaaaagagtaaaatcaatacttcccaagcatggcaaggtagctataatgagcattacagataaacagtttggagatattgaaattttctttgcgagagctaaagaggaaccaaaaccaacctatcagcaattagaacttttttaggaatagaaaaagactttacatcaaacaaaaatagagaagaaatagtaaaaaatctaatcctataaaaacgcaaaacccattgaaaaacaatgggtttattttttgaggttgcgaactatcacaaagatagtaaaaattgaaagcaattcacaacacccaagtgctccccgctgacgccacccaggttgcgaactatcacaaagatagtaaaaattgaaagcaattcacaacgctgttggtggcaacgagtctgggcctctggttgcgaactatcacaaagatagtaaaaattgaaagcaattcacaactggacactgccgccctgcagcgcctggtcagttgcgaactatcacaaagatagtaaaaattgaaagcaattcacaacggcggcgaaggcgtcctgctgctcgcggctgttgcgaactatcacaaagatagtaaaaattgaaagcaattcacaaccgcagcgccagtgacataccagatgccattgttgcgaactatcacaaagatagtaaaaattgaaagcaattcacaactttcggttgctatccgaaacgattcggatcgttgcgaactatcacaaagatagtaaaaattgaaagcaattcacaacgaggtgttgtcatatctcaatctcgtctatgttgcgaactatcacaaagatagtaaaaattgaaagcaattcacaactacttcgtttattagttttattgcaatgttgttgcgaactatcacaaagatagtaaaaattgaaagcaattcacaactagatacatctctttatcttcgtgtaaaatgttgcgaattatcacaaagatagtgaaaattgaaagcaattcacaacgtctttgaggtaaggttttgtcaaatcccagttgcgaattatcacaaagatagtgaaaattgaaagcaattcacaactaatggagattataatatccagatacaaacgttgcgaattatcacaaagatagtgaaaattgaaagcaattcacaactctatcgaagtgtttaaaaacacttgatttgttgcgaattatcacaaagatagtgaaaattgaaagcaattcacaacgatatagtatcagatgaaccgacaacggacgttgcgaattatcacaaagatagtgaaaattgaaagcaattcacaactgattgactctattttctcctgtgcagatagttgcgaattatcacaaagatagtgaaaattgaaagcaattcacaacttattaaaagttttccgatacttcctatgtgttgcgaactatcacaaagatagtgaaaattgaaagcaattcataatattactgtttgttattggttttattttttaagatataaaacacgcttccaattatgtaaaccgacacaattaaattagatactaaattaaaaatccctatactcccaaaatccattacaatgtagtaggaattataaatgatataaaaaatagaaaatacaataagtataaaatatagcatagagtttttcatttttataaattgcaagctgttacaaagataaaaaagagctacctccaagaggtagctctacgtttttaaattgagatattcagtctactttaaagtaatattgtctatttgtacagtagtagttacagtagtgttacctgcatattcaaaaaagatataaccttttcctgtagcaggaattgcaaattcgccactatctacccaatcggcagcatagccattagtattttcttttgaaagagtaaacttagaagtaatatctattaggtcggttttatttacaactccgccaggtgtatatttcgtagtgtaatatactttaagagcatctcctgtgtaataaccatcttttgtttggaaagagagcttagaagagcctgtaaactcagcaggaactataaagtaagtgctaacatcagcattggctctaaatgcacttatttggatataattattaccattaaaggttttttgctcccaaaaacgatttccaaatacagaatagttaatgtatttaggatctgcaattcttttgaaattagtaactgtagatacattatcaaaagtttcagctatggtcttgttatattctggagcattgccacctaaaacatttttggaacttacaaatctttcttgttcaaatttaacatcgtttaaatcacgaatgtagagttgccatgttacatttcttccagaaacatatttgtttacaactacggtgatgtctccacttttagtaggtagtgttttccctgcaaaacgagcaaaaccactatttctcaccacagcagtgttgtcttctctgtctactaaagttctatcaacagtttgtctattgactgcatctgcataagtaattttaccatcagcctctgaaaattgtactcctttaatagtaactagagtattgatgtattcatctttagtagcttctgcgatggagtttaccactctaggagtaatggttttaatatccatagtattacctccacaaactccagtgatgaagtctctcatattaccttcaggtatttgtcccgttggatttacatagcctagtttaactacttctctgtctaagccaacagaaagaccgttagctctaacccttacacgagagcccacaggatagtctgtatataagaaagttttgtttatggcaacttggataccagcggtaggattttcggtattgtcttgtatggtaagttgtttgtaaaagttaccaccttcatcagaagaaattacatatccttcaaaaataacaggagcgtctgtttctccgttagggatagtgtagttgcttacgaagtttacaggttctggagccaatgttttaaaatctttaatagtagttgtaggttccgagaattggttgctacattggattgcaggtgtgtcaaacttatcgtcgtgtacgcaagaggttaatgctccaaaactgagggctattaacgaagtttttaaatatgttgttgttttcattttttattgtgttaaatattaaaatttagaatcttacttgtagattgataaaatagtttctaccctgtgtaaagaaatatctaggtgcaaaattaggatactctctgtcgtagtctcttctaaagtctgcaaagttcacatttcttgtttgctcaaagcctccagtagcatatttagtattgtcaagcacattgttcacagttgcactaattaggacataatatttgcctaacatccaggatttacccgcattgatgttaaagaaataagcgacagggagtttaacttgagcggtaactcttttgtattcctcctccgaaattcctgcatacggtgttcctgttactgggttgtttacaaagaagtcagaacgaatgagaggagatggatctaggaaattattgccaagatagttccagttagcacctacccaccagtatttaggagaactatactttactcctagagagtaggcttcttgtggtgtgcctccttgtctaaagtttttgatgtaagaagttccgtagctggtgtaaagtttttcgttcgggaacattcccaccgcatccgaagcgaagtacacctcaggattattggtatagatgtatttaccataattggcaaccccattaacggtaatagtaggcgttacttttacctctacacctagttctgcccccatatttctacggttcacattagacattacttgtgttacaaatgcacttctcgcactagtggtgttgccttcgctatctacaccatctagttttattccatcagcaaagaaacgctgtacattagtatcattttgtgtgtttataaggaatgcggtagctctcactttaacaaatggagaagagaccatatagctaatatcattagccgaaactatggtgtttttaatattaggtgcgatggcactgtttactcttgcattgatgaacaaattattgaggtaaggagcttgggaatagtaggcactattataaactaagaaatttctaccatctaatttatagattacctgaccttttaagccgaaattccagtagtcttggttttcggattttcctaatgcatctttgtaaagatagtggttaaaatgcccttctctattattagtgatgtaagccgctagggcagatacgaaaatatcaaaattacctgtgttaaatttcaaagcagggtttatcttagtttcttgtcttcggaaagtgtagtcataacctattttatcgcctacttttttatgagtgttttcttctccttcgttgaataaacctgaaagcttaggctggttggtagaggcaaaagggtctccattaagagcgtattgtgctcctagtaagtcttttatctctctatattggtttgataaataatttctgtaagaagcgttgatgaatagctgtgtcttgtcagaaaaattatgaacaaaatgagttcctacattccaaactttgtcatcattaacatcatttactaggaaataaaccgcttgttctctatttctattagcgaggtaaagcctatcccaatttatttgggtgtagttttggtcattgctttcccatctgtttttagttatttccagttgagctatatcggagtcgctagggttggctaatccagcaaaatagcttggtaaatttctgtagtatagaggagaggggttctgagcgttataccaatctagtctagaagccttgtctttaccaaattggtaagaaacagtagcccaaagctgagatctgctgcttatcttccagtaatctgtaagttgtagtatcggttggaatccttttcttactctttcacttcttttctcgccatcttgccatccccagaaagcattgtaatgtacaccattataatctattacctcttgggtgttagggctagcagtacttctacggtaaggagagcctattaagtttaaggtaagtgtatgtttgtcacttacttttttctcaattcctaggtaagctccgtaagcatcatagaaagtaccttcttgtatcccttcttgtgcccatcttctagctcccattacagtaaacgcccaaccctttttattcattccagaagagtatcttaaggaagttctgttacgatagtttctgttggtaagagattgggtaaattggaaacctttgcggtattcacttgctttcatatttttgtagaccacagagccaacgcctccgaaagcgtactcagaaggggaatgatttactgcaatttcagggtatcttgtgatttcattaagtcctccccagttgccataatctacattgccattatcggcattttccatagagataccattcatcataacctcgcttcttctaccatctatacctcttggtctgaaccaatagaatcctaaatcaaaggcagcaatattactaaacacatctctagaagactgtaatagtcctaatgttgcttgtgaggaagactcgtccatactgctattgtcatctagcaatactactcctaattccgaatttttaaggttagaaaaaagagtaataatccccaagtcttttcttttttcattttcaaaaacatcaaactctaggactttggtttcgtagttaggttgagttactaccatttggtaatgtccaggttttaaatctacaaattggaaatatccaattttgtctgcctttacatcgtcattggcttctcttaggtcggctactgcattttcaatgggttttccatcggcatctttcacatacgcatagactgtggtttgtgcatagtaataagatgcaggcaataaacagaacatagagactaatgataatttcttaatcataacattcttttttcttaatttatcttttgaataaaacgattattcaatccacaaaattaagtcaattttttgacaagttttgatgaaattaagaatttttaacatctgatatttatcacgagtatgtgagattgctttagggcaaggggtttgtccctaataatgttttatgtattgttaattaaaattaattttaacttagtgttcacttcaaaatcactaattttgctcaaaattagaatctaggtttaaaaacttatttaaaaataaatgaaaatgaaaaagatattttctctcttaacattgggactttttttaaccagtttttctcaaacaggtaagctgagaagaatggcaacggtgggtttctataatgtggaaaacctttgggataccattcagtcggcagattatatagatggaacgctaccgcctaatcaccctcgttttcatagaagtgtgccaatagattcggtaaagtatttggagcgtgaggactataaaggtgagtggtcggactctaaacttataggtaaaaaagtggttcgttttcagggttcttcagaagagtttacacctaagagcgccaaaaattataatacgagtatttataatcaaaaattaatcaatgcagctagggttatttctgagttaggagcttcggttactaagacagcaccggtagtagtgggtcttcttgaagtggagaatcgccaagtagtggaagatttggtgaaacaacctgcattaaagaagtttgattatggagtaattcattacaactcttatgattatagaggcatagatgtggctcttatttaccagaagagaaggtttagccctacttacagcactaaaaaagaactcaaaatatacaatgaggagggtagaagagagtatactcgtgatttgttggtggtttcaggatatttagatggcgaaaaagttgcttttttgttaatcactggccgtctaggagaggtggtgaagcagtttctcttcctaagagaaatgctgctgctcagctgctaagagcacaaatggatagcgtaagagctttagatgctaatactaaactaatagcaatgggagactttaatgatgaccctattagtagtagttttaaaaatcatttaaaggcagtaggtagtgtcaaagagcttagcccagagtatccttatataaacttaatgtatccgttgtataaaaagggagtagcatctttagcatatcgtgatgctcctaacttgtttgaccaaattattgtttcagaaaatttagttaatccaaaagatacttcttattctgtttttagaacagaagtttatgcccctgcttaccttatcaataaagaaggtagctttaaagggtatccgttccgttcttggaatggggataaatttacaggagggtatagtgaccacttcccagtatttactatattgtccaaggaggttaattagaaagtttataacatactgcgaaggaggttgtcttagtttaaggcaacctcttttttgttttcacaaaaactattatctttaaggactaaaaaaataggaaacctatggatttgcaattcaacaaaaatgaagaccttaaccgattgaaactttcgga

SEQ ID NO: 2297 - DNA, 22535 bp, synthetic construct
  misc_feature 1..22535: note = Synthetic
  source 1..22535: mol_type = other DNA
gtttcagaatgaaatcacttctgtactttctttgcttctctggacattgggtcttgttgttattattcatttaatgtctaaaacactaaaaataaattaatcatgtaccttttattatttaagaacttcattcgttcccagtctgcttatttggggaatgctgttcctgctgttatcaggattagtcagtatttttgtgggaagacagtttatcaataagcaaaaagccactattgaacatacagctatatatcagagagaacatattcagcgatatacaggatatatagaaaaagaccttggtctttgttatactatctgaaatttggattagtcaaccaaacagatcatctgaatgccctgtccataggtcagagagatgtaaatccttctatacagaacctaacgataagaaatctggaaggacagaagtatgataccgatcttcaaaatccggtcagtctgcttctggggagtttggatctcggtttgtgatcatttttctctttccgctggtgattatttcctactgttacaatctgttgtcggaagaaaaagaagaaagtacatggattcttctttctgtacagtcgccatcacctttcagaattttgtataaaaagtttgtgatccgttttgcagtcattgcaggagttttactgtttctgattattctggctgttccactcctggatttaagtattaacagagcattagccggtttttttctggtttcactcttttatattatcgtatggtttgcgataagcttttgggttgtttcctggaataaaagctcaagagcaggcgctgcacgacttttgtttttctggattgtactcaccgttatccttccggctgttctcaatcattttattttaagccaatatccgctcccggaagcgttggatacagcggttgagcagagagaagcgtatcatgaaaaatgggataccgatcaaaagccgactttagaaaaattttacaaacactatccacagttcagatcctatggttttccgaaagaaagtttcaactggctttggtattatgccatgcagcagatgggagacgatgaatccaaaattcagtcggatcagctgaaagcaaagctttggaagcgggaagaaatgagcaggacgctttcttattttgttccaggacttcatgcacagcttcagttaaatgatcttacgggttccggattggcagaccagttgaggttcacaaaggcggcagaacattttcatgaaagtaaacgactccttttttatcctaaaatcttcgcaaacgaacctacgggaagtatcaactggaagcaatttcagctggaatactacaatgaaaagagtaaagtcaactggttggtgatgctggggcctctattgctgttcagtttgctgttttatttcatgggaagcatcaatttcaggaagcaggcagctttgtaagattgtccgtttgaagcatacttttttgtattttaggaggtatgaaaatcattatactgttaactgctttattcccggtttttattttcggacagcgatatatttacggggtagaatgtgttttgagatcactaaaaaccacctgtatcaataatgaaagattgatttctgagattaaatttcccagttctgatgatgcgttggtcatacaaaaaccagtggccctatacggaagatttgaagacctggaaagaatccggttgccccggttttttgaagccaataccattgattttaaatgtggggagaaggtgcagtttgaaacaagctatgaaggaaatttttattacgcacagaaaaaagaagataacagaaagctgtacttcattaatgatggactgaatacgatatacagaggtacggaaaagatagaaagtttctctcccgatacgttcagccccgatactaagaataagtatctttccttctacagaagcgacaaagaaaatgatccggactatgaagttcgatattatttcagggataaaaacggtgatctggtttattcttttcaccagagaggaaatgaatttgatgaatatacttacgaatacacagaacacaattacgatcgggtactttcttcagtttataaaaacgatattctgtttgaagaatatgagtattttgacaatgatgaaagttataaacaggtgataagccaatacagtgttaatgaatcttaccgtttggataaaaagcgacatccggttttaaaatcttctgcattttctgacacccaaaaggcctgccgttgccatgagggatctatgaccgtcatagaattttggaataagaataaatgtacaagacaaatggatgatataatccttgaataatccttgtacagagcgacaggacctaataaaagatgtgaatttttaacagaaacataaaaaatgacggtacggtggaggaaaaaaagaagaaaatagcattttggtctaaaattttttagccggagctaggctggaattaccataaaacctatatttgcaccctaaattttaaaaataatgaaagaactaattgaaaaaatcaacgctgaattcgaagcgtttgcaagtgaggctaaccaacaagcagaaaaaggaaacaaagctgcaggtacaagagctcgtaaatcagctttagaacttagcaaattgttcaaagaattcagaaaagtttcagttgacgaagctaaaaaataattcgttccccagccggctcattgagccggcttttttatattctttttttcagtaatcaccctttgaaattttcccctttccagaaatctgtagtttaaggtttgctgtagtttttttcatggagccaccacattccattatcaaatcaccagattttcccttttaacgctccgttctcttcttcaatcccacaaattcttttatctttaagcattcaatatatgttatgaagataaatagattttttgctgttccagcagttgtgctggctgcccagttctcatgggcgcaggtgaaggtagatccgaaagaaaaactggaccctattgtaaaaagctttgtagatgaaatcaacaacagttctcagcttgaaaatatggcgtatgagcttctggatggtatcggaccccgtcttgtgggaactccggaaatgttagctgcgaatgaatggtctgctgctaaactccgttcatggggaatagaatccaaccttcagcagttcggaacatggaaaggatggcagcgtggcattacgcatgtagatatgacgtatccgcgtgtaaaatcattggctgccacacagcttgcctggagcccggcaacgaaaaaagcagtagaagctgaggtggtagtgcttccaaaagtttcttctaaagcagaatttgatgcatggcttccttctgcgaaaggaaaaatagtgcttatcgcgcaataccagaaaatcggacgttctgatgagcagatcaaagaatttgccactccggaactgtacgaaaaactgaaagcagaaaaagaacaggcttccaaagacttccgcgattatgtgaaaaatatcggctatgataataatacgcttcctgaagcattggaaaaagcaggagcagccggaatcgctatttcaaactggacgggaatcatgggcgcaaacagaatttttggagccaaaacctcaaaaatcccaatgatcgacattgatgttgaggattatggaatgctttacagaatggcagaaaatggagctaagcctaaaattaaagttgaagtacagtccaggattcttcccgatgcaaaaaactttaataccatcggaatcattaaaggaaaggaaaagcctgaagaatatgtgattctttccgcccaccttgattcatgggacggagcacagggagccacagacaacggaacgggtacgcttacgatgcttgaggcaatgagaatcctgaagaaatattacccaaacaacaagagaaccatcgttgtaggactttggggaagtgaagagcagggactgaatggctcaagaggctttgtagcagacaatcctcagattatgaaaggaacacaggccgtgttcaatcaggataatggaacaggccgcgtgatcaatatcagcgggcagggatttgtagactcctacagctatatcggaaaatggctgaacggagttcctaaaacagttagagatcagattaaaacagatttccctggaatgccgggtggtggtggctctgaccatgcttcatttgtggcagcaggggtaccaggattttctctgagctccctgaactggggatatttcggttatacatggcacaccacaaaagacacctacgataagatcgtttttgatgaggtaaaaaataatgtggttttaaccgctgcattggcctatatggcatcagaagatcctgaatttacaagcagagaaagaagagtgatgcctcaggacgataaaggcgcaacggtaaagtggccggaagttaaggagccgaagagagattctaaggagtataaataaatgggatagacgtcagatgttagatatcagacatcagacgtgagatttcagactaagattaagattaagattaagattaagattaagattaattttggactgggactgagggaactgatattacggcgcactcgtaatactgtttttgtcaccatcctttacaatataaaaggctgtacagattattattgtacagcctttgttttttttgggtaaagaagatttttgatctcctgccttttattttctttaacgatgtaggttttgcagattttgttgttcagattcatactgaaatgcatctcagtaaattctttttcccaattatcatttgccagcgggatgtaatctgaaaagataggccagaaattcgctaggcacaaaaagtttctttttaaagataaccagagacccggatcatttccaaaatcatcaatcacttttattttaaatatactctttcctagagtcgttccccaataccattcgcatagagtccccgaaataatagcacagggaatggaatacagaaaactgatgatcgctatttttccaaacagaaagaagaagataaggaagaagggtaggatgtcaatgagcttagcaaaagcctttttctttcattgcctttataagtagtctcatagggaaaatcatattcaaaagaattataaatcctgtatccgaattcatcaaactgacgggttggcctgcggatcattcttctgtccttaagttctgatattctcattggttctcttatgattctgtttatttcatggcctgaatctttttcttaagtttaaaaatggaggtttaaacaaataattccagatcagaaaactttgaaacagaaggtttgtaatcacctgtaatcagctttccgaagccgtattcgcagaaaataaaaggtaggctgtttgcttttgcagaatcgtaatcggtttgtgtatcaccaatataaactgagttttcaatgcttaaatgatttctttccataatcagatgaatattctctgacttcggtttttttagtccggccgtgggattcaatgtctgtaaacagatcgttgaactgatagtattctaaaaatgcttcgatgtagccgtcctgacaattgctcacaataaaaagttggtggtcttttgctaaattctttaaggcttctgccactccggtatagagaataccaccttcaagatgcaggattttattttcatgttgaatgatttcggaaagaacttcgtgaacctgctgattggaaatgccgggaacgatagcttttataatagtatcggccagtaatcccatgtattggtccatatcttcaggcttcaaatccttgtcgatcaattggtatttatttaaaacctgattccagattttaatgatggtagctctggaatcccaaagcgttccgtctaaatcgaaaattaaatttttatagctcaaaatgtattgttacttggttggtattattgaagatctttataaagcagaacttataaaatcatacttagctgcactctttttcttgcctcatctacttccgttacttttacgcgcacatgctgatgaagtttgaccacttcattcacatcagagacaaatccttctttcagttgagaaatgtgaaccagcccgctttccttgattcccatatctacaaaacatccgaatgctgtaatgttattgacaattccgggaaggatcatgcctggtttcaaatcccggatgctttttacattaggatcaaattcaaatactttggccgcttttctggggtctaagcctggtttttcaagctcttttaaaatatccttgatccctaaaattccgatctcttctgtaatataattttcaggctttactaaagctgttttttccttactgccaatcagttcattggttttaatgcccaaatctttagccattttttctacaatgtcataagcttccggatgcacggcagaattgtccagaggatttttagcattggtaattcttacaaacgctgcggcctgttgataagccttttcacccagtcttggcactttcttaagctgctttctatcttcaaaagcaccattttcagtacggtagttaacgatgttttccgccattttttctccgattccagaaacatagctcaacaatgatttactggctgtatttaaattgattcctacggagttcacacacttcatcaccgttgagtcaagttcgtttttcaactgggtttgatctacatcatgctgatactgtcccacaccaatagatttggcatcaatttttaccaactctgccagcggatctgccagtcttcttccgatagaaacggcaccccgtaccgtcacatcatacgatggaaactcgtctcttgcgattttacttgcagaatagaccgatgctccagcttccgaaactacaaaaacttgcaatggtttatcaaaagctattttttttatgaaaaattccgtttcacggcttgctgttccgtttcctatggagatggcctcaatattataagcattcaccatggagcggatctttttcattgccattccactttcattctgaggagcgtgagggtagagggtttcattgtggagcagatcgcctttttcgtcaatacagaccactttacatccgcttttgtatcctggatcgatggctaaaattcttttttctcctaaaggcggagcaagaagcaactgacttaggttttcagaaaatatttcaatcgcttttttatccgctttttctttggcttcctgtaaagcctcatttgaaatggcgggttctaaaagtcttttgtagctgtctttgatcgccagcgcgatctgttccgaactttcattgttggatttaatgatggctttctctataaaatcaacggcttcatctttatcaataccaatatttactttcacaaaaccttccgattcagctctcagcatggccaaaagcctgtgagagggagttctgctcagactttcttcccattcaaaatactgcgagaatttttgtgcattttcttcatcttttttagccttgaccgctttagaagtgatcaatgctttacgctgaaacagtcggcgaagatttttcctcacgtacatattttcattgatccattccgccatgatgtctcttgcgccctgtagtgcctcttcctcagatgaaacatcattgttcacatatttggaggccagaaactgcagatcattgcttttctgactcataatgatcctggctaaaggttccagtcctttttctttagcggtatccgctttcgtttttctgcgttttttgaagggcaggtataaatcttcaagctccaggatatcaaaactttcttcaatcctttgtttcaattccggagttaaagcattctgctcttcaattgatttcaggatgctttcctttcgctttacaatttcttcaaactgtttgctgattttggagatctgttcgatctgaacttcatccagatttccggtcttatcttttctgtaacgggaaataaaaggaatagtgcagtcttctgctaataattggagggtattgttgatgctcttttcggatatgttgagctgttgttgtataaaggttacggtcgtcattattttgttttcggaaggctaaaataaggctttataatgaaaaaaggcgagttgccccgccttgaatgttttcacaacggaataatccttattgtgaattgcttttcaaaattattgatacaaatataagagaaaaattatatagttgatttacggaaaacctcatttttgataatttttttcttgctatttttatttactttaaaaactgaaacttatgattagaaatattcttggactggacttgggagtttcatcaattggctgggcttacgttcaggaggattctgaaaattctgaaaacaataaaattatcaaactgggagttcgtgtaaatccattaactgttgatgaacaattaaattttgaaaagggaaaaccgattacaaccaatgccggaagaactttagccagaagtgcgagaagaaatctgcagaggtttaagttaagaagatccaaccttattgatgttttaaaaaaaaataatattcttaaacaatctgacttacttgccgaagttggtaaaaattcaacatttcaaactcaggaactaagagcaaaggcggcaaaagaaaaaatagaactttcagaattggccagagttctgcttcttattaataaaaaaagaggatataaaagcagtcgtaaagctaaaaatgatgaggatggacagattgtagacggaatggctgttgccaaaaaattgtatgaagagaatttgacacccggagaatattcatatcaacttatacaacagggcaaaaaacaactgcctgatttttaccgttcagatttgcagacggaatttgatcaaatctgggattttcagaaacaattcaatcctgaaattttcacaaatgagctttatgaaagacttagaggtaaaaatagaaatgcaacctggaaagaattagagattccattttctcttgtaggcattaagcagaccgggacgatgcaggagaaaaaagcagaaaaatacttttggagaagtgaagcggtaaaaaaacaattggattttgaaagtctggccattgtttttcaggaaattaacagtaacctgaataattccagtggttatctcggcgcgatcagtgacaggagcaaagaattgtatttcaataatcagaccgttggagagtatttatttgggcagcttaaagagaatccgcatacgaagcttaaaaatcaggttttctacagacaggattatttggatgaatttgaaaaaatatgggaaacgcaatcaaaatatcataatgaattaaccaaagagttaaaggaggaaattcgtgatattgttattttttatcaaagaaaacttaaatctcaaaaaggattaatcagtatttgtgaatttgaaaacagagaaatcgacataacagaaagcggaaaaacaaaaaagaaaacggttggtttaaaagtagcaccaaagtcttctccattattccaggagttcaaaatatggcaggttcttaataatttacaatttcaaaatatagaatcgaaagaaatttttcctattgatttggattttaaacaatccattttcaatgaagttaatattaagggaagactttctgcaaaagaagttttagatattgttggctattccggtaaagaatggaaaactaattttaaagatattgaaggtaataataccaatgagaatttatataatgctttcctgagaattataggaaatgaggggattgaatttccaaaagaatttaaattaactattgacgatgaaattaaggtggctaaggtaaattcttctgctgaaactataaaactattcgtcaaagacaaactatcagaattaggaatcaatacttctattctggattttaattctgaattggacggaagtgatttttgaaaatcaggcttcctatcagctttggcacttgttgtactcttatgaaggtgatgattctccttctggaaacgaaaaactgtatgaattgttggaaaagaaattcggtttcaaaaaagaacattccaaaatattagcagaaattggttttcctcaggattatggaagtctgagttctaaggcgatgcgaaaaatttatccttacatcaaagagcataaatatagtactgcttgtaattatgcaggttataatcattctaaaaattcattgaccaaagaacaattagaaaacagagttttaaaagatcaattagagattcttccaaaaaattctttacgaaatcctgtggttgaaaagattttaaaccaaatgatcaatctggtaaatgaagtatccaaagaatattggagacccgatgaaataagaatagaattagcaagagaacttaaaaataatgctgaagagcgcgctaatatgacttccgaaatcaataaggcaacggtacagcatcagaaatatacggaaattttacaacgagagtttggtattaaagcaccatcaagaaatgatataatccgttacaagctatatttggagctggcgaataatggctttaaagatttatacaccgatgtgaaaattgaaagagaaaatttattcacggagaaatatgatatagaccatatcattccacaatcccgattctttgatgacagtttttccaataaagttttagttccaagaagtgctaatcttaaaaaaggaaatttcacggctttcgattatcttgaaattgaaggaaaggaaaaattagaaaaattcctcaatattatcaaagaattgtatgataaaggagttattactaaagctaaatatgaaaaacttcaaaaaaaaggcatcgaaataggcgatggttttattgaaagagatttgcgcaatactcaatatatcgctaaaaaagctaaagaaatactttttggaattaccaattctgtagtttccacttcgggaagaataacggataagcttagggaagactggaatcttgtcaacacaatgaaggagcttaatctggagaaatacaagaaattaggtttgacagaaacgatcattaattcaaaaggagaagagaaacaaagaattatagactggaccaaaagaaacgaccatcgccatcatgcaatggatgctctgacagttgcttttactacgcataatcatattcaatacttaaattatctgaatgcaagaaaagatgaaaagcataaggaacatcaaaatatttttgctattgagaacactattacaaaagttatagaaaagaaaaacggttcaaaagaaagaaaatttattgagccgattaaaaatttaagaattgatgctaaaaggcatttggatgaagtactgatttctcataaagccaaaaataaagtcgttaccaagaacattaataaaattaagaaaaagggaagtgtagttgcaaaaacagaactgacaccgagaggccagcttcataaagaaactatttatggaagttcaaaattccttaaaacaaaagaggaaaaaatatccggaaagtttgatctggaaactattcataaagttcagaatgaaaaattccgaaatgctttattaggaagattgcaggaatttggtggagatcctaagaaagcattcactggaaaaaatgtgatttctaaaaatccaatatttcttaatgatgatcaaacagaacaattacctgaaacagtcagtttagcttggtatgaaataggttatacaatcagaaaagtggtgaatcctgataattttaaagattacaaaaatattgaaaaggttactgataaacgaattcgtgatattttaacagagagattaaaagcgtttaacggaaattctaaagaagctttttcagatttggaaaagaatccgatttggcttaataagtctaaaggaattgttgtgaaaacggttacaattaccggaattaataatgctgaggctatacattatagaaaagatcatttaggaaaagatatcttagatgaaaatggaaaaaaggtagctgttgattttgtaagtacaggaaataatcatcatgtcgctatttatgaagatgcagatggaaacttacaggaaagagtggtgagcttctatgaagccattgagagagtaaatcaaggccttacaattattgataaagattataatcaagatttaggatggaagtttctttttaccatgaagcaaaatgaaatgtttttatttccttcggaagatttcaatccaaaagaaattgatttgtttgatgataagaatttgagtttgatttctaaaaatttgttcagggtccaaaaaatagctactaaagattatttctttagacatcatttagaaactactgtggaagataattctaacttaaaaggagtcgcttggagaagagaagggttgaatggattaaaaggaattttaaaaatccgactgaatcatttgggtaaaatagttcaggtaggagagtattaaaaattgaaaaatatgataacccgttccatttacatcggtaatcctgcatatctcaaactcaaagacgagcagatgaaaatcctttgtcctgaaaccaagacagaaaaggggagtgttcctgtggaagatttgggcttgctgatgttggatcattttcaaataacaatttcacacagtttaattcagaaaatgatgggaagtaatgtggtggtaatcagttgtgatcatcatcatttgcctcatggaatgatgttgccactgtatggtcatacagaacattctgatagggtaaaagatcagttggaagccactgaacctttgaaaaaacaactctggaaacaaaccatagaatgtaagattgaaaatcagaaaaatgttttagtgaaattaggaaactatcacgaaccaatgattggatatcagagaaatgtaaagtccggtgatattaccaatatggaaggaattgcagcgcagcattactggaaatatcttattagtctggattttttaagggaacgtttcggagattcacccaatcagtttttcaattttggatattccgttttgagaagtattgtagcaagagcaatagttgaaacaggtttactacccgttctcggaatttttcataaaaataaatataatccttattgtctcgctgatgatttgatggaaccttatcgtccattcgttgatctattagtcatgcaatggctgcaaacaaatcctgaaacagaagaattaaataaagaatttaaagcgcatattcttcaaatagcaacgaaagatgtgaagattgatgacaaaataagaccattaatggtcgctgtaaaaacaacggtcacttcgctttataaatgctataccggagaaaaacgtcttatttcttatcctgaactgatatgaacgccgaaaggtttaatgcttacagaattatgtgggttttagtattatatgatttaccgaccgagactaaagctaacatgaaggatgcgaatcgctttcggaaggctttaatcgatgatggatttacattgtttcagttttcgatgtatgtccgccattgtccaagtcgtgaaaatgctgaggttcatattaaaagagtaaaatttatgttgccaaaagcaggaaaagtggccattatgagtattacggataagcaatttggggatattgaaattttctttgccagaaataaagaagagccacctccaaccttccaacagcttgaattattctaaattttaaatcctaaaaacaaaaacaatctactgaaaatcagtagattgttttttgaggctgtgactaatcacgaagataataatttttgaaagcaattcacaaccggaaagcttgaaaagatccatattgtgtagctgtgactaatcacgaagataataatttttgaaagcaattcacaactaaaaagattgagtttgatgctgaacaagtgctgtgactaatcacgaagataataatttttgaaagcaattcacaaccagatagatcatctcctgagtttaagtaaggctgtgactaatcacgaagataataatttttgaaagcaattcacaacaggatactgggagtggagggctaaagtagggctgtgactaatcacgaagataataatttttgaaagcaattcacaactgtcctaatagtgatccgcacgtagggcacgctgtgactaatcacgaagataataatttttgaaagcaattcacaacttaatggtaaacatgtacccaatacctggagctgtgactaatcacgaagataataatttttgaaagcaattcacaactgtacggctttctttgcatcggataatcttgctgtgactaatcacgaagataataatttttgaaagcaattcacaactactaccactacagccatttactactatgagctgtgactaatcacgaagataataatttttgaaagcaattcacaactaccactactaaatctttttttatttgggagctgtgactaatcacgaagataataatttttgaaagcaattcacaactcttttcagggcattaagctcatcatttaggctgtgactaatcacgaagataataatttttgaaagcaattcacaacagcatgtaagatggggagacggagaggatggctgtgactaatcacgaagataataatttttgaaggcaattcacaacgaaattgttcaattttacaatttcttagaagctgtgactaatcacgaagataataatttttgaaagcaattcacaactgtggtcacacctgagaaaacaccactattgctgtgactaatcacgaagataataatttttgaaagcaattcacaacggcctgatgggatctttcatcaaaggttccgctgtgactaatcacgaagataataatttttgaaagcaatttaaaataaatctccctcttactctgcgcctaaatttatatggttatccatagagttatgatagatccaaacagctaaaatagccaattttacgtggttttaagtaccttagaatctcctttttcgcaggatttcatatttttttgatgggcacgaaatattaaaaattctatttcttgatgtatggtaaggtgataagtgggtaggtttttatatttttgaatcctgaaatttagtattttaattaaattttttaaaacaataaataatatgaaaaaacttagtgtaattgcattagtaggagtaggattgcttgcagcatcttgtaataaagacaaatcagcaggaactgcatctaccgctacggagcagacagtagctgagagtaagggtgaagtattgccagttgatgttgctgcttctgtagtaaactggaaagcttttcacaaaggtggaatggctcctcgttggggaacacttaacgtaaaatcaggagatctaagcgttgaaggcggtcagctttcagcaggaaactttgtgatcgatatgaattctatcaaagtagatccggcttcagtaactgaaaaagataaaaaaccggcagatttggaagctcatttgaaaactcctgacttctttgataccgcaaagaatcctacttcggatttcaaaattactagtgttacagatttgaaagacgcaccaaaggatgctgttgcaggagctaataaaacagtaagtggaaacctaacattgtcaggaaaaacaatcaatgtcactttccctgctaaagtggatgtaacagatacttcagctgcagttcaggctaaatttacagtaaacagagcagattggggaatcaagtttggtacctctgaaacagatcctgcagaatggatgatcagcaaggatatagagatcgctgttgacgttaaagctaaaaaataattgttagatacaaatacagagagctgttttcttatgaaagcagctttttttgtggatattgggtactagaaactgtgagaataataaatatttttatatttataaaaacataaatacgaaagaggaaattataggttggatgtatatcttattatacgcagatggaagctattatacaggaagtaccaatgatcttgaacgtagaattattcagcaccattcaggtgagggggctaatcatacgaaaaaaaggtttccggaagacttatctattttgaagaatatgaacgcattgatttagctttctacagagataaacagggtcgtaagcacaaagaagatcagaggggatattcaactattgcctcaactggccgtggcatatagagatttgttttctgaaggataaggtagcttcgagtacctcagccaccttttgaaatctagttggagattgattttatgtcaataataagttggacaatagaggttgatctcggtcactttttgaaaataacgttagaaataattgtcctcgtagtaacggaaaaaaagacaattttctgatcaaaaaagaccgatataaggtggctgaggcactcgaagtcaccatacaattcactacttttacacccatgatctaccttctgctcattataaatctgctcaccatcattttttttgggtgggacaaaaaacttgctattcaatataaaagaagaatcccggaaaatacacttttaggattgacatgcgtgggaggaaccggaggtgcgattgtagggatgcttattttcaggcataaaatatctaaaaaatcttttttgctgaaattttcgggagtggttttgattcagggatttcttatcctttgctatttgaagttttttagatttttggtataaaaaaaaactccctttcgagagttttgtagtatttataaagcatatactttgctttcaagaaaagcctttgcttcaatagaagtgtcaaattttaatacctgataggctgataactgtaattcaaccggagcgaaggcagaaacatccagaaagaattctaagtttggattattgggatctgcaaccgcataacagacgactgtttgccatttatttttgacggtaggtttatactgcatgacctgatattgattcctgttccataagaataatgtaggatctcctgaatttacttttacatcaaaggtgatcacgtaccaaccaccagtattattatttgtactcacgacactgctttgcagtcccatgtattttatctcataatttggatctccacccgaaggaagtgtagggaaagggatattaaacttattggaagattcaaagattaatgaatcatttacaaggcttccctgtataggagggaaagatcccgttagtgtttcttcagttttcattgtcacagattttatcttgtttttgatgtctgtaactttgttaaaccttgcggtactgatagcaggtcttatgagagaagcgctggtgtcactgttgatatagagttgtctgttgtaatcataactatctgccatgatgacattgtttcctgtaggaaggccaaatatggtgattggacgatagagtatcagatagctgttattaccaactgcatttgactgcgcagcccctacacctgaactggattctgtataacagttggtggctttcacaattatattatcaccgttgatataataatcagaaacccatgaattgtaaacattgcaggtaaagctttttccttcaaatatatgagcatggggagtgactactttttcaccctttgttgtaccggaccatgtatcaatagttacaggattggaataggttgaacttccggatgcttcattccagcacgaatcaataacgattggtatgatcgagttactatcattataaatatacgtattgatatagttaaattcaaatatggcattattgaaacttaccgcgccaaatccctgtgttgaattatgaatataaatacctacctcattgttagaaatttcgccgctgtagaaatatttatttcctgcatgcatagtttgggaatcattaccaaatttattgtcaagaaaatacattccgtatttattgtcatgtattcctactgaataaaaatccatcccaatatttccaaacaggcactggagccctttgttcagttttttaaaatctacatttctgaaagtaatattactattattctcgtcgttagcctcatattctgattctacagcttttgccatgctgaccccacatccctttttattttctcctaaaaatgttagcccttcaattgtggttgcatactgccagaatggtcccaggtttttgctgaggatcataattggtttattctcatcgtaaggtttcaaaaaagtagcaccgctgccggcaccaaaaattttagccttatgttgtacattaatattaatgtggtaaatgcccgcaggaaaatagatgtttttttttacttcacacgcttttagtaccgccatactgtcatctacactcgctattccttctcctgttgcaccgaaccactgaacatttacagtatcatcaaccaatactctacgataaaatttgttgtttacttgcttgtaaataatatcatcacaatcactcgctgtgatcggaactggtggagtgagcggattgatatcgtcatacttatatacctcttcttgaaaaacagtccactctccggtatactgatcatttaattcaattgttgccatttttttgttctttgatgttaataatttgtttcctgcaggaaaactactgaagcaaagataaatgcgtgtaacgacagaacttgacgtatgttattttatccggctttttttaaggatttacttaaatttctcattatgaatttgttaattaatgtatattcttgcttattattcattagaaatcactatttttgcacccgtaaaaatcattcatgcaaaacattagaaatattgcgattatcgcacacgttgaccacgggaagacgactttggttgacaagattattcatgctacaaacattttcagagaaaatcaggaaagtggagaattaataatggataataacgatcttgaaagagaaagaggtattaccattctatctaaaaatatttctgttacttataaagacgttaaaattaacgtaatcgatactcctggtcacgccgattttggtggggaagtagagagagttttaaaaatggcggacggagtaatcttgttggtggatgcctttgaagggccgatgcctcaaacaagatttgtacttcagaaagctttggaattaggacttagaccattggtagtaatcaacaaagtagataaaccaaactgtcgtcctgaagaagttcatgataaagtatttgatttattctttgcccttgaagcaactgaagagcagttggatttcccaacattctacggttcttctaaacaaggttggttcaatacttcattagaacagacagaaaatattttcccattactagatggtattttacagtatgttcctgaacctaaagtagaagaaggaagcttacagatgcagattgtttcgcttgacttttcttctttcttgggaagaattgcgatcggaaaagtgatcagaggagaaatcaaagaatctcagtggatcggtttagctcaggcagacggtaaaattttgaaaggaaaagtaaaagaactgtacgtttttgaaggattaggaaagaaaaaagtttcagaagtaaaagcaggggatatctgtgctgttgtaggttttgacgcgttccagatcggtgattcattcgtagatcttgaaactcctgaaccattgccaagaacggcaattgatgagcctacgctgaacatgacgttctctatcaacaattcacctttctttggtaaggatggtaaatatgtaacttcaaaccacctgaaagaaagattaactaaagaattagagaaaaaccttgcattaagagttgagcagactgatgatgccaacactttccttgtattcggtagaggtattcttcacttgtcagttttgattgaaaccatgagaagagaaggatatgaaatgacaattggtcagccacaggttatcctgagagaaatcaatggagaaaaatgtgagccttatgaatctttggtagtagacgtaccggatgagtatgcttctagagtaatcgacttagcgactcagagaaaaggtgatcttcatgttatggaaactaaaggagagatgcagcacatggaattcgaaattccttcaagaggtttgatcggattgcgttctcaaatgttgactgccactgctggtgaagctattatggcgcaccgtttcacagaatataagcctttcaaaggggctattcctggaagaagtaatggagtattggtgagtaagactcaaggtccggctacagaatattctatcgctaaactacaggatagaggtaagttctatgtagatccgggtgaggaaatctacggaggtatgatcatcggtgagcaaaacaagcctggtgacctggtaatcaatatcgttgaagcaaaacaattgaacaacatgcgtgcttcaggtaaagataaagatactggtgttgctccaaaaatcttattctctcttgaagaatgtatggaatatatccagagtgatgaagcgatcgaggtaactccaaactttatccgtatgagaaagaaaatcctttctgaagaagaaagaaaaagagtagaaagatcagcgaaagcttaagaaattcttatatcatagaaaagcctcgaatttttcggggctttttttatgagactatctcgtaaaatgtttattttggcacaataatctcttacaaaaaataaatctaaagtagtttgcaaacgatgagaatgaatattataaaacttactgtttttgccggaatttttgcatcatgcgccagttgttccgtacaaagcaatactgtaaaatcaacacccacaaaaaatacagccaagccaaacggcaatacatcaaaaaccaaagagaccgttactgcacccaagcctgtaactgcaatacctcccgctgaggaaaacttcagaaccacactcccagaagttaaaagagaattccgcgcagcctggattgccagtgtagccaatatcaactggccatcaagaaataatttaacggttgaccagcagaaagcagaagccatcagcatgctcgatatgctgaaagacaataacttcaatgccgcgatcttccagatcagaccatctgcagatgcgctttatacaagcaatatagagccatggtcgtactttctgaccggacaaaccggaacagctccttatccgaattatgatccccttcagttttggattgaggaagctcataagagaggtttagagcttcatgtctggttaaatccttaccgtgctcatcactcgaacggtggagttgtaaacagcctgtctatggccagcaagctctccgatattgtgattaaattaaagaacggaatgtattggttcgatcctgccaacccaaaaacccagggccatgtttccaatgtcgttaaagatattgtgaaaagatatgatatagatgcagttcattttgacgactatttctatccttatgctacttataacaggggagccgattttcctgataacgcaagctggaatgaatatttaagaaacggaggaacattgtcgagaccagactggagaagagacaacgtcaaccgatttgttgaaagaatttataaggagattcacgcagagaaaaattatgtaaaattcgggatcagtccgtttgggatctggaaaccaggatatcccgcgggaatcgtgggatcatctcaatatgatgaactgtatgctgatgctaaattatggctgaataaaggttgggtagattatttctcgccacagctttattggcctatcgattcaaaagggcagagctttgaagcgttattgaattggtggaaatctgaaaataccatgaaccgtcatttgtggccggggcttaacaccgttgagatcaaagtatccgaccgtccgaccgaaattaaaaatcagattgacatttcaagacagatcttaaaaaacgatgccggagaaattcattggagtattgccggactgacgaaaaatcctaatatgcttcctgttttgaaaaacggaccctacaaagataaggcactggttccgaaaacaccttggattaaatcagttccattacaggacgcctaccatatttgttgctgataatgggaacgctgtaaaaaccagctggagcatcaaaaatataggacaagtattccagtggatccttttttactcaatataacggagcatgggaaacagaaatccttacgctggataccctttcaagagatattccgaaaaataaagacggtagaaaattaaatgcagtcgcgataaaagctgttgaccgactcggaaacgaaagtgattataccgccagaaaagtaaaataaaaatatagaatttattttcataaagatatttttttcattagtcaatattgaatcctttctgtaataaagaaataacaaaaccagttcagaagagctggttttatttttgt

SEQ ID NO: 2298 - DNA, 22344 bp, synthetic construct
  source 1..22344: mol_type = other DNA
  misc_feature 1..22344: note = Synthetic
gcatccttttgcagtagtcttcgctgatcagctgtttgcctttccaccggccgttctgcataataagctgcccgagtcttgcaaaatccctggccgtggcatggatacagcagaaagctttttccattcctttttcgtcggtgctccattttgccggaaactccatattcagcggtttccatattttttcggaaaggtaagtggcaagatcctggttaaccgcctttctgagggctagccccagaagctgagcagccacgctctggtattcgtaccttgtgcccggcatctcaataaaaccgatgtcaaaagcctgttctgcaaggtcttccacaaaatactgctttgagttttcggcaaaggggtggcggtattcctcaatccagtcgaatccggcctgcatggtcatcagatgcctgaaggtaaggtgtttcccgtaaaagctttccgcataccggggaaataccgtagaaaccagttggtcttccgattccaggtaaccgtcatcaatggcacatccggtcaggacagataaaataccctttgccatggaaaaagaattcatgagggaagagaaatcgtggtctttccaatactgctcatgcagcagtttcccgttctgcaccactaaaagggaagaggccctggtctttttcagttcatttaaaatatcctctgataatgtcatccggttgtagtgggcatcttttttccaggcttctgctttcagattcggcaccggccgggaagggaatttttcttcatcatcgatagagggggtaacggcaccttttttcagattgagggctgcggctctgaaaatgtagccgtatccggaaagatagatagctgctgcgactgctgaagttcccaaggccagggccgttattatttttttcataaattaaaccttataattaaagaccggtcattttttcaacagcattggcaccttctcttatttaaattcagtgatttcggttaagatgactctggaataattaataattttagtgccaaacttgattttaatttttaaataaggaaagtctttcccataagtctgccgcttcgccagataagtgccttatttaaggaacggtttttgtaactttttggcagatcacttaaaaatttacaaatcgaaatattatgaaaaactatctactgccggtagcagctttattgttgtttagctgtaaggacaagaacaaatccaacggaacaggatcaggcgataccgccgttacccagaccgataccctaaagcttccgccgcccaatgaaaaagcttccaaaaataaattcagcaatgtcatcggctggccgaaagataaagcgccaacggctcccgaaggatttacagtgacccgttttgcagagaacatcaagagcccgaggaacatgatccaggctgagaacggcgatatttttgtagtcctttccaattctgagcgatcggtttccgagaaaatcaaaaacgacatcagtggcaaaagcgatgcggaagtcggcggaaaatcggccaacaggatcctgatgtaccgcgatgccaacaaagacggcatcccggaatcctcatccgtatttctggccaacctgaaccagccgtatggtatgctgatcatcggcaaccagttctacgtagccaacaccgatggcgtgtgggtctacccatataaattgggagatactaaaattacacagccgggaaaaaaaatcgtaagccttcctgcgggcggttacaacaaccactggacccggaacctgattgccagcaaagaccagtctaaaatctatatttccgtaggatccggaagcaacgtcggagaaaacggaatggaaaatgaaatcagaagagccaatatcctggaagtaagcccggacggaaaaggagagaagatctatgccgcaggtctcagaaatccggtaggtatgagctggaacccggtaaccggggaactctggacggtagtgaacgaaagggatgaactgggtgacgagcttgtgccggattacctgacgggggtgaagcaaggcgccttttatggttggccgtatgcgtatttcggaaaaaatgaagacccgagaagaaaaggggaaaaaccggacctggtagcaaaaaccattgttccggatgtcccgttgggtagccataccgcatcgcttggacttaccttttatacaggcgcacagtttccggggaagtataaggacggcgcgttcatcggacagcacggatcctggaaccgatcgtcactggccggatatcaggttgctttcgtttcttttaaagacggaaaagcttcgggtccttaccagccgttcctcaccggtttcattgccaacgaaccgaaaggggatgtgtacggaagaccggtcggcgtgcttcagcttgcagacgggtcgttactggtagccgatgatgtaagcggcatcgtctggagagtggcgtacaataaaaaatagttttaattcatttaaataaaataaggtaaactcgaagaagaatacggatgaaaaggctggaagagggaagcaggatgccggaagtttattagatcaaaataggaccggagatctttgtattatcttaaagtcatgaaggaacggcttattacaggatacgataaaatcctgtcagaggtatggaccattgatttatcctacaagaagtcattctatttgatatcctgattgataaagccttaattttgcttttgaattgattaaatatttgaatacaagctgaatacaggcgaattcacgtaaataaaaacaggcagtctttcggattgcctgttttattgtaaacttttctgaagtttccatacttgatcatacggttattcaggtaatttcagcgtctaacttgctgtcgttaatgtcggtaagataaaccgacaaaataatgtttctgtgcctgatgctggatcctgtaattcagtcctgcatccatcttaaaatctttagctatatcgacctcaatggctgcgttgatgtaattggacagctcgtgggctttgaaatcataggtgtaataggtttccgctatcccgtcgactcctttggcaatggaatggctgagcgtcagggtctgcagcagttcggtatgcatggccggcagatccaggtctttcaggcggtcgacttccacctggaatccgagtttccattcgcccggcaatttatacatcatcggaacaatcagccctccttcaaaacggctctcatcatcgtatccggaagtcgggaatttaacataaggcagaatggccataacgaaattcccatgatcatttccgatcaggttctgtttaatccttacattgatgtctccaaatccgtcggttctccggatatttcctgaagacaggtctttttcccgctgcaccccgtaagtctcgaagccgatctgtatggccgttgaaccggtaatccccagtttcaggtttccatgattaaccagtaccgtagaaacttcccgggaatcagatctttctttctcgagccggatcaggtcggtttcgtactggaagtgtccggcgtccaccgtgtaggccgattccgtaacgtccggccggtcagtctccatctccctcatcagggattccggaacaggattgaaaagcgaataatgtttctcctgattttcctgtccccggtaagcggcagggatgaggagcatgctgcctagcagcacggcaaagcgttggtttttattcatggctggatttccgggattgcatggattaagcggtagtaaaagaaggtcagaaattgaccctgatgtcttccggtgttttcaccacgacccggatgcgtgtaggatggtcgataacatcataatcgatgtcatccgagaggtgaccgtcttttttctgctgtatcctgatgccgtcaaaacccacctcgtctttggatatttcaagatagtaacagttctgttcttcgtcgtggataaaatgttcttttttaaattcgataaattgcatatttctatttttttggtgttttaaatcaatgagccactgcagaaggctctgaaaaagtcaacacaaaaacggagccataaaatgatcataccgccccgaatatgcccgaagtggtaccaaaatataatgcggatctcatggacccgcattatattgtattaaaaaagaaattacgcctgtataaattccaggaggtctttattgatggtatctgcttctgtggtcggcattccatgcggaaaccccgggtaactgatcagtttgccgtttttcagcagttttgccgatttcagtcctgaattttcataagggacaatctggtcgtcttcaccatgcagtaccaataccggaatctccaccgctttcagatcctctgtaaaatccgtttccgaaaaagcttttacgccgtcgtaatgggcaacgataccgcccatcattccctgtctccaccagttattccggataccgtcttttatatcggcaccttcccggttgtagccgtagaaaggaatggtaagatccatatagaattgctgcctgttgttcattgtctgttccctgatgttatcaaaaaccgacattgggaccccatccggattgttttcaccggccaccatcaccggaggtacggcactgatcagtacggcctttttcgctcttccgttggcatatttgtgaacatagcggatcacttcgcctccgcctgtggaatgtccgatatgaatcacttctttcagatccaggaattggaccagttcggcggcatccgaagcatattgttcgatgttgtggccgtaaatattctggctggaccttccgtggccccttcggtcatgggtaatcacccggtatccgcgttgaaggaaaaagatgacctgtgcgtcccagtcgtccgatgacaaaggccatccgtggtgaaacatcagcaccgggccctgcccctggtctttgtaaaaaatctctgttccgtcttttaatgtaagtgtactcatagctgtaaattttttgtttcgattaattgttttgttgtttatttctttgacaaaagtaggacatcggcataagacaaaaattgacctgggttaatttcgtacggtttgatgaaaaattctgaagctgttgattaaaattttaaagctaaaaaaccgggtgccttacctgaaaaggatttccttatcatgacgaccctttttgaccggttttttgccggcatccgttttttgagggataaaacatggatcatttccaataaaagcctgttttctgtacgaattcatataaattttttcttcaccattaggctggaattcccataaaacctatatttgcagcctaaatttttgaaataatgaaagaactaattgaaaaaatcaacgcggaatttgaagctttcacagctgaagctaaccaacaagtagaaaaaggaaacaaggcagcgggaacaagagcccgtaaatcagctttggaacttagcaaactgttcaaggatttcagaaaagtttctgttgaagaagcaaaaaaatagttgttctaaaaaaaccggctcaaaaagccggttttttttatggtcagtggcgaatagtgaatagtgaatagtgaatagtgaatagtgaattttgctttgcaggtgaatggtgaattcaaagttgaatattcaccattgaccattaacaagcgcagcggattgaccattcccattcaccttttacaggatcatgctcagctgaaccctttttcttccttcatccacatcggttacttttacctgaacgtgctggtggagttttaccacttcattcacatccgatacaaaaccttccttcagctgggagatatggaccagtccgctttctttgatgccaagatccacaaagcatccgaaagccgtaatgttgttgacgatgcccggaaggatcattcctgttttcaggtctttaatgcttttgactttcgggtcaaactcgaagactttagcggctttcctcgggtcgagccccggtttttccagttctttcaggatatctttgatgcttaaaatcccgatgtcttccgttatgtatttttcgggccggatcagggcaattttctctttgttggcaatcagttcgttggtttttatgcccagatcttctgccattttctcgacggttccgtaggcttccgggtgaacggcggagttgtccagcgggttctttgcctgatggatccgaacgaatgccgctgcctgctgaaaggccttttcacctaaccgcggtacttttttcagctgcttccggtcttcgaaagcgccgttttccgtccggtagttcacgatattttcagccattttttctccgattcccgaaacgtaactcagcagggatttgctggccgtgttgaggttgatgccgacggcattcacgcatttcatcaccgtagaatccagttcgtttttcagttgcgtctgatccacatcgtgctggtactgtccgaccccgatggatttcggatcgatctttacgagttccgccagcggatcggccagccttctgccgatggaaacggcaccgcggaccgttacatcataacttggaaactcgtcccttgcaattttactcgccgaatataccgaagcaccggcctccgataccacgaaaacctgcagcggcttgtcgaaggcaatctttttaataaagaattcagtttcgcggctcgccgttccgtttccgatggaaatggcttcgatattataggcgttcaccatggagcggatctttttcatggccattccggtttcgttctgcggtgcgtgcggataaatggtttcgttatgcaggagatcgcccttttcatcgaggcagacgatcttacagccacttctgtatccgggatcgatggccaggatccttttttcgcccaatgggggagccaatagcagctgggtcaggttttccgaaaagatttcaatggcctttttatccgctttctctttcgcttcctgaagggattcgttggaaatggccggttccagcagtctcttataactgtctttaatcgctaatgcaatctgatccgatgattcattgtcggatttgatgatggctttttcaataaattccagggcttcctctctgtcgattcccacattggttttcacgaagccttcggcttctgccctgagcatggccaggagccggtgggaaggtgtacggttaaggttttcctcccattcgaaatactgggagaatttctgcgcttcttcatcgtcttttttcgcttttaccgctttggaggtaatcaccgctttccgctggaagaggcggcggaggtttttccggacgtacatattttcgttgatccattccgccatgatgtccctggcagcctgcaaggcctcttcttcggaagaaacgtgatcgttcaggtattttgaagccagagaccgtacatcgtgcgctttctggctcatgataatcttggctaaaggttccagccctttctccctggccgcatccgctctggtcttttttctttttttgaaaggcaggtaaaggtcctccagttcctgaagatcgaagctttcttcaatccgctgctgcagttcaggcgttaaggcattctgctccccgatggatttgaggatactttcctttcttttaacgagatcttcaaactgtttgttcagttttgagatctgttcgatctgcgtttcatccagattgccggtacggtctttccggtatcgggaaataaaaggaatggtgcagtcttccgccaggaggttcagcgtagcgtcaatgcttttttcggatatattgagggattgtcggatataggttacggtgttcatctgaaattttaaacggctaaaatacattctttttgtaagagtaggactgaataaacggaaaaccggagggtgaatggtgaattttgcgctgcaggtgaatggtcaatggtcaatatgcttcgcttgtcaatggtgaattgtcaattttatatgtaacgtaaggattgtaatgcataagagcgcgaaaggattttaattgctgttcatgggaaagacgcaagggtttttacctctgataaaatggcgtaccgctgaaatcctcaccgcaattccccttcttggaggggggtcgaaaattcagggaatttttgatggggtgggttggtgaatggtgaattttgcgctgcaagtaaatagtgaaatgtgaattttaaagaagtttttgcctgaagacataaaatacggagttttttttaatacataacattttcaagtttcacaaagccatttcatttacaggagcacaccaagtttctgaatactggcagttttggaaaatcgattttaaagaaaagaaattatagaatattaattttaacaatatatatttgacagcgttgatttctacaccgatcaacagcattattatccaattacctagtgcttttgtgtactccaacccaaccaaaagtctgatgtaaattcccttcaccgcaattcccctcccttggaggggtgtcgaaaattcagggaatttttgacagggtggtttttagggtgaacggtgaatcttgcgtagcaggtgtaagggattcatagtgtggaggtgttggaatgcgcaaaggcacaaagcgcttatctttaataaaattgtagaacgctgattaattgtgaaaacagatcttataaaaaaacaatttcagcagcattaaaatttgaccgcgtcaaattcttgtcgtctttaaacattattattttaaagaaaatggcgactttgcgcattccagccaggaagcatctttatcagctacccgtaaaatttatgttcggttttcatttattgatgtaggttaagaaaacagagtagggaagttgttatctttggctttttaaatgaaaattcttgtgggatctttcattttgcttatatttaaaatctttaaactcattaataaaataaataatatgaaaaaacttagtgttattgcattggtagctgtaggaatgcttgccgcatcgtgtaacaaagacaaatcggctgaaaatgcagcaacgtctaccgagaaaaccgtagcggaaagcaaaggggaagtattgccggtagataccgtgggatctgtggtaaactggaaagcgttccacaaagggggaatggcgccgcgttggggaactttaatggtaaaatccggagacctgagcgttgaaaacggaaacgttaccgccggtaacttcgtgatcgatatgaactccctgaaagtagacccggcttccgtaaccgaaaaagacaagaaatacacggatcttgaggctcaccttaaaaatcctgatttcttcgatacggctaaaaacccgacggccgacttcaaaatcaccagcgtaaccgatcttaaagagccagctaaagacgcggtggcaggagccaacaaaaccgtaagcggaaaccttaccctgtccggaaaaacaatgaacgtgaccttcccggctaaagtagacgtaatggaaaacgctgcttccgtacaggctaaatttaccgtaaacagagcggattggggcatcaagttcggaacttccgaaaccgatcctgccgaatggatgatcagcaaagacatcgaaatcgccgtagacgtaaaagcgaaaaaataatattgttagatctaatcttgtaggccgctccttttttggggtggctttttgtatgcttttccgtactggtttgattaaatagatcggccggatctgcagacagtctctaatcacaactaaaaacgaaacccgtcaggttttatccgtcaccgtattgatcgtgctctccgcattccgaaacggcagggcataaaaaagcctcctgattatggacaagaggcgacccaaatgttttcacaacggaataatccttattgtgaattgctttcatatacaaatgtagaaaatatttttttaatccttttctggattcccgtaaaaaacttcctttttttctttttacatttatgcaatttctaaaaactgatacattatgattaaacatatacttggactggacctgggaacaacttccattggatttgctcatgttactgaaggcaattcgcctgaacaatcatcaataaaaaaaattggtgttcgaataattcagtatgacaattttgataaagtagataaatcaggaaaggttacagaatctaaaagtcctaaagatgattttgcctctggaagaggactttctccaaatgcaggaagaacattgaaacgcggagccagaagaacacttgaccgctatcagttaagaagaaaaaacttgatagaggtattaataaaagcaaatattatttcggagaattcgatattggctgaagatggaaagcaaacaacttttgaaacttggcatttacgtgcgaaatcggttttagagaaaattaataaagaagcattggcaagagttttcctagctattaataaaaaacgaggctacaaaagtagtcgtaaggccaaaaatgaaggtgaaggtcaaattattgacggaatggcagttgcaaaaaaaatctatgaagaaaatctcacaccaggtaagttagcttatcaattattaaaagaaggaaaaaagtatttgccggatttttatcgttcagatttacaagaagaatttgataaagtctggaatttccagaagcagttttatcctgaaattctgacagatgaattttatatggaattaaaaggtaaaggccagcgagctacttctgcgatgttttgggcgaaatatggatttaatacggcagaaaataaagcaaaatcgagagaagaaaaaaaattgcaagcgtatttgtggagaagtgaagcaatcgagaagcaattggaaaaagataaagtcgcttttgtgattaccgaaatcaacaataatctgaataattccagcggatatctgggtgctatcagcgatagaagcaaagaattgtatttcaataaccaaacggtagggcaatatctgtatgaacaactgaaagaaaatccgcatacgagactgaaaaatcaggtattttatcgtcaggattatttggatgaatttgaaaaaatatgggaaatgcaagcgaagtttcatccggaattgaccaaaaaactgaaaattgaaatccgtgacattatcatattttatcaaagaaaattaaagtcgcagaaaggtttagtgagcttttgtgaatttgaaagtaaagaaatagatattgaaaaaaacggacaaactgttaaaaggaccatcggtttaaaagttgctcccaaatcatcaccattatttcaggagtttaaaatctggcaggttctgaacaatgttctggtcagaaaaaaaggaagtgaaaagagggttgcaaaagaaaccactgtaaccttatttgaagaagaaaaggaaatttttgtatttgatttggaagccaaacagaaattatttgatgagttaaacatcaaaggcaatctgaaatcggcaaaaattattgaaattttaggctacagatcttctgattgggaattgaattattcagaattggaaggtaacagaaccaataaaattctgtatgatgcttttctgaaaattctggagtcagaaggctatgataaagatttgcttaccctgcaaggtaaagatgatattgacgtttcagagctgaaagcacctgtatcagaaattaaagatatgatcagacgtatttttgaagtgctgaatatcaacacggaaattttagaatttgatgcagaattagaaggaaaagattttgaaaaacaggcttcctatcagctttggcatttgttgtattcgtatcaggaagatgattctaaaactggaaatgatactttgttcagattgctggaagaaaaatttgggttcaaaaaagaacattcacagattttggcgaatgttgctttttctgatgattacggaaatctaagtagcaaagcgatgcggaaaatttatccgcatatcaaagaagtaacttacgataaagcttgtctgcaagcgggttacagacattccgctgcgtccttaaccaaagaagaaatcgccaatcgtccgttgaaagacaaattggaactcctcaaaaagaacagtttaagaaatccagtggttgaaaaaattctcaatcaactggtgaacgtcatcaacacaatcatcgaaaccaacagcaaaaaagatgaggaaggaaatattacggaatatttcagatttgatgaaattcgggtggagctgtcacgtgatctgaaaaagaatgcagaagaacgcagggaaatgacttccaatatcaatgcatcgaagatcgcccatgaaaaaattttcaaattgcttcagaatgagtttcatattaaaaatccaacgagaaatgatatcatcaggtatcggctatatgaagaactgaaaggtaccggctataaagacctgtataccaatgaatatatccctagagaaatcttattcagtaagcagattgatattgatcatattatccctcagtctaaattgtttgatgacagtttttcaaataagacagtggtttacagaaaggataacctgaaaaaaggaaacagaactgcctttgattatatttcagaagaattcggagaaaccggtatcgaaaattttaagtcaagaattgaaatgctgtttgaacagggaaagaaaaataaggaagagggaatttccaaagccaagtaccagaaattactgaagcaggaatcggaaattggtgatggtttcatcgaaagggatttgcgtgatagccagtatattgccagaaagtcgagaaatcttttatatgacatttgcaggactgtaacacctactacgggaagtgtaactgcaaggttacgagaagattgggatcttatcaatattatgcaggaattgaattttgaaaaattcaaagctttgggtcttacagaaatggtagaaaagaaagatggaagttttaaggaacgcattgtagactggagcaaaaggaatgatcatcgtcatcatgcaatggatgctttaacggtagctttcaccaagcaaagccatattcaatacctgaatttcctgaatgcaagaaaaaatgaatttcataaacttcataacagcattattggtattgaaaatgcagaaacagagatcaaaacggatgatgatggcaacaaaaaaagagtttttagattacccattcccaatttccggcaggtagccaaagaacatctggaaaatattctggtttcgcacaaggcaaaaaataaagtcgtcaccaaaaacaaaaataaaaccaagtctaaaaacggcggaaaaacgaaagttgaattgacaccgagagggcaattgcacaaagaaactgtttacggaaaataccagttttacgtgaataaagaagaaaaaataagtgcgaagtttgataagcaaaccatcgagcaagtagccaatccaatttatagaaaattattgcttcaaaggctttcagaaaatgataacgatcctaaaaaagcatttgccggaaaaaacgttttgagcaaaagtccaatttatctgaatgaagaaaaaaccgaagttcttcccgaaacagtaaaattgacttggctggaagaagattattccttccgaaaagacattacgccggagaactttaaagatgtaaagaccatcgaaaaaatcctggacgaaggggtaaaaagaattttacaaaaccgtttaaaaaagtttggaaacgatccgaaaaaagcattttccgatttagaaaaaaatccgatctggctcgatgaagcaaaaggtatttcaattaaaagagtcaccatttcaggtgtgaaaaatgccgaatttttgcattacaaaaaagaccattttggaaacgaaattttagataaaaacggcaagcctattccggttgattttgtgagtacagggaataatcatcacgttgccatttaccgtgatgaaaaaggaagcttacaggaacgagtagtgtcgttgtttgatgctgttcaactcgtaaatgcgggagaacctgtaattgataaaaattataatcaaggaataggatggcaatttttattcaccatgaaacagaatgaatactttgttttcccgaatgaaaaaacaggatttaatccgaaggaagttgatttgttagatgtaaaaaataagaaggagataagtccaaatttgtttagggtgcaaaagctggcaacaaaaaattatatgtttagaaatcatttggaaacaaatgttgaagaacagtcacagcttagagatgtcgcatatataagtgtcagaagcactaatccattagcgaatattgtaaaagtccgtctcaaccatattggagatattgtcgaagtaggagaatattaaacattactaatttaatcttaattatgtctaaaacagccctcaaaaaaaaacttcaaaaacttaacaaagaaaagctcatcgaacatatcctggatctgtatgaaaaaaacagttcagttcaggagttttataagttttatcttaatccggccaacgaaaaactactggcggaaaaatacaaaaggctgatccgcaaagaattcaatgtggaaaatccgatgcggagtaccgaaaagttttctgtggcaaaacgggcaatttcagattttaagaatctgcagccgtcaccggaatacctggcggacgtcatgttatatttacctgagagtgcctgtgaattgactgccctgttcggggatttttccgaacaattttataatggtacatttaataattacaaagcagcactggtatttttaaaaaagaacaatctgctagacgattttaaagaccgtgccgaacaatgtgtcaagtggtcggagtactgcggatatggatttgcggatgatatgagagaaattttttatgaatattatcattaaataattaaagctaaaaaccatgatcacccgctccatttacatcggcaatcctgcttaccttaagctcaaggacgagcagctgaaaatcctctgtccggaaacgaaaacggaaaaggggagtgtacctgttgaagacctgggacttctgatgctggatcattaccagatcaccgtctcgcacaacctgatccagaaaatgatggggaataatgtggtggttgtaagctgtgatgcccatcatctgccgcacgggatcatgcttccgttgtatgggcataccgagcactcggaccgggtgaaggatcagctggaagccagtgaaccgctgaaaaaacagctttggaaacagacggtggagtgcaagatcgaaaatcagaaaaatgtcctgatgaagcttgggaattattacgaaccgatgctggaataccagcgcaatgtaaaatcaggagacagtacaaatatggaaggcattgccgcccagcattactggaaatacctgatcagcctggatttcctgaggcagcgtttcggggattcgcccaacccgttcttcaatttcggctatgcggtgctccggagtattgtggccagagcgatcgtagaaacgggactgctcccggttctcgggatttttcacaagaacaaatacaatccgtactgcctggccgacgacctgatggagccttaccggccatttgtcgatctgctggtcatgcagtggcttaaacttcatcctgaaaatgatgaactgtcgaaagatttcaaagcccatatgctgcagattgcaaccagggacgtacgcatcgatgataaaaccaggccattgctggtggcggtgaaaaccacggcttcatcgctttacaaatgctataccggtgaaaaacggctgatctcttatcctgaactgatctgatgaattgaattacttcttacattgttgtacattttacaaataaaaatatggacgccgaaaggtttaacgcataccggattatgtgggtaattgtattgtatgacctcccgaccgaaacgaaagccaatatgaaggacgctaaccgtttccggaaatcgctgatcgatgacggctttacgctgttccagttttccatgtatgtgcgccactgcccgagccgtgaaaatgcggaagtgcatatcaagcgcgtcaaatgtatgcttcccaaagccgggaaagtcgctatcatgtgcatcacggacaaacagttcggcgatattgagatcttctttgccaggaataaagaagaaccgcctccaaccttccagcagctcgaactcttctgatttttttaatcctaaataacaaataaacccactgcatttcagtgggttaaatgttgaggttgtgttgtatcccaaagatacgattaaatgaaagcaattcacaacaaaaatgctaaaagtgcgttaagatcgttagttgtgttgtatcccaaagatacgattaaatgaaagcaattcacaactacgaaaccaatcagccacaaaacggcacagttgtgttgtatcccaaagatacgattaaatgaaagcaattcacaactaaataatatactgaccataaataccataagttgtgttgtatcccaaagatacgattaaatgaaagcaattcacaacacataaataccataccataaaccataaatagttgtgttgtatcccaaagatacgattaaatgaaagcaattcacaactataaatactgactgactgactgaccataagttgtgttgtatcccaaagatacgattaaatgaaagcaattcacaacactgacataaccatatactgactgaccatagttgtgttgtatcccaaagatacgattaaatgaaagcaattcacaactaataaccataataaccataaataaaccatgttgtgttgtatcccaaagatacgattaaatgaaagcaattcacaacctgactgactgactgacataaaaccataaagttgtgttgtatcccaaagatacgattaaatgaaagcaattcacaacacttctgttcttgctgcaaaactaaatgatgttgtgttgtatcccaaagatacgattaaatgaaagcaattcacaaccggaaaatatgttggtatccaggaaggcgagttgtgttgtatcccaaagatacgattaaatgaaagcaattcacaaccagtgaattcgattatgacccgaaaacccagttgtgttgtatcccaaagatacgattaaatgaaagcaattcacaacccaggatctcggatgttactttacagatttgttgtgttgtatcccaaagatacgattaaatgaaagcaattcacaactttattctttgtataatgttttccatgtcggttgtgttgtatcccaaagatacgattaaatgaaagcaattcacaacttcggagcaggccggctttgcaattgctcagttgtgttgtatcccaaagatacgattaaatgaaagcaattcacaactatgaggcggaaacggcctgttacggtgaagttgtgttgtatcccaaagatacgattaaatgaaagcaattcacaaccaacggatttaataattcggaacaacaaaagttgtgttgtatcccaaagatacgattaaatgaaagcaattcacaacattagtttaggccgggaggcaaattatgacgttgtgttgtatcccaaagatacgattaaatgaaagcaattcacaacaagaatgttctccgtatgtggatcaggtcagttgtgttgtatcccaaagatacgattaaatgaaagcaattcacaactccggtcttgtctttattgtgagcaaacttgttgtgttgtatcccaaagatacgattaaatgaaagcaattcacaacagtacagatcccctgcactaccttccgtatgttgtgttgtatcccaaagatacgattaaatgaaagcaattcacaacaaagaatcggatttgccttttatcgtaatagttgtgttgtatcccaaagatacgattaaatgaaagcaattcacaacttgtcccagcgtaataattcgcgatcatacgttgtgttgtatcccaaagatacgattaaatgaaagcaattcacaacatatgacaaaaacgtcttttatcgctaacggttgtgttgtatcccaaagatacgattaaatgaaagcaattcacaacatatgacgagcgatttttatttctccctttgttgtgttgtatcccaaagatacgattaaatgaaagcaattcacaactcgctttcatcgagggggttaagcgggaaggttgtgttgtatcccaaagatacgattaaatgaaagcaattcacaacgattgattattctagccattgcggccctgggttgtgttgtatcccaaagatacgattaaatgaaagcaattcacaacagcattaaaggcgttgattattggttgcgagttgtgttgtatcccaaagatacgattaaatgaaagcaattcacaacagaaaagtgtttgtatctttgaatcatcaagttgtgttgtatcccaaagatacgattaaatgaaagcaattcacaactcgatcagactccgaagataacgtcaaattgttgtgttgtatcccaaagatacgattaaatgaaagcaattcacaacttgatcggttcaaagccgaattttgatttagttgtgttgtatcccaaagatacgattaaatgaaagcaattcacaacacggaatacggatgaaaaaagaacttttgggttgtgttgtatcccaaagatacgattaaatgaaagcaattcacaacacatttaaaaaccgttcttgaccggtttaggttgtgttgtatcccaaagatacgattaaatgaaagcaattcacaactcagaatgtgccatttcaaaaaggtggtgagttgtgttgtatcccaaagatacgattaaatgaaagcaattcacaaccatgaaagatgagcaatttaaggctttgaagttgtgttgtatcccaaagatacgattaaatgaaagcaattcacaacgcatcggttagcggccattcgtgcatcgaagttgtgttgtatcccaaagatacgattaaatgaaagcaattcacaacttggacgatgacgacgagctcgccgaatgggttgtgttgtatcccaaagatacgattaaatgaaagcaattcacaactgccgatttagcggccgcccttttccctacgttgtgttgtatcccaaagatacgattaaatgaaagcaattcacaactctgaaagactgtttgactttatccttaaagttgtgttgtatcccaaagatacgattaaatgaaagcaattcacaacattctgatctcatcacctttgacgttatatgttgtgttgtatcccaaagatacgattaaatgaaagcaattcacaacgtcgaaagagagttctacatcatggatgatgttgtgttgtatcccaaagatacgattaaatgaaagcaattcacaacagtgttggtggattacaatatggtgaaggtgttgtgttgtatcccaaagatacgattaaatgaaagcaattcacaacaaaccggaatgagattaagtccctcgcgtcgttgtgttgtatcccaaagatacgattaaatgaaagcaattcacaactaaccgtctatcaattagttaagaagcgtagttgtgttgtatcccaaagatacgattaaatgaaagcaattcacaacgtatgggtggttcgtttatatgttcaaaaagttgtgttgtatcccaaagatacgattaaatgaaagcaattcacaacaactaaattcgagaactttatgacaggtgggttgtgttgtatcccaaagatacgattaaatgaaagcaattcacaactacacttaagtacgccttcaaaagagtcgcgttgtgttgtatcccaaagatacgattaaatgaaagcaattcacaacaacgaaaggatacaggcagtacaacaggaggttgtgttgtatcccaaagatacgattaaatgaaagcaattcacaacatatcatcgtagatagcgtttgggtcattggttgtgttgtatcccaaagatacgattaaatgaaagcaattcacaacaacgcttcacaaaagggcttggcagcatgagttgtgttgtatcccaaagatacgattaaatgaaagcaattcacaactgcctcagatgctcacacaccatcaggaaagttgtgttgtatcacgaagatacgattaaatgaaagcaattcacaacgtgcgtacgtcgttgctttcccggctgcctgttgtgttgtatcacgaagatacgattaaatgaaagcaattcacaacgaattcaaggtataaacgaaattaaaagaagttgtgttgtatcacgaagatacgattaaatgaaagcaattcacaacgcggatgtttactcccggttcgtcaacattgttgtgttgtatcccaaagatacgattaaatgaaagcaattcacaaccaggaaggtgtacttcccgtacgtttttaagttgtgttgtatcccaaagatacgattaaatgaaagcaattcacaactggaagagattaaggagccgggttaccacggttgtgttgtatcccaaagatacgattaaatgaaagcaattcacaacgagaatagggcggcatattaccgccctcatgttgtgttgtatcacgaagatacgattaaatgaaagcaattcacaactgctctgtggagaatacgggatttgaacccattgtgttgtatcccaaagatacgattgaatgaaagcaattcagaattttaaaaagaatgggatacgggaagcggtaagaatttacccggatcaaaacgattgatatgattaaagaaccggtgttcaagaccagcaggtctgccaattcctatatgctaaacaaaaaccacccgccgcatccggcaggtggtttttatttggtaaatctgtttctatttttaaactttcgccagcggttctgcagcggccagggcgcgggaggcgatccagctgatgatctgggcgcaggtggtctcgaccagttcgtcgcgggtgacctcacggatgcccgggatgagatccgaggccggcggtggcggaagaggccgggagagaatcaggccgggaacggcaggatcgaatgacaccccgcggtaaagatccacatgctgaacgaagagctgggaaatgtaatccttcattttcaggggaggaacattaatcgcattcttgccgtccgagtactgtagggtgcccgtcaatgaactgttccggatccgggtataggacgctccggattttgcggcatcgttaagggcaattttctgtaaccggtcgagaaagaagtttgtccagaaatgaggcgattttccgaacagggtggcgaccttttccaggtcggtggtatcccaggcgtggggaaccacatcgatggaattccagtgcatcgtgttccagctctggtagggaagcggttgcggctcccacccggagggcagtgcggggaaagtggtgttgaatagttccgaaaagttggcttccccgggcgtcggtccggcggtaggatacaccagcgtcagtgcaaaggcatccaggtcatttttctgtttcaggtaaagcgcaagggtcggagacagggcaccgcccaggctgtggccgcagaaaatcacagccgtatccggttggggttttgcaccggtcaggaactgttcgaggctggtgccgggagcggctgccgcatccggggaaatcattccgagaaggttctgaatgccggttgccgtccctttggagataaacggggtaccttccacataaggcgacggggtaaagccggacggatcgtaggtattccagttcacgactgtggaaaccgaaaaatcctcatcgccccagtcataaagggaatcgggattggttccggcaaccgccaccacataagcgggcattactgtaccgccgggaaatgccacggcatcgcactgggcaacaaacagcgaattgtcggcaacaccggtcggaacgccgttgatcacttcttcaagcaccgccggtccccataccagtttccagtttcctaaaaccggcgtcaccaaagggtcggcggtagaagccgatttgatgggatccacaggcggaacgccgctgagataaaaagaaaggtcttgctgaagctgttgctgaagcagggtttccggaccgtggtaaccggcggcacgccctacgatgcaggccattgcaaatacctgctggtaagcgtctaatgttggattgttcatgaggtaaaagtttttagttgggttaaattaaagccattgattgttctttcctgtaccgttttacctgcggtaaaatcttccggggaactgatgtaaaggaagggagaaaaatcaagtaaaggttaggtagaaacaaccaaagtatagcgtcagtgtttgtactcagaagtggcttc

SEQ ID NO: 2299 - DNA, 21679 bp, synthetic construct
  source 1..21679: mol_type = other DNA
  misc_feature 1..21679: note = Synthetic
atgagactttttttttgtcccaaaatctaaaatctaaaatttgaaattcaaaattcggagtaactgttttttctaagatataaaacttagtacagtagcaatagatttttgattttatttgaagaataagggtatttctaaaataaagttttttgatgccgaataccttagccctgatagtagcggttaccccacagcaagggttggagcgcatgggttttggcggtggagagttttggagcgaggagtagaagcggatagcaggaaatagctccttaaaagaaatattttaggtgttatttgtttagaattacttttagaaaaaactctacttgcaatttttttttagacttttatttgtcgatttttgcacttcgtaatttgatttttaaatgaaactttgtatcgcagaaaaaccgagtgtagcaagagatatagctaaagttttaggagctacaatgcctaagcaaggttatatggagggaaatggatactgcgttacctggacttttggacatctttgtactctgaaagaaccacacgattatggacaagagcttaaatcttggaatcttatatttttgcctattattcctaagaattttggaattaaacttatacccaacaaaggagttgagaatcagttcagggtgattgaaagattagtaagtgaatgtgatgaagtgattaattgtggtgatgctgggcaagaaggagagcttattcaaaggtgggtacttcaaaaagcaaaatgtaacaaaccgatcaagcgtttgtggatttcttcattaacagaagaatctataaaagaaggttttgaaaatctaaagcctgccgaggattataaaaatctttatcttgctggaaatgcgagagctataggtgattggcttttgggaataaatgcaacgcgtcttttcacgaaaaagtttggaggaaacaaaggagtgctttctattgggcgagtacaaactcctactttggcaatgctggtgcaaagacagaaagaaattgatagtttcagcactgaagaatattgggaactgaaaacgaaatatagagatgtgatttttaatgcagcgatagaccgattgaaaactcttgatcgcgcagaaaaaggtctctcttatctcaaagaaaatctttttgagattgtttctttcgaaattaaggaaggtaaagagaaaaatttaagactttttgatttaacaggacttcaggtggaagctaataaaaagtatggttattctgctgagaatacattgaattatattcagagtctttatgaaaagaagcatgtgacttatcctcgtgtggatactacttatttatcagaaagtttatatccgaaaattgagggtatattgagaagtttgactttttatcaggatcttattttgccattattgcaacagccaattccgaaaagcaaagctgtttttgatgatgctaaagtaacagatcaccacgctattatcccaacagagatttcgccttcgcaaaatttaagcaaagaagagaaattgatttatgatttgattgccaaaagatttatttctgttttttatccggaatgtaaaatatctaatactctggtagaagctagagtgggcacaataccttttaaaacaaatgggaaacaaattttggagcctggttggcgagcagtttatgcaaaagaaccaaaagacaaagaagattctacggataaagaaaaaagtgctgaggaagaacaattaattccagaatttcttgctggagaatctggtccccatgatccctacattcatcagggaaagacatcacctcccaaatattttacagaagcaacattgctgagagccatggaaactgcaggtaagcaaattgatgatgatgaacttcgtgagatgctaaagaataatggtattggtagaccatctacaagagcgaatatcatcgaaactttatttaagcgtaaatatattgagaaaaaaaggaaaaaccttattgcaacccaaacaggaattcaattgattgatactattgaggatgaagttttgaaaagtcccgagcttacaggagaatgggaatttaaactcagaaaaatagaaagtggagagtacgatgctaatacctttaaagaagaactcattacaatggttaccgagcttacaaaaaaagtaaaagatggaaaaggtaaatcgtttacttttgaagatgaaaagcctaaagaggaaaaaaagacggtatcagccgccaaaaaagagattaaagagtgggatatgctaaaatgcccaaaatgcaagcaaaaccatttgatgaagggtaaaactgctgtcggctgttctgattttaagaactgtggatttaaggttttatttgaaatatacggtaagaaattaacagaaaagcaactaatggatttggttgtaaaaggaaaaacttcaaaactaaaaggtttcagttctcatcctaaaaatattcaagaaggggtgatttctctctcagaaaatgattacagtgtgaatcttgcataaaaaaaacagtaagcatggtatatgcttactgtattaaaaactaaaatattaaacagagaaaactaatcaataaatagtgctgcaatagcttgagcttgggatcctgttaaaatctcatcataagcagcagatcctgcttcgggaccaaatgctgtggcagtattgaatcctgcttgcattgttacttgctcgcctgcataaactgggtctgtagctgctggcatgtttccaccattatttagctcaatccaccctttgttcattctcattcttcttacttgtgaagcatgtctagcttctacagagtgtatttgtaacgctgcttgtaaaatagctttgttgcccattacatttcctgcctggcctttataagctctcactccagtatcttcaaatgcctgagcaagaattaaaaattgctgataatttgtaaaaggtgtaaatgctccattcgctgtaaagtcaaaaagaggtttagttccaggagttgctccgagcgaagtaagtgctgctttcaagaatgcaacgtgagcagtttcatgcttggcaatttgttgaaaaactacacggtcagctgtaggaattagtcctgctgtagccaatccttcagcatagtattgatcttcaagatattctaaaaccaaagccaattgtaaggcatctgttaaagcatcttttttgaaggctacactttctgtggtatcagctttttttgtttctgcttttgcatttcccgaaaggaaagctcctaaacctagaggaattgcagctgcggctgttttttttccgaaagatgacagttggctcaaattttcatttctagaaaatgatttggtatataaagcgtcatctgataatgtatcaagtattttaagaatattcataatgtttgattttgcggttaattttgatgatttttttttatcctatacctctttctttccaggtaaatggagttttgaagaatccgccagctgcggctacaacgtcttttggttcttttgctacatccagaccgttggcatcaattacatcatcacccgaaaacgctgctgtaccagggttgattaaatctctaattgcacttgcgtgtcttgcttctacagaaacaatctttccagccagcacaagataatcaggattagtaatatacttgcctgcagcattataagctgctactcctgtatcttctaatgcttttgcagtagccaatacagatgctctgtcactgaaattcacattaggatattgaaattcaagctttggcagaacttggcttgtaaccccagataaagcagccttgaaaaaatctctgtgaataacttcgtgatgataaagatctgtaagcactgctttttccacagtagatgctcctgtatagaaactgttgactactttagtgtaaaaatctgcctctagctgttctaatgcataagcatagtttaaaacacctacatctcctgtacctaaatcgaaaatattaggattagcatcctcaaactcatcgttacaacctactagtgcaagacccgccaccaaggcacctacaccactcatttttaagaaacttcttcttccggagtccaaattggttttgccggaaacagtaattgtttttttcataatattaataatttaatgggttctatttttaagtaaaacctgcatcaaaatcaagaaatgatgcaggtaaaacactaaactaaggcattaatactgtgtcgataacatgtatcacaccatttgattgatttacgtctgcgattgtaacttttgctttattaccttttacgtcgcttacatataagtcttttcctttcgtccagaatgtaagagcttctccttgtacagttttcatttctgctttaccgcctccagctttcactgctgcccaaacttgctttccagaatatttacctggtaaaacatggtaagtaagcacaccttgaagcatagatttattttctggtttcagtaaattatctacagcagactttggaagttttgcaaacgctgcattagtaggtgcaaaaactgtgaaaggaccttcaccttgcaaagtttctacaagacctgccgcttttacagctgctaccaatgtagtatggtctttagaatttactgcattttctacaatatttttagaaggatacatggcagcgcctcctaccattactgttttttctttcattgactgtgcagctgcgtttccgctaaatgcaaatgataatgctaccattcctgctactgcgaattttgatgtaaagttcattgttttaaattttttaatgattttaaaattgagttttgatctgtttattgggatcttatagacatctacgacaatatgataattatcagttttaattaattcaaaatattttataacaacttgataatcaagtgtatttattttcatttttattttttttgtggtatgtgcttgggttgatttttatttttgactttttttatctataatatcatcccaattctaatcattttatctataaattgattatatttgaaaaacttaaaaatcgcatcatcaaaacaaaatactctgaagacgagattatcctcatgatcagtaggcatgacgaacgtggatttcattatttatatgaaaactattcggctgccttatatggagttattttaaaaatagtacaatcgagagaaggagccgaagaaataatccaagatacatttgtaaaaatctggaattctatagggcaatatgacaaagtaaaagggaggttatacacctggatgattaatattgccagaaatacagcactcgattatataaaatctaaaagtttccaaaacgatctaaaaaaccaatcgcttccagatttcgtatataacgatacaaatctttctgtatctggcgagcatgattttattggtttcagtaaaattttagataatttagatgcagataagaaagaacttattgatttggcttactataaaggctacagtcaatctgaaatatcagaaaaactagagatgcctttaggcacagtgaaaacaaagatgcgtaatgcgttgatgaaattaaaagatttgttaaaagattacaggtaaagtgaacactcaggaatacatatcatcaggagtacttgaggcatatattttaggcacagcaagtcatgaggaagcaggcattttagaatgcgtgatgtctcataatgcagaagtgcgtgctgcgtttgaagaaactcaaaaaatacttgaagatcttgctacagctcaagcaataaagcctgcagatgacctgagagataaaatttggctaaaaatttcggaaaataaattagacattacacctgtctcaaatcaagacgaagaaataagaaagataccattaccagcagaaatatcaatctctaattcagaatctggaaaatcattgtggagtaaaatttctgttgctgcttctatacttcttctattaagtcttggagcaaatcttttttggatttcaaaatcttctgataaagatgtacagattgccgaacttacaaatcaaagaacggataccgaaaataaaatcaaaaatatcaacgaaaagctaagtcttatttctaatcccgacttacaaaaaatcgttttagcgggtgtagcaacacatcctgattcaaaggctgttgtcttttgggataaaagtagcagtaaagtttatcttaatgtacaaaatcttcctgaagcaccttcaggaaaacaatatcaactttgggctattgctgatggcaaacctgtaaatgcaggaatgtacagcaaagacaaagataccaaaattgcactggcagaaataccttctgcacaagcatttgctattactctcgaaaacgaaggtggcagcgaagttcctactatggaaaatatgtatgtgatgggtgcaaccctctaaaaagattcttgaacaagaacagctataatagccaaaatggcaggtaacgattgaacaaaaaatatttttttcgtagaagatattgctccaaaaatccctgctatagttacacatcccaagaaaaataacgcaatattattttgccacttttcgtcacagatgaaaagagaccaaatgagaccagcagccaaaaaaccgttgtacaaaccttgatttgctgccaaacctttcgtgggtttaaacatttcgggaggtaaagctgccttaaatacttctttgcccttggtttcccaagcaaacatttccatccataaaatataaatatgttccaatgctacaattgaaataaggattttgggtagaatttccataatgtttttttgttttggtaaaactaaaaaaataaactttagtttgaacagctaaaactaaaaagggaaagttttaaacacatttaaataaattcataactattgctgacgaagaatttttttcagtaatgtcgttttttgaaattatgcatataacgaaaaaacacagtttaatgacaggcggagatgtttgttaaagaatttacttcttttctgaaggatgtcttagggaatttttcattattctaaaaggtattgggcacactctgaattttccattgagaattttccattgagaactggaggatttagaattgctataaacgaaagtataaactagataacagcaaaataaatcggcaataaattatttctccatcagtaagggtggagttttttatgatcattgtataatgtaacggaagattttgaagaagtcaataagacaaaaagaaaggcgagttgccccgccttgaatgttttcacaacggaataatccttattgtgaattgctttcgatttcaaagatagagataaatttttttaaccaaaaaaaggttacccgtaaaaaacttattttttttcttattacatttatacaatttcaaaaaactcaataattatgacaaaaaatattcttggattagacttgggagtttcatcaatcggttgggcttatgttcaggaagatgataaaaattctgcgaataataaaatcatcaagttaggagttcgtgtaaatcctttgactgttgatgaacaaataaatttcgaaaaaggaaaaccgattacaaccaatgcgggaagaactttagcaagaggagcaagaagaaatctgcaaaggtttaagttgaggagagctaatgttattgatgttttgacaaagggaaatatcttgaaagatggtgatttgcttacagaagttgggaaaaactctacgtttcaaactcaggaattaagagcaaaatctgcgaaagaaaaaatcgaactttcagattttgtgagggttttacttttaattaataaaaaaagaggctataaaagcagtagaaaagcaaagaacgaagatgaaggacaaatcattgacggaatggcggttgctaaaaaattatatgaagaaagcctgactccaggagaatattcttaccaacttttaatagaagggaagaagcaattgccagatttttatcgttccgatttgcaagccgaatttgataaagtttggaaatttcaaaagcaattttattctgaaatcttaattgataaactttataaagaattacaaggaaaaaataaaaatgcgacttgggcaattttgaaagaaccgttttctcttgttggaatcaaacaaatgggaactatgcaggaaaaaaagattgaaaaatatctttggagaagtgaagctgcaaaaaaacaattggattttgaaagtttagctgtagtgtttcaagagattaatagtaacctaaataattccagcgggtatcttggcgcaatcagtgatagaagcaaggagctttattttaaccatcaaacggttggcgaatatctttatcaacaacttaaagcaaatccgcataccaaactcaaaaatcaagttttctacaggcaagattatttggatgaatttgaaaaaatatgggagacacaaactcaatatcattcagaattaaccaaggaattaaaagaacaagttcgtgatgtcgtgattttctatcagagaaaactcaaatcccaaaaaggtttaattagtatttgcgaatttgagaacagagaaattgaaatcatagaaaacggaaaaacaaagaagaaaacagtaggattaaaggttgctcctaaatcttcgccattgttccaagagtttaaaatttggcaagttttaaataatctgcaatttcaaaatttagaaacaaaagaaattttcccaatcgatttagacttcaaacaatcaatttttgatgaagttaatgtcaaaggaagactttctgcaaaagaggttttagatattgtaggttattccggtaaagaatggaaaactaattttaaagatattgaaggcaataataccaatgaaaatttatacactgcttttttgaaaattattgctaatgaagaaaaagaattcccaaaagagtttaagttaactattgaagacgatattaaagttactaagattcattcttctgcaagtaaaataaaagaatttgtaaaagagaatttttcgtcattaggaataaatacatcaatattagattttaatccagaatttgacggaaaagattttgagaagcaaagttcctatcagctttggcatttattgtattcttacgaaggcgatgattctgcttctggtaatgaaaaattatatgagcttctggagaagaaatttagctttaaaaaagaacattccaaaatattggcagaaattggtttctctccagattatggaagcttgagttctaaggcgatgcgaaagattattactcatttaaaagcaggattttcatatggaggaagaaaagataaacctgaagaaccaagcgcttgcgaatttgcaggatataaaagtcattctaaaaattcattgactaaagaacaattagcaaatagaattttaaaagaaaaactagaaattcttccaaaaaattctttgcgaaatcctgtggttgaaaagattttgaatcaaatgataaatgtggtcaatgaagtatccaaagaatacggaagaccagacgaaataagaattgagctagcaagagaactgaaaaaaaatgcagaggagcgtgcaaatatgacttctgaaattggcaaagcaaccttgcttcatcaaaaatatgcagaaatattacagaaagaatatgggataaaagtaccatcaagaaacgatattattcggtacaaactgtatttggagctggcaaataacggttttaaagatttatacacaggtcaaaaaatagaaaaggaaaacatttttaccgacaaatatgatattgaccatattatcccgcaatctcgattttttgatgacagtttttcaaataaagttttggtaccgagaggtgcaaatcttaaaaaaggaaacgcaactgcatttgattatttggaaatggaagggaaagatcaactggaaaaattcctcaacaccatcaaagatttgtttgataaaagtttgatttctaaagctaaatttgaaaaacttcagaaaaagggaagtgaaattggagatggttttatacaaagagatttacgagatacgcaatatatcgctaaaaaagcaaaagagattcttttcgaaattaccaattctgtggtttctacatcaggaagaatcacagataaattacgtgaggattggaatctcgtcaacacaatgaaagaacttaatctcgataaatacaagaaattaggtttaacggaaacggtaattaattctaaaggagaagaaaaagaaagaattacggattggagtaaaagaaatgatcatcgccatcacgcaatggacgctttgacagtagcttttacgacgcataatcatatacaatatttgaatcatttgaatgctagaaaagatgaaaagcataatcagcatatcattatttcaaacattgaaaatctcataacaaaagtctttgaaaagaaaaaaggttcatcaaaaagaaagtttattgaaccgattcataattttagaattgaagccaaaaagcatttagatgaaatattgatttctcacaaaacgaaaaataaggttgttaccaaaaatatcaataaagccaagaaaaagggtggagtagtgtctaaagttgtacttacaccgagaggtcaacttcataaagaaactatttatggaagctcgaaatttcttaaaactaaagaagaaaaagtatcagttaagtttgatttggaaaccattaacaaagttcagaatgagaaatttagaattgctttattagaaagattaaaagaatttaatggagattctaaaaaagcatttacaggaaaaaatgtgttggcgaaaaatccgatttatttgaatgatgaaaagacagaaaatgttcctgaaagtgtaattttagcttggtatgagataggttacaccatcagaaaagccgtgaatccagataattttaaagattataaaaaccttgaaaaagtaattgataatggcgtaaaagaaatcttaaaaaatcgtctggatgcatttaagggtaatgcaaaagaagcattttctgatttagaaaaaaatccgatttggttgaatgaatcgaaaggaattgccataaaaacggtcaccataaccggaatcagtaatgttcaaagtttgcataaccaaaaagaccacttaggcaaagatattcttgatgaaaacggcaataaattacctgtggactttgtaagtacaggaaataatcatcatttagccgtttatattaacgaaaatctagagcttgatgataatgtagtgtcgttatatgaagcagttgaaagagtaaatcaaggtatagatatagttgataaatcttataagtctaatgatggatatcactttttattttctttgaaacaaaatgaaatgttcttgtttccttctgaagatttcaacccaaaagaagttgatttgtttgatgataaaaacttaagtctgatttctaagaatatgtttagggttcaaaagatttcaaaagttggttatggtaattctttcgtaagggattttgtttttagacaccatttggagacttctgttgaagaaaaaaaagaacttcgaaatattacctatgtacaattgaagagtttagaaggtttaagaaatgttgtaaaagttagacttaatcatattgggaagatagttcaagttaacgaatactaaataatttatgatcacccgctccatctacatcggcaatcctgcttatctcaaactcaaagacgagcaaatgtacattctttgtcccgaaaccaaagaaatgaaaggcaaagtccctgtcgaagatttaggattgttgatgttggatcacttccagatcaccatttcgcatcagctcatccaaaaaatgatgggaaataatgtggtggttgtaagttgtgatgcgcatcatttgccacacggaattatgcttccgctgtatggccatactgaacattcagatagaataaaagaccagttagaggccagtgaacccctcaaaaaacaactatggaaacagaccgttgaatgtaaaattgaaaatcaaaaagaagttttaacacgtttgggaaattattacgaaccgatgattgattatcaaaataatgtaaaaagtggcgacatcaccaatatggaaggcatcgccgcacaacattattggaagtatctcatcagtttagattttctcagacaacgtttcggcgattcacccaatcagttcttcaatttcggatatgctgttctcagaagtattgtggcacgggctattgtggaaaccggactgcttcccgttctcgggatcttccataaaaataaatacaatccttactgtctcgctgatgatttgatggagccctatcgtccttttgtagatttattagtaatggattggctggcaaagaacccgaacgttgaggaacttacaaaagaattcaaatcacacatcctgcaaatagcaaccaaagatgtattgatagacacgaaaacaagaccattgttggtggcggtaaaaacaactgcttcttcactttataaatgctatacaggagaaaaaaggttgatttcttatcctgaattcaaataaatggatagtatggatattgtactttttacatcgtacataatacaataaaaaatgaatgccgaaaggtttaatgcttacagaattatgtgggttttagtattatatgacttgccgacagaaactaaaaccaatatgcgggatgccaataaattccgcaaaggtttgctggatgatggttttacgctttttcagttttcaatgtatgttcgccactgtccgagccgagaaaatgcagaagttcacattaaaagggtaaagtttatgcttccaaaagcgggtaaggttgccataatgtgtattaccgacaaacagtttggtgacattgaaattttctttgccagaaacaaagaagaacccccaccaaccttccagcagctagaattgttctaaattttgaatcctaaaaacaaaaataatctactgattttcagtagattattttttgaggttgttgtgtatcccaaagatacttaaaaatgaaagcaattcacaactttcaccgggttatccttatcaaaaatgaagttgttgtgtatcccaaagatacttaaaaatgaaagcaattcacaactttggctgctttcgttgtgaattctgcaaagttgttgtgtatcccaaagatacttaaaaatgaaagcaattcacaactaacggggctactttccaaggcttataaatgttgttgtgtatcccaaagatacttaaaaatgaaagcaattcacaacaaaaatatacttttcatttgttaaaatattgttgttgtgtatcccaaagatacttaaaaatgaaagcaattcacaaccacgggacaaatgatccttggagtaatttggttgttgtgtatcccaaagatacttaaaaatgaaagcaattcacaacctgtaacctgttttgatttttacttgcccggttgttgtgtatcccaaagatacttaaaaatgaaagcaattcacaacgcatctatggatgttatttcttccatggcagttgttgtgtatcccaaagatacttaaaaatgaaagcaattcacaactttttaaaataaatcaaaaatactttgaaagttgttgtgtatcccaaagatacttaaaaatgaaagcaattcacaacgtcagtgattcagttgctggagcctacaaagttgttgtgtatcccaaagatacttaaaaatgaaagcaattcacaacacagggggcaaataattgattctttggcgagttgttgtgtatcccaaagatacttaaaaatgaaagcaattcacaacaagcaatgacaatagaaaattatctatcacgttgttgtgtatcccaaagatacttaaaaatgaaagcaattcacaaccaaacgtagcagagctaagagacggagatggttgttgtgtatcccaaagatacttaaaaatgaaagcaattcacaacggtgtggttagcgttaatacaaacacgtcagttgttgtgtatcccaaagatacttaaaaatgaaagcaattcacaacccattggttaaatattatgaattggcaagagttgttgtgtatcccaaagatacttaaaaatgaaagcaattcacaaccgtaactctctattaaaagagttggcagctgttgttgtgtatcccaaagatacttaaaaatgaaagcaattcacaacggatcaatattttgtcgaaaacaagactaagttgttgtgtatcccaaagatacttaaaaatgaaagcaattcacaacgttttcatggtttcatcctcggctaaggtcgttgttgtgtatcccaaagatacttaaaaatgaaagcaattcacaacggagtcctatttcaacaaaaaacaattggagttgttgtgtatcccaaagatacttaaaaatgaaagcaattcacaacggagacaagaaaatttcggttgcggaattagttgttgtgtatcccaaagatacttaaaaatgaaagcaattcacaacaccgtctaatgtgtagaggtctgccatttcgttgttgtgtatcccaaagatacttaaaaatgaaagcaattcacaactaatgaagattgctccagcaaatttagatggttgttgtgtatcccaaagatacttaaaaatgaaagcaattcacaactggtacaaacgattctgtaattgatggtttgttgttgtgtatcccaaagatacttaaaaatgaaagcaattcacaactatggtgaaggtgtaagatacaccgcaaagttgttgtgtatcccaaagatacttaaaaatgaaagcaattcacaacttgagcctgccgttaaaaaaatggttgatggttgttgtgtatcccaaagatacttaaaaatgaaagcaattcacaactaatggggaaaatatgttttttatatccgagttgttgtgtatcccaaagatacttaaaaatgaaagcaattcacaactaccacatcataatttcctgttgcgcctccgttgttgtgtatcccaaagatacttaaaaatgaaagcaattcacaactaaacggtgctgctttctccaaaagaccgagttgttgtgtatcccaaagatacttaaaaatgaaagcaattcacaactgcatttaatggtgcgattggcttatttgcgttgttgtgtatcccaaagatacttaaaaatgaaagcaattcacaactaaacaggggctgggaaagcttggctttagttgttgtgtatcccaaagatacttaaaaatgaaagcaattcacaactaaatttcaagtgtttttattaatatcattgttgttgtgtatcccaaagatacttaaaaatgaaagcaattcacaacaagaatttgaaaacggtaatgtttcatcttgttgttgtgtatcccaaagatacttaaaaatgaaagcaattcacaacggagacaagaaaatttcggttgcggaattagttgttgtgtatcccaaagatacttaaaaatgaaagcaattcacaacaggaaataaaaagtgcagaccagttagaatgttgttgtgtatcccaaagatacttaaaaatgaaagcaattcacaacaggaaacatctatcggtgctcttcggaatagttgttgtgtatcccaaagatacttaaaaatgaaagcaattcacaacagtataattattttgaatcaaaaattaattgttgttgtgtatcccaaagatacttaaaaatgaaagcaattcacaacaaaaaagttttatggctagaacagtagtaagttgttgtgtatcccaaaaatacttaaaaatgaaagcaattcacaaccctgcagactaaacggagtattcgcagctagttgttgtgtatcccaaagatacttaaaaatgaaagcaattcacaaccgtttccgtaggatcatccatattaatagagttgttgtgtatcccaaagatacttaaaaatgaaagcaattcacaactcaggaggtgtatgatcatcaccacatacagttgttgtgtatcccaaagatacttaaaaatgaaagcaattcacaactctctgtcgttcttgtctttgattgtaagtgttgttgtgtatcccaaagatacttaaaaatgaaagcaattcacaacgcttcaatatgaaaagaaagagcacgattagttgttgtgtatcccaaagatacttaaaaatgaaagcaattcacaactactgaaagaccatataaagaaagattgatgttgttgtgtatcccaaagatacttaaaaatgaaagcaattcacaacacaaattgtaatcaccaatttaaaaaaatcaaaacatatttatttacttttgccctatgttttatttcattttattattaaacttcataacattctcagcgtatacaattgataaatggtatgctataaaacataaaaaaagaatatcagaagctatcttgcttattttctcattttttggtggcacaatcggggctgttttaagtatgattattttcaatcataagatagcaaagaaaagttttttgctaaagttgagtctggttgtattgttgcagatattcattgcagggataatatattggctacaaagtggtagactataaatttggagaaaatcatatatcgtgcaaattaattctaaagtcaatatttttatcaaaataaatatagcctttatctggttttaagtattttaacatttttttaaatacataatcgctcttcatggcactgtattttcttagtttgaagaattaacaccaaaaaatattaattatgtctaagaaaattgccattttggctactcatggttttgaagaaagtgaattaagctctcccaaagaatatatagaacaacatggatgggtggcacacatcgtaagcccaaaaagcggaacaattaaagcatgggcagaaaaagagtgggggaaagaatatgcagtagataaaactctagatgaggtttcagcatcggattacgatgcactagttttgccaggtggtgttattaatccagacctgctaagaaccaatgaatcggctttaggtttggtgaaagaatttttcaagcaaaaaaaaatagtagcagcaatctgtcatggaccacaaattctaatcaatgccgaagtggttgcaggtaaaaatattacctcagtaaattctattagtattgacctcaaaaatgctggcgctgattgggaagaccgtgaagtagtagttcatcaaaatcttattacaagccgtacacccaaagaccttcctgtttttaatgctaagttgattgaggagatggaaaaaagataagcaagttgtctgaaataaatgagcatcagttttttgtggagaaaaaaacatataccaaaaccaaatacatcacatcaaaactttatttagaaaaatgaaggtttattgaaagaatgttaattgtcctacaaataatttgtattttttttttgaaaagatattttttaattaattattaatattaaatataaactaattaaaattttagatccaatagcgatctgaggcaactgttacaaaggaaattttaaaaagtatatcaaatgatacaatatctatttgcttactattatctattttcaactaaacttactcattatgaatttgttaaatatcataagtattttattatatattgataaaaaaacactatttttgcacccgtaaaaatcttatatgcaaaacattagaaatattgcgattatcgcacacgttgaccacggtaagactactttggttgacaagatcatccacgctaccaatattttcagagaaaatcaggagagtggagaattaattatggataacaatgatcttgaaagagaaagagggatcactattttatctaagaatatttctgttacttataaagacactaaaattaacgtaatcgatacacccggtcacgccgatttcggtggtgaagtagagagagtattgaaaatggcagatggagtaatcttgttggtggatgcattcgaaggaccaatgcctcaaacaagattcgtattgcagaaggctttagaattaggtcttagacctttggttgttatcaacaaagtagacaagccaaactgtcgtccagaagaagttcatgatcaggtatttgatttgttcttcaaccttgaagctactgaagagcaattggatttcccaacgttctatggttcatcaaagcaaggttggttcaatacttcattagaagaaactgaaaacattttcccattactagacggaattttacaatatgttcctgagcctaaagtagaggaaggtaacttgcaaatgcaaattgtttctctagatttctcttctttcttaggaagaattgcaatcggaaaagtaatcagaggtgagattaaagaatctcagtggattggtcttgcgcaagctgacggtaaagttttaaaaggaaaagtaaaagaattatacgttttcgaaggtcttggaaagaaaaaagtaactgaagtaaaagctggagatatttgtgctgttgtaggtttcgatgctttccagattggagattctttcgtagatctagaaaatccagaaccattgccaagaacatcaattgatgagcctacgttaaacatgacgttctctatcaacaattcacctttcttcggtaaagacggtaaatttgttacttcaaaccacctgaaagaaagattaactaaagaattagagaaaaacttagcattaagagttgagcaaactggtgatgcaaatacattcttggtgttcggtagaggtattcttcacttgtcagtgttaattgaaacaatgagaagagaagggtatgagatgacgatcggccagccacaagttatccttagagaaatcgacggagaaaaatgtgagccttacgaatcattggtagtagacgttcctgaagagtatgcttctagagtaatcgatttggcgactcaaagaaaaggtgatcttcacatcatggaaactaaaggtgaaatgcagcacttagaattcgaaattccttcaagaggtttaatcggattgcgttctcaaatgttgaccgctactgctggtgaagctatcatggcacaccgtttcacagaatacaaacctttcaaaggtgctattcctggaagaagtaatggtgttttgatttctaaaacgcaaggtccagctacagaatattctatcgctaaactacaagatagaggtaagttctatgttgatccgggcgaggagatctatgctggtatggtaatcggtgagcagaataagccaggcgatttggtagtaaacatcgttgaagctaaacagctgaataacatgagagcttcaggtaaagataaagatacaggtgttgctccaaaaatattattctctctagaagaatgtatggagtacatccaagctgatgaagcgattgaggttactccaaacttcatccgtatgagaaagaaaatactttctgaagaagaaagaaaaagaatcgaaagaggagcgaaagcttaatctgaaattcaaaaatataactaagcctcgatttttcgaggctttttttgctttaaattttaaatacccactttataatcaatcatttcttatttcagtaatctttatcaccacttcaaactttttttatcggatatattacaaattttgcaagtgttggtgggcagtttcgaatttacttttgggtattttaacaattgttttaaacattttatttatttttaaaaacgatataaaactgattaacaaatctaaatatcaaaaaaaactcaatgaacaaataaaaacatttaagaagtttaaattgctcacttctccctattttacaaaaattcatattatttctgatttttttttatttaatttaaattttgcggagtgagatttccaaaattatctttatatcattagttttgtctttttacaactcagaatttttttttaaatccttatgaaaatctctacaataaaattaatcactatattaagtttctttgcctcattcagcacttcatgtgccgtaaaaagtgtttcagaaaaaaaagcacctcgtaaatccacaaaactcactgataatatttcgaaaaaatcagattctctcgttttatctgttcctaagaaatccctgcaagaagattttaaagtgaatcttccggaaatcaatcgagaattccgtggtgtttggatagcgagtgtggcaaacatcaactggccttcaagaaataacctctcagtagatcagcaaaaatcggaagcaatcaatatgctcaatatgctgcaagaaaataattttaatgcagttgttttccaggctcgcccatctgcagacgctttgtacacaagtgaattggagccatggtcatattttttgacaggaaaaactggtgaaccaccattcccaaactatgatcctcttcaattttggatcgaagaatcccataaacgcggaatggaacttcatgtctggctaaatccatacagagcacaccattccaacggaggtgcggttacttcgcaatctatggcaaacaaactttctgatattaccattaaattaaaaaacggaatgtattggcttgatcctgcaaatcccagaacgcaagggcacgtttctaatgtcgttaaagatttggttaaaagatatgatctagacgccatacattttgatgactatttttatccatacgcaacctacaacaaaggagcagattttcctgataatgaaagttggagtgcttatcaaagtgccggtggtgtgctttctagagccgattggagaagagagaatgtcaatcaattcgtagaaagaatctataaagaaatccatgccgagaaaaaccatgtgaaattcggaatcagccctttcggaatttggaaacccggttatcccgaaggaattgtaggctcttctcaatatgacgaattatttgcagatgcaaagttatggttaaataaaggttgggtagattatttttcgcctcaattatattggccaatcaattcaaaaggacaaggtttcgtatctttattaaattggtggaaatctgaaaacacaatgggtcgtcatctatggccaggattaaatacggtggaagtaaaagtttcagatcgttcagaagaaattaaaaatcaagtagaattatcaagacaaattttaaaaaataatgcgggagaagtgcattggagtatagctggattaaccaaaaactcaaatatgctttcaactctaaaatcaggaccatataaagaaaaagctttaacgccgaaaagcccttggataaaaacgattcctgtagaaaaaccaacattattcatcaaagacaacggaacttctattcaagcaagttggagttcgaaaaaaagcgcaaatattttccaatgggtactttttacacagtacaacagcgtttgggaaatagaaattctcactttagataacgtctcaaaacaaataaataaaattaaagatggtaaaattttaaatgcagtagccataaaagcaattgaccgtttaggaaacgaaagcgattatcaagcaaaaaaaatcgataacctatcatctcctttcccacctccgacctcaaaaaatgacaactgatcaccgcaggaatttgcattttttttaagagccgggaacccgctgtc

SEQ ID NO: 2300 - DNA, 21532 bp, synthetic construct
  source 1..21532: mol_type = other DNA
  misc_feature 1..21532: note = Synthetic
agatgtgtataagagacagatctaaacacttacctttataaagagagttgtgatttgctttcagatttgttctttgctatatttaacaacaacgagcagtaaacaataggtttacgcccggtagttgtgatttgctttcagatttgttctttgctatatttaacaacaaccggccagctgttcaactgttatttgatctggttgtgatttgctttcagatttgttctttgctatatttaacaacaacttttaagggtttgttaacgaatatccgtttgttgtgatttgctttcagatttgttctttgctatatttaacaacaactacaaaggttattaggcaagccggaacgtgttgtgatttgctttcagatttgttctttgctatatttaacaacaactgaactgacccgtcaatggttactgttgtgttgtgatttgctttcagatttgttctttgctatatttaacaacaaccgccattggccgctgtatccgctgtatccggttgtgatttgctttcagatttgttctttgctatatttaacaacaactgaccttttggcatctgttaattgcaaagcgttgtgatttgctttcagatttgttctttgctatatttaacaacaacactattttttgaaggcgctcattagaaggtgttgtgatttgctttcagatttgttctttgctatatttaacaacaactaataatcttaatttagttaaaccataagagttgtgatttgctttcagatttgttctttgctatatttaacaacaacagattagcttttcgctatctatgataatgagttgtgatttgctttcagatttgttctttgctatatttaacaacaacctgtcgcctccgcagggcgcgaatgaggcggttgtgatttgctttcagatttgttctttgctatatttaacaacaacaatacgccgattaacccctttagaatgctggttgtgatttgctttcagatttgttctttgctatatttaacaacaacgtccggcctataattgataagggttcgttcgttgtgatttgctttcagatttgttctttgctatatttaacaacaacctatatttaccgaaccatgttaatccgtcagttgtgatttgctttcagatttgttctttgctatatttaacaacaactaaaataattaaatagctttccgtttacttgttgtgatttgctttcagatttgttctttgctatatttaacaacaactaagctggcccgatgcgtatcgtaaaatgagttgtgatttgctttcagatttgttctttgctatatttaacaacaacccgcctgggagaaatcatcggcaggcgcttgttgtgatttgctttcagatttgttctttgctatatttaacaacaaccagaatagtttatttgtgcaataatagcgggttgtgatttgctttcagatttgttctttgctatatttaacaacaacaaacgcacgtactccgctacgttcacgcgcgttgtgatttgctttcagatttgttctttgctatatttaacaacaacgtgtggacatcagcggtccgctttttaaatgttgtgatttgctttcagatttgttctttgctatatttaacaacaacgctttaaaacttgatgatctacactggggtgttgtgatttgctttcagatttgttctttgctatatttaacaacaacttcgtccgtttctatcacagccagcataccgttgtgatttgctttcagatttgttctttgctatatttaacaacaacggttggcttcaatgggttccttcgctgggtgttgtgatttgctttcagatttgttctttgctatatttaacaacaacttctttaaacttatcatcgtaggccccccagttgtgatttgctttcagatttgttctttgctatatttaacaacaacacaagctttaaaatgcaataatcacggttggttgtgatttgctttcagatttgttctttgctatatttaacaacaacaatggaacctgcgtacagcaatagcgaaggttgtgatttgctttcagatttgttctttgctatatttaacaacaacccttttaaaatgccgaatggtaaccgtgttgttgtgatttgctttcagatttgttctttgctatatttaacaacaaccttgtcaacttcatcaattccatcaatgaggttgtgatttgctttcagatttgttctttgctatatttaacaacaacgagagttcagccattaaccgcttttcaggcgttgtgatttgctttcagatttgttctttgctatatttaacaacaaccattgcaatttgaaaactttcaataccgccgttgtgatttgctttcagatttgttctttgctatatttaacaacaactctatatcggcctgatctattaactcaaaagttgtgatttgctttcagatttgttctttgctatatttaacaacaacgaaaaaaaaatatatgattactacggttccgttgtgatttgctttcagatttgttctttgctatatttaacaacaacctccgggctttcgtagccgtatttatccttgttgtgatttgctttcagatttgttctttgctatatttaacaacaacaaaccctgtgttaatacttctgttttacaagttgtgatttgctttcagatttgttctttgctatatttaacaacaactaagatcattgctaaagtgttcaataacctgttgtgatttgctttcagatttgttctttgctatatttaacaacaacctcgcgcccaaactggtcaactgtacacccgttgtgatttgctttcagatttgttctttgctatatttaacaacaactcccaaagcaactgtgctttttgctgaaaggttgtgatttgctttcagatttgttctttgctatatttaacaacaactgtgcgtcacacgcttgtttagttcggcctgttgtgatttgctttcagatttgttctttgctatatttaacaacaactgcacaccaaccaattcaggaatgccgtccgttgtgatttgctttcagatttgttctttgctatatttaacaacaacggttcaagttgcaataacatttcccgttgggttgtgatttgctttcagatttgttctttgctatatttaacaacaacgcaagatcgttttcagctttcctttatatagttgtgatttgctttcagatttgttctttgctatatttaacaacaacttattgttgcaattatcaaatttagttgtgttgtgatttgctttcagatttgttctttgctatatttaacaacaactgccatcaattacacttccatcttcatttagttgtgatttgctttcagatttgttctttgctatatttaacaacaaccttaccgtaaatggcagttcaacaattgggttgtgatttgctttcagatttgttctttgctatatttaacaacaactaggtgcgcgtattgaagtgcaccggtgtggttgtgatttgctttcagatttgttctttgctatatttaacaacaacgcgcatcctgttaataaccgccatcgaacagttgtgatttgctttcagatttgttctttgctatatttaacaacaacgaactgttcttcgataaccgggttaaaccagttgtgatttgctttcagatttgttctttgctatatttaacaacaacatccgcacgcggaaggcatactcggtgcccgttgtgatttgctttcagatttgttctttgctatatttaacaacaacggtcgttaaatgcctgatgccgtcttttgagttgtgatttgctttcagatttgttctttgctatatttaacaacaactttttacagctataaacctttttatccgaggttgtgatttgctttcagatttgttctttgctatatttaacaacaacgtgaaacgatgcatgatatgataggcaggggttgtgatttgctttcagatttgttctttgctatatttaacaacaacacagatacgcttgcgattgcttcatctcacgttgtgatttgctttcagatttgttctttgctatatttaacaacaacgaaacaaaaatcatacatgaattggtttcagttgtgatttgctttcagatttgttctttgctatatttaacaacaacttgctatcggttgcgcattatgtgttttacgttgtgatttgctttcagatttgttctttgctatatttaacaacaaccttggtattgtgtagatcagtaggggcgtggttgtgatttgctttcagatttgttctttgctatatttaacaacaaccaaatgggggttcttctctcttgtataatagttgtgatttgctttcagatttgttctttgctatatttaacaacaacgtacccctgcttatcacattgatttataggttgttatagcttaaaactacaaaagaaaaaatgcccggctactttcataagcagccgggcattgttcattaaaacagttctaattgctgcggcgtacccggcagctccttttgttcgcggccataaaatagctccatcatgccaaattgcttatcggtgaccgttaaaatcccgacatgcccacgcggcggcagcagtttttttacccggttaatatgtacatcggcattttcgcggctgctgcaatgccttaaataaatcgagaactgaaacatagcaaagccatccgtcataatatcctttcggaacctggcagcgcggctccggtcctttttggtttcggtcggcaggtcaaataatacaagtatccacaaaatacggtattcgttaaaacgcatattttttaagtccgaaagtccgaaagtccgaaagaagaaagttttaggttccgaagaacatttgtttctatttcagacttcctaaaattggcattaccgggtacaaaattttacggcttttgccttcgtaacatttggcaagcgaagcggtggtacgctgtaaacccaccatcagcgggctgctttccttttcaatatgcacatcccttgtggcaatacccaacagcctgatttttagttcggtggttaaaaattcaaaatcttcgccctcatccactatttcgcaaaccaatttatccacataaggccggtaaggttccataatatcgtcggcaaggcaataggcgttatatttattgcggtggtgtatgcccagcgtgggcagcaggcccgaaccaaccaatccacgggcaaccatggcccgcaatatagcatagccgtaattaagcaggttgtttggcgcttcgccctcgcgccggcggaaaaagtttgtttgcgccccgaaaatataccgccagtaataagccgccgcccggccttcgtaattatccgggtcgccgctgcgcacgctttttgcccaatgcagcaggttatcagtttcaatcccccggtcatttaatatagcagcctggtttactattttagcgcttacggtttgctgccataactgtttttttagcggttcggtagcgttaacctggtggcggaaacgctcgctttgcacatcgtgtccgtccagcggtaaaaacaggcctaccggatgatgggtatcgttgcaggtaataatggccgcgttgttttgcagcagggccgctaaggcggcctgggtgatggtaatttgctggtggtccagtatcacaacgccgatatcctcaataggcaccgaacgtttggtgttcccttcacctaattttgatgtcccgggcagctccacctgcaattgctccaggtgcttgctgaggtatgccgggttgccgaaatggagggtgcgtttgatcatgcttggctcaattatattgcaataaaagtattagtgaatttacctatcaaatatatttgaagttaagcaataaaaaaaggggtgaaaacacggtatttattactgtatatattggctgtttgtaatgggctaaaacagagagtcgtttgaattactaaataaaagacataaaaaagccccgtattgtaagacgaggcacttatgtttacacaacggaataatccttattgcgatttgctttcaatgtaaagatatataaatagttctcatttgaacaaaaaaaaatcaaatcacaactattttgtatatttgtgcgtaataaaatttttggatcggggtgtccccaatcggaataaagccagtttatctggctttatttttttaaggaaagatttttaacccgtatcttttttctgattttttataaagcttatctttaaatacctcaaatgcagggttaattctttcaggttctaaaatatacctggctataggatacgctatcagatctgctaattgtaagccgttgatgttttctttcttgtttttaaaactgatagttaagttatattcagataatttaccggctttaatataacccgttccccttgatgatattttttgaaaatgctcctgtagttttttatcttctttagcgccccttctttcaataatgatttccagggacacatcgctttcttttaaactctgtaaatagaatattgtacgctcaattataaaggagaggcttatttcgtacacatcgtcagaaagctttccatactttttaatgtaattcactttcttaatagctgctgcaataaccttatagttgcaactggtaattatattatccagctttttataaaattcggctttcaggttcaggttaaataaatacttaaattccttttcacatttgcggatatcccttgaatgaaaaataacatgctcacttttccatatatcccgtttaactgaattgaaaccattgtttaatttttcgtaattttcagaagaaattacaattccgcacaatagaaatattgggaaatcgggattaaggttacttaagccatgatctccgctttcatctatatataaactgtatttcatctgattattattatattcgtaatgttttatttataaaaaaagcaccgaactgataagaactgaaagcaaatcgcaactcaataagtgataaatatatattgaagtggttgttcggtactttttaaataataaataacaagtgcaacttatcaaagcggcacttgttatcgttttttttgcatggtaatgtaatgtaaacagcgaatgaaaccattccattattgcaactctaatgtgatctgccgtatatgttttcaggcacatgcaaaacaatgaacaaatgtagaaattaaattaaccaattacgcaaataatatataattattcttattgatagttttatatgtgatatcttattgatagttttgtattgcacttatcatgtgtgtgttatccttttataaatatgaagaaaattttaggtctggatttaggaacaacatcaatcggatgggcttttgttaaggaagccgaagatggtgataatgaaccgtcatcaattgtaaaaattggagtgcgggtaaatccgcttaccacggatgaacaaaaagattttgaaaaggggaaatctgtttctgtaaatgcagacagaacattaaaacgtggagcaaggagaaacctgcaacgctataaacaaagacgcggaaacctgattgaagtactgaaacaaaacaatttaataaatactgatagcattttagctgaaaatgataaagatacaacccatttcacctatgcgataagagcaaaagcggcagccgaaggaattactaaagaagagtttgcccgtattttattaatgatcaataaaaaaaggggatacaaaagtagtcgtaaagccactaaagaggatgaagggcaagcaattgacgggatggctgtcgctaagcaactgtatgaagataatctaacgcctgggcaattaagctaccagtttttaaaagaaggcaagaaacatttgccagatttttatcgttctgatttacaagccgaacttagcagggtttgggattatcaggagaagttttatcccaatattttaacagcagaatttaaaaaagaacttgaaggaaaaggccaaagggcaacttctgctattttctggaataaatataaatttaatactgccgaaaataagggaacaagggatgagaaaaagctaaaggcttatgaatggcgcagtaaagctataaatagtcaattagcgatagaagaggttgcttttgttattaccgaaatcaataacaatattaataattcgagcgggtatttaggcgctattagtgaccgtagtaaagagctttactttaacaagcaaactataggacaatatttgtttaatcagttgcaaaataatccgcatacaaggatgaaaaaccaggtgttttaccggcaggattattttgatgaatttgaaacgatctgggaaactcaggctaaataccacgctgaacttacgctggttctgaaagaagaaatacgggatattatcatcttttatcaacggaagttaaaatcgcaaaaaggattggttagcttttgtgagtttgaaagtaaaaaggtggagtatgaaatagatggaaagacggtaatcaaaaccataggtgcaagagttatccctaaatcatccccgctattccaggaatttaagatatggcaaaatttaaacaacatagaactaaaaaataaaaaagacaaaagccggattttgattaaggactttgatttggatattaaagagcaattgtttaatgaattaaatattaaaggtaatctaactaaagccaaaattttaccaattttagtggacaaacctaatgactgggaattgaattatatggtaatagagggcaaccgtacccatcaggcattatatgaatcatatttcaaaatgatggaatatgagagccacgatgatattgatttggaaaaattgacggctgctgaaatgaagtcagctgttctttctttttttgaaactcaacacatcgatagaaccatacttgattttaatgcagaattggatggcaatcattttgaaaagcaaccagcttatcaattttggcacttgctgtatgcttatgaaggcgacaactcaaatacaggaaacgataaactatatgaattattaaaaagcaaatttggctttaaaaaagaatacgcttcaattttagcgaatataaaaatacaggatgattacggaagcttaagcgcaaaggcgattaaaaagatttttccatttattaaagaaaataattatagtgatgcttgtgccttagctggttataaccattcctcgtcacttactaaagaagaaaatgataaaaggccgttaaaaggcgaattgaaaatattacctaagaacagtttgcgtaacccggttgtagagaagatattgaaccagatggtaaacgtaattaatgctataattaaagacccacctcttggcaagcctgatgaaatacgtatagaattagcccgtgaactaaaaaagaatgctaaagaacgtgaggaggataccaaacgtataaacgaagcaaaatccaatcatgataagatcagggaaatacttataagagaagataaaattccaaatcctacccggaatgatattatccgttacaaactttatcaggagttaaaatttaatgcctataaagacctttatactaatgagtacattgcaagacaagatctttttacaaaaaagtacgatatagaccatataataccgcaggcaagtttatttgatgatagtttctctaataaaaccttagcgccacgtgaggcaaactatactaagggtaatagaacagcttacgactacattgataaagatcgtggtgcggaaagcttgacagattatttggaaagggttgaaatgttataccaggtaaattataaaagcaaagatgagggtattagtaaagccaaatacaaaaaactacttttaaaaggaagtgaaattggcgaagggttcatccaacgtgatttacgtgatacccaatatattgcaaaaaaagccaaagaaatgttgcatgaagtatgcagaactgtagtagccacaaccggaagtattacagataagttgcgggatgattgggggctggtcaacgtaatgcaggaactcaatatggataaataccgcaagcttggccttactgaaatgattgaaaagaaagatggcggctttaaggaacggattgtagattggacaaagcggaatgaccacaggcatcatgcgatggatgcgcttaccattgcttttacaaaacacgaacatatccagtatcttaataatctcaatgccaaaacgaaagaggataaaaaaggaaaggagatttatgctattgagcaaaagattactgaaaaattcgataaagacaaaaggcgttttaaatcacccttagataatttcagggaagaagctaaaaatcatttggaaagtgttttaatttcctgtaaagcaaaaaacaaagttgtaacaaaaaacaaaaacaaaacaaaaagttctaaaggagaaaaaagtcagccaacactaacgccccgcggacagttacataaagaaacggtgtatgggaaaataaaacaatacgtaattaaagaagaaaaggtaagcgggaaatttgatgaagaaacaatttttaaagtatcaaaaccacaatacagtagcgcccttttaaaaagattacatgaaaacaataatgaccctgtaaaagcatttaccggaaaaaatagcttggctaaaaacccgatttatttagatgatcaaaaaacggttcaggtacctgagaaagtaaagctggtttggttggatgatgattttaccattcgtaaagatatttcgcctgacttaaaaatcgataaagttatagacattggtattcagaatatattatataaaaggttagaacaatttggcggaaaagaaaaagaagctttttctaatctggataaagatcctatttggctcaataaagataaaggcattgccataaaacgggtaacaataagtggtgttaaaaatgcagaaccccttcattataaaaaagatcatcatggaaaagaaattttagatgataatggtaaaccaactccggttgattttataagtacaggcaataatcaccatgtggccatatatcgtgatgagaacggcgatctgcaggatgaagttatctcattacataaagtaataactgagcgtgtaaaccaggggctaccagtggttgataaaacatataaccaacatttgggctggcgctttttatttaccatgaagcaaaacgaatattttatatttccatcttataatttcgatccttctgaagtaggtttattagacccggctaacaataaactgataagtccccacctttttagggttcaaaaattttcaaaggtcacttatggcaattcatcggtaagagattatgtattcagacatcattttgaaacatcagttgaagataaaaaagagttgaaagatataacatataagtcaatcaagagcttaccatattttgagaatataataaaggtgaggattaatcatattgggcaaatagtgaaagttggcgagtattaatttacgcccatgttgccgttgtcaccaacaagtaccggcattctaagtgacataaatgcctggccgtgaatcccagcctcaaaaatagtccatgtggttggtgacaacaccaacaacggcgaaagcaacaccaacaaatgcaatatgcctcatagaggctacccctttgtagaaaaaaaaacaagaaaaatattgccccgtcaggtggctacccaattcacgaagggtagccacctgacggggcaagaaataatacgaatttgtttttctacaaaggttttgcccgtaccgggcaagggaatttttgaaaagaaaaaaatgtaattccccgcgttagggatagcagcggataccggccctgcgcctaagtccgcctattggcggagtatgatcccgatctccatcgggacaggtctccaggcccggcccggttctatcaccgggcaacgcccaaaatcattaaaatcaaccatcaattcccccccgctaaaaaatccccttcagcccgtcgataatgctctggaaaaacgtgggtatgctgaggccgctgtggtagttaaaatatacaaaaatgcagaaaatgataacggcgataatgatgaaccgtttaaacatataggccagcaaaaacaggccgcagggtatggctaaaagcagcacccagctaatgtggaaggggcgtagcttatcggcgtttttgtaaacataatacaggatagagtgtgtgccgctgtcgttttggtgcctcacgtataaaaaggtgctgcgctcaatcttatgcctgtaaaaggcggtgcctttgtcgaaatgcagggtgtcctggaaaccgttgacggtaaaactgaaggtgccgtttacgttttcccgcacgttgccggcggtatcggtggcaataatggcgacttcgttttttgcaaaggggttttcttttatcacaaagtggttgatggccacggtaatggtatctgcaaaaacaaacatcgccggggcgcataataaacaaaggacaataaatattttcttcatggtagataaggcctgtaaagccgctataaaattaatgaaataatgtgtttaatgattgaaaaataaggaatagagcgaattaaaggcaacggcctgtgcgattcccctcttgagaggggtggaggggtgtgttaacaggtatataggctaacacacccccgccacaacgcaaccggccgcaccccctctcaagaggggagttgccataacgttcacattatctattcattatgattattgtgcaaatttccaatcactaaacacgttaatgaaatattacttatgcgaacgtttgaaggggagaatagtttttctccgtccccgtcaatcttaattcccggttctttgtttgtataaccgactaaaaaagtatttttacgccaaataaacccgaagatgttttttgtactttcaaagctgcttgtcctatttattttcccgctcacctgggtgttcagccttttaatagctgctgttatcagcaaaaatcaaaaaaagaaacgccggtttttgatactatcagttgtgttattatgggttttttctaacgccttttttgtgaatcaatttgcaaaacgctgggatattaaccctgtccccttaaaaaccaccggggcatacagctgcgccgtagttttaggcggctttaccacggaagacgctaagggcggcggtttttttaacgcaaatgccgacaggtttatacaggggcttaaattggtcagtacgggtaaggttacacatatccttatttcgagcggcaacggcaatttgatacacgataattttaccgaagccgattgggttaaaacccagctgcagcaatttaaaatccccgacagctgcatattgattgaaaacaaaagccggaataccattgaaaatgtggccttttcaaaatcgctgctaaatgcccgccatttgcagcctccctatttactggtcacatcggcatttcacatgaggcgttcgctgggcatttttaaaacaaccgggattgaggtaactccttatccctgtaattttatagcgggaaaggatggtttttctttcgcctccctgctcccggatgcggaatcgttgtttaaatggaatatctatatcagggaagtaatagggacggggattaactggttcaggtagcgttttgtttacgttgactcttggctcttgatttccgccgtctttcaattaaatctgttcattattgccactttatcgtcataactaaagtcgcccgtatttttcattatttgatttgttgcagaatgattactttcgggttcgattttaaagccgtttgttaacagtgattttatttgccggagaatttatttgccggttttagtaaatttataaatgagggtattttttaggttaatcatatttattaccggtttattatttgcaaacagtttattagcacaggaaaataaacctgtaccaattacaaccattcctgttcaaccgcaaacaaataaagttgcagcaaaggataccatcatcagtaataagaaaggtgtaacccaaatagatattacggatgtattggaggaagtgtttaaaattaaacacaaagcgacagtggattcggtaacatcaaagcccacaatttcaattattccggcgcttggatattccctggtttcgcgccttggcatagtattatcaggtaatatggcattcaggaccgggcccaaatcaaggatttcaaccatcgtggccagtaccgcatatacacaaaacaggcaatataccttgcccgtgcaaaccagtatatggagcaaggataatgtttataattatattggtgaatatcgtttttataaatacccgcaaagcacttttggtttgggcagcaactcaaatatcaaaaatgaggacccgatggattattcttattttcagtttaacgaaacggttttgcggcatatcaccgggaatttgtatgccggcttaggctatgtatttgatgatcactggaatgtttcggagaagggtaaccccaacggcactttatctgattatgcagcttatggtaaacttgcacattcaatagcctccggatttacactgaccggctcatacgactcgcgcgacaatggccttaatccctcaaaaggcgggtatggctttgtccaattccgtacaaattttagatttatggggagtacaagcaactggcaatcgctgatcatagatttacggaaatattatcgttttccggaaggatctgacaatgtgatcgccttgtggagttacgactggctggtgctgagcggaaagccggcttatgtcgatctgccgggtaaccagtgggaccccagctccgccaccggccggggttatatacaaggcaggttcagaggagcccaaatggtgtatcttgaaggtgagtatcgttataaaattacgtctgacggtttgataggcggtgtgtttttcataaacctcgaatcattttcggctgggcccggaaccaggctacagggcatacagccgggtttcggccctggcttgcgtataaagctcaataccatatccagaaccaatgtcacccttgattacggctttggccgccaggggtcaaatggcatgtttattgatgtaggcgaagcattttgagattttggttgcttagttttttcagacttagcagacttacgaagtctttaagacttcgtaagtctttatagaacagtcttttaatgatgttctataacatcctttcagtgctcccagagatacatttttcgaactattttatagatcaacttaaaaaattggcggaattgtcaaacgaaaatatttaattattataaaactttccttccgtttatgaaaattatcttaaaaatataataaataggtttgattttatggttcgggtccaggcagggaatccaaataaatcgggctgccttttttactaaaatattaccgtcaattatacacttctttttttaataaaatatactacatttgaaaagatggtttctgtatcctttttgttacagagatttaccccgccaattatttacccgttataaaatattaatgagaagattaatacttatcgttttagcgctaattgtttgttcaggtggtttcgctcaggggctatttactaaaaaagtaaaaaaatattcattgaaagatggtctttcattcggtataataaatagtataacacaagataataaagggtttatgtggttcgccacgggcgatggtttaaatcgttttgatggtacaaattttaaagtattcaaatttgaacctaacaatccctatagtttgccaagtaattatgttcaaacaatatataaggacacccagggcgatatttggatatcatcaagaagagggatttatcaatttgatactaacagagagcgttttacaaagtttaatccaccgggcgttccgttggcctatttaagcaatgtaaacagtatttccggaaataataaagatcagctatggttttcatgtggcggttttggattctcttcctatagtaaaaagagtaaactgtttaaaacttatactaaaaaagaattgcctggtttaacaggtgatttatcggttcttaatgtaattgaagataattacggactattatgggtgggtacacgggatggcggcctcaatgtttttagtacaaaagatgggacagttttaaagaatttgaataatcaattcccgcttaatcaggttcctcagggcagggtcaattgtatttacgaagatcataatcatgatatctggatagctaccagtaagggattagcgctatatcgaagaaaagagaatagttttcatgttttttcaggctcaaattataaattaaggagcaactatttttattcccttctggaggatgaccataaaaatctgcttgttggtcttcaggatggcggtttgtataatataaatcttgaaaaagcagaaaagtcgtcgtataaagacattactatcgatcctgtgaaatccgaagataattttggcatcacagcccgcacaatacaaaccttattccaggaccgcgataagaatatttgggccggaacttatggtgacggtatttatatgctaagtaacgttcccgaaaagttcataaaatttcagaataaattaacagatgcttatggtgttagttttttaagatattacggcatgtgtatggatgatgatggttacttgtggcttggtacagatggtgatggaatatataaaaagaagctgaatagtgagtttgttaaatattatagggcaaacggacaaaacggttcattaaccgataataatattctttgcgcctataaagaccattcaaacaaattgtggttcggctcctattcacatggacttttccggtatgatagaaagactgattcttttacaaatttcattcataaggcaaatgatccggcaagcatcggtttaaatgatgtaagggtgatcctctcagattcaaaaaacaatttatggattgggacaaacggcggcgggttaagtttattacctccgggcagcaatcagtttgttaactataatccgcacaatagtaatattgcatcagactatatccgggcgcttgccgaagataaatatggcaatctgattataggcacgtatgccgcgggcctcaaatattatataaataatcaaaataagtttattgattattttagcagggcccaggccgaaaaacgggaaaatcaactgtttatcaaccaggggaatgataaagacgggattcctcattttaccgaggaagcgaagaagtacggattagccgatgcggggtacagtacccaggccgttttttttgattacgatggcgatggtgatcttgatatgcttttgttaaaccacagccctgttcaattgccggttttggacaaagcaaatatggccgccgctttaaaaaaatcaaactcattaaatggggtcaaattgtacagaaacgataacggcttttttaaagatgtaactgaacaggccgggatcagcagttctgattatacctacgggcttggtgcagctgtcgccgacgttaatggggacggtttgcctgatatttacatatccaatgattataccatacccgattatctgtacattaataatggggacggcacttttaccaataaactgcaatcatctttggggcatacctcacaatcatcaatggggaataatatctcggatataaataacgatggtttacccgatatttttacggctgatatgcttccggaagataatcaccggcaaaagatattgtttgcgccgaataattatgaaaaatttgatttaacgctgcgtgacggattctactaccagtatatgcgtaatatgctgcacataaataatggtaacggaactttcagcgagattggccaactatccggtatctcaaataccgactggagttggtcccctttgtttgctgattatgataacgatggctggaaagatctgtttgtaaccaacggctatgcccgtgattttacaaatatggatttcatgaaatatatgtccgattttttgaatgataaaagattgatgcgtaaggatgtctataatctggtgcaacaaatgccatcctcgcaaatcaaaagttatttttttaaaaataatggcgatttaacctttaccaacaccactgctccatggggcattacccaatcatccaacagcaatggggcggcttatgccgatctggataatgatggcgatttggatttggtagttaacaacgttaaccaacctgcatttatctatcaaaacgaaaccaataaacaattaaacaatcattacctgcaactaaagctggaaggcgccggaaaaaacacacaggggataggggctaaggtttccatttacgtaaaaaataaaatgcagtaccttgaacaaatgctgagttgtggttttcagtcaagcgtatcgccaatattacatttcgggttgggaaaggatacacaggttgattctttatgtatagtgtggccgctgggaaaaatgcaggttataaagaacgttaaagcagatcagctgctaacgcttaatgaaaaagatgctgttaaccgttatcagatacctaaagctgtaaaacctattttcacagaggttcaatcacccgtaataaataaccaggaaaaaaataatatcaacgattttaaacggcagccgctaatggtaaacccgttgtcattttccgggccgtgtatcacaaaaggggacgtaaatggcgatggccttgaagatgtttatgtaggcggaagcaacgggaagcccggtataatatacatccagcaggctgatggtaaattcacaataaaaccagaacctgcttttgaggctgataaaaagagcagcgacgccgatgctgtattttttgatgccaacggcgatggtaagccagatttgtatgtgtgctcggggggctatgataattattctcctgatgatcctttattgcaggacaggctctacctgaatgacggaaacggtaattttacgaaagcaaaaaatgctttacccatcatgcgcagcagtaaaagctgtgtaagagtagccgatattaatgctgacggacacccggacttatttgtaggcgggagggtaatacccggcagataccctgaaacgccgtcaagctatattcttatcaatgatggtaagggccattttacagatcaaaccgaaagttttaaccctcagctaaaacatataggtatggtaaccgatgctgcatgggtagatatgaacggagataaaaagccggatttggttttagtaggagagtggatgccggtaactgttatgataaatactaatggtaaacttataaatagtacaaacgactattttgataaaccaaacagtggctggtggaataaaatccttgtagcggattttaaccacgacggacatcctgatctgattgttggcaatcaggggttaaatacccagtgcaaggccagtgttaaagagccggcagagatgtactataaggattttgatgctaatggcacgattgaccccttcctttgtttttatatccagcataaaagttatccttatgtaacccgtgatgaactcctggaacagatgaatatgatgcggtcacgttttcctgattacaacagttatgctgatgcaacgattacaggtatatttactgctccacaattaaaaggagcaggtcatctgcaggctgataacctggcaaccacctgttttttgagcgatgctaaaggtaaattacatgaatcggcattgccgttacaggtacagttttcgccggtatttaccataaccgctttagattatgaccacgatgggaatcaggacctgcttttatgtggtaatatcaacagggccaggctgcgctttggaaaatatgatgcgaattacggtattttattaaaaggggacggtaaaggccattttcaatatatcccacaggcacagtcaggtttcaagctttggggagatgtaagaagtgtgactgaagtaaaccataccttgttgttcggaattaaccaacagggaataaaagcctataaagaaaactaattatatgaagagattgccgcatgttttgctatttataatcatatcattaacagcaacagttaaaactgaagcgcaatcaaatcttaatacgatgccccattatttttatcccggagcaatatggccggataacaatggtgttcacattaatgcccatggcggagggatattataccggatgggtgtttattattggtttggcgagcataaaattgaaggcgaaaaaggcaattcagcccaggttggtattcattgctattcatccaaagatttatataactggaaagatgaaggaatagctttaaaagtaagtgacgaccccaaaagtgatattgcaaaaggtagcataattgaaaggccaaaagttgtttataataagaaaacccaaaaatatgtaatgtggtttcatcttgaactattgggaaaaggatatgcttctgcattaggcggtatagcaatcagcgataaagtaaatggtccgtacagctatttaaaaagtttcagggcaaatgccggtaaaatgccattctatcccgccgggacggctgaagaagaaaaagtcaattgtgcggatacgctcaataaagacaataagtttttttgccgtgatttttcccgtggacaaatgatacgggatatgacaatttttgcagatagtgatggaaaagcctatcatgttttttcatccgaagaaaataataccttacagatagcggagcttaatgacgattataccggttatacaggcaagtttgtaagggtttacatcggccaccaaactgaggccccggcattgtttaaaagaaatggcaaatactatatgttaggttcaggttgtaccggatgggcgcctaatgcggcccgttggtttaccgctgacaatatatggggcccctggatattccatggaaacccatgccagggacctgaagcacaaataacctttaaggggcaaagcacatttgttttacctattgaaggaaaaaagaattcattcatttttatggctgacaaatgggaaccaaaaaatgctgttgatggcaggtatttatggttgccaattacttttaaaggcgatgatatccagattacctgggttgataaatggaatctaaaagtttttgatcaatgatttttagtggtcccaatcaaactgaaaatcctaatgtacattcccttaaaatttaaaaaagcctgacaatgctgaatatgaaactaaaaaaactgatacttcttacaattatttttttaaatgtcgctaatacatttgctcaaacacatacatttaaactgggtgacgacgcatttctgttagataataagccatttcaaatgatctcgggtgaaatgcattatccaagggtgccacgtgaagcatggcgtc

SEQ ID NO: 2301 - DNA, 21506 bp, synthetic construct
  misc_feature 1..21506: note = Synthetic
  source 1..21506: mol_type = other DNA
tacatctgatcttcaagctgcttgtctataagctcttcagctaccacaggaaagtccgttaaatgcaccgaatcctgttttacgctatcatctactgatattaaatccagaaacaacctgtcagcataaaatggtgctattggagccatcaactttgaaactgtaagcagacattcatacaaagtctgataagccgacagcttatcatcagtcatttcaccaccccagaaacgtttacggtttagacgaacataccagttgctgaggttatcgttcacaaaatcatttattacacgacctgcttttgttggctcataactgtcatagccctgatcaacttcttttaccagtgtatttagcagtgaaataatccaacgatctatctcaggtcgcttctcaacaggtatctgtggatactgatttctgaaatcatcaacattggcataaagcacgaagaatgaataagagttatagagagtcccgaagaattttctgcgagcttcctcaactccttcaacatcaaaccttagattctcccaaggtgcagcattagtaatcatataccaacgcagcggatcagaaccatatttatctattgtagtgaaaggatctactgcattgccgagccttttcgacatcttatttccattcttatccagcacgagaccgtttgaaacaacattcttaaatgctacactaccctttaccattgaagcaattgcatgtaaagtgtaaaaccagccacgcgtctgatccaccccttcagcgataaaatctgcagggaataccttttgaaattcgtcttcagatatatgaggataaaacacctgtgcaaaaggcatagcaccactgtcaaaccaaacatcaataaggtcagtctcacgatacatcggtctcccgttttctgaaaccagcacaatattatcaacatacgggcggtgcagatctattttatcatattccagatccttataatcatccaggtcaagccctttccaaggaagctctgtcattacaccagcatccattgctttttgtatctcttcatacaattctttaaccgaacctatgcacttttcttcctttccatcctcggtgcgccatattggaagtggagtgccccaatagcggctcctgctaaggttccagtcctgcagattttcaagccacttaccaaaacgacctgtacctgtcgattgcggtttccagtttattgtattattaagctcaatcattttatctttggaggcggttgtacgtacaaaccagctatccagcggataatagagcacaggcttatcagttctccagcaatggggataattgtgaaccatcttctctattctgaaagcacggttctgaagtttaagcataactgaaagatccacatccagtgttgcatctttctctgtgagagaatcgttatattcatttttcacatatctgccggcatactcaccgtacaactcagcattcatgttatcctgaacaaactgcgggtcaatcgcttcaagtcggaaatatcttcctgtaaggtcaaccataggacgcatatatccgtcaacatccttaagcataagcccttctacatcattttctttcccaaccttcatgtcatcagcaccaaaagtcggagctatatgtacaataccagttccatcttcagtagtcacgaaatcccctgttactactttaaaagcgttatcagaagccttaacccatggaatcagctgttcgtattgcatacctgcaagatcttcacctttccaaactttgtcaagtatcctataaggcacatctttatcgccctgcttataatcattaagtgataattcgctgttttttgcaggaaaataaacattcacaagattcttagcaagcacaacagttattggttttccagtgtactgattgaaagtctgcaccgctttatactcgatattctttccaacagcaagcagaacatttgaaggcagcgtccagggagtggttgtccaagcaaggaaaaaagcctcaccaaactcttcccattcagtcagcggatcaacaatcttaaactgagctgtacaagtagtatctttcacatcacgataacaaccgggctgattaagctcgtgcgtactcaatcctgttcctgcagcaggagaatatggttgtattgagtaacctttatacaggtaacccttattatataattctttaagaagataccaaagagtctcaatatatcggttgtcataagttatataaggatcgctcatatcaacccagtaacccatttggcgtgtcagatcttcccactctttggtatatttcatcacctcagtgcggcaagcagcattatattcttcaacagttatttttttccctatatcctcttttgtgattcccaatgttttttcaacactaagttccaccgggagaccatgagtgtcccaacctgcttttctgttaaccagaaaacctttcatcgttttatagcgacaaaaaatatctttaatagaacgagcaataacatgatgaataccaggcatcccgtttgcagatgggggaccctcgtaaaacacgaaatcaggctgaccttcacgaatttctaaactccttttgaatatttctttatcatcccactctttcagcatatccttgtttatttctgaaagatctaagtggctgtgttcaggaaactttttactcatcatcaattaattataccctttgaaaaataatgtgcaaaggtaataataaaaaatataaaacccggctcattgattgaaccgggcaatattttcaacttaaataattttatttgtcaggaaagtttttccaaagcgatttttatcctggcaattgcattcttaatattttcatcagatgtagcgtaagagatacgtatgcatccgggagctccgaaagcatcacctccaacacacgccacatgcgcttcttccaaaagatacattgcaatgtcggttgcactattcatgtttttaccattataagacttgccgataaaactcttacattccgggaaaatataaaaagcacccatcggattattcacattcaaccccggaatctcattaagcatttccacaacaagattcctacgcctctcgaaagcagttctcatttcagcaacacaagactgatcacctgtataggcagcaactgcagccttctgtgaaattgatgaaggacccgaagtatactgtccctgcagcatactgcaagcagatgcgatccactgtggagcagcaatccagccaatgcgccagccagtcattgcataacctttcgacaccccattcactacaactaccctatctcgcagtttagtgaattgagcaatcgactcatgtttacctatataatttatatgctcatatatctcatcagcaataataatgacattaggatatctttcgagcacctcagccaaagcctttagttcatctgctgtatatacacttcctgtaggatttgacggagagcacagaataaaagcttttgttttaggcgtgatagcctcttccagctgttgagcagttattttaaagttctgatcaattcccgcgtacacaaatacaggtttaccatcagccagaatcaccatttccgggtagctcacccagtaaggtgcaggtattatcacctcatcatctttatcaattatggagagaatcacgttgcagatagactgcttagcgccacccgatacaacaatttgcgcaggtgaatactcaagatcattctctttttgaagcttttcacaaatagctttcttcaggtccgggaaacctgccaccggtgagtagaaagaaaaattatcatccactgcctgcttggctgcctgttttatatgatcgggagtaaaaaagtcaggttcccccacactcatattaataacatcaattccctgagctttcaattcattacttttttgagccatcgcaaatgtttcagaaggcgataaagctaataatcgggcagacaataaatccataatttgttattttgattaataatttggacaaagataaacaaaaatcatattcacaatcactatttattgaaaaacagtcataaaaaataaggaataggctacaaatagaaaaagccgccttttggggcagcctccatgaaatatataattatgtacaaaaaaattctttaaaaaaataaagcatctgtgatcattgatcactcagcttcctcctgcatcagcatacttacaggcacttcctgctttctgctctttaactggcaaattgaagttcattagcttgcaatacgcaaactagccttcaatgtacggattctgttcaacctgtttgtgcgatatgaaacagacccttttttaatgttttgctccagatattttaactggcccaaaatctcttctcttgttaggtttctgattgtcataattttcctttcttttaaagttatgattcatcggcaaccgtctatttaagaagccattcaatatgtatttgataacctaatgatgattctaaataactcgcttgccattaaaatcaatacaaagatacaataaaaaacatgttatacaacatatttctgatagatttttcaaaagatgtataaatagaatctatcaaaaagtgaaccccaaaccaccacttagtctcaaaccgctccaatcaggtcttggagaaccaatcagctcttcatagccgccaccaaacgagaggtcgtaaccggctgaaagatccaaacttatcatcttgcttatataatacttacctcctatctgaaaaagcagagaataagcattttcgttgtaatcaggttcttccacaacctcttgcaattcaacatcagaaagtactgtgctaatatttagtgttgatataattaaagcaggcgagatctcaccccaaagagaaaatctctctttaaatgcaccttgagtatcctctttttttaaagtataaaaataattcctgtaatatactccctccctgtatccatttgttgtaaaagacatatttatctttcctgagtagtcgccaaccgaaagcttgccgcctgtactgtaaaaaccacttttaatgccaaactcgtgacggttcaacctatatcctaaatttacagagtgcgcaacataagccggaaaatcctctacaatctccataccaaactgtttaaaaggctcatttgatttaacagtctgcacaaaatccatcatatcacccatattatatgcagcatatgaagcatgataatcaagtctgaattgtgcctgcaagctaaacatacatatactgcagacaacaatcaataatagtctcttcatcattttatatagtttgatatattaaagcacccctgatacattaataagaagtcattataagcacccaaaccatagctatgcgtcctgaaactaacaacaggtctcccaatatcggaactgttataaacattcgtaagtctgttattattccagtcggcatcaaaacaaaatattctgcccgtaaacggatccaccgcttcaaattttccattaatataacctgatttcccggatgcagcatctaataccagcactctgtgtgcagtaacagaccaaaacataatctgatcagaatcataaggattaataacacaaaacagcaaatcatcaggattataaaaaggatccagaggaatagttttatacaactcaaatcctgtttcttttatatcataaatattaacctgaaacccggccctgtcggtaacagcaagtcttttcccgtcgtacgacaaatcaatattattatacagattagtcgccatagtctcaataatttcacctgtgattgcattaacaagaatgtgatatgtattaacaccatctgaatcgagtgagctctcaataaaaataaggtcgtcaccaatcagctcaattcgcttataactaccattcgctttaggagtcttaatctctgttggcaccaccgacaaatcatttttgttgtcatacaagtataccctgttgtctctttcaaaaccccagtcataaccaataaacagaagcaacttattgctgtttggcgaaacagaaacagaagtaatattttcaaaatagggggagttgtaactctttattgttttaagtgtagtggcatcaccaaccttaacagtattgcccgaacacccataaatcagcatatcctcaacactgtaactgtttattgccatatccagttctgaaggcggtgcttcatacttataaaatttctctataccacccgacttgtacgatatctctgaagcaaccatattgtcaggtgcggcaataacagtataaaatccactctcttcgggaaataccggtgcctgcagaatagcttcaggagattcataagaggctgatccaacaaccttatcatttctgtcatgcagtataaaatagttacacctgtatctgtttggttcccaggttagatttgtcgagacaagatctttaaactcaatatttatatcatcgcttgtcatcccggtataactcatattataatatatggtcttatcctttatcttttcacctgcgaatttcgttgttatactgtatgacctgtaaccactaacataatcagtatctacaaaataggttgcagtaccatccagaacaactgtcttgttggtgcccctgaaatccttgaacttaatctcataagccgcaacctccaactgttcaagttccggtctgtcccactccagcatgaaataaccatcattggaaataccatctcttaccccaaggctaaaagcattatccacaggaaccagctgaaatgaaaattccccctcatagtattcagcattcatgatatcggcaagactccccgaatcagtcttaagtcgaaaagtaaacttcagagtgtttacaccattcctcaacagctgatttttataaatcattatataatcaccccccgtcatatacttaacctctccgttcaacatgacatcctgactaagaaccctcttaccagagctattcagagtaaagtaaatcttagtatcatcataaatgtaaacaggatcttttggattaacaccagcaagatcaagtcccaccattatatcagcaggcttttcgatatcgcgaaaaaactccttatcactttcaaactcacaagaaaccagtaaaatggcaaataaaaaagctgataatgctcttatcataaatttaattattattgctgattataaaatgaggtgtttgtaggaacaggtgtttgtgtcagaggtatattatgtgtataattagatttgcggaagcggggggattcgaacccccggtacagttacccgtacgacagtttagcaaactgttggtttcagccactcacccacacttccttaatggttattttgctgaaatcggatgcaaatatacatgaatgttttcaacttttcaaagaaaaaaggctttttcaaaccgaatatttatacttttgtcagtttaggtcggtttattataattacaaacttgatggaacagccaaaaggaaagaaaaaaagaactaacatagtcctgtttatcattggcatcttgttgctaatcactatatctgcaggcatatatatctacaatacaatcttcgaaccattcgatctcaccgaaacagtttacatttacatcgatgaggaaaaggaatatgactatgtggtgagtcagctgaaggaaaaagcagaactgccaaacgaaaaaatctttcacctgctagccgacaggatgaactatccaaacaggataaaaacagggcgctatgcaatagttgacggcatgactatgcctgatgtaatacgactgctgcgctcaggtgtgcaggcgcctgtaaatctaaccttcaacaatatacgcaccaaagaaaaccttgcaggccgcttttccgaccagctgatggccgacagtctctctataataaatgtcctaaacgacactgccgtagcagcaagctatggcttcaacaaccaaacctttggtgccatgtttatccccaacacctacgaagtgtactgggatatgagcatcgggaacctgacagacaggatgaaaagagagtatgatgcattctggaatgaacagcgaaaaagcaaagcagagaagcttggctttacacccgtagaagtatctgtactggcgtccatagtagaagaagaggcaacctataccgacgaatacccaattgtggcaggactctacctgaaccgtttaaagaaaggcatgcgcctcgaagcagaccctacggttaagtatgccgttggcgatcccacacttcgcaggatcctgttcaaacaccttgaggtggagtctccatacaacacatacaagaacgacggcctgccacccggaccaatcaggataccatctataaaagggattgatgccgttttgaatcccgcagatcacaaatacctgtttatgtgtgcaaaagatgacctctcgggccgacacaattttgctgtcactcatgccgagcatgccagaaatgcaagagcttaccagagggcgctgaatcagagggggatatattaaaagatctcctgcctccataatttatccagaaaactcaataccggataaacctcaattttattcaataagcgaggttttttatccatggacacaattataagttttgcatcaggaaactcctccgaaaaagctttaagaccttttgtatgatgagactgcacttcctcagtcgatttaatctctatcgctacttccgcattacctaaaattgcatcaacctcataacctgaagaagtgcgccaataagtaacaccttcaagtggtttgtaataacccaagtaggcaataatctcctgtattatgaaatgctcaaaagcatgtccaaattcaggtgaaccgggatgcatattagttctctttagtagaaaattagcaactccaacatcaaaatagtagaactttggtgattttataaccctccgctttacttttctagtaaatgctggaattgtatagcctataagtgtttcttccaaaatagaaaaatactctttcacggtaggcgaacttacgccacattcagatgcaatattgttatagtttacaatttcaccattgcttaaagctgcaatctccataaatcttgaaaatgtacttaaattacgggtgagcgcttcagcctttatctcttcctgcaagtaatcgccaacataagcatgcagtctatttgtagcatcagccacaagataatgacgaggcaacataccattattacacgccctaactatatcgaaatccggtatttcactactcacaaaaggataaagatatttccttactgccctgccacccaataaatttgctccacttcgacgcattttacgagcgcttgaaccactcaaaacaaaacggagattacgattagttatcagccaatgaacttcatcaagtaatgaaggtattttctgaatttcatcaataatcaccagttcgttttccggaagcaagtttagctcttcacgcagaagagacgggcgacgattatatctctcaaactcatccgactttagtaaatccacatagaaggtatcgggaaaaatcattttaagtaaagtacttttccctgtctgtctggctccccacaggaaaactgaatcattttctacatcactgagattaatttttcttgataacattgtgacaactgatattagcacacattatttacacacaaatatataacaattatatgtaaatataaagtatcactttattttcacatgtatttctaaagcacgactttacttttgcatgaatcaactgataggttcacaataaaaaagcgacccaaaggccgctttaaatgttttcacaacggaataatccttattgtgaattgctttcaaatgcaaatataatgaatagtttcacataaactattattttagttaaatttttatatctttgggcttcaacatactttaaatgtaaaacacgattaaaatgagtaaaacaattttaggtctagaccttggtactaattcgataggatgggcattggtagaagaagctgaaaacattgatgaatcttcaaaaataataaaattgggagtaagagtaaatcctctaacagttgatgaacaaactaactttgaaagaggaaaacctatttcaactaacgctgatagaacattaaaaagaggagctcgtcggaatttacaacgatataaatcaagacgtgaaaacttgattgaaatattagttaaaaatggaataatcacaaaaaatacgccattaactgaaataggcaaaaacactactcatcagacattaatgctgagagctaaagcagcacataataaagttgatttagtagattttgcaaaggtcctcttaactataaataaaaaaagaggctataaaagcagcaggaaatcaaaaagtagcgatgaaggagtggctattgatggaatgacagtagcaaaaattctctatgagaagaaccttacaccaggacaatacgtatatgaaactttaaatggagggaataaatttatacctgacttttatagatccgatctacgcatagagataagcaagatttgggataaacaaacagaattctatccaactcagcttacaaatgaccttttccatgctatagaagataggaacaaaggacaaacttataaaatattagaagtaccctggaacttaaaaggactaaaacaatccggtaaaagagatgaacaaaaacttgaaaggtataaatggagacaacaggcattatcagaaaaaatagaacttgaaaaacttgtaattgttttacaggaaatcaatggcgaactcaataattcaagtggatatcttggtgctatatccgatagaagtaagcgtttatactttaacaaaataactgttggagaacacctttataaccaaatagaaaggaaccctcacacatcactaaaaaaccaagtgttctaccgtcaagattacttagatgaatttgaacaggtatgggaaacacaagctaaacactatcctgaaatcttaaccattgaactaaaagaagaaattagagatgtagtaatattctaccaacgtaaactaaaatctcaaaagggacttatcagcttctgccagttcgaaagtaaacaagaggagtacattgacaaaacaaccggaaaaacaaaattcaggacgactggtcaaagggtagcacctaaatcctcccctgtatttcaggagtttaaaatttggcaaaacttaaataatctcacctttgaaaacgaaaaagataatcaaataatagaagtacgcaatctggaagataatatccgtgaagaaatctttaacgagttaaattttaaaggtagcttagcacctaaaaatgttctaaaagtaatttctaaacatatcttcataaataaagcatctgattggacttgtaatattgaaaaaattgaaggtaatactacaaataaagcccttctggaagtatatcaaaaaattgcagaagccgaaggatatggatttgactgggacaaaaaatctgcaaaagatattaatgaagaaatagaagcaatattcggagagataggagttaataaagagatcttaaaatttgactcaaacagggatgattttgataagcaaccctcgtaccaattatggcacttattatactcagcagaagatggaggtaaagtaaacgaagaagaccgcttattatatggaaacaatgacacaaagctacgtaaaacactgcataccaaatatggatttaagcctgaatatgcaacaatgctttcaaacattacaatgcaaccagactatggcaatctatcaagtagagcaatgcgcaaaatcaccccatatttgcaagcaggacatccttatgccaaaagcagtgacaacaaagacgaagcaggtgcatgcgatttagcaggctataaccactccaaaagtgaaactgtcgaagatttgaagaataagatattaaaagataagcttgaaatattgccaaaaaacagtctcaggaatccggtggttgagaaaattctcaatcaaatggtaaacttagtaaatcaagtcatcgatgaattcggaaaaccagacgaagtaagaattgagcttgctcgagaactaaaaaaaaccgcagacgaacgcgagagaatgagtaaagacattgctgaagctactaagcgcaatgaagagatcaaaaacctaataattaaagaatttggaatccccaaccctacaaaaggcgatatagtcagatttagattatgggatgagttaagttcaagaggtcataaaaccatcttcactgaattatatattcctaaagaaaaactattttcaaaagacattgaaatagaacatatcattccgcaagcacttctgtttgatgactcctattcaaataaaactttggcatatcactctgaaaatttacaaaaacgaaatcgaactgcttacgactttattaaccaggactataaccaatacacgacagaattcgaaaatagagttgatgtatggtataataataaatccatctcaaaagccaaaagaaataagctactaatgacctatgcagatattcctgatggctttatagagcgcgacctgaggaatacgcaatacattgcaaaaaaagcaagagaaatgctattggaagcattcaaaacagttatcccgacaacaggaagcataacagaaaaattgcgtgaagactgggggttaataaacctaatgaaagaattaaatctgccaaaatacaaagcattaggactaactgaaacagaagaacgattcgatattggttctgagaaaataaaaaaagtggaagttataaaagactggaccaaacgaaacgatcaccggcatcatgctgtagatgcactgactgttgcttttaccactcacaaccacattcagtatattaataacttaaatgccagaagaaacactaatcacaagaaacataacataatacatgccatagaaaatgttataacagaaaggattaatggcaaacctatatttaaggagccaattcctaacatgagagatgttgccagaaaagagattgagtcaatccttgtttcatttaaggctaaaaacaaagtaacaacaaataatatcaacgaaacaaaacttgccggaaaacaacgatacaaaaaaacattacaaacaacacctcgcgggcaactccacaaagaaactgtttacggaaaatctctgcgtccattagacaaacctgttaaactcaataacaagtttaatatggatgtagctaattttataattaataaaaaagaacgtgacgcagttatcttgcatctttcaaaatatggaaataattgtgaagtcgcttttgcatcaaaaacgttgaagaacaatcctattttattaaacggagaaactcttaaagaagtgagatgctttgaggaaatatttactattcgcaaacccatagcacctgatttaaaacttgataaagttatcgatgaaggcgtcaggaatgtattagaggaaagactaaatgaatttaatagtaatcctaaagaagctttctctaatttagaagagaatcctatttggttgaacaaggaaaaagggatatcgataaaaaatgtcacaataacaggtgtgaacaatgctacacctctccattacaaaaaggaccatcatggaaaagaggtcgtgaattgcaaaggtgagaagtctcattgtgactttgtgcaaacaagaaataatcatcatgtagcaatatataaagacaatgatggaaattttcaagaatcagtaatctctttttatgaagcggttgaacgagctaaccaaggactgccgataattgataaattatttaataatcatctaggctgggaattcctgtttaccatgaagcagaatgaaatgtttatttttccagcagatgattttgaaccaagtgaaatagaccttttaaatcctgaaaatgcgggtgtaattagtaaaaacctatttagagtccaaaaaatcagtacaaattattacaccttcagacatcatcttgaaacaacagtaactaatgatctgaattttacattcaaaagaatacaaacaccaaatagtcttaaaggaattattaaagttcgaattaatcatataggaaaaattgtacatattggtgaattttaatcttaaaacctatgatcaaaaaaactctatactttggtaatcccacctatttaagtttaagcaacaaacaattggtagtaaaaatacccgaagtagagaaaaatgagaatcttactcataagttaaaagaacaatcaaaaagaacaattccaattgaggatattggcgtcataattcttgacaataatcgcattactataactcaaggtgttgttgaagcattattagaaaataattctgcgctaattacctgtgatagttctagaatgccaattgggctcatgcttccactctcaggaaataaaacacaaaccgaacgatttcgtgatcagataaatgcttcacaacctttaaaaaaacagctttggcaacaaacagttcaggctaaaatcaaaaaccaggcctatgttttatcaaataaaaacaacacaattattgataatatgctggtatgggcttcagatgtgaaaagtggcgactcagacaattttgaggcacgtgctgcagtctattattgggcaaatttatttaatgaaattgaaggattttccagaaatcgtgaaggtgttccaccaaacaatttacttaattacggatacgcaatattaagagctgtggttgcaagatcattagtggcaagtggattattaccaacacttggaattcatcatcgcaacaaatacaatgcatactgtttagccgatgacattatggagccttatcgtccatttgtggataagttagtttgtaatttagtcacttctgaaactaacattgatgaactttctcaagaaataaaattcaagatcttaaatattccagtacttgatgtgataatggacggacagagaagtccattaatggttgctgtaggtcaaactacagcgtcactttataaatgttttgcgggtaaaataagaaaaataaaatacccatcttttgaatagttattaatgaatcgttttagtgaatatagagttatgtgggtcatggtattttttgatttgcctaccgaaactaaaaaggatataaaaaactattctatattccgcaagaaacttattcaagatggatttactatgtttcagttttcaatctatcttcgccattgtgctagtagagaaaatgcagaggtacatatcaaacgagtaaaaagttttttaccacctactggacaagttggtatactatgtgtaactgacaaacaattcggcatgatggagctgttcattggaaaaaaagaaacagaagttcaaacaccttatcaacaactggaattattctgattaaaatattatcaatttatagatagaaataaaatcctgtcagttgacaggattttattcttttaaaacaacaacaaattttatttgtaaatttaaccccaactaactgataatctagggcattacacacatccagttgttgttggtatcaaagatactgaattctgaaagcaattcacaactatctcaagatagatttggtcgtcttcagtgttgttgttggtatcaaagatactgaattctgaaagcaattcacaactaataatcacaataaagctgataagtcaacgttgttgttggtatcaaagatactgaattctgaaagcaattcacaacagatgtttcgatagtattactctatcctgcgttgttgttggtatcaaagatactgaattctgaaagcaattcacaacaagttagtgctgcatggaatttaataatttgttgttgttggtatcaaagatactgaattctgaaagcaattcacaacaatgaggcagatatagttattgctcataatgttgttgttggtatcaaagatactgaattctgaaagcaattcacaacctgatactaaagggaaaatagacccgaatggttgttgttggtatcaaagatactgaattctgaaagcaattcacaactcgcataatatgtatgtttttactgcttacgttgttgttggtatcaaagatactgaattctgaaagcaattcacaaccaaggttgattttaatgtctgaagctctgggttgttgttggtatcaaagatactgaattctgaaagcaattcacaacagtactcctgaagtcgggtatgtgccaatagttgttgttggtatcaaagatactgaattctgaaagcaattcacaactgtttaccctttaaaggttgagggggagatgttgttgttggtatcaaagatactgaattctgaaagcaattcacaacgcttttgcctgtgcatccgcagctgttgcagttgttgttggtatcaaagatactgaattctgaaagcaattcacaacccttaatcccaagtgattctttaactgcatgttgttgttggtatcaaagatactgaattctgaaagcaattcacaacggagcattctatctccaggtaactctgtatgttgttgttggtatcaaagatactgaattctgaaagcaattcacaacttaaaagctttctcaacttccggaaacccggttgttgttggtatcaaagatactgaattctgaaagcaattcacaacggggcaatatgatcaaaacccaatcattggttgttgttggtatcaaagatactgaattctgaaagcaattcacaacctacaaaggttttgttttatgcttttgcgcgttgttgttggtatcaaagatactgaattctgaaagcaattcacaacacgacctttctttgcgtaaagttcaaattcgttgttgttggtatcaaagatactgaattctgaaagcaattcacaacttatccgacatacaggacactaacccaggagttgttgttggtatcaaagatactgaattctgaaagcaattcacaacacgtaaataattgttatatttgtgcctgaagttgttgttggtatcaaagatactgaattctgaaagcaattcacaacatcaactctgagaagagtgtttactggaggttgttgttggtatcaaagatactgaattctgaaagcaattcacaactgcgatagggacattaataccccttaatgagttgttgttggtatcaaagatactgaattctgaaagcaattcacaactggagaatcaacatcgatgccattatacttgttgttgttggtatcaaagatactgaattctgaaagcaattcacaaccaatcaacttgatcgttattcattaaagccgttgttgttggtatcaaagatactgaattctgaaagcaattcacaactataaaagtggagctaatgccattatttgggttgttgttggtatcaaagatactgaattctgaaagcaattcacaacaaccaaatagtaggtaatccacttcatccggttgttgttggtatcaaagatactgaattctgaaagcaattcacaactatattttagcggtaccatttcctaattttgttgttgttggtatcaaagatactgaattctgaaagcaattcacaactaataaaacgttaacatacattaacgccagttgttgttggtatcaaagatactgaattctgaaagcaattcacaacattgttccgattttatttcttagcggttgggttgttgttggtatcaaagatactgaattctgaaagcaattcacaacctgttaacatcttgtatgtttaaccagtccgttgttgttggtatcaaagatactgaattctgaaagcaattcacaacgcctcacctgaactcataagcaggtatatagttgttgttggtatcaaagatactgaattctgaaagcaattcacaacatgaaagtaaaagtaattctcagcagattagttgttgttggtatcaaagatactgaattctgaaagcaattcacaactatttcaatgtagacttggtcttcttgaatgttgttgttggtatcaaagatactgaattctgaaagcaattcacaacgtgctgagtgacacctcactcaaaaacaacgttgttgttggtatcaaagatactgaattctgaaagcaattcacaactgaaccatctaagtaatgattaagaagctgttgttgttggtatcaaagatactgaattctgaaagcaattcacaacagtagtcaatcctttacgtaaacccttcacgttgttgttggtatcaaagatactgaattctgaaagcaattcacaacagaatagtaagcctccacctctgccacttggttgttgttggtatcaaagatactgaattctgaaagcaattcacaacaagtgtttcgattattgtttttccgaactggttgttgttggtatcaaagatactgaattctgaaagcaattcacaactaattgcaggtttttaataaaggctccgacgttgttgttggtatcaaagatactgaattctgaaagcaattcacaactgcgatgtcaactatattatttgtgcctgtgttgttgttggtatcaaagatactgaattctgaaagcaattcacaacttcctcgattccagccaattttgctgtatcgttgttgttggtatcaaagatactgaattctgaaagcaattcacaacagaacgaatataacacaccagaaatgcaaagttgttgttggtatcaaagatactgaattctgaaagcaattcacaacaatcccttatattttaaagtaaaaatatatgttgttgttggtatcaaagatactgaattctgaaagcaattcacaactcaggctatgcgaatgtttataacattgaagttgttgttggtatcaaagatactgaattctgaaagcaattcacaacaatatattaaaacaagtagacaaatatatggttgttgttggtatcaaagatactgaattctgaaagcaattcacaaccaaacggcgaatattcagaaatagtaaaaagttgttgttggtatcaaagatactgaattctgaaagcaattcacaacctattgattacataaggtcatcaaaaaaagttgttgttggtatcaaagatactgaattctgaaagcaattcacaacttggctctgactattataaaaacgctacaagttgttgttggtatcaaagatactgaattctgaaagcaattcacaaccaatacatcatccacgtagcttggtagttggttgttgttggtatcaaagatactgaattctgaaagcaattcacaactgcgcccttgaggtaatgattgagaagcttgttgttgttggtatcaaagatactgaattctgaaagcaattcacaactaaatgtgtatatattaattactttttagagttgttgttggtatcaaagatactgaattctgaaagcaattcacaacacaatccaaaatgcttttttagaaaatccggttgttgttggtatcaaagatactgaattctgaaagcaattcacaactgaacgccttgcaagctcatcccaaacgtgttgttgttggtatcaaagatactgaattctgaaagcaattcacaactcaataatctgggaataaattccgaatgggttgttgttgttggtatcaaagatactgaattctgaaagcaattcacaacaggtggagagaagtatatcttagagcattggttgttgttggtatcaaagatactgaattctgaaagcaattcacaactcacaatataaagggcttgcaaacggattagttgttgttggtatcaaagatactgaattctgaaagcaattcacaacaaaagataaactttacagtgaacgagaacggttgttgttggtatcaaagatactgaattctgaaagcaattcacaactgccaggaagtcgtaccaggtgacagttttgttgttgttggtatcaaagatactgaattctgaaagcaattcacaaccaatgtgcccagcctgtcacttgccgtcatgttgttgttggtatcaaagatactgaattctgaaagcaattcacaacacacttacttttgctaccccattttcagcagttgttgttggtatcaaagatactgaattctgaaagcaattcacaacggtagatgcgaactgtataatgcagactggttgttgttggtatcaaagatactgaattctgaaagcaattcacaacttagcgatgctagagcttgggagggatagggttgttgttggtatcaaagatactgaattctgaaagcaattcacaacacaatgcaatttctaaacccagataggcgggttgttgttggtatcaaagatactgaattctgaaagcaattcacaacaagtaactctcactattatactcttctatgttgttgttggtatcaaagatactgaattctgaaagcaattcacaactctgttattacttgttttggtttacaagaagttgttgttggtatcaaagatactgaattctgaaagcaattcacaactttcattaacaaacaatatacttcagcccgttgttgttggtatcaaagatactgaattctgaaagcaattcacaacgatgttcctgacttagggtttatggaatatgttgttgttggtatcaaagatactgaattctgaaagcaattcacaaccaatacatcatccacgtagcttggtagttggttgttgttggtatcaaagatactgaattctgaaagcaattcacaactgcgcccttgaggtaatgattgagaagcttgttgttgttggtatcaaagatactgaattctgaaagcaattcacaacctattcgggttttacttttaattaacctttgttgttgttggtatcaaagatactgaattctgaaagcaattcacaacttggctcagactattataaaaatgctacaagttgttgttggtatcaaagatactgaattctgaaagcaattcacaacatatgatgtcaactcatccattaccagcaagttgttgttggtatcaaagatactgaattctgaaagcaattcacaacagtgtggtctattcttttttcaccccgacgttgttgttggtatcaaagatactgaattctgaaagcaattcacaacttatcgatggcagttagcgttagccacgacgttgttgttggtatcaaagatactgaattctgaaagcaattcacaacttacccctttgcgatacatataattccatagttgttgttggtatcaaagatactgaattctgaaagcaattcacaacacattatcctccacttcgcaaacccgatcgttgttgttggtatcaaagatactgaattctgaaagcaattcacaacatcttcgagcgctgagccagttgcttagctgttgttgttggtatcaaagatactgaattctgaaagcaattcacaacacct

SEQ ID NO: 2302 - DNA, 21491 bp, synthetic construct
  misc_feature 1..21491: note = Synthetic
  source 1..21491: mol_type = other DNA
tatttgttttgttccataattctaaatgggtttttatagttaataattattttgtcaattttgggttattcttatgacgctcgctatcgcgctgcgttttcttctccagattggcattgaaagcctcggtgagatccacgcccgtttgattggcaatgcacatcagcacccacagcacatcggcgagttcatcggcgagattgtggtcttcatcgctcggtttgcacgactggtcgccatacttgcgagccatcacacgcgccacctctcccacttcctcggtgagaatagccatattagtgagctcgctgaaatagcgcacgccgtaggtttttatccacttgtcaaccctctcttgggcttcactgattgtcataacggcaaatttactcttttaatttggaatctacaataatcgtcaccggtccgtcgttgattaactccactttcatatcagcgccgaagacacctttttttaccgttttaccggtgattttctccaattcctggcagaaaccatcatagagtggcactgccacctcatggcctgcagcgtggatatatgatgggcgattgcccttcttggtggatgcgttgagcgtgaattggctcacggcaagtatctcgccgtctacatccatcacactacggttcatcacgccgttttcatcgtcgaaaatgcgcatggcggcggcttttgcagcgagccattgcatatcggcgagttcgtcgccctcgcgcacgcccaccaatatcattaagccttgtcttatctcgctaacacgctcattatcaatcgttactgatgctctctgcacccgttgaatcactattctcattgtttatttctgtagttatcttgttgctattcaaaacattaaatactatctctgccttcttgcgccctatcacggcagccacatcgtcgatgctcgcttcgcccacccgcctcatgctcttgaagtgcttaatcagcgcctcgtgggtcttcgggccaatgcccttcactccatcaaacacggtgctgatctgaccacggctacggcgattgcggtgatgcgtgatgccgaagcggtgtgcctcgtcgcgcagatgctgcaccactcgcaacgactcgctgtttttatcgatgtagagcggaatgctgtcgccagggaaataaatttcctccagtcgcttggcgatgcccaccagcgccaccttgccacgtatgcccatttcatcgaatgcttccacggcggcgctcagctgtcccttgccaccgtctaccaccaccagttgcggcagttcttcgccctcctccatcagcctggtgtagcgtcgcgtaagcacctccttcatcgaggcaaaatcatcggggccaaccaccgtcttgatgttgaaatgacgatagtctcttttcgacggtttggcgttgcgaaacaccacgcacgatgccacgggatttgtgccttgaatattggagttgtcgaaacattccacatggcgaggcaactctttcaaacggaaatctcgctgcatggtgagcaatgtgcgcatcacacgctggtcgggattgagcttctccattcgcttgagtttttccatcttgtattgcttcgcattctggagcgagaggtcgagcaactttttgcggtcgccgcgctgaggaacgaagaaattcacgttctcaaattcagcatctggaatcaccgacacaagcactacgcgcaactgcaggtcgaaccgctcgcgcaattcgtcgatagcaatcgacatcacctcctcgtcgggttcatcgaggcgtgtcttatattccagcgtgagggtcttcaccaccgatccgttgcgaacgtgcataaagttgacatacgccgagtcgtcgtcgcgcagcaacgagaacacatccacatcgtgcagttgctggttcaccacctcgctcttggcgcgatatttctcgatgagcagatacttctccttcaactgctgtgcttcctcaaatcgcaattctccggcaaggcgggtcatttccgacatcagatggttgagcaattcgcacgtgtcgccattgaggattttcttgattccatcgatatattcgccatatttctctacgctcaccagtccgcgacaacacccctcacaattgtggatgtggtattgcagacacagtggcgtggtgccacgcgcaatggtgttgctatcgatattatgtcggcaggtgcgtatgggataaatcttgcgtatcacgtcgagcacggcccgagccatattggagtgagcatagggaccaaacaatttcgccccccgctctggcttatttcgggtaataaatacccgtggatacgactcatgggttacgcatatccacggataagatttatcgtccttcagcagcacgttgtagtacggctgatattctttgatcatactgttctcgagatgaagcgcgtcttcctcggtgcgcaccacggtatactgcatatcgtggatgtgacgcacaagcatattggtgcgagccaccgtgtgaacacggttgaaataactgctcaccctgcgcttgaggttttttgccttacccacatatatcaccaccccatccttgttgtagtagcgatacacgcccggacattcggggagcaaactaatcttcagtttcagttcatcgcttggtgtcatagcatacgcgcacttcttctcagccaacagcgggcattaatacactatcattgcgtttactggcacgtcggcagggaacaacttgcgaccgccaagtgccgaaagttctacgatgaaatcgatataaatcttctttgggttcatcgatttcaccaattcatacgcagcgagcatagtgccgccagtagccaagaggtcgtcgtgtatcaccaccacatcgtcgggagtgatagcgtcgcggtgtatctcaatggtgtctgttccatactccttttcgtaagtcttgctgatagtgtcggctggcaatttgcctggcttgcgcaatggcacgaatccagcgcccaactcgtgtgcgaggattgaaccaccgatgaatccgcgagcctcgatgcccacaacctttgtgacgccaaggtttgcgtatttttcttcgatatattcggcgattatcgcaataccttctggatttttgaatgcagtggtgaggtcacgaaacataataccctttgttgggaaatcaggaatcgtacgaataaggttttttactttctcaattttttcggttttcattatttgattgtttatgttagtgtttcacgtgaaacaattttggtttatcttcctaataataagagcaaaatattgatgtcgctcggcgaaataccggggatgcgcgaagcttgtgccacggtgtcgggatcaatgcgttccaacttctgacgagcctcggtgctcaacgcctttatctcggagtaaactatcttgccgcgaagcttcatgctctcaagacgctgtatcttgtcggcgatgattcgttcgcgctcgatatagccttgatacttgatcagaatctctgcagcctccacaatttcctcgcgacgctcctgctctatctgagcaatctcgtcggcgagcggttgcaccattgtggcaagtgttgcaatcgacaattgcggacgaagaataagatcgtaaagctttgtgccctgcttcagggttggcaacccagccttctccaactctggatttattatgctcgcctttatcgagaaatacttggagaattccacaagacgattgatttgattgcgcttgctcaccatcagatcgtagcgacgctgtgtggcaagaccgagacgataggagcgctcagtgaggcgcatatcggcatcatcttggcgcagcaagatgcgatattcggcacgcgaggtaaacatacgatatggctcatcaacgccctttgtaaccaaatcatcgatcaatactccaatatatgcttcgtcgcgaccaagaacaaagtcctcgcctcccgccacgcgctgatgcgcattgatgccggctatcagtccctggcctgcggcttcttcatatcctgtggtgccattcacctgacccgcaaagaacagattgcgcacgcgcttggtttcgagcgtatgcttcagctgtgttgggtcgaagaaatcatactcgatggcatagcctgggcgatatatctgcagattcttaaacgcaggtatcttgctcaatgcctcaaactgtatgcgccacggcaacgacgatgagaatccgttgagatacatctcctgtgtattctccccttctggctcgatgaacaactgatgctcggttttatcggcgaatgtaacgatttttgtctcgatacttgggcagtaacgcggaccgattgatgtgatttgaccattgaacaacggcgattctggcaaacccttgcgaagcacatcatgcacctcctcgttggtgtaaacgatatagcacggacgctgcttgagcgtgcgatgcacttctggtaaatacgagaacttatgataatcgttgtcgccgtcttgtatcttagtgagcgaatagtcgatggtgcgtgcatctagtcgcactggagtgccggtcttcatacggtcggtagtgaagcccatttggcgcaattgctcggtgattccatggctggctggctcagaaatgcgtccgccctgcatctgcacggggccgatatgcattagtccatttaggaaggtgcccgcagtgagaaccaccgctccagcacgaaattccacacccaccgcggtgcgcacgccacacaccttgtcgccatcaaacagcaactctaccacggcgtcttgccacatgtagaggttcggcgtattttccaccacatggtgccattcttccataaagcgcatgcggtcggcttgcgagcgaggactccacatagcagggcccttgctacggttgagcatacggaattgtattgacgaacggtcggtgacaatacccatctgtccgcccaaggcatctatttcacgcacaatttgccctttggctatacctcccacagcgggattgcagctcatctgggcaatcttattcatatccatagtgatcagcagcgtagccgaaccaagattggcggctgcgcaagcggcttcacatccggcgtgacccgcgccgattactatcacatcatattcaaatttcataccttaaaacacgttttcgggcagcaaggcgagggcagcattttcgtgagcctccatgatttctcgttcgcctggtcccttatcgttaataccacatagatgaagcacgccgtgtatcacaacacgcataaactcctcattataagcacgttgaaataattccgcattactgcgaacagtgtcgagcgatatgaatatatcgccgctgatgcgcttatgcgaactataatcaaacgtgattacgtcggtaaaatagtcgtgctgaaggaattggcgatttacttcaagaatcttttcatcgctgcaaaatatatatgtgagcggacccacaaccctattatggttgcgtgctacttgctcaatccactcattcacagccgattgattaaattctggcatctcaatttgctgtgccaaataagttatttctgtcatatccacaaagatagcggtttttaacgaattatttctatttataaaaaagagaaattgccgataatcacaaaattatcgacaattactaaatatctttatcgcaaacctaccccctcggcttaaccgaagaagaagtaagccacaaaaattgctgcaatactgccaagcacgtcggcaaagagtgcgaatggcacggcatagcgtgttttcttcactcccacactgccgaaatacacggcaagaatgtagaatgtggtgtcggtggagccttgcagacacgatgccacacgacccacaaacgagtcggcgccgaacgtattcatcgcatccaccatcattccgcgcgatccgcttccactcaatggcttcatcaatgccgttggcaacgagcccacccattcggtgtcgaatcccatcgctcctacggcttgggtaatccaatctacgagcaccgacatggcgccagatgcgcgaaaacacccgattgccacgaggattgccaccaaatatgggataatcatcaccgccgtcttaaagccgtctttggcgccttctataaaggcgtcatacacgttgatgcgcttaatcacgccactggcaagaaacgccacaatcaccgtcaacagcaggaaattggcgaagaagctagaatacttctgaatatcctcttgcgagagttgcgcgaaaaacgtcactaccccaacgataaacgccagcatacccagaccaaacgccagcagcaccttgtcaatcttgatgtgctgcttgatgcaaagggcaagcacgcctgccagggtggctatggtggtggctatgagaataggcacgaacacatcggtgggattggcagcaccgcactgggcgcgatacatcatcactccgattggtatcaagcacaagcccgacgaattgagtatcaaaaacatcaacatcgcatcggtggcggtgtctttcttcgaattgatcgactgtaattcctgcatagctttcaatccgagcggagtggcggcattgtcaaggccaagcatgttggctgagacattcataaatatcgcaccgagcgccggatgattttttggcaccgacgggaagaggcgcgaaaagagcggactgatcattctgccgaagaacgagatgatgccaccgcgttcgcctattttcatcagacccatccacaacgaaaggatgccagtgaggccaatggaaatctcgaatgcctgagctgacgaattgaatgccgcattcatgatgtcgctccatatcgagagattgccattcaccatcgtgtcgatgagcgcaaccgcaaaagtgataaagaagaaagctacccaaatataatttaataccatatagtaaatttttctataatctctatttttctcaaaaaccgagaatacacgttaaatatgcaaatttactcatttttccacttttttgcggtgattttcagacaaaaaaccatttcgggcattttcgcaatttttctgaagtttttccaaaacacgcatttttcaccccaaatcacactatcacagcgcattacaccatttttaaccctctgagaatacgatatttcgtcaccactcaataaattggtgggattttttggttaaatcggaggcgaattttcgctcaatacttgagcatcagcgtcaatcgtttgttttcacgtggaacattgcaatccgttggtcgcgacctggaattatttcgacgacctttggatgagcgaaaaattttccgcgacgatggttgacacgatacacagtttctttcgtaactttgcatacgataaacaaaactatggaacaaaattctaaagacgccctactctctctgattcgcgacggcaaaccgatgacgctgcgccaacaactcacgctgactgccaaactgagtgcgcccgccatacttgcccaactctcgtcgtttcttatgcaatacatcgatgcctcgatgctcggacgcctcggcgccaacgaagccgcatcggtgggattggtgtctaccaccatctggctctttggcggattgagtttcgccttcatcaccggcttctcggtgcaggtggcacaccgcatcggcgccaacgacaacgtgggcgctcgccaagtgcttcgccaagccatcaccactgccgccatcttcgctgtggcgctttccgccgtgggcatggccatcagtttccatctgcctcaatggctcggcggcgatagcaccatctgccgcgattcgtcgctctacttttttgtttacgctgccacctatcctttcgtacagatattctacctatccagcagcatgctgcgatgcagtggcaacatgaagataccgagcaccatgagcatattcatggacgtgctcgacatcatatttaacttcatactcattttccctacccaccacttcaccatcggcggcttctcgttcacgctgcccggcgccggactgggcgtgctcggagcagccctcggcacatccatagcctttgtcatcacgggcgcaataatgatgtggtatctgcttcgccactcgcgcgaactgagcatcatcggcgaggagggctcgttccgacccactgcttccatcctgcgcaaggctttcaagataagcacacctatgggtatggagcgcacagtgatgtgtggtgcgcagattgccaccactgccatcgtggcgccgttgggaccgatttccatcgcagccaactcgtttggcatcaccgccgagagcctatgctatatgccgggctacggcatatcggacgctgccaccacactcgtgggacagagcatcggcgctcgtcgcaacgacctcacccgacgcttcgccgccctatcgctactgctgggtatgaccatcatgacgctatccggagcagtgatgtatattgccgctccgctgatgatgcagaccatgactcctaatgccgaaatcattgccctcggcagcgagattctgcgcatcgaggcgtttgccgaaccgatgtttgcggccgcgatagtgtgctacggcatctttgttggcgcaggcgacaccctcgtgccttgcatcatgaatttcagcagcatctggctggtgcgcctcactctggcgctcgccttggcaccaagcatgggcctcaaaggcgtgtgggtggcaatgtgcatcgaactctgcttccgcggcatgatattcctggcacgcctgaaatggggcaattggcacacagcaaaatcaaagatctaaccacctatttccacatctgtttttcttcccccattctgtaatcagggcttgacaaaatctgcgcttctaaaattccgaaatccattcaagcatatacgaccgaattgggttaaacctccgcccgctttttcagtcaaaatacctacagaacaataaattcataaaactatgaaaacaaaccacatcatcgaagcagcattgcttgccctgggcatagtgatactgggcgtgtgcatcaaatggggcgttgacgacttcgtaaacaaagaccgccgcgtgaccgtgaaaggactcgccgaaatggaagtgcctgccgacaaagtgacatggcctatcgtatctaaagagattggcaacgacctgccaagcctctacactaagattcgcaccactaacgccgctatcatcgcctacctcaaagccggcggactaaccgacgacgagattagcgtgaacgcgcctgtagttatcgacctcaacgccgagcgatactcatcaaaccagtcgaactatcgctacaacatcacatcagtgatcaccgttacgtcgggcaaggttgataaagtgcgctcgctgctctctcgacagggcgaactgctcaaagacggcatcgccatcgtaagcggcgactacgaaaaccctatccgctacgactacacttcgctcaatagcatcaagggcaaaatgatggacgaagcaatagcaaacgccagcacaacagccaagcagtttgccgacgtgagccaaagccgactcggacgcattgagaacgcctcgcaaggccaaatctccatcgaagaccgcgacgccaactcaccacacatcaagcgcgtgcgcgtggtcaccaccatcacctacaccctcaactaacgagcccctaaaacaccgaaacagcaatccacacatagccccagacgccccagcgcccggggcttctcgcatcccccctcacacacgcagcatctcagccacatacaaaaaaaacgaaacaccttttgaggggcgttccgctttaaatgttttcacaacggaataatccttattgtgaattgctttcatttttgtactgcaaatctaagcacttttatctataaaacaaaattttaatgcaaaaaattcatactctcttgaaaattttataactttacaaaaatgattaatctatacatctaaataccccagatagtatgaaacgaatattaggattagaccttggcacagccagcatcggctgggcagttgttaaccaagccaccactgatgaagaacagtcaagcatcatcaaagctggcgtgagagtaaaccctcttaccgttgacgaaaagaacaatttcgaaaccggcaaaagcatcaccaccaatgccgacaggacattaaaacgaagcatgcgccgcaatctgcagcgttacaaactacgtcgcaatgctctattggatatcctacgcaaaaacggatttataaccaacgacaccatattatcagaaaatggcaatcacagcacatttgaaacctacagcctgcgtgctaaagcagctactgacgaggttacgcttgaagaatttgcccgaattctgcttatgataaacaaaaagcgtggttataaaagcagtcgtaaagcaaaaaacgaagaagaaggctcgctgattgatggtatggctatcgcaaaatctctttatgaagaaggtatcactcctggccaattcacattacgtttgcttgaaacaggtaagcgatatgtgccatctttctatcgttcggatttaatcgccgaactcgataaaatatggaattttcaaaagcaattctatccagaagtgcttacagacaaatgccgacatgacatcgcagacaaaagcaaaacagccacctcaaaatacttctatgctgcttatcaaataaccacagcttctgtaaaggataaaaatctacgactaatcgcttcatatagttggcgcgtgaacgctctttccgaaaagctcaatctcgaccaattggctgccgcaatatgcgatgtaaatggcgcgatatccagttcaagtggataccttgggtctatcagtgaccgtagcaaggaactatttttcaacaagcagaccattgggcaatacctctacgacaacatacagaaagaccctcattatcgcattaaaaataatgtgttttaccgccaagactatcttgacgaatttgaaaccatttgggacacccaagcaacatatcaccgcgaacttacccctgaattaaagagtgatattcgcgacgtggtgatattctaccaacgtagattgaagtcccaaaaatctttgatttctctatgtgaatttgagcaaagaaaaatcaaagtgaccgagggagataaagtgcgtgagaaaatggtggggttgcgcgtagcacctaaatcttcacctctgttccaagaattcagaatttggcaggctatcaacaatattacgatatgccacaatgacgaccctcgtcctctaacaaacgacgagcgccaactgcttcacgacgagctatctatctgcgacaaaatttcttccgcccagatactaaaactctttggccttaaaaatcaaaaagacgatgaatatagtctcaactataaggaaataaaaggcaacaccacacaagccagactatttgacgcttttgctgaagtgtatgaaatgactggacacgacgcagaaagcctaaaaaaattgcgtagtgcttcagaaagaattgacaccttaaagcgtgtgtttgaaggattgggatataaaacagattatctcacgcctccatcatacaccgacaccgagtcaatgcaaaaaagtgccttataccgactttggcacttgctatactcctacgttgacgacaaatcaacaactggcaatgagaaactgattgcacacattcaagaaatcacaggttttgaacgcaaagaatatgccgaggtgatagcaaaaataatgtttgagcaagactatggttctctgtcatcaaaagcaatgcttaaaatattgccatttctccaacaagggcaaatctatagcgatgcttgccaatcggcaggctaccgccattctgcagcctctctgacaaaagaagaaatagcaagccgccctctgaaaggcaacctcgaaatattgcctaagggtgcgctacgcaatcctgtggtagagaaaattctcaatcagatgatcaatgtggtgaacgaattgaatgctcaatatggcaaaatagacgaagccactggcaatcactattttgatgaaatacacattgaattggctcgtgaattgaagaaatcggcagatgaacgtaaaaatgccactgaagcaatttctaaagccactaatgaaatggaaaagatacgcaaaaaggtttccgagctcacagggtcagaccacgtgagccgcaacgacattattcgctatcgtctttataaggaattggctgttaacgaatataaaaccttatattctaacacttacattccagaagaaaagattttctctggagattttgatatcgagcacatcatacctcaagcaaagttgttcgatgactctttctctaataagaccctcgaaactcgcgatataaaccgagagaaaagcaatctcacggcttatgatttcgtgcttaataaatacggcaaggagtacgccgaacagtatctaacaaaggtgaaaaaacatttcgataagccgggctcaaaaacaaaatatagaaatcttatcgctcgtgaagcagatatcccaagcgacttcatcaaccgtgacctacgcgactcgcaatacatcgccaaaaaagcaaaggaaatgctctacgacatcacccgcgtggtggtttcaaccaccggtagcatcaccgatcgcctacgcgatgattggcaacttgttgatgctctcaaagaacttaattgggacaaatattctcaacttggactcaccgagatatttaccaatcacagcggtcaacaggtaagacgaatcaaggattggaccaaacgcaacgaccatcgccaccacgcaatggacgctatcaccatcgcgttcaccaagccaagccacatacaatatctaaataacctcaatgcacgcagcgacaaggcagggacaatttacgccatagagcagaaagaattgcaccgcgacgagaaagacaatcacttgcgtttcaacccgccatttgagggtatacgccacgaggctttaagacaattagataatatacttgtttcgataaaagccaaaaacaaagtggctaccatcaacaccaatatcaccaagaaaaaaggtggcacaaacaagaccacgcaactcacgccacgcggtcaactacacaacgaaactgtttatggaaaacgtcttgtggcagtagttaagactgagaaagtgggaagcacattcaatgccgaaaagattgccactgtgtgcagtccaacctatcgtgaggcattgcttgctcgtctcgaagcatttggaggtgatgcaaagaaagctttcactggcactaattctctggctaaaaagcctctgtatttcaatgagcagcacaccgagtgcgtgcctgagcaagtgaaaaccaagacttttgatgaaatattcaccattcgcaagccaatcacaccagaactaaaactcgataaagtggttgacgatggtgtgaaacgtattctaaaggctcgtcttgacgaatatggtggcgacgcaaaaaaagcatttgtcaaccttgacaagaaccctatttggctcaatgaagcaaaaggcataagcataaagtctgtagcgattaagggcgtgaacgtggcaacgccactgcatgaaaagcgtgataataacggcttcgctatcctcacagaggatggcaagaacatccctaccgattatgtgagcaccagcaacaatcatcacgtggctatcttcatagacgctgacggcaattatcaagaacatatagtgtcgttatttgaagccgcagcaagcaagagtttgggacttcctgtaattgacaaaaactacaatagcgataagggatggaatttccttttcactctcaagcaaaacgaatatttcgtattcccagaatatgcgcttgacgaaaatggtaaacctacagatgtaatgacattcaaccctacggagattgatttgattgacccaaatatctattctttggtaagcaagcatctttatcgtgtgcaaaagttctctacaaaagattatgttttcagacatcacttagagacacaagttgttgacaatagcaccttacgaggcacaacttggaaacgaattaccgcattaaataacctaaaaaaggtagtcaaagtgcgagttaataatgtaggtcagattgtagcaataggcgaatattaaccagaaataccatatttatgattaagcggacgctttatttcggcaatcctgcttatttgagtctcaccaataagcagttggtaatccgcctacctgaggtggagaaagccgacaatgtgagcgaagtgatacgagaaaaatcggtgcgcaccatccctatcgaagacataggggtggtggtgctcgaccataagcaaatcaccatcacacaggcattgcttgaggcgctaatgtgcagcaatgtggcggtaatcacctgcgacagttcgcgcatgcctatagggctactgatgcctctaagcgccaacaccacccagaacgagcgctttcgcaaccaactgtattcttccactccgctacgcaaacaactatggcaacagaccatacaagccaaaatacgcaatcaggctgccattcttcgcctcaacaccaaagcgcccgtaaccaatatgatgcgttgggctgctgacgtgaaaagtggcgatagcgataatctggaggctcgcgccgccgtatactattggaaatcggtgtttacatcactgcccgactttgtgcgtggcagagaagaattgcctccaaacaatttgctcaactatggttatgccatactccgcgccatcacggcccgcgcattggtggcaagcggaatgctacctattttgggcattcaccaccgcaatcgtgccaacgcatattgcctcgccgacgatattatggagccttaccgcccctacgtagaccaactggtggtggacatagtgaatagcggtgaggattattccgacctttcgctcaaccttaaggcacgtatgcttgctattcccacactcgacgttaccatcgatggcgctcgccgaccactgatgactgccatggctcaaaccacagcctcgctctataaatgctttgaaggatctgcccgcaaaatcagctacccttctctgtaattcctcgccaactgacactctcctctcattttctccaccaaggtatgaataaccgttttaacgaatatcgcattatgtgggtgcttgtactcttcgaccttcctaccgaaaccaagaaggaacgcaaggattacgcccgcttccgcaaggatttgatgggcgacggtttcaccatgtttcagttctcaatatatatgcgccactgcccaagcaaagaggtggccgacctgcacataaaacgtgtgaaaaatatgcttccgcctaacggaaatgtgggcatactttgcatcaccgacaagcaattcggcgaaatgcaactcttttactgcaaaaagaccatcaccaccaagccaggccctcagcaattagaacttttctaagacatcataacaattctataaaatcacaatatgctataataaaaaatctcgaccaaagccgagattttttatttaaaagcatcctgaaaatttatttctaatatgtattatatctttctatatatcagagagatacaggtatcgtgatgcttttgatagttcaaagatacaaaaatgaaaggctatcgttggttattcttacgcgttttcgatgcttttgatagttcaaagatacaaaaatgaaagcggcttgtggggcgtggccaatagaagtgggatgcttttgatagttcaaagatacaaaaatgaaagcaattcacaacatgttgctttctataacacatcttgtgttagatgcttttgatagttcaaagatacaaaaatgaaagcaattcacaacaacagttaatgctaatcgtgctgttgctgagatgcttttgatagttcaaagatacaaaaatgaaagcaattcacaacaacagttaatgctaatcgtgctgttgctgagatgcttttgatagttcaaagatacaaaaatgaaagcaattcacaacaaggtaggattcttaagcaagaactggagcgatgcttttgatagttcaaagatacaaaaatgaaagcaattcacaacgaatttacaacaatggcttcgtgagaatgagatgcttttgatagttcaaagatacaaaaatgaaagcaattcacaactcttaatgttaaacacatttcctatgacaagatgcttttgatagttcaaagatacaaaaatgaaagcaattcacaacaacctattaatgacatgcttccttatgtcagatgcttttgatagttcaaagatacaaaaatgaaagcaattcacaactactagatacatatgttcacacaagactaagatgcttttgatagttcaaagatacaaaaatgaaagcaattcacaaccaaataatctcaagaaaggaataagtattcgatgcttttgcactatcgttggataagataggctacactctgaaatagcaactcgagcaagctcggttgcttatttccctcgtttgcactatctttgtacaaagagattattacttaaatcggaaatatgaaactactacgcatcactttttgcgctgccttggcatcgctcgccctggccgcttatgctggcgaccgtctgcctggctatctgcaagccgagaaattcactaaggaaaaactcaacactatgctcttcagcactcgcctgtcgcctcaatggatggaaaacggtagcatgttttggtatagctacaagaccagcgatggcactcactggtatgtggtgaacccggcaacacgccaaaaaacaccgctgtggaaccgcgacgatctggcttcgcaactcaccatgatcgtgaaggacccgtttgaggctcgtcatctgcctatcagcaacctaaaggctaaggaggacggtcacacgttcaccttccaagtcacctcgtcgcaggagtgggaaaagcctaagaaaaccaacgaaaaggctgatgagaaggccgacaaggataagaaggacaagaaacctaagagcggcaaaaagatatacttctttgaatgggatttcaacacccaacgcctcactcacctcaaggataagtgggaggaggataagaccgtgaattgggccaacgtgtcgcccgacaagaagaccgtggtgtatgccaaggacctcaacctctatcgcatgagctttgccgactacgagaaggcaaaaatcgacgagaaggacagcaccatcgtggaggtgcagctcaccaccgacggcattaaggatttcggctacggcatcccttacagctcgctcaacaccgacaccatctgcaacggcaagcgccgcggcgtgtggggcgtgtggtcgcccgacagccgccacttcctcacctctatcgaggacaaccgccaagtgaaggagttgtgggtgatcaacgccatggcttcgcctcgtcctacactcgaaacctacaaatatcagatgcctggcgagaaggaagcccctgtgcagcacgtctacctcttcgacatgagcaacaacagccgcaaggagataaacactgccaaatataaggaccaaaccatcgacttcgccagcgcacctatcaagaagaaggacatgagcaaggacgatgtggccgtcacttggcttggcaacaacaaccgcttctacctgagccgctcgagccgcgacctaaagcgcatcgacgtgtgcagctacaccatcggagccgacaccatcgtgccactgattgaagagcgcatgaacacctatcagcaactgcgcaccctcttcaccgccaacgccggtaaagacctaatccactggagcgaacgcgacggttgggctcatctctacctatatgacgctgagggacacctcaaaaaccgcatcaccaagggcgcttggcacgtggaggatgtggtgagcgtagacgacgccacccgcaccatctatttcacagcctgcggtatggaccctaacgaaaacccttactacgaacacctctaccgcgtgaacttcgacggtagcggcctgcgcaacatcacccgcggcgactacttccacgaggtgagcgtagacgatgccaaccgctatgtggttgacaactattcacgcgtcaacaccatcccttgcaccgccctattcgacaccgccggaaaccgcctgatgacactcgaagaaagcgacttctcgcaactgctcgccaacggatataaattccccgaaccattcaaggtgaaagcagccgacggcgtcaccgacctctacggcgtgatgtataagccattcgacatggacaccaccaaagtgtatccgatagtagactatgtatatcctggtccacaggttgaggctgtctactacccattcacacgcatgtcggtgcgcaccgaccgtctggcacaagccggcttcatcgtgatctcggtgggacagcgcggcggtcacccaaatcgctcgaagtggtatcacaacttcggctacggaaatatgcgcgactacccactcgccgaccacaaatatgccatcgagcaactcgccaaccgctataaatacatcgacatcgaccgcgtgggcatacatggccactcaggaggcggatttatgagcaccgcagccatctgccaataccccgacttctttaaggcagccgtgtcgtgcgccggcaaccacgacaacaacatctacaaccgctggtggagcgaaacacaccacggcgtgaaggagaaagtgaccgacgaaggcgacaccacattcgtctaccacatctccaccaatccagagattgcacgcaacctcaagggccacctgatgcttgtgcacggcgacatcgacaacaacgtgcaccctgccaacaccactcgcgtggccgacgccctgatacgcgccggcaagcgcttcgacatgctctacctgcctcaacagcgccacggattcggcaacatggacgaatacttctactggcgattggttgacttcttcagcgagcacctcaagggcgcaagcgagaagtcggtagacatacccaagcgataagcattagccacacgttagcagagaaagccacacgcgccctctcgctcactatatcaccacccatcagcccccgcgatgccacaacgcgtcaccggggctgatgcttttttaccccaattttgaatcaacaattgcaagaaaaaaatgctatttcctttcctttatctttggttttcactatctttgcacaaagcgagcgcaatgtgcactttcacaaaacgccataaaaaccctaaccttgacaaacaatactaaatcatgctgaatatataccaaatagtatcagataagcaatggggcggaccagagcaatatgcattcgaccttgccgcgcagatgcacagcgagttaagcacaaactatatggaaatcgtcacccgcaaccaacccaaaatcatcaagcattttcgtcgccttgaggtgccaatctccaccctaccgctcaagagccttagcgacctcgactcacctatccgccttgcccgtcagataaagcgcggacacaacatactgcacgttcacaatatgaaagacgctgccacagcagtgcttgccagccgcatatcagagaaccgcaacaaccgcgtggtgctcaccagccacagcgtggagcgccctaagaccaacttcatgtatcgccgcatactgcacgagatagaccacatcatcttcgtgtcgcaagtggcctacgacgagtttatcaaccacgccaagcacttcgaccgcagccgcgcctcagtgatacacgacagcatacgccaaatctacaccggcgaaaaagccattgacatacgcagcacctacaacataccaagcgacgtggcgctgataatgtttcacggtcgcgtgtgcaaagaaaagggcgtggacgtgttgctacgcgcactcacacagctcaacaaggccacatttcaccttgccatagtgggagaaggcgaccgacgatttatgaagcacctacgctcgtttgtagaagtaaaccagatgcagcgcaacgtgtcgttcctcggattccagcccgagctgcagcaactcatcgcgcaagccgatttcggcgtactgccagccacttggcgcgagccattcggcatcagcaacctcgagtatatgatggaaggcaaggcacacatcgccaccaacaacggcggtcaggtggaatatctgcacaacgaggagaacgcactgatggtgacgcctaacgacttctcgcaactggcagcagccatacaacgcctcatcagcgacaaagccctgcgccagcgcttaggcgaccgagcgcgtcacgacttcaacaccgagctcgactatagccacttctacaagaagatctccgacctctaccacagcctctacaaaaaataatcccccagcaacgaatgtggaggattacagatatgtcttatttcctgtgatgaccagcgcgcttagattttgtcgagtccgcgagtgaatttgagccaatagtatttcagcggattcttatatttcagctgcttccatgggcggctactatgcggacggtgcaacacaggcaacgacgcaaacagatagttgctgaaacccgccttcacagcctcgtgcgaaatggtcacatcaaaccaattcttcgatgcatcgagcgtgtcgaaatcaaaagcgcgaagaaactccggcttaagcagcgaacagcagaagctgcaatgcttcttagtggcaaacacatcgccatagtgcgacttagcataaaggtaaggataattcaccgcaccatcctcatccaccgtcacagcggccgcaatggcgcaatcgttgcgctcaagcgcaccatcatagagcgcctgaatggtgtggctgcgcacagtcacatcgctctccactatcagcaatcccgcatcctcggcaatagccttgcggcgagtggtctgcaacaccagcagatagttgggcgacggatgcgtggtgatgtcactcagattcaccaagttaaaacccatctcctcagcagccttggcaagcctacgagtgttttcctcagtgctgaaatcgttatacaccgtgtaggtgtaaggcacagttatatcgctctcaagcaccgatttcacagtctcaagagtcaactctatagaatcctttacaggagtgataatatgtaggcatttcatatctttcgtaagcttttattccgtttttggcatattgccaccacaaaattatctattcatttcctatcggcaaaatcatttcgccgaaatcactcgttttgcgtcagataaaagccctaatgcccgaatcgggttgatgctaacgcacatttcatcacccgccatcacacagtcggtgttttagtttcgcgccgatagtgatttttctttcacgtcgatgcccgaagataggtcagatttttttgaatttcacgtcggtggacaacaccc

SEQ ID NO: 2303 - DNA, 21460 bp, synthetic construct
  source 1..21460: mol_type = other DNA
  misc_feature 1..21460: note = Synthetic
ggttggtataaggagacagatgtgaatgtttcatgtaaatcatttgaaaaggctttcaaatcaacaggatatatttcaacagatatttcaattatagataagttgcagagaagaattgaaagacttaagccgtctggaaatcccgtgatagatgttcgatgcaagatttatttttatttttcgggcgaacttctggcaactatgtgtcttgataggtttcatgcactgtatgatggcaagtattataaaacatccaagaagttgttggctttgataaataatattatggagaaagaggtaagatatgatatagtaccaaaggctgtcgtggaagactcaatagtttctgacaaaacagttttaataaattacatggattccatatcagacattttgaatttaaatcagtcggaagagttgcgcggttattgtattgcggataaagagggaaacataataaaaatatctattagacagaaagactctggtacgaaaatacctcaatgctatattgaaaagatagaggatatttataaaaaaacgataaagtggactcctgacaatgaacgtatgaaaacggacaggataccaataagaatcgttttttaataattgtggacaaaaacaatgacctatttaggtttaaccttatgttctttttgcctttttgtccccaaaactatgtctttccgtccagtccattacacaaagacgcttacggttaaaaaagcataaagacatgcaacattatccgttttggcacgtcttattattaaccccgtgcggcgcatctgccgcatggcattgacatgttaattcaattttaaatttaaacaatgtaagttatgaagaaatttatctttgcagtggcgctcgccgcaggcatcatcgccctgagcagctgtgccagcaagaaggatcttgaaaactgcaaacttgaaaacaaggacctgacaagcaacctgcaggacacgaaggagcaactcgcctctgcaaacacacgcgtgaggtcgctcgaagaccagttgcgccaggcgcagaccgcgtaccagcagctgcagatgtcgctcgacaagagcctctcgaacgcaagccagaacaacgtcagcatcgagaaacttgttgaccagatcaacgagtcgaaccagtatatacgccacctggtggaggtgaagtcgaagagcgactcgctcaacatggtgctgacgaacaacctgacgcgctcgctcacgaaggacgaactgcgcgaagttgacgtccaggtgctgaagggcgttgtctatatctcgcttgccgacaacatgctatacaagacaggctcgtacgagataaacagcagggcagccgagacactgtctaagattgcgaagatcatcatggactacaaggactatgacgtgctcgtagagggcaacaccgacaacgtgccaatatcgcgcgagaacatccgcaacaactgggatctctcctgcctgcgcgcttcgagcgtggtgcagtacttgcagaagaactacggcgttgacccgaagcgtctcacggcaggcggacgcggtgagtacaacccggttgccaccaacggcaccgagattggcaagcagcgcaaccgccgcacgcagatcatcataacgccgaaactcgaccagttcatggatcttatcgacgaggctcctgaagcagagaagtagtcacgtcacaataaaaagaatgtcccgccatacgactggtgggacattctttttttattgtcacacaggcgtacggatgcttgcagcgtgccgcgcgtcacacgcaatgataagccgggggacgggctgccgggacgaaatggggataatctgtgctgtaatgaccggttggggctggaagacgctgtgtaaggcaaacctgtatcaagacggagtaacatgccgtttggcaaatgcgacaagtgccgggaggctttatgatgtctcccggcacttgccttatgttgagtcacaatgtgtcccttttacagtccgcgcgacttgagcagcgccgatgcgtctggcgactgcattccggtgaagtcggtgaacatcttcatcaggtcgtcggtgttgccacggctcagcacctttgtgcggaatgcctggccgacggctgggttcagcgcgccgtgtgcggtgaaatactccgcgcagttggctgcaagcacctcgctccacaggtagctgtagtaaccggctgcatagcccccgccccacacatggttgaagtatgacgtgtggtagcgtggaggtatctggctgtcgagcagcccgatttgcctcagtgcttctgtctcgaagtccttagccttgtctgcggttggtatctgcgatgacggcaggcagtgccatgcaaggtcggcgcatgttgcggcgaggttctcgcccattgcgtatgccgactggaagttgatggactctatcatcttgttcttcagttcctccggcatcggcttcctggtctggtagtgcttggcaaagtttgcaaagacctccggcactaccgcgaacgactcgttgaactgcgacggcatctccacgaagtcgcgtgccaccgccgttccgctcagcgtgttgtagtagcagtcggacagtattccgtgcagcgcgtgtccgaactcgtggaacatcgttgtcacctcgtcccatgtgagcagtgtgggctgtccctcgggagccttcgcgctgttgcacacattatatattataggcagttgtccgcgctgcctgctttgttttgcgaagccgtccatccatgctccgccgcgctttgtgggtcggcggaaatagtcgcagtagaagagagccatcgttttcccgtccttgtctgccacctcaaacactttcatgtccgggtggtatgtcggcaggtccttgcgctccttgaatgtcagtccgtatgccctgtttgcggcgtagaacactccgttgatgagtacggagtcgatgttgaaatacggtttcacctcgtcttccgagaagttgaactgttccttcttcatctttgccgagaaatagaagcggtcgtaaggctcgagtttgaagtcgccgcccattgtcttgcgtgcgtaggcctctatcgccttcgtctcggtctctgccttcggcttgtattcgcttatcagttgtttcaggaaggcgtacacgttgtcggtgttctttgccatgacgttgtcaagcgagtatgaggcgtagttcttgtatcccatgagctctgccttctccgcccgcagtttggcaatctccacgattaccgggaagttgttgtatttgcccgtgccgtccgcgcggtgtattgaagcctcgtaaacgcggcggcgcaggtctcggttgtcgaggcttgcgagtatcggctgctgcgtggtgttcacgatcacgatgcagtatggggctttcccgccgaggctctcggcgtccttcttgcactgtgcgatgtcggcctcgctcagtcctgcgagttcctcgcggcttttcacccacaccgcagcgtcgtttgtggccttcggcagcatgttgccgaagtcctgctgcagtgctgctatgcggttgtttatctcctccatccgtgctttcttgtcggctgtgagcaatgctccggagcgcacgaagcccttgtaaatctcgtcgagcagttttctgtcctcgccctttagcgagttgcgctcgttgtcatagacatacttcacgcgctcgaagaatttctggttgaacgatatttcgttctccagtgccgtgagcagtgggattgcctcgtcctccgcctttccgagcgtcggtgtcttgttggcgtttgtcagtccgaagaatatgctggacacccgtccgagcaactgtccgctctcctcgtatgccagtatggtgttcttgaatgtcggcttctccttgttctcaacgattttccttatctcctcgcgctgctgtccgatgcctgctttcagtgccggcaggtagtcggtttccttgataatcctgaagtctggcgcgccgaatggcagcacactctttttcatcagcgggtttccgtcggtgccgtccccgttgccgtttccgtctgcctgtgcggctgatgtcaccatcaccgccgttgcaagtccggctgtcagcaatgtctttttcaatttgttattcatagtctggtaaattaatatgtgcaaaaatatgaataaaaaacgatataatcagcactttcgttttttttaactataaaaggtgaaatggtgaatgactaaatgtgctggatttactgatatggcattgattgccaaatttctcaatgtgttatgctttggcgggcataggcgaaagtccggtatgcgtgatgctgtttatttgggttatacaataacttggttggcgaaaggtctcaatacagtagtcaaagcgtgggttggacgtgcgctcgcgtccaacccacgctttgatgttatgccttattcccgtggattgcgcacgggcttagacttaaagtgccttcaggccgcggaccattctcttcagtccctcggcaagtatttcgcgcgggcatgcaaggttgatgcgcaggaacgccttctcgcgttcgccgtagcactcgccgtcgcaaagccaaaccttgtatttgttgtacaggtagtccttcagttcgacagacgacatgccgaacgccgagcagtccacccatgcgaggtaggtcgactcgtgcggcgacacccacagttgcggcagttccttagcgaagagcgacacggtgtagtcgtagttgccctgaatgtagtcgttgaactgctttagccactctgctcctccgtcggtgtaggcagcctctgccgcaacgatgccgaacggattgacatggcaaatctcgaatatgtttatcgcgcggtctatgcggtagcgcaggtcagggtctgccacgatgatgcttgccgtctgcagtcctgccacgttgaacgccttggatgctgccacgcaggtgacgctgttcctgaggaactcctcaccgagcgaggagaatggcgtgtactcgtagccttcgggaacgaactcgcagtggatttcgtcagagacgaccagcacgttgttcctgaagcaaatctcaccgatgcgcctcagttcctcgcgtgtccacacccttcccgacgggttgtgggggttgcagagcatgaagatcctcactttcgggtcggcacatgccttctccatcccttcccagtctatggtgaacgcgtgttcgtccctgccgttcttactctcgtcgagcagcaggggcagttcctccacgatggctccctggtttgttatgctcgagtagaagcagttgtatatcggcgttgtcatcagcaccttgtcgccggggagtgtcagtgcgtgcattattgccgacactgccggcaccacgccgattgtcacgatgaaatgctcgcgtttccagccattggccccgtggcggtcgtggaaccagttgatcaccgagtcgtagtaactttgcggcaccagtgtgtagccgaacacctcgtgttccatccttttcttcattgccttggttattcccggatagaccttgaagtccatgtcggcaatccacaatggcattacgtcttctgcggcctcgtcccactttatgcagtctgagccgcgccggttgatgatttcatcgaaattgtagttcatagttattttttaggtttgatattcttttgcacagaggcttactccctcttgatgatcttgcagtcggccggttgcctcacgaactcgtctatcgtcacgcgccctatgctgtcggctgtcacgatgcctgtcctggggttctttatctccgttattgacccggctatgtcggcatggacgtcagaatcctcgaacgcgcggtcgcagtcctcgccgaacgtgcattcctccagcacaagtttgtcggcatagcacagcggctgctcgcccgttatgtggcatctcacgaggcgtacgttcctcgagtgccacgcgaggtactcgccgttcagctcgctgtcgtatatcgtcacgttgtccacctcccagaacgagtccttggtggttatcctggcgttgtgcacctccacgttcttgcagtactggaacacgtatttcgagtcgctcgtcagcccgtcggcatacacgttctcgcagaacatgaaagggtatgtgccgccgtgcagagtgacgttccttatcttcaggtctttgattttccagaatgtctcgtcggcatcgttgaacaccacgttctccaccgtcacgttgttcatctcgcggaagagcttcggcgcgtcaatcacgcagtccctcatcaccatgttgtcagaataccatatcgccgagcgcgaccctggctcaaagcggcagttcgttatcagcgacccgtcaacgtgccaccatgggtatttcccgatgaacaggcagttgtcggcctcaatgttccggcagcattttataccggattccccatcggttatggttacattttcgagccgcgtgtcatgaatgccgaacaggggtctctcccctccgaattgtttccctgcaatcctttccactttatgtcttttttatccgtgtgcaaagttacaacaaataaaacaaaaaacttgtaacatttttcctttttaatgatacataatacgggaaaacgcgccatttatgtgctaaaaaagcataaaaagatatgcgcttaaaaagtttttagtaattttgtcacaattattgctgaaaaaatacttttggaaaaacataatataatattaaaacactggaaatgaaacaacatgatgttatgccggctgacggtaagttgggaataatggtggttggctgcggcgccgtggcaacaacattcatcacgggtgtcctcatggcacgccgtgggcttgccaagccggttggatcgatgacgcagtatgacaagatccgtgtcggacgcggaaacgacaagaagtatcttcactatggggatgtcgtgccattggcaaaattgaccgacattgagtttgccacctgggacgtatatccgcagaacgcctaccaggccgcgatgtatgccgaagtgctcaacgagaaggacatcaatcctgttcgcgaagaactggagaaaatcgtgccgatgaaggctgctttcgacaagaactatgccaagcgcattgacggcgacaacgtaaaggactgcaagacacgttgggaaatggtcgaggctctgcgcgaggacatacgcaggttcaagagcgagaagggatgcgcgcgcatcgtggtaatctgggctgcgtcaaccgagatatatgtgcctgttgacgaaaaggcgcacggcacgctggctgcactggaaaaggctatgaaggccgacgaccgcgagcatgtcgcgccgtcgatgtgctacgcgtacgcggctctctcggagggcgcgccgttcataatgggagcgccgaacacaaccgtcgacattcccgcaatgtgggaacttgccgagaagactaaaatgcccatatccggaaaggacttcaagaccggccagacactcgtcaagagcggcttcgcgccgatcattggcacacgctgcctcggacttaacggatggttctcgacaaacatcctcggcaaccgcgacggccttgtgcttgacgagccggcaaacttccgcacgaaggaggtgtcgaaactctcgacgctcgagacgatactcaagcccgacgtgcagccggacctctacaccgactactaccacaaggtgcgcatcaactactacccgccgcgcaacgacaacaaggagggatgggacaacatcgacatcttcggatggatgggctacccgatgcagataaagatcaatttcctgtgccgcgactccatactcgcagcgccgctgctgctcgacctctgcctgctcagcgacctcgcggcacgcgccgggcggtatggcatacagcgtttcctcagcttcttcctcaagtcgcccatgcacgactacacccgaggcgaggaggccgtcaacaacctgtaccagcagtacaccatgctgaagaacgccatacgcgaaatgggaggatatgaggcagacgaggaaattgactgactctgacgacagacaacatggaacgaacccacggcgcatactgaaatggctgtgggttcttttggcacttgccgcgctttcatggctggtgtggctcgcgatgccgatgaccgggagccagcggcaacgcaaccgcgtggcggtggactaccagtcgtgcttcgcgctggtgtcgggcaacgacacgctattgtatattggcgaaatgtctgacgactggacacgcacgagcgtatcggtggaatacggcaatctgacaccaaggcacgaaacactcaacggcgtttggcacaataagtacatgctcgtcccatcgtgccacgggcgcatactgacattcaaccccgaccacaaggcggacagcatcctgaaggtggtgaacgacacgctgccaaggctcgtcagacggcaggaaacactgctggcggagaaaagcaaaacgctcgggcggacggtcagggaactgatgtatttcatgcgcgtgcacagcgttattgacaacggctaccacatcgtggccgcacattacacggaggtggcagccggcaaggaactgatagacagcgcgctgtccgcgctgaggtcggcaaggaacaggccgctgaggatgtgcgtcgtacagcgtttcacggcagtgtgcaaggacggcgaggggaaaacacagcgttatgtctgcgacatgcagagagacgccccaccgcaactgctctgcaccatacagacacgcagcaggagaaagccagcccacgcatttgccaccttcagcggcaagccggggcaataccgtgcggcaccgcagccagagttcacatacatgggcgagacagacaacgggaaacgcaacggtcacggcatatattccgaccgcgcggggaactactacgacggcttctgggccgacggcatgcgcgatggcttcggctgctcggttgactccgcaggaaacgtgcgcgtgggactgtggaaggccgaccgattccgtggcgaacggctgaattacaacaccgagcgcatatacggcatcgacgtcgcgcgctaccagcacgagagcggcggacgctctcacccgatcgcatgggacaggctgcgcataagcagcctcggggtgaaaacgccaaagacaatcacgggaaaggttgactatcccgtctcgttcgtcttcataaagtcaaccgaaggcaccactgtgacaaacaggtactatatttccgattatgccgcagcacggaaaaacgggatacgcgtgggcgcttaccattttttctcgacgaaaagcaacccgaaggaacaggcgaggcatttcctgcggcacacgaggttcacgaggggcgacctccctcccgtgcttgacgtggagccgagcgacgcgcagatagcggccatgggcggagcggaaacgatgttcgccaacataaggacgtggatgggcatggtggagaacgccacgggagtgcgcccgatactctacataaaccagatgttcgtcaaccgctacatgccgctggcgcccgacatcgcggcggcttacgaggtgtggatagcgcgatacaacgagttcaagcccgacatgcacctcgttttctggcaactgggctacgacggcagggtgaccggaatacgcggtgacgttgacatcaacgtcttcaacggctaccgcgacgagtgggaaggctatctcgaaagaaggactttcggcggcggtcgtcgctgagcgtccatccctttcagtattcccgattatggcaggcttgccgtggcaaacaatataattttggcacttatgtccaaaataagatgtatattcatttccaaaaatgactaatgtacataatatgaaaaataaaaagtccaccgttaaggacgatggaccatgacctaatgttttcacaacggaataatccttattgtgatttgctaaaaattagttctgcaaatgtatgatttttttctgggaaaagcaaatcttttttattttttttattatatttgcggtaagattaaaacacacataaatatgaagaggatattaggacttgatttgggaactacgagtataggatgggcactggtgaacgagggcgaaaacgacaatgagaaatcatcgatagtgaaactcggtgtgagggtcaatccgctttcgagcgatgagaaaaacgaatttgagacgggaaaggcactaacgacgaatgcagaaaggacaaataagcatggaatgagaattaacctgcagcgttacaagcaacgcagggctaacctcgtgagatgtttgaaggaaaatggtataatagatgatgaaacgctactctttgagcatgggaacagcagtacattccagacctacagagccagggcaaaagccgttgacgaggagatctcacttgccgatttttcccgtgtcctgcttatgataaacaaaaaacgcggatacaagagcaacaggaaagcaaaagacacagatgatggcgaactgattgacgggatgactgtggcgaaagaactgcatagcaagggcctgacgccaggtcagttccttatgatgcggcaaaaggaaggaaagaaattccgtcaggaattctaccgttcggacttgcaaaacgaattggacatgatttgggacaatcaaaagacgttctatccagatgtactcactgacgacatgaagagcgagatcgccgggatgaacgcgaagcagtgttcggcaatattctataacaggaaaaatgtcgtgacggcgaaaaacaacggcaaagattcctatgagacaaaactgcaatggcgatgtgaatgccttacggggaagagggacatcgagcaggtggcatacgtgattagcagtctttgcggcgaaatcagcaactcgagcgggcggctggccatgataagcgaccgcagcaaggatttgtatttcaacaatcagacgatagggcagtacctgatgaccttgattgacggaaatccgaacgtaagtcttaagaacataaccttctaccgtcaggattatattgacgagttcaatgctatatggcagtgccagtctaaatatcacaaggaacttacaccagcgttgaaggatgaaatagaaaaacacattatattctaccagcgtgacttgaagagttgcaaatcacttgtgaaccactgtgagtttgagcaatctgaaaaagagattgcggtggacgggaagaagaggaaaataaccataggactacgtgcatgtcccaagtcgtcgccactgttccagaccttcaggacatggcaaaaactgaatgacattatggttagtacgtcatacgggaaacacaagtcatctgcaatgaattctgtgccagatctgttcaatgatctcaaaacatggaagccggaacgtttcctgaaacaggaagagaaggaaaaactatttgaagaactttccgtgaagggaaaactcaccaagaatgaagcactctgcatattgttcgggaaagccaatgggcttgaaatgaatttcagggaggttgaaggcaaccagacgatggctgcgatctatggtgcgtgtcgtgacatcatttcacaatcgggcaatggcgaatatgacttccgaaagatgagcgcggcagaaattaaaagtactgtgaatgaaatatttgggagactcggatatgatacaagttttcttgattttgacccgttgtcggaaggcaaggctcttgagcggcaatcgtcttacaggctgtggcatctgctttactcgtacgctggcgacaaatctgtcactggcaatgatgccttgttggaaagaataggcgaattgtgtggcctcgacagggagagtgcaggcataatggcaaaagtgtctttcgcggaggactatggtaagttgagcgcaaaggcaatgcgcaagatattgagatacatgatgaaagggatggggtacagtgcggcatgcgaggaggctggatataaacactcaccacgatccctgacgaaagaagaacttaaagcgaaagtatatgcaggcaaaatggatgtgataaagcgcaacagcctgagaaacccggtggtggaaaaaatactcaaccaaatggtaaacgttgtgaatggcattatagatacctacggtaagcctgacgagatacgcatagagatggcacgcgaactgaaacagagccgtgaagacagggcggaaaaggacaaggcaataagggatgcgactaaagagcaaaatataatacgcaagactcttgaggaggatttccacatcgcaaacgtgacaaaaaatgacatattgcgctaccggctttacgaagaactgaagatgaatggatacaagacgctgtattcttgcacttatatcccaatagaagaattattcagcaaaaaattcgaaattgagcatatcataccaaaggcacgcttgtttgacgactctttctcaaacaagacgcttgagacaagcggcgtgaacaaagacaaaggtgatatgacggcatacgatttcgtggccatgaaacatgacgaaaaatatctggccgactatgaagcacgagtgaatgaacttttcaagcagaagaaaatatcaaaagcaaaaagagacaaactgcttatgagggaggccgacataccgaaagatttcctaaaccgcgacctcaatgacacgcagtatattgcaaagacggcaagggaaatgctcgaagacattgtgccggaggtgctaaccaccacagggaaaatcacgagcaggctgcgtgaagactggggactggtggatgtgatgaaagaaatcaactgggacaagttcgacaaactcaaaatgaccgttacggaacatgaccgcgacgggaggccgataaagcgtatcatggactggacaaagcgcaacgaccacaggcaccacgcaatggatgcactgacgatagctttcacgaaacgggcaattatacagtatctcaacaatgtgaatgcaaggagcgacaaaggaagcagcatatatggaatagagaagaaatatatgaaacgcaacgagcgcggaaagctggttttcgttccgccaatgccttcaggcaagttgcgtgaagaggcaagacgtcaactcgacatgatacttgtatccgtgaaggcgaagaacaaggtggtgacgaagaacatcaacaaaacaaagaaaaatggcggggtgaacaaaaaagaacagttgacgccgcgtgggaaattgcacaacgaaacggtatatggaaaaatagcacgctaccaaacggaaatgaaaagagttggggggagtttcaccgaggatgtcgtactgagtgtggctgacaaacgtatacgggaggctttgtatgaacggctggcagagcatgacttcaatcctaaggaggcattcaccggcagcaactcgctcacgaaaaaacctctgtggcttgacaaggaacattccagatgtgtgccggaaaaagtgaaaacagttatactggaaccaatatgcaccataaggaaacctgtggataaagatttgaatatagacaaggtggttgatgccagggtgaaggaaatccttaagcaacgcctgaaggaatatggcggtgttgcagccaaggcgttctcaaaccttgaggaaaaccctatatggcttaacagggaaaaagggattgccataaagagggttaagatcttggacagtaaaaacaatgtcgcaatacacggcaagcatgacattgcaggcaggcccatgcttgacgaggacggtaaacctgtggggaatgactatgtaaacacttcaaacaaccatcatgtggcaattttcacagatagtgaaggaaacttgcaggagcatgttgtgtcgttctacgaagcaacggcgatggcaatcctcgggtatccggttgttgaccgtcagtataataaaggtctgggatggaagttcctgttctcaatgaagcagaatgagtatttcgtattcccgaatgaggcggaaggctttgatccaaatgaaattgacttgaccgacgaaagtaacgccgcaataatatcacggaacttgttcagggtgcaaaaattctcaaagggggattattttttccgccatcatttggaaaccaatgtggaaaccaacctgaagttgaaaaacgtgacatggaagcgcataacgcggcttaatgatttgattggtgtcgtaaaggtgcgtgttgaccacattggtagaatcgtgtatgtcggggaatattaaaaacatattgccatgataaagaaaacgttgtgtttcagcaaccctgcctacttgtcgttgcgtgacggacagctggttattaagattcccgaaatacagaacagcaagggagtcctggaggaactgaaagaaaagtcggtaataacacgcccgatagaagacatcggcgttttggtaatagacaacaggcaggtgacagttacgagtgctgttctcgatgccctgcttgccaacaactgtgcagtgataacatgcgatgcacggtcgatgccagttggactgcttctgcctctttacggcaacaccacacagagcgaacggtttcgtgtacagattgacgcatcgcttccgctcaagaaacagttgtggcaacagactatacaatataagataattaaccaagccgccgtactttcggaatgtactgacgccgagacgcattgtatgaaggtgtgggccgcagacgtaaggagcggagacccacaaaacgtggaggcaaaggctgccgcatattattggaaaaacattttccgtgacgttaccggtttcatacgcgacagggaaggcacgccaccaaacaatatgctcaactacggatatgccatactgcgggcagtggttgcaaggtcactggtttcgagtggcttgctgccgactttaggcattcatcatcacaataggtataacgcgtattgcctggcagacgatattatggagccttaccgtccttacgttgaccgtctcgtggtcaacatcatggcacgttacggacatgacatggcacttaccagggaaataaaaatgcaattgctgtcaatacccaccattgatgtgaaaataggaggaaaaagaagtccgctcatggtcggcatttcgcagacaacggcatcactgtacaaatgcttcagtgggaagtctcgtaaaatatcatatcctgaaatgtgaaaagtgaaagaataagtgaatatcgggttatgtggctgatggttctttttgacttgcctacagagacaaagcgtgacatacgcgcctattctgttttcaggaagaacttgatgaaagatgggttcacgatgtttcagttctccatttacattcgtcattgcgcaagcatggaaaatgcagaaatgcatataaaaagagttaagtcattccttccggagttcggaaaggtaggaattatttgcataacagacaagcagtttggtaacatcgagttgtttttcggcaaaaagacattcgcaccaaatgcacctgggcaacaattggaattattctaagaatggggattccattgctaaaaatgaaatccccatcctttatcgcacttttttatttctgattaataccataactattttattatcagaagcatactgcatatctgttgttaatgcaagtgcaaagatactaatttttaagcaaatcacaacgggagacgctgatatgggttaagaactcacgttgttaatgcaagtgcaaagatactaatttttaagcaaatcacaacggtggtccatgttgtttcggctacctttttgttgttaatgcaagtgcaaagatactaatttttaagcaaatcacaacagaacggaaaactttgtggtttgccagtgtgttgttaatgcaagtgcaaagatactaatttttaagcaaatcacaacaggattctctttcttctgcttcggtgcctggttgttaatgcaagtgcaaagatactaatttttaagcaaatcacaactatatcagaacatctaccactcgcttatgggttgttaatgcaagtgcaaagatactaatttttaagcaaatcacaaccgaactggctgaggggcttgccggctgcgagttgttaatgcaagtgcaaagatactaatttttaagcaaatcacaactataaaggatttggacgctgaccattggaagttgttaatgcaagtgcaaagatactaatttttaagcaaatcacaacttgtcaaagaagatataatcatacacgtctgttgttaatgcaagtgcaaagatactaatttttaagcaaatcacaacttatcttgttatgtaaaatttcagtcctctgttgttaatgcaagtgcaaagatactaatttttaagcaaatcacaaccgtcttgcatatcatcagtgatttgttcgtgttgttaatgcaagtgcaaagatactaatttttaagcaaatcacaacactctcggttttgaccccaagatcggcgacgttgttaatgcaagtgcaaagatactaatttttaagcaaatcacaactacggctgcccatctgcaccagagcgtcacgttgttaatgcaagtgcaaagatactaatttttaagcaaatcacaacttctaatcgttgtgagttccttggtggcacgttgttaatgcaagtgcaaagatactaatttttaagcaaatcacaactcataaattttgtaagtgtggattagattggttgttaatgcaagtgcaaagatactaatttttaagcaaatcacaacagacttgggttatgcatacttgcgtggtgcgttgttaatgcaagtgcaaagatactaatttttaagcaaatcacaactactccggcataagcggcttcaccaacctgttgttaatgcaagtgcaaagatactaatttttaagcaaatcacaactcagtgtacggcgcgccaaaaccgacgccagttgttaatgcaagtgcaaagatactaatttttaagcaaatcacagcggcaacctcttgtcgatggattttgaagaaatgcacgctttgtgataatttacgcgaatagcagtatcatcaactgtgctgtcattactcttacgaacagcgtcagtggataaactgttgcatacttcacggctgggatgttgttctttgaggcatccggggtgagcgacagggcgggggcgaacgtcatgttgcccgcgacatatcccagaagcgtgaaatagtcgagcttgagccagtagcggccaagcgttattgtgacgcataaaggtatcatcattattgcggcggcgtacagcatccacatgtaaccgccgtcaaggagtttttcgacgaaactgcctcccacgctcagtccgacgcaggcgaggaacagcgtgatgccgaactcgcgaagcatgaggttgacgctctgcgtgttgtgcgtgttgagtttgaaccgcgtgccgaaattgcttatcagtatcgccacgatgagcgttccgcccgagaacccgagcttggcaggcatcggcatgccgccgagggggatttcgacgctgccgacaagcacgccgacgagtatcgttacgaatattaccgaaaggttgggcttgcgcagcgtgcttgccgagttgccgaggattttctccacgcgcttgacgtcgccctcaccgcccacaagtatcacggtgtctcccgtctgcaggcgcaggtctgccttgccgatgaggtgtaccccggcgcgcagcacgcgcgagatgttgacgttgtacagcgacctgaacttgagttcctcgatgctcttgccgttcaccgcgccctgcgtgacgagacaccgccgcgaaaccagcctgtggtccagcttgaaccactgcgtgtctgacatgtctatcttgtggccgatgaaagcgcacatcgtctcgacctcgttttgttcggatatgacgagaaccttgtcgccctcgttaaccactgaccccggatgagccatttctatctctccggtgtccttgtgcagtattctggatatgatgaactcgtgcttgtcgagcagcgccttgacgtgcgatactgtgttgccgaagattgctgggttggtgacctctattgagaacacgagtgcctccgcgcgtttcgccttctcgcgttcctcgatttgctttgtctccttgtcgacctttatcctcagcacccatttcatggtgcttgtgatcagtatcatccctattatcgctaccgggtaggccagtgcgtagcctatgccgatgtcagaaggtatcgcccccgtcatgcctttggccgcctcctgcgccgcgccaagcgccggagtgcttgtcaccgagccggcaacgattcccatcatcgtggaaatcggtgtcccggagaaatagaatatgatgtatgttatcactatggcaagtgccacggaggccatcgacagcaggttaagctgcaccccgccttgcctgaaggtggagaagaatcccggccccacaatcatgccaatgccgaaaatgaacagcaccatgccgctctccttgacgaacgacagcaccatcgggtcgatgctaagtccgatatgcccggcgagtattccggaaaagagcacccatgtcacgccgagcgacagtccacctggctttatcttgctaagcagtatcccggcggtgaccacgagcgcaagtacgaaaattgattgaccgatgccgtgtcctgtcagcagttcgactataatatccattgtcaccagttatgtttttccgacggaagcgtttccggcgggttgttagattctcgctgcaaagttacaacattcttcttgttccgagacttttctgacgtttttttgctattaattcggcgatgtaaatgtatatgccacaaaaaaaggacacaatgagattgtcaaatcccacgtgtccttatgtttattatgttgagagccggacctgtctgtacggtctcaacgcctgttgccttacgtcagagcctcttcagcttcactgtgaagtggcgcatcagcggagcctcccattcgatggccacgccgtgcgttatctgctcgcggcgctcgtaaacgttcttcagcgcagcggcgatgacgttcatgtggttgtcggtatatacacggcgcggtatgcagaggcgcagcaggtcgaggcctccgaagcggttctcgcgcgtcaccgggtcgcggtcggcaagtatatatccaatctcgcagccgcgcacgccagcctcgaggtacagttcgcacgtcagggtctgtgccgggaactcctccttcggcacatgtgtcagcacgcggtcggcgtcaacgaagattgcatgcccgcctgcgggacgctggtaagggatgccgtactcatcgagtttcgatgcgaggtattccacctgatgtatgcgcgtgtgcagcatgtcgtactccgtgttctcgtcgaggcccacggcaagcgcgttgaggtcgcggccgttcattccgccgtatgtgatgtatccctcgaaaggtatgcagaacaacttggctccctcgaaccactcttcgttgtttgtggcgatgaagccgcccatgttaacaacgccgtccttctttgccgacatcgtcatggcatcggcgtccttgtacatctccagggcaatctgctttatggtcttgtcggcatagcctttttcgcgtgtcttgatgaaataagcgttctctgcgaaacgcgccgagtccatcactacaggtacgccatgcttgtggcagagcgcgcatgtctcgcgtatgttctgcatgctgacgggctgcccgcctacggtgttgttggtgacggtcagcaccatgaaaggcacgttgcccttgttctctttcagcactttctcgagtttctccaagtcaacgttgcccttgaacggcacaactttctgtgtgtccttcgcgtcatcggtcgttacgtcgatggcctttgccttgcggctctcgatgtgtccctttgtggtgtcgaagtgggcgttgcctggaacgacgttgccctccttgacgagatatgagaaaagtacgttctcggctgcgcgtccctgatgggtcgggattacatatttcataccgaaaatccttttgacgaccgactcgaacttgtagaacgaggtggctcccgcgtaactctcgtcaccgagcatcagttctgcccactgacggtcggacattgcaccggtgccgctgtctgtgaggcagtcgatgtaaacctgctcggccttcagttggaacacattgtagtgtgcttcgcgaagccattgttcgcgctcttcgcgcgtactcttcctcatcggttcaatcatcttgattttccaagattctgcaaatggtatttccatagtctggttattttattaataggttgatttttatttaatatgggtacaaaattacaaacaaatttcgacacgggcaaccgtttcacatatttttatcccaaaagtttaaatagtcaacagacaaccgccttgcctgccagcaccttttttcttgcctgaaataccgcgctcctttgtccatgagtaatgaataatgccgatgtcataagattgccatccacgccttgtctgtacataacatgaagtctggcgatgatgattttcactgcatcactgtgtgtttccccgtctgcagtcagttccggttttgatgagcgatctggggttaggccgttcacattataataatatatggcaatacgggcatagaccgcctcattgccaactcaagccttatgtgtctttccataacccaacactatatattatgttttcaaatacaacaaatttccccagcaaacggcaaaaacaacaacgattttcttcatcatgcgatgtatgtcccggcattgaaaagacaggctggtgcaagttccaaaacgaagtgcaataaaagagtacccctcgccgagagatgcagacgttctcgaagcgtagcgagaggttgtctgcatctctcggcgaggaaaaatagacaaccagcaatacaaataaaaaaagggagaccgcagtctcccaaagattaactaactttgtattgtgaaatatcatcaattaacctcggagtaaaggtcgcaaattttcgccttactccaaaagaaaacaccgggaaaagaaattgccgacatcgtcggcatcagtcagtcaacactctcacgtgaaatcagacgcaacagcacgccatcgggaaagtatatctggacaaaggcgcacgatatggctatgcggcgcaggaagaggacggtaacgaacgccagactctccgacggattggtctggagaatcaatgagtatatcaccaacgaccagtggtctccaagacaaatatcaggatacctgcgcaagaacgaggggataagggtgtcccaccagtccatccataacatcatccacaatgacacgacaggggaacttgccaggcacacaaggcataagatgaaatacaggcatcatccca

SEQ ID NO: 2304 - DNA, 20955 bp, synthetic construct
  misc_feature 1..20955: note = Synthetic
  source 1..20955: mol_type = other DNA
aggaggattctaaccagcctaagagcaaactcaaaggcacttatttcgatgatgacacccctaatgagaaagacaacaccatgctcactctgcaagaggggttgaagtttgccatcgacaccgaggccgattacatgccagccaacaaggcttgggtcgacaattctatcaccaccgctatcaccgctatcaacagggatgctcaggccgatgacaccatctacgacctcatgggccgcaaagtggtcaacccaacccacggcatctacatccagaacggaaagaaagtggtttattaatgcattataatgcacaattaggcttacgccattgcgcttgattgaaaggcgaattcagtgatgagcaaaagctgtaatattcccctcaacaccccctctaagatagagcgggcaggggggagtatgacaacccgcatcaagggaatcctctgtgccttggcaatctttttgtcattcgccacaagtgccgcaccacgcgactcagtggcagtgacctggacccacccaggccccttgctccccgacagcagtaactttgtcactgcaagcgtgctggtggcatcgccaggtgaggcaatctactcgcagctggggcatgccgcattgcgcatggaatgtcctgtccacaatcttgactattgcttcagttttgaagaagaagctggaatgggtggcatcctcaagttctttgtaggtaagaccgatgctcacatgatggcggtgccaacagcacagttcttgagcaatttcaagaaagaaggcaggcaggtgaagcagtacacactcaacctcactttgcatgaggagcaagaactgtggcggctgctcgacaacgactacgttgacgagaacctgcggcatttcaacttcctgcagaacaactgctcgtcggtgtcgctcatggcgattgagaatgtggtggtggatgagacaattgacttcaacggctggcccgagcctttcaaattgattaatggggcaataatgaagcatcaaactcgcgaatggccttggctgcaattcttgtgccttacattcttaggtactgagggcgacttgttttgggagcaagaacaacgcacaggacctgaattgctgccgctagtgctcaagaaagcctcaatagtcgcagccgatggctctagtcgcccaatggtcacaggtgaaaaggagattctgccacttgtcaatcgctttgaggcgtcacggttaacaccaactgtggcgtttggcgcattgctgcttgtggtggtccttttcacattggcacaactcaagtggaaattgtgccgtgcagggcgagtgctcgatatcatgctgatggtgctggtaacggcaatgggtttgttcctgatttacaccagctttgtgtcagggctctttggtaagcattggaactggtatcttataccattcaatccactaccattgatcatttggctcatctggcgcaagcgcaagggattctacaaggtctatttgctctacacagtggttctggtgttgtttatcctcgccaccccactgagccagcaactcgaccttccacatcagctaatcactgcaacactcgcagtgcgatgcttatttaactactatgacagcaagcgaaatgccgcaacagccgtaataatgacaaaaacaaaaaataaaaatattaaaaataaaaagtgatgtttagatataagaattttaaaatactgataatgctgatgctttttgcctttgctgggcagaatgcttgggcagacgaggactactggatgtatgtacatttgaaacaaaaatgtgaaccaacaggagttggtaaagtttatgcatcaaccgacccattaagtgctgacaatccaaataattgtgttgttgtcccagaaggtggtaaagaatacgaaagttcaacacatgagtcaaatataactaataattgggtaacaggtacacaatggtttgttaatacaattcctgttgatgtttggagttatggatttgtgggttggaagaatggagatggagtaattgttagtacagaacccagtcctctacaaagtttttatgatcctggggtttatgctgttgataagaacggaaagaaaacatcaaaatcaggttatcttaagccaagtccatttcctgtaactctcgagctaacagcagtttatgaggaaattgacccaattgttgttgctgttccagagaattatagtattggcaacacaataattagcaaagcaaataataaagtggcagacaatgtagaaatttttgcctatcctatacggccaagttcaaaatttataggttggtataaagatggggtgtttgaaactacagaaaatccatattcgtttaccatagaagatgaaactaagcatacctatacagcaaaatttaggacaggacactcttttacagagtaattaataagtctactaaaagggttataaatggagaaaaagatcaaggtagtatgactgatttatcagcattacaattagtggattatcaaacggctcaagtatctgcgggttcagtatttgaaataaaatatgataattctaaacctgagtgtgttgattttatagttcaaaattttgatccaggagccaagtattataataaagataaaggtgtttttatgtgtatgcgacataaaatagttgataatacatggaaaatacacccaaacagaaacaccccattcttggcagacaagggttctgggaatgtggttgctgaagaatatatagtagataattataattcaaaagaatatgtggattggtatttagagccatttgatttggaccttgagactaaggagaattatttctcccttgatcctgcgaagttgattcaattgggtgaagatgagtattacaccacgttgcgtacttcttgggacattttgttcaatcctgagcagatgactccttatgttgtcacttcggtggtggatgagacgaatggcacgtttgagatggagccattggatggcaatatcattccaaagggtacccctgtgattataaagacaaaaagcaccgatattgaagaaaaccgcatggtgccaattatctccaatgccacaaaacctacagtcaatgagttgaagtctagcgagaaatacttccctaaccagagtgtgtcgactggcagtaactataagaaacttatggtaaaagacggccaactcgcctttggcggtgatgcgttgaataaagtcaatggaaacgaggcttacctgtgtgttgctaatgacgtgatacttccaggtcttcctaacatcacccttgccgacttgcttgaaagtcgtgataccgagaaaacttatagcgttaccgacttgacttgcgtgtatgcccgtgataatgtgctgtactgcaaggatgatgacggtgcaagaaaccgtagcgaaatgaaggaaggcgaaatagattatttggtgacagttgcaggtctgcaaacgaaaccttgggaccaaagtaactggatagcagtgaagttgcctggcgaggccaatcctaattatttagaccatcgcttgacgaaagttgttggtaggttaacaaatacggtgaatcctgagtttgaggttacagttgctcctagcattggcgacgagaatccatatgacgagaataattatataacttgcaacttttcgggttcacatcaggcgaatgtcactatcaataacgtggagcacaactactattttgtggagcccaagcccatggagattgccaatgtgaaatgggcattgtggaatggcgagactttctcaaagccctccaacgccagcagcgacctgaagggtgagtttgctgccaatttctctttctcgggagagcctagtagcgctggggtgtacaatttcccggcattgataaagattgccccaacagctcaaggcatcatgccacgcgctcaggatgaggctacaaagagttgggtagttttcccacttgaacttactaaccagccagttaccgccatcgacagcttgcaaagtggcaagacgactgtcaaggtggtctactacaacctcatgggagtagagagtgcggtgcctcataatggtgtcaacattgtagagactcgctatagcgatggtacacgcacaacaactaagataattagataaggatttctgttatcagcattacaacaacggtgagcgatggataatcgcttgccgttgttgtgctatggagggaatgcactattcttaaaaaatgttataaatccgcttggtttgccataaaatcattatcttagcagtctatattcatgaaagctataaaatgatacttgccgagttgtttccttattccagactggtgtttaccattttgtatggtatcacggcggtagcgattattggcgttgtggttagcgagaaccgcaatccagtaaagacgctggcgtggatcactgtgctggtgctgctgccggtggtgggtatcgtgctttacatcttctttggccgcagcctgcggcatgtgcgcatgatatctcgcaagaagcggttgcgattgactggccgcgacgacatcaagcacctgatgcgcggtgggcaggtggtgcgctacgacacgtcgctgagcgagcgccagcagatgataaacctggtgaacagtatccagggctcgccctacttgcccaacaacgaggtggagatcttcaccaacggcaaggacaagtttgctgcctacaagcgcgacctgctcgctgccaagcgctatatccacatccagtactacatcatcgagaacgacaagctgggcaatgagatagccgagatactcaagcagaaggtgggcgagggcgtgaaggtgcgcgtgctctacgaccacgtggggtcgttccacttcgacatgtcctatttcaagaagctgcgcaaggcgggagtagatgtgtatccgttcatgaagatcaccttccctgagtttgccaaccgcatcaactggcgcaaccaccgcaagataacggtcatcgacggcgagataggctacataggtggcatgaacatcgccgaccgctacatcgacggcggcaagatggggcactggcgcgacactcacctgcgcgtgcggggcgacgtcgtggcagcgctgcaggtgtcgtttgccatcgattggaacttcatgaagcgtgagctcatcgaggagccggtggcagtggtggagccaggcagcatcgtccgccctgtgggcatgcagctcgtcactggcggtcccacgagccagtgggtgaacatggcgtttgtgttccagaaggccatcgatggcgccagcaagtgcgtctacattcagacgccctatttcctgcccagcgacagcctgctcaagtcgctgcaggtggcggcgatgagcaaggtggacgtgcgcctgatgattccccgcaagcccgacagcatcttgctgcgctatgcctcctattcctatgtgcggcagtgcctcgacgcgggcattaagatctacttctacgagcctggaatgctgcattctaaggtggtggtggttgacgacgacttcgtgaccacggggtcgaccaacttcgacttccgcagttttgagcacaactttgagggcaatgtgctggtctacagcaacgatttcaaccagcgcatgaaagacgtcatgctcatggacatgcatcagtgcagccgcatcagcctgcgcgcatggcgcaagcgccccatgtggcaaaaggcagtggagtcgattgtgcgcctcttcggccccctgctgtagaagtagtcagtaatcagtggtcagtagtcagttttcagtaggcagtattcagttatctgggttttccgggccttccgggccttccggatgttccgggttttccggatgttccgggccacttaaaactttccactttccactttccactttccactttccacttaatacttaacccttaacccttaacccttaacccttaacccttaacacttatcaatgaaatctttaagaagtatatcaattgctctcgccgtgcttgttgcagtggtggcgggtgctcaggatgcccccaagcgtgagttccgcggagcgtggatgcacatcattggccaggggcagtatgcccgcatgactcccggcgagacgcaggactacctgcgcgatcagctcgacaaacttgataaggcgggagtgaatgccatcatatggcaggtgcggccgcaggccgatgccgcctatgtgagcgacctcgaaccctggtcgcgatggctcactggcgaggcaggcaaggcgcccaatcccgtgtgggacccacttcagttcatgattgacgagtgccacagccgtggcatggagctgcacgcctggataaatccctatcgcgtgaccagcggcgagagcgacaagcccgcccctggacacatctactaccagcatccggagtggttcctgcggtatgccgacggcaaaatctatttcgaccccgcattgcccgagagccgcgacttcatcaacctggtggtacgcgacatgattacgcgctacgacgttgatgccatccacatggacgactatttctatccctatcccgtgaagggtgtggacttccccgacactgcctcgtttgcccgctacggcaagggctggggcgacaagggcgactggcgccgccacaacgtggacatgctcattgagcagctgcacgccaccatccaggccacgaagccctgggtgaggctgggcatcagtccgtttggaatctggcgcaacaagcgcagcgaccgcaacggcagcgagaccagcgggctggagtgctacgatgcgctctatgccgactgccccaagtggacggcaatgggctgggtcgactacatggtgccgcagctgtactgggaactcgagcacaaggcggcgagcgacctcgtgctgagctactggtggaacgaccacgccaacggtcgccacatgtactatggccaggcggtgcgcaacgtgatggaccaccgcgacatccccgacacgctgaatcccacccagctcaaccacaagattgagctcatgcgctcgttgcccaacgtgcacggcgtgacctggtggccaggctactcggttaccgagaactacaagggagtgctcgactcgctcaagaataaccagatgaggaccagggcgttgtgccctgcggtgacgtggatcgacagcattgcgcctgcgccagtgagcaatctgcgatttgacaagcaaaagctcgagacggtgctctcgtgggacgctcccgccactgccgaccccatgcagcaagcggtgcgctatgtagtgtatgccttccgtgagggcgacccaatcgacacaagtaaggcgagggcgataatcagggtgaccaatagcacctcgataaccgtttccacactaaatattcccaagaaacagaagatggcgcggccaccaggcaccacctatgtggtcactgccctagaccgctgcaacaacgagagcgaggttagcaacccagtgaccgtgaggttctaaggtgcattcgctcgcctgtgatggggtgggtgaagtttattgactgtgcatggaggcacaggcgcggagcggcggtgccgtagagcatgtcgcccacgatggggcaatgcaggccctgggggtgtgaggcatgcacgcgcaactggtgggtgcggcccgtgaggggcttgaattctaccagcgtgcggttgccacgatgctcaagcacacgatattgagtgactgcccgcttgccgtgctcgtaatcgaccacctggcgcggacggtcgtcgaggtcggggcgcaatggcaggtcgataattcctttttctttcagtggtttgccatcgagcagggcgatgtaggtcttgcttacggtgcgctgctcaaactgctgtcgcagagcactttgtgcctctttgcttttggcaaagaccaccagtccgctcgtcgcctggtcaagacggtggacctctaaggcgcttgcggcgcggggcgcggggatgggggattggggatcggggtcttttgcgcctgcggcgcggagcattttgctcacaatctccagtgccgaggtggcgttcttgtccttgccgggcacggtgagcatccctgctggcttgtcaacgacaattagccactggtcctcgtagacaactttcagttgctcgttgctggctgtggcgagcggattatcctcaacgtcaaggccttgcatcatgaactcgagcaaaggcaggcacttgctgtggcaggcagggtagtagtggccgtggtggcgcacctcgccctgtggcgactgtcccacccagaactctgccatgcacacgggcgtgtagccatgcaggaaggtatattgcagcagcttgggggcgcagcactcgccggtgccgcctggtggcaatcgatggaggcgatgctcgaagatagttgcgacatcgctgctctcgccgcgcgcgttgcgcaccacaaagagcttgaacagctgacgttgcagcgtctcgctcatggtgcgtcgcttggctttcagagcgttgattgttgtctgcaggtcattgagccgttgtgttattctctctatttccaagcggtggcgcttcttgagccggcgcagctcggctttcatgaactggctctccttgatgagcgcggcctcttgctcggcagtgatttcgccatcactgcgccgcttgtcgcgctgtgatttagcgctttccatggcatggcgcatcgtcgtttcctcaagttcatgccgcgccattgtcgtgtcgagaagattgtcaagttccttcttcgtgggcgaacactcaagcgcctcgatgcggtggttgatctcggtgatctgtgcctcgccagtgcggaaaagaccctgaggctcaagcaggttgtagatgtgcggcacaaaatagggattgttgccgttgtgggcaagatttcccgagtaggcggcgagatatcccagcctgccgtcctcatccttcaccaccagcacgcccagcatcttgccggcaaggagttcgtcgcgccacagctcctggctcagggcatagtccatcacctcggccgccgccaccttgcacagctcatgcggcacatagtggaacggaaaagtgaaccgcgccggcagctccacgccacccacgtcatgcaagaacctatgtaacttctcatcgcccataatcgcaagcgcaaaagtacaaagaaaatcctagtgatgcaagataggtaagtacaaagtgcagagtggagagttaagtacaaagtgcagagtggagagtggagagtagagagtggagagtgcagagtggagagtgcagagtggagagtgcagagtagagagtgcagagtagagaggaggtggaacggttagattgactcgcttgactcacttgactcactggatgggtggaaggtggaacgtggaaggtggaacggcggtgagagaacgatactctcgcaaagttgcacctatcggtgtcgcaaagcctgcttgcgcaggagtttttaatagattgaagatagatgataggattcacttgattcacttgactcacctgactctctgactcctgtgggcaacgtgccgcttcccaaagtgaagatttgctcttatgtaatttataatctcgtcccatcggtagcaaaagtaaaggaaacaaaacgaccggcacaacattaaaagaatagagggcgaaggactaaggacaaaggactaagtgtgaagtacaaagtacaaagtacaaaggaagaagtacaagggacgaaggagtaatacaccaacaaaaaagaacgaggcccaaaggtcccgctcttgatgttttcacaacggaaataaatccttattgtgaattgcttcaaatttgttctgcaaatttagttcaaaataattaattcaacaaatttattaggcaaaaaaatcctatttccaatatttttgcttaaatttgcagaaaataggaattaattaaattgcaaataataaaaagatattacaatatgaagaaagtattaggtttagatttaggaactagcagcataggttgggctgtagttaatcaagcagagaataccgatgaaaaaagcagtattgtcaaactgggagtaagggtaaatcctttaacggtagacgaaaaaggaaacttcgagaagggaaaaagtattacaactaccgccgaccgcactctcaagcgtggcatgcgtcgcaacctgcaacgctacaagcagcgtcgtgacaaattaaaagaccttcttatcaataacaacataatttcaaagacaaccaagctgagtgaagacggcatgggttcaacttatcagacacttgagttgcgtgcaaaagccgcaaaagaggaaatttctcttgaagagctgggccgagtactactcataatcaataaaaagcgtggttacaagagcaatcgcaaggcaagcaatgaagaagaaggcgagctcattgacggcatggctgttgcacgcgagctttacagaaaaggcatcacaccaggtgaatatgtttatgaactgctaaagtctcaaaagcgctataagccgtcattctatcgctctgatttacaagccgaactagaaaccgtatggaacaagcaggctgagtattatcccaccctgcttgatagcgagacaagacgaaaaatagaaggcaagggcaaaaccgacacaaggaaattgttctatgcggcccacaatataagtgctgccgaagagaaagaccgcaagttgcgtcaaatcacctattatcaatggcgtgcattggcagctaagtcgagaatagaacctgagcaactcgttaccgtcttgagcgagataaacggcgatattgcagcctctagtggatatctaggtgcaataggtgaccatagcaaggagcttgaaatcaatcaccttaccgtgggcgaatacctgtttaatataatcaaggagaatccccacaatagcctgaaaaatattgtcttttaccgcaatgattacattcacgagttcaacacgatatgggaaacacagtcaagattccataaggaactcacgcccgagttgaaggaaaagatagccaatgagacgatattcttccagcgcaggcttaaatcgcaaaagggactgatttctttctgcgaacttgagggaaaagagattaccgttggaggtaaaaaagttatgacaggttccagagtatgccccaagagttcccctctgtttcaagaattcaagatatggcaagacctgaacaacctgttgcttgaggacaagaccaccaggaatggcgacaagatactattgactataaagcagaaacagcggctctataaagaattgtattgcactaaggaattgtcggcaaaagatgccattaaagtgctggggctcaatgataaggaatatggtcttaacttcaagaagctgcaaggcaatataactcaagtcacactattcaatgcctacaagagcatagttgagatgacaggtcacgatgtcgagaaatttgacaaaatggatgccgagaacaagctgcatcttgttaccgcagtcttagaaatgcttggagcaagaaccgatttcttgacatttgacccaggcaaaaatgccgatgagatgcaacagaatgccatgttcaagttgtggcacttgctctattcctatgaggacgataacacccccacaggcaatggcaaactagtagatcatatcgcagagttgacagaattgcctcatgaatatgcctcgctcttagctcgagtgacctttgttcaagactttggctcattgagcaccaaggcaatgatgaaaatcttgccttatatgaaaaatgagggcatgatatattctgatgcctgtcaagctgcaggatacaaccattccaagcaatcgttaaccaaggaggagaaagaactcagggaacttgagaagcaccttgaagtgctccccaagaacagcctaagaaatcccgtggtagagaagattctcaaccagatgattcatgtggtgaatggttgcattgatgagtttggtgattttgatgaaattcacattgagatggctcgtgagctcaagcaaagccaaaagcaacgtgaagcgaccactaagcatatcaatgacaagaaccgcgaagttgaaaagatcaagcaaatattgaaagaatcccccttcaacattcctaatccgagccgtaatgatgtgcttcgatatcagctctatgaagagttggcacctaatggctttaagaccttgtattccaatacctacatcagcaaggaaaaactatttagtcgtgaatttgacattgagcacattattcctcaggccaaagtgtttgacgactcttattccaacaagacacttgagtctcgtcaggtgaacattgagaagtcaagcatgacagccatcgactatgtgaagatgaaaggcggtgatgcagcagtagaagattacctcaagcgcatagagttcctaaagaaagatggaacacgcaagaaatatgacaatctcacaaccaccgaagacaagattaagaatgacttcttgaatcgtgacttgagcgactctcaatacattgctcgcaaggccaaggagttgttgctgaaagtgtcacgtgatgttattgcgacaactggctcaatcaccgctcgcctgcgtgaagactggcaacttgttgatgtgatgaaagagttgaactgggaaaaatatgacaagctgggtatgactaccgtggagcgcaaccgtgatggccatgaagtgcgtcgcatcacaggatggacaaagcgtaacgaccatcgccaccatgccatggatgcactaactatagcatttactcgacattcccacatccagtatctcaacaacctgaatgccaaagacgatggcgagaaaaaagactccaatatctatggcatcgaaaagaaagagctacttcaaaaccgtcgttttgtgccacccatccctttagatgaatttagagcccaggcgttaaatagccttgaaaacattctggtttcgatgaaagccaagaacaaagttgtcaccaagaatgtgaacaagcccaaaggcgcaaaaccacaaaacacattaacgccacgcggacaactgcacaatgagaccgtctatggacagcgtcatcgctattccacccgtgaagagaaagtgggcgcttcattcactgccgagaagatcaacagcgtgtgccgcaaggcctatcgtgatgctctcatgcgtaggcttcaagaaaacggtggagatcccaagaaagcttttactggcaaaaactcattgtcaaagaatccattatatgttgacgagcaccacatggtaaaagttcctgaaagagtgaagaccgtagttcttgaaacctactatacaataagaaaacctatcaataaagacttgaagattgacaaggtagttgatgagggaatcaagcgcatcttgcaagcaagactggctgaaatgggcgatgcaaccaaggccttctccaatcttgacgagaatcccatatggctcaacaaggagaaaggtattgcaataaaaagtgtcacaataaagggagtgaatgtggcaactccactacgccccaagcgcgacaagaatggcgacattatagttggcgatgatggaaatattatcctcaccaactttgtgagcacatccaacaaccatcacatagcaatcttcgaagacagtgatggtaacttgcaagagcatgtggtatcgctttatgaagcaacggcaaggaaaaaccgcgacttgcctgtggttgaccgagattataacaaggagctgggatggaaattcctcttcacaatgaagcagaatgagtactttgttttccctgacgaggaaacaggttttgatcccagcgacatggatttaactaacccagtgaactttagcctaataagtccacatcttttcagggtgcagaaactttctacatgcaactatgtgttcaggcatcatctagaaacaaatgtggaggaagaaaaagttcttagaaatactacatggaaaagaattcaaaccactaattatttacggggtatcgttaaagtccgtgtaaatcacattggtcaaatcgttaaggtgggtgagtacttatgattaagcgcacgttatactttggcaatccagcctatctgagcatgaagaatgctcagatggtgctgcgcttgcctggtaaagatggtgaggaagaacaaattcgcacatttcccatcgaggaccttggcgttgtgattcttgaccacaagcagattaccataacacaaggactgatggagcggctgcttgagaataactgtgctgtaattacttgcgactctacccacatgcccagcggtctgcttttgcctcttgatggtcactcccgccagagcgagcgtttcaaggcacaactggcatgcagcaagccattaaaaaagaacttgtggcaacagacagtgcaggccaagattgccaatcaggcatcggcacttgaaaagtgtgttcctggttgcaagaccggaaacatgagagcgtgggtcgaggaagtgcgcagtgacgacaacatgaaccttgagggccgtgcggcagtctactactggagcaacttctttccagagataaaagacttcaagcgtaatcgtgaaggtttcttccccaacaacttgcttaactacggctacgccatcttgcgaggggtgatagcacgcaacctggtggggtcggggttgttgccaaccatgggaattcatcaccgcagcaattataatgcctattgccttgccgatgatattatggaaccttatcgcccgtttgttgatgtgcatgtgaagcatgttatgaaacacagtgatgacccatgggagttgtcgccagccgttaaacgcgagctgctaacaattcctacccttgacgtgaagattgatggcaagcgacggccactgatgattgctgccgagatgacaactgcatcactagcacgatgttttacgggtgaatctcgaaagatttcttacccatatttttaagaaagtttaacggtgatggcatgttgtcagcgattcagtgaatataggattatgtgggttcttgtgttttttgatttgccaaccgataatcgaaaacatcgaaaagcctatgctacattccgcaaggggttgatgcaagatgggttcaccatgatacagttctcaatctacgcaaggcactgtgccagtgcacaaaacgccactgttcacgttcaacgagtgaagaacatgttgcctgccgatggcaacatttgcatcatgaccattaccgacaagcagtttggcaatatggaaattttcaacggaaggagtccagatactccaaaatgtggaggacagcaactcgaactcttttgaaacaacaaatccaccctaagaggtggatttgttattgtagtaatacaacttttttgaaatcctaatacaacatgtatattcctgtgatacaaagagttgcgtacatcgtgttgtattatccgatacaaagatacaaatttgaaagcaattcacaacggtgatgccgagtgggttgtcaccgctgccgttgtattatccgatacaaagatacaaatttgaaagcaattcacaacccatgcaaggtgcttagtgagaagaccaagttgtattatccgatacaaagatacaaatttgaaagcaattcacaacaagcggtggcactatcagttatgacaacacgttgtattatccgatacaaagatacaaatttgaaagcaattcacaacatctcgcgcagggcatcaagttgagcgttagttgtattatccgatacaaagatacaaatttgaaagcaattcacaacaagcggcgtgtcgtgcaggcaccgcccgtgttgtattatccgatacaaagatacaaatttgaaagcaattcacaaccacttgccaggtgtgcctttgtaatggccagttgtattatccgatacaaagatacaaatttgaaagcaattcacaactcgggaactgttctcaacaattgacacaggttgtattatccgatacaaagatacaaatttgaaagcaattcacaacagtactacaactaaatacattattgaaagggttgtattatccgatacaaagatacaaatttgaaagcaattcacaacagtcttatctcacttaacgtcttttcagttgttgtattatccgatacaaagatacaaatttgaaagcaattcacaactaagacattccccattgtcaacgacctcacgttgtattatccgatacaaagatacaaatttgaaagcaattcacaacaggagattgtgaacacctataacgacattagttgtattatccgatacaaagatacaaatttgaaagcaattcacaactgactttatcaatcgctatgaccgctggagttgtattatccgatacaaagatacaaatttgaaagcaattcacaacgcaagtattaattcgattgtgtccagtcctgttgtattatccgatacaaagatacaaatttgaaagcaattcacaacaggcacgcaatgaaaacgaggcaagcgaaagttgtattatccgatacaaagatacaaatttgaaagcaattcacaacaccagggcagttgccgatttcctgcgtgccgttgtattatccgatacaaagatacaaatttgaaagcaattcacaaccggcacgaagacggggacacgcttggagcggttgtattatccgatacaaagatacaaatttgaaagcaattcacaactcttattgtagttgacactttaatcataagttgtattatccgatacaaagatacaaatttgaaagcaattcacaaccatctttcgttgacatcgtgccatcaagtggttgtattatccgatacaaagatacaaatttgaaagcaattcacaacaaaggattggctttaatcgcagcactaaaagttgtattatccgatacaaagatacaaatttgaaagcaattcacaactaacacaggctttgttctcactgttggtgcgttgtattatccgatacaaagatacaaatttgaaagcaattcacaacatttcctccgtatgttaagttatatccgttgttgtattatccgatacaaagatacaaatttgaaagcaattcacaacggtcgagtatcgacttcatttcttcagatggttgtattatccgatacaaagatacaaatttgaaagcaattcacaactgaaagcaattcacaactcaatctgctcgcattgcttgtgaatgcggttgtattatccgatacaaagatacaaatttgaaagcaattcacaacttagcgcgtcgtcgccctcgtcaccatcgggttgtattatccgatacaaagatacaaatttgaaagcaattcacaacgttgtagctcttaatccaaaactctttgcgttgtattatccgatacaaagatacaaatttgaaagcaattcacaacaatttaatcgggcttgcctgctttgccctggttgtattatccgatacaaagatacaaatttgaaagcaattcacaacaatcttttggtagtcgatgctgttcttatgttgtattatccgatacaaagatacaaatttgaaagcaattcacaactgaacgccaagccgaccgacgccctcgacgttgtattatccgatacaaagatacaaatttgaaagcaattcacaactgttcatcggctgcaaaagcattgggcatcgttgtattatccgatacaaagatacaaatttgaaagcaattcacaacatcgaagcaagtaacagtcttgccgatgcgttgtattatccgatacaaagatacaaatttgaaagcaattcacaacttatcaggaccaactcagtagaatgtggcgttgtattatccgatacaaagatacaaatttgaaagcaattcacaacgcgctgccgtgcttgccattctctcaccgggttgtattatccgatacaaagatacaaatttgaaagcaattcacaacgctcgacaccacgctctacgtttatgtaggttgtattatccgatacaaagatacaaatttgaaagcaattcacaacacgcaccatttgtttctgttcttttcgtggttgtattatccgatacaaagatacaaatttgaaagcaattcacaacatatgatgcaaatcttggttatggcggaggttgtattatccgatacaaagatacaaatttgaaagcaattcacaacctgtttgcctatttcctcgattgtccttacgttgtattatccgatacaaagatacaaatttgaaagcaattcacaactgtggcgaagaaattgcaaaacgtatttcgttgtattatccgatacaaagatacaaatttgaaagcaattcacaacagtaatagatttatgcatattagacggagtgttgtattatccgatacaaagatacaaatttgaaagcaattcacaacacacagtttggacttaataaatatggcaagttgtattatccgatacaaagatacaaatttgaaagcaattcacaacttttgcctgtctttttagaaataaggcacggttgtattatccgatacaaagatacaaatttgaaagcaattcacaacatctttgccctcatgaatggcgattttgtggttgtattatccgatacaaagatacaaatttgaaagcaattcacaactttgcagaagatattataaatcttgcagggttgtattatccgatacaaagatacaaatttgaaagcaattcacaacgactcccagcaagcggtgaaaggcttgatggttgtattatccgatacaaagatacaaatttgaaagcaattcacaacgcaaagcacgtgcgaaataaatttattaagttgtattatccgatacaaagatacaaatttgaaagcaattcacaacaccgccaaatgtcgagcgcataggcttgcgttgtattatccgatacaaagatacaaatttgaaagcaattcacaacgccactcctgatgtaaccccctcggctttggttgtattatccgatacaaagatacaaatttgaaagcaattcacaacgctcattcagacattcctaaatgcatataggttgtattatccgatacaaagatacaaatttgaaagcaattcacaacttttagttttgcatattattttgtttttagttgtattatccgatacaaagatacaaatttgaaagcaattcacaaccaaaagtggctgataattctcctcaataccgttgtattatccgatacaaagatacaaatttgaaagcaattcacaacggaaatttacctctaaatttccccgtttggttgtattatccgatacaaagatacaaatttgaaagcaattcacaacgacgaagaagaggataactcatagtaaaagttgtattatccgatacaaagatacaaatttgaaagcaattcacaactgcccgataggcgcaaagtggatgatgcgagttgtattatccgatacaaagatacaaatttgaaagcaattcacaacgtcgctgtcgttgaatactaaaaaacaccgttgtattatccgatacaaagatacaaatttgaaagcaattcacaacacggctatgagaacgtgctgacaactgcatgttgtattatccgatacaaagatacaaatttgaaagcaattcacaaccgccacgatggcagccttcatctgctcgttgttgtattatccgatacaaagatacaaatttgaaagcaattcacaacgccctgctcatggtcaatcttggcacactggttgtattatccgatacaaagatacaaatttgaaagcaattcacaacagtgcgatgttgatgatagtctttaaagtcgttgtattatccgatacaaagatacaaatttgaaagcaattcacaacatcctcatattcgtggatgctgtcagttagttgtattatccgatacaaagatacaaatttgaaagcaattcacaacgccacgatatgattgcgaataacgtgttgcgttgtattatccgatacaaagatacaaatttgaaagcaattcacaaccattatttgcaaagaatgctacgatgtaggttgtattatccgatacaaagatacaaatttgaaagcaattcacaactcgttgcacgtcgtgaccattccgagggctgttgtattatccgatacaaagatacaaatttgaaagcaattcacaacagtgataaattgctaaatatagcaatagcggttgtattatccgatacaaagatacaaatttgaaagcaattcacaacctgcatgggctaccagtgagcagcgcaaatgttgtattatccgatacaaagatacaaatttgaaagcaattcacaattctctaacagggtggttttctgcggagttagttgtatcaataatgccgtttcatccttgtgcttgtggttccacatgaccatttggccgtagaccttgcgcttaaaatagttatcttattcacaataagcgttttagtgctgtaattataagaattttgtcaaaatccgtaaaatttttggcttgtggtgtgcccctatgagtggtctcgcatgatggatgttgttgaccctctaccgaggctcgggataaggaaaaactcacggatgccccacacccttcggggtgcgcgccgtggggttgcatcatttcgccccctcgggggcgccttggcctatggccaactcgcaatggtccatgtcgtgcgtattaataaactataaaaagaatatatagaaattattaatttggaaactatttcgtaactttgcaagttgagggaaaagtgagtgttatactcccccctgaccccagcggacaaggcgtgccttgtccctgcattgagggaactttctttcgatatttaatagagaattttttaatggctgaagaattagaactacaagataacacgcaacagcagca

SEQ ID NO: 2305 - DNA, 20929 bp, synthetic construct
  variation 8743: note = n is a, c, g, or t
  variation 8760: note = n is a, c, g, or t
  misc_feature 1..20929: note = Synthetic
  variation 8848: note = n is a, c, g, or t
  variation 8989: note = n is a, c, g, or t
  variation 9052: note = n is a, c, g, or t
  variation 8890: note = n is a, c, g, or t
  variation 8836: note = n is a, c, g, or t
  variation 8995: note = n is a, c, g, or t
  variation 8860: note = n is a, c, g, or t
  source 1..20929: mol_type = other DNA
  variation 8899: note = n is a, c, g, or t
  variation 8762: note = n is a, c, g, or t
  variation 8784: note = n is a, c, g, or t
tccaaagcctcctatttgaaaaggctggctaaagtacagctgggctttttgatactcaaaatcactattaacaaagccttttaagcccttagaatagctggcataaaatgttgggtattccgaattaacctgtgtacgttccacgccatttccaatggtttttttaccaggtgtatattttacagaaaattcgatttcagattgtacgatttcgcttttagttgtcgtaaaagttgcatcggtatagtagtctatattaaatgtacttggagaggccgattttaaggtacggtaggaagtccctaacctcagtaatacattctttcttggctccatgctcagataagctgtggatagattaatcgaggttagcttgctattatctccacttgcaaacactgcagaagacgcaaaactacgtcccaacacatcatttgtagtggttaaactcaccgcgatctgttctacatctctacgatttcctcctcctataataaacctgtttttaggattgaacatccattttccagaaagtccatatttaaactgatcgtctttaaatccataggccaaataactttgcaaacgccatttatcgttgggaccaaaatatgttctacctccaacccgcaagcgcagaccttctacatcattcattccaaaagaagaaaatataggcccgaaatcaaacttattaaactcgatataaccagaccctaaaatagaaaccaaattatacatgcgtttaaacttaggcaccgtttttaaggtgtctagcattttgtaaattcccttttcgtttgcacttaagatttcctgcctattcgcatcccaaaagtcatcattttgactgtaaatttcatcctcataaacatctatttcggtggcataaaacttattggttttttttatatcaaacttataattcttatacatggtggttcgcttaccgtacacccccttggctttgtcttttttattaaaactaaaattagacatcatataatccttctgcaacagaaaaacagaatcacttaatacctcgtactcttgttctatataaatatcttttacccaatttatatttgcgcttcgggtggctttcatatttatttctttgacggcaaaagtggtatcgtttacccagaaatcacctttaaaagtcaattcgtttttacgcctaggataatatacaatattgtaacaccacttactttcgatataggcactatctgtcaatatataattataggtcgctactcctgcgcgagaaacaggactggtaaaactcttgtcaaatatcttaatatagttatcgtaaatatcatactccacatataaatctttgataaaggagatgatgttttgattggcgctaaatccagaattacgatttcctacgatatcttctctaaccctattggttttattattcccatagacatcatacacagattcgttgatgaaaataggtaaaaatgcttttccagtaatccgagaagtatcaattcctttaaatataaactccatatttttaaacaacttactacgcatcatagcgctgtcaatattgtttaaatcaaattcgagtttttcgtattttttgtattcatattgatcaaataagtacattccgtttcggcgtttcttggcccaaacttttttcaatatggcgatggcaggattgcctttcttttttactttcccactgtaaagcacaatttcgtttaaccttgcagcggcttcctttaatacaattcgcaattgtaaatcacgatgcttaattgttattttacgagtttcaaagcctataaagctgacttctatggtttgataattttttttagattggatatagaacttcccgttttcatcagaaactgttccttcattagaatctgtgaaaattacatttgcaaaagggattgtttcattattttcatcgagtactaccccgcccactttaacttgacctaccatactgtagattcctattaataataaaaacaatgtacttctaattttttttcccatagtgttccatctttttcaaactaaaaaattccttccaggtagacctgaaaggaacttaaacgcaaaaagtatgcctttattttatatacataagctctttaacagcttttacaacatcactcgcattaggcatccactctgctaacaatacaggagaatacggagcaggagtatctgctgtagtaattcttttaattggagcatctaagtgatcaaatgctttttcttgtacttggtacgtaatctcagaagccacactagcaaaaggccaagcttcttctaaaataatcaatctattggtttttcttaccgattctaaaatggtatcgtgatccattggacgcacagtcatcaagtcaataatctcaagagaaatcccttctttttcaagtgtttcagcagctttaaaagcttctttaataatctttccaaaggtaacaagtgttacgtcagaacctactcttttaatatctgctttaccaattggtaatacataatctccttcaggtacttctcctttatcaccatacaattgttcagattccataaagataacaggatcgttatcacgaatcgctgcttttaataatccttttgcatcataaaccgtagaaggaacaattacctttaatcctggagtgtttgcaaaccagttttcgaaagactgagagtgtgtcgcacctaattgtcctgcagctcctgttgggccacgaaaaacaattggacaattcaactgaccaccagacatttgtctaattttagccgcgttattaataatttggtcaataccaaccaaagcaaagttaaacgtcatgaactcaacgatcggtcttgtaccgttcattgcagatccaacagagataccagcaaaacctagttcagcaattggtgaatcaatcacacgtcgttctccaaactccgctaacattcccttggaagctttataagctccgttatattcggcaacttcttctccaattaaaaaaacgcgatcgtctttacgcatttcttcactcatggcttcacatatagcctctctaaattgaatagttctcatatatttcgttttgaatttgcaaatttacaaaattctaaattattacaaatacaatgctgggaattattttactatgcgtgcatagtatttttaattttatttgtttaacttcgtagccagaaaaagaaataacttattaactaattttcaaaacacatcatatgaaggtattagtatgtatcagtcatgtacctgacacgacatcgaaaataaattttaaagacgacaatacacaatttgaccccaatggcgttcaatttgtaatcaatccttacgacgaatttgcgttgacgcgtgcgatgtggctcaaggagaaacaaggtgccacagtgactgtagttactgttggaaataacacgacagaacctaccttacgtaaagcacttgctattggagcagacaatgcaatccgagtaaacgcggaggctacagatggttttgctgttgctaagcaattggctgctgttgtaaaatcaggtgaatttgatgttgtattgacaggaaaagaatccattgattttaatggaggaatggttccaggaatgctggctacctttttagatttcaattttgtaaatgcctgtatcggattagagatagaaggtacaactgccactgcagagcgtgaaatagatggaggaaaagaaatcattaaagcagaacttcctatcgtaattgcaggacaaaaaggattggtagaagaaaaagacctacgcatccctaatatgagaggaattatgatggcccgtaagaaaccattaacagtggttgaacctacagaaacaagcaatgcaacggcaagtatttcttttgaaaaaccaagctcaaaaagcgctgtaaaactagtagatgctgataatattgatgaattgatttcattattacacaacgaagctaaggttatctaatcattcactcatcacctattcttttataagaacaggtaaaaaaacaacattatgtcagtattaataattgccgattcatcggaaggaatatttaaaaaatcagcttttgaagttgtgagttatggtaaaaaagttgctgaattattaggcacaaacaccgttgctttaacgataaacgcagcagataatgatcagttatttaattatggagcagaaaaagtgctgtgtgtaagtaatgacgctttaaaagactttaatgcaaaatcatatgccgctgtaatccaacaagctgcccaagcagaaaatgctacggtagtgattatagactctggaaataacggtttgtatatgggacccataatcgccgttaatttaaatgcaggatacactacgaatgtagtttctcttccaaacttggacaatgggtttacggtaaaacgtaatgcattctctaccaaagcatttaaccacacaaacattaccacagagattaaagtaatcgctttagcaaaaaactcttatggtattgtagaaaatccagtaagtggcgttgtagaagattttatgcctacagttagtgaaaacaccttatctgtaagcgcggtagaaaaaaccacaggaaaagtaaccattggagacgcagacattgttgtttctggaggacgtggattaaaaggacctgaaaactggggaatgatagaagaattggcccaagttttaggcgctgccacagcctgttctaaaccagtttctgatctaggatggagacctcacagcgagcatgtagggcaaacaggaaaacctgtagctgctaatttatacattgccatcggaatttctggtgccattcaacacttagcaggaatcaatgcctcaaaagtaaaagtagtgatcaatacagacccagaagcacctttctttaaagcagcagattacggtattgtaggggatgcatttgatgtcgttcctaaattaattgaaaagttaaaagaatttaaagcacaaaacgcataatttttagtaaattggcgctctaaaaggcacgctatttataggcccattgtcctttaaatagcgtgccttcttttgaccttaacaccgaatcaattttaatgagtttagtccgattaaatataaaaggaatttcttatagccaaacccacacgggtgcttacgccctcgtactaagtgaagtagacggcacaaggacattgccaattgtaattggtgcctttgaagcacagtccattgccatctccctggaaaaggaaataaaacccccaagacctttgacgcatgacttattcaaaaacttcgcagatcgctttcatattgtcattactcaagttatcatccacaaactggtagatggtattttttattctagtatcatttgtcaaagagacggtatcgaagaaatcatagatacacgtacttcggatgctattgctttagcgacccgatttaatgcccctatttacacctacgaaaatattttagagaaggcaggagtagaactcaaagacaaggaagaaaaagacaggcaactggaagctgaagaattcgaattaccacaagtaattgaagtagaaaaacctactgagaaaaaatcaagttacgaccaatattcattggaagaactccacaccaagcttaatgacgctgtctctcatgaaaactacgagtatgcagccaacttaagagacgaaatagaaaaacgcagttcaaaataattaccacatgattaaaaaattatcttttgcactgcttgtattaagcagcatcgcaacacaagcacaaaccacagaaattatcccaagtcaaggactgtctttcacgtctgtctggaaagggattttaggaatgattgtcctagtacttattgcaattatacttagtaataacagaaaagcaatcaactggaaaactgttggagccggattgtccgcacaattaatcatcgcttttggtgtgctaaaaataccatttatccaacgtatatttgagtttattggaggtggttttatagaaatattagattataccagagcaggaagcgaatttttgtttggtggaatgatgaatatagaatcatttggatttatctttgctttccaagtattaccaaccattatatttttctctgcccttacttcccttttattttatttaggagtaatccagtatttagtaaaattaatggcgacattactttctaaaatacttcatatttccggagcagaaagcttgtccgttgcaggaaatatctttttaggacaaacggaggctcctttattgataaaagcctacttagaacgcatgacaaaatcagaaatgcttctcgtaatgattggaggaatggcgaccgtagcgggagcagtacttgccgcttatatcggtttcttaggaggaaatgaccctgtaatgcgtttaaaattcgcaaaacacttgctcgcagcatctgtaatggcagcccctggtgccattgtaatttcaaaaatattatatccacaaaccgaaaaaattgatacggatgtaaaagtatcctcagaaaaaataggttctaacatactagatgcaattgccaacggaactaccgaaggattaaaattggccgtaaacgttggagctatgctattagtatttgttgcttttattgcaatgatgaatggtattttaggagcattagcaagttttgatggatttaccattgagattgcttctcttagtatagactggaactggcattttacttcattgaatgaagttattgcgatgcacacaccttacaatagactgtcattagaatttattttaggaaccgttttttcacctttaatgtggttgataggtgttgctaaggaagacatgatgttgatgggacaattactaggaattaaattagccgccagtgaatttatcggatatattcaattagcagaactaaaagatatggccagtgccacccattttacttataataaatcggtgattatggcaacctatatgttgtgtggatttgctaattttgcatccatcggaattcagattggtgggattggatctttggctccaggacaacgaaaaacattatctgaattcggaattaaagccttaatcggggggtctattgcctctttattatctgcaactattgcaggaatgattatcggataactactataaaactaccattgctatgcaacaatacttagatctaattcgccatgtaagcgaaaaaggaatagaaaaaggagatagaacgggtaccggaactaaaagtgttttcggttaccaaatgcgctttgatttaagtgagggattccctatgctaaccacaaaaaaattacatttaaaatccatcattcacgaattattatggtttttaaaaggggataccaatattagttacctcaaagaaaacaaggtaaatatatggaactcttgggctgatgaaaatggagacctcggtcccgtttatggtcaccaatggagaaactggaacagtgaaggtatcgaccaaatagccgaactgattcataccatcaaaaccaacccagacagtagacgtatgcttatttctgcatggaaccctagtgttctaccagatacgagtgtttcgttttcggaaaacgtagccaatggaaaagcagcacttccaccctgccatgccttctttcagttttatgtaagcaacggaaaattgtcttgtcaattgtaccaacgtagtgccgatatatttttaggagtgccttttaatattgcctcttatgccctatttgccatgatggtagcacaggtttgtgacttagaatacggagattttatccatacttttggagatgctcatatctataacaaccatggagaacaaatagcattacaactttctagaacacctaaaacactaccaaccatgaaaataaacccggcagtgaaaagtatttttgactttacttttgaagattttaccttggaaaattatgaacctcatcctcatattaaaggaaaggtgagtatttaaggggagatgtgagtagtgagaaatgagaagcactgttgtggataacaaaacggaataccttgaagattagagttacttccaatcactagtgactagtcaacatttaacgtattaacagacagtaaatcaatttcttttgttaattttataccaaagaattgtcaggaatagcgcgttccttaaacagatcgttatacaggccattatggctaatgttttcgtggatacacaccaaacaatgcaatgtatattgtctgagaattctatgaaacacatttcagaagtactgagcgccccacaaaaatcgaaattttaacgatgctattaacgagtcgtcaaaaacatgtaacttatggatactatagagcaacacgaacgctatgagaatgctagaaaaagagtcaaacaaaaaaaacgactctactatcactttgtcttatttctcgtaggatctgtctttttaattgttttaaacaaagtccttaattttggagaaaacttcttgaaagattggtttgtatgggctattatggcatgggcatttttttgggtgcttcacctgattaatgtatttgtcacccaccggtttatgggaaaagaatgggaacgtaaacaaaccgaaaaattggtactaaaacaagaagttaaaattgccaaattagaaaaaaaagtcatcaaggaagtacagctaaaatctgaaagtgaagtcttcgctctcgnagttaaaaaaaaagaananccaacagaagaacaaccacccntatgatcaccattatagcagccatcgcaaaagacaacgccttagggaaaganaaccaactgatntggcacttgccnaacgacctaaaacgttttaaaaaagtaacntctggacancatgtgattatggggagaaaaacttttgaatctctgggaagacccttaccaaatagagtgaatataatcatcactagaaacaccgattanaccgcnaaaggatgcgtagtagtacattccttagcagaagccattacggccgctaaagaagangaaaacccctttattttaggaggtgcacagatctacaaacacgccctagaagtggccgacgtattagaccttacttttgtacaccacagcttcgaagccgatgctttttttccagaaataaacaaggatgtttggaaagaagacagcagagaagattttaaagcagacgagaaaaataagtttgactatagttttgtaaaatttgtaaggaagtaaagactagaagcgtgagaagtgagaaggttctataattaaacgtaactcccctccttctcttgcatttttttctgttcgttcatgtgtgattgaaatggagataaaacaagcataaagcacggatgctactgcacgactttatcgctttgcttcgtaaacttaattggctgttgtagagctctgccattaaaaccaactactactggtatttaaatctcttaccgccatcctgtacttgaattttaacaatactatccatagggattgcatgccttatttcttgaataaatcgagatcgtcctccttttaacatgcccttttctaggagtaccgtatcaaaataaaataaaatttttttccattccaatggtgaactcgtagttcaatacttggagaaacatccaaataactgggatgccttttttttataagacctttacaataaacgaagtactacttcttttttaaaaatcactcaacagtctttgcttttagatgttttagcgtactcgcccctttcttagcgtcctgctccgtgtttctgaaacatttaaaaaagagaaaacgacgtataaataaatatacgccgctttaaatgttttcacaacggaataatccttattgtgaattggtttcaaattgtactcaaatatataaaatttatttgatatatgcacgttagtgtgctttgattttgtaaattagttgctcaattactctaaaaccttaggtatgaaaacgatattaggacttgatttgggaacaacatccatcggatgggcgcttgttaaagaagcagaaaacgatactgaaacatcagaaataattaaattaggtgtaagggtgaatcctttaagtgtcgatgaattaacggatttcgaaaaaggaagacccttatctacaaatgcagacagaaccttaaccagaggagcacgcagaaacctacaacgttttaaacttcgcaggagtaatttaattcaaattctaaaagaaaatcattttatcaacgaacaatctgtacttacagaaatagggaagcacaccactcatgaaaccctaagtttcagagccaaaggtgccaaagaaaaaataagtttagaagcatttgcaaaagtacttctaagcatcaataaaaaaagaggctataaaagtagtcgaaaggctaaaaacgaggaagaagggagtttaattgatggaatgtctattgcaaaagagctgtatgacaacaatatgactcctggacaatttgtgtatcatttattgaaaaatgataaaaaattcatccctgacttctaccgttcagatttagaaagtgaatttctactgatttggaaccatcaaaaaaattactatcctgagttactagaagactccctatttgaacagttaaaggataaaaacaaaacccaaacatgggctatttgcaaagcaccatttgagctcgtaggtatcctacaaaaaggaaaagtacaggagaaaaaagtggagcgttataaatggagagacgaagccttaaccaaacaagtagacttagaaacattagccattgttttacaagaagtaaacaacaatataaacggatctagcggatatctcggcgctataagtgaccgttctaaagaactttattttaataaagaaaccgttggagaaaatttatactaccaattagtagtaaacaagcatacatccttaaaaaatcaagttttttatagacaagattatttggatgaattcgaacaattatgggaaacacaagcaaaacaccaccccgtacttacgacaaaactaaaggaggaaattagagacgttgttattttttaccaacgcaaattaaaatctcaaaaacatttaatttcaaattgtcaatttgaaaaacatcataaagccattcctaagtcttctcccctatttcaagaatttaaaatttggcaagtactaaacaacttagaatttacgcataaaaaaacaaaagaaaaaacaactttagcggaagaattacgtcaagacttatttgacgaagtgaacattaaaggaggtttaaatctcactggtttgtataaatttatagggattaacgccaaagaatactcttgtaattacaaagaaggcatcgaaggtaaccgtaccaacgaagccttatatgaagtataccataaaattgcagaggaagaaggttatggttttgagtggtctaaaaaaacaggcgcagcaataaaaaccgaattaacagccatctttaaaacagcagggatcgatgcctctattttagattttgacccaacgcttaacggtactgaatatgaagcacaagcaagctttaaactatggcacctattatattccgcagaggacgatgagaaaataagtaaggaagatcaacttatctatgggaattcaaatgtgcgtctcaagaaaaatttatgtaaaaaattcggatttaaacctgcatacgcggccttactttctggagtaactttacaaccagattatggtagtttgagctccagagcgatcaaaaaaattattccgtttttagtagatggacatgatttttatgaggctgctgcccttgccaagtacaatcattccaatgctaaaacagcagaagaacaggccgaaagatttttaaaagataaattagatcttttaaaaaagaacagccttagaaaccctgtagtagaaaaaatcatcaatcaaatggtgaacgtaattaatctaattattgatacgtatggaaaacctgacgaaattagaatagaactagcacgtgaactaaaaaaatctgccaaacaacgtggagaaatgacaacttccattaataaagccaccactaaaaatattgaattaaaaaagattatcacaaaagattttggcattcctaacccaactaaaaatgacctaatacgttataaactatggttagaactcgaagctaatggctttaagacagtattcacaaacaaatacatccccaaagaggaattattctcaaaaaacatagacatagaacacatcattccaaaagctattttatttgacgattccttctctaacaaaaccttggcctaccgtagtgtaaatttaaaaaaggcagaccgtacagctatggattttataagtgacgattataatgcagacaaggatgattatattaaacgagtagaaagcctctacaataacggaaaaggtgcgtttagtaaagggaaatacaaaaaattactgatgcctaaatccgatctaccagatggttttattgaacgggacttgcggaacagccaatacattgcaaaaaaagcaaaaatgatgttggaagaagtagtacgtacagtcgtttctagttctggaactattaccagtaaactccgtgaggactgggatttaataaatgtcatgaaagaattaaattttcctaaatacaaagcactaggtttaacagaaatacaaattagaaaagacaataaaaaagtagaagtcataaaagattggaccaaacggaacgaccatagacaccatgctatggatgctctttccgtagcttttacaacccacaatcatatacaatacctcaacaatctcaacgcagcacggactaaagaaagtagattatttcaaataaaaaacaaaataacgagtaataaccaacatggaaaacgtgtatttatagctccgatgcccaactttagacaagaagcaaaaaaacatttggaatccgtattaatatccttcaaagcaaaaaacaaggtggtgaccaaaaataaaaacaagataaaaggacaagacacaccaaaaatacaattgactccaagaggacagttacacaaagaaactgtgtatgcaaaacaacttgtgattataaacaaagaagaaaaagtaagcggaaaatttgacctaaaaaaaatagctcaagttacaaaacccctgtataaagatgccttatttatgcgtttagcagcacataataacgaccctaaaaaagcatttacaggaaaaaatagtttggaaaaaacaccgctatatttaaatgatgcccaaacaaaatacgtccctgaaaaagtgaaattacagtttacggaggaactatttaccatcagaaaacctattactcacgaattaaaaattgaaaaagttaccgatgctggaattcgaaaaaaactaagccaacgactcaaagaatataacaataacaaaaaagaagccttttctaacttagataaaaatccaatttggctagacaaaaaaaacaatattgctattaaacgagttaccataaccggtgttagcaacacagaagccttgcatactaaaaaagaccatttaggaaatccgatacttaaaaacggaaaagaaattcccgttgactttgtaagtacaggaaacaatcatcatgtggcgatctacaaagatagcaaaggtaaattacaagaaaaagcagtctccttttatgaagcagtagctagagtaaatacagaactcccaataatagactacgactataatgaacaaattggatggacttttatgtttactatgaaacaaaatgaaatgttcgtatttccatcgaatggtttcaatccaagtgaaaatgacctactggacgagaaaaatactgctttaataagtgaacatttatttagagtgcaaaaaatcgcttcaaaagactattctttcagacatcacttagaaactactgttgaaaataataatgtactaaaatctcttaattggaaaagggaaggattaaatggacttacaggaataataaaagtaagaacaaaccacattggaaaaatcgttgcaataggagaagaaatacaacaagaaaaaagggtcttaaattaatataccatgctcaaacgcaccatctatattggaaacccagcctatttaaaaataaaagaccttcagatgttggtgatagaccccaagtctaacaccagcaaggggggcatccccgtggaggacatggctatattagtcttggaccattatcagattaccttgagccatcaattattaattgccttacaagggaataatgtggtggtaattagttgtgatgcccatcatttaccctttgccatgatccaaccactctatgggcatagcgaattttccgaacgcatccaatgtcaactcacagtctccgaacccttaaaaaagcaattatggaaacagactgtagagcagaaaataaggaaccaacaaggactcttagcccttttagacaaaccttttgaagggatggacgcttataaaaacgccgtaaaaagtggagacagcagcaatatggaaggcattgcagcacagtatttctggaagcatctcttcgaagattttagccgaggtcgccatggtaccgcccccaattccatgcttaattatggctatgccatcctacggagtatcgtagcacgtggactagtaagcagcggcttacttcctgtcttggggattttccatcacaataaatacaatccctactgcctggcagacgatattatggaaccctaccgcccttttgtagataagatggtgtacaattatatacaaatacatggcagcacagcggaattaagtaaagaacaacgtagctatttactacaaattgccacccaagatgtattgatagatggccaagtacgtcctctaatggtagccgttagcaccacaacagctagtctgtataaatgttatactggagatttacgacagattaaatatccaatgctagactaaaatgaacaccaccaaccgatttaacgcctataaaattatgtgggtactcgtattttttgatttaccaacagacacaaaaagagaacgtaaagccgcacaattgtttcgaaaacaattgataaaagatggttttactatgttccaattttctatttatttacgccactgcccaagtcgggaaaattctaaagttcacagaagaagaacgaaaaataatttaccaaaatatggaaaagtgtgtattctagaagtcacagaccggcaatttggaaatatggaactctttttcggtaaaaaagaggtagaaaaaccaaacacggtacagcaattagagcttttttaaatcaaaaaaacgcgcctttactaacgctactattcataaattactttaatttataattcctaaaaaacaatcccgacgccttagtacaactaagaattcgggattgaccatgtgaatgctcacataaaaatacaattttgaaaccaattcacaactcaattgtgtttcagagaaaatgagaggtgcatgtgaatgctcacataaaaatacaattttgaaaccaattcacaactcgtgaagctatgttccgaagaacggacgccatgtgaatgctcacataaaaatacaattttgaaaccaattcacaacagttgtggtgttccagcttgtaaagaatgtcatgtgaatgctcacataaaaatacaattttgaaaccaattcacaactcctcctgtgttgggtttcttaaaagtaagcatgtgaatgctcacataaaaatacaattttgaaaccaattcacaactgtgcattaaatcacaataaagcaagactgcatgtgaatgctcacataaaaatacaattttgaaaccaattcacaacttttcgttgtttgttctgttttatagaaaacatgtgaatgctcacataaaaatacaattttgaaaccaattcacaaccgaaacccttgggaagataatttacattaacatgtgaatgctcacataaaaatacaattttgaaaccaattcacaacttacctgaaggaatgactaaatactggaatcatgtgaatgctcacataaaaatacaattttgaaaccaattcacaaccatattaaacgaactactatacggaggcatcatgtgaatgctcacataaaaatacaattttgaaaccaattcacaactgaagccgcttccatccttcaggtgtaaagcatgtgaatgctcacataaaaatacaattttgaaaccaattcacaactcaggagtgcagggaaaaagtgccgttaaacatgtgaatgctcacataaaaatacaattttgaaaccaattcacaactaggcgtcgattggctgattaattagaattcatgtgaatgctcacataaaaatacaattttgaaaccaattcacaacaggaggcgtatttgcatttacctgctcagcatgtgaatgctcacataaaaatacaattttgaaaccaattcacaactaacatctctatttgtccactcagccctacatgtgaatgctcacataaaaatacaattttgaaaccaattcacaacacggagcaattagaccaattctacagcttacatgtgaatgctcacataaaaatacaattttgaaaccaattcacaactaggaatagggaataacagaacatccgcaacatgtgaatgctcacataaaaatacaattttgaaaccaattcacaactctcgtagcgcaatagtgaacttttgacctcatgtgaatgctcacataaaaatacaattttgaaaccaattcacaacgctttagcatttgtttaatatcttctttagcatgtgaatgctcacataaaaatacaattttgaaaccaattcacaactgatgttcgtgattgttttcgcccctaacacatgtgaatgctcacataaaaatacaattttgaaaccaattcacaactgattttaagatcatacaaaaggatgataacatgtgaatgctcacataaaaatacaattttgaaaccaattcacaacatcacgtaagccgtataattcccttccaatcatgtgaatgctcacataaaaatacaattttgaaaccaattcacaacagtcttagcgtcgaactgctcagtagtaagcatgtgaatgctcacataaaaatacaattttgaaaccaattcacaactatacattcgatctgcgattctgtaagctccatgtgaatactcacataaaaatacaattttgaaaccaattcacaactagaagctccttttcgaaatagccattcttcatgtgaatgctcacataaaaatacaattttgaaaccaattcacaacacataatagtatatggagttgtcaatacttcatgtgaatgctcacataaaaatacaattttgaaaccaattcacaactgtttaatggttatgtttttggaagtagaacatgtgaatgctcacataaaaatacaattttgaaaccaattcacaactatcagcatgattaatcaagctaataagaacatgtgaatgctcacataaaaatacaattttgaaaccaattcacaactatcgccttcgtaatactcagctttaattacatgtgaatgctcacataaaaatacaattttgaaaccaattcacaactagtcgatgtaaatatctccgtgagttctccatgtgaatgctcacataaaaatacaattttgaaaccaattcacaacattatttgaaatattttgtggttgttctatcatgtgaatgctcacataaaaatacaattttgaaaccaattcacaacacaaggtctttgcttaattcttggcgataccatgtgattgctcacataaaaatacaattatgaaaccaattcacaacacctaatccatttcttcttggctcgaatatttatttaaatttactggtatacttttcgtctgaaatagcggtaaggttttgggttaatataaacagtcgtaataattaaaacggttctgtttataagttgaattcagcgatgctaacatggtgtttaaaaatattaaataacttacgtgtttcctggctaggtgttctaaagaaacggaaatgatcattcctaaggttccttttctttaaaaaatttgtcttcagcccattttttagggttattgataatatagttcgatatattttgatacgcattatcatctctaataatatgctcgtaataattccgctgccagatagatttatcaaaatctatcttttttaatatgttcatttccgccgtcgtcgtcgtcgtcggggcgaaaaatctttcgccctttttatattcgttttctgatctttcattctcttttaatgtgaaagattttttgccttttttatatgctgcttctttaagtgcgaaagatttttcgcccgtactgataaaaaatgctcggaatcccttttttgttcctattttaaatcctctaataatagatcctattgttttagagggtgatttaaattggcctatttcctctgtggtgttttcattagtatctagaatttctatgatgccgtgtatatgattaggcatcattataaattcgtgatttttagtatttggaaaatgatgtggaatagcatcccagctttctgttattatagctgccaatcgattctgtatcattgctccattttttatctcgccaaataaatgtgcgtagttctgagtgcaaatcgttataaaatacaatcctgcacttgcataatcatagccttttaaacggatgcttcttctgtggtgtttttctggattgtatttcatagctttctttttaaattcatccatatcgaaacaaaaaacctgttcataggaaatatttttcaccctaatagcttttctcaacctccaacatcgcctctagcaccaataacttacccaatattaattgagagagtacggtgtcgcgaagtttagttagtgattgtgtttatttttgctttactaataaattagtattaaaatattttgttcgactatctaattcatctagtgttttatcacttggcaccagaatagaaacacttttaagagccgaacctgaaacttctataaaagtaggtctacttgctacacattcaattttgtcagcgttttgcttcaataattaaaatagatattcagtaggtaatcctttacctggaatcaatgacttaaaaccttaatttcttgaaattttattatctgctattgctatatatccgattggagctctagatgaaaaacagcatcgtaccagcaggtattagttttgctctactttttttcaaacctaaatcagtaagattttataactgccttaaaataagaaaactattttcatatccttacgagaacccgcaattacatgaaaatagtttttagctgatgaagcaattcatattactaaagaccaaacgtttacacaaaacttatctttccatataatacgattttaaaaatgacgctacattgcaaccaatataatgtaaatttatattcatctgattattcataaggattataaaaccctgaaccttcacatgtagtacagattacagctatacctccatcttcagattgtactagaccacaactttcacagtttttacattcgcatttttttctccccaattcatctttgatttttttcatatgtatttccaaaaacttatctaataaaacaagaggggtaattacaggaattagcctccttcatcattcaaaaaaacaaccttcagacaacatcagtctttcacctaaagtcatgtgtattttagcctggttctattgataatttcaaacagttttgaaacctaactaacaggcctaatgtccaaagattaaaacatcacaaaacacttcccgttaattcccctaagaaaggaagattctatttatcagaaagaagaagaagaagaagaagaagaagaagaagaagaactgtaaatacagtcattaaaaaaaagcaacccaccattcagaaagttcccaaatcatgcattgcttttattttaacaaattattattccaccaatgccaaaatatctttggtaatttcatccacgggggcatcgccttttaatacggcacaaccaacaccgctttcaaggaagtatttttcaatagcagtgctattacttgtataaataccgatacgatgtgcaatgatgctactatcggaatcctctatgcgtccactatccagtccacgagcaacagaacgtttggtagcctcctgctctgacacagaaatcaccactggaatcaattcaatcccttgtaattcacaggtttttttaaaaacttccgcctgtgctaatgttcggaccacaccatcaaaaacaaagcctttggagctcgcttttaattcctcgattttatcatttaaaattttaattacaatcgcgtctggcgtcaacttcccttccgcatctaacttggtgaccaactttccaatctccgttcctttttccttatgctctcttaaaagaacgcccatgccgatataggtatacccctgctcttctaatttttttgattgtgttcctttaccacatgcgggtaagcccatcaataaaatacctttcatctattatatacttttaattatatgtttatgtactgtactccgacccctaaaactagtttaaccagccgccatcaatccattattaaaaccctaaaaaatccactcaataattgcgtggattttttactgaaacaagtgataggcttgagtgtttcggctattcacttattaaatctgatattcttgctatggttttcttgtaaattctaaacctcatttataagaaaatcaactaccattgatgtaattttattacactcatcgtcacttcgagtgattacgacggtaggagtaattgtatcgagaagttcat

SEQ ID NO: 2306 - DNA, 20927 bp, synthetic construct
  misc_feature 1..20927: note = Synthetic
  source 1..20927: mol_type = other DNA
tacaattgcgggagcggctattttcggagaggcaggagccattttagggcttggagtaggagcaatagcagggccaataatagcggcaacaacggatgtttcacttacgataaaaggtccatacctcggtgcttacaaaccggaattatttttggatattattgggccattcaaccagaccatgaatttaggcagcattaaaataccagagggctttaaagacaggcttgccgagcctcgcaaatcaggcagtcatttggataaaagcgatgattttatgatggacttaaatgaacgcaataaagatggattatttccgctacgtccaaacggcagcagggtaactttactttcaatgtattcggattctgcacataagatattgcctgatctctttgagatggccggcgaaaatgctgacaagttttgtgttgctgagaataaggatccgaattgttttgctgtgggtgcagttttgagaagatatgcatgggaaatgaaaaaacaaaaaatttccaatattgaatttgacagagggcttttgaatgctttagtcagcattcaaaacgattggctcaagcatggcgatgctgttgtggaggcaagcagccaaaagtttatcaataatggcaacacgcctgacaacgaacattttttggctcctcgcaattacgtcatacacgacgcccttgctccttgggagcctgtgcttcatggcccatttggaaattacagtggtgctccccagcaaggcttagacattctctgcgctttatcccctgcttgcgacaaggccttcagggcagcgaaggagggaggtcgcgattctgttctgaagctttcgggaacaatagggaaaggcggatttaacgaaaggtatttggatgttgcaggcgattttaacttggctccggtttacatatcagagggcatacaggcattttctctttctgcaaatgacgaaactgtgcttaccgccacatacgagcccggcaaaggctcttcgataactttgaaatatggcggaacggagaaaaccgaacttttgctaggcccggaatttgttatgcaaccctcaatgactcgcaaaggcgattcaatttatgtttcctttacaaattactcaggcagagctttgcaaaaaggttactttttgccggagcttcccggcagtttgacggcgacagtcatagccagcggttcagcaatgtctcccgtgataataggcagcgcaacagcaacaaacccagaaacccagaaacccgccacgcctccgcccggtcacaggctcgcccctgtcacgcttggagttttgcatcgcgaagcaagaggggaacacgaaagcaatacttccaggcctcgtctcttggttttcaacgtaaccgaagacactcttgaattttcaaaagtagcctattattttaccgcagatccggcaagagtacccagggttgtggttgactatccctatgttcctgtttccttggaaaacttgggtggcgaccagtggcgttttgtgcttgatgtcggaaaccagaaaatagccccgaagactttctatccctctgcggacggctggcagataagggttcattactctgattggtatgagcaagaccattttgacgattggtctgcggactacagccttggactcgtgcaattgaaccgcaaaatcgttgttttcgacaaaaacgacaaaataatttggggcagcgaggctccgggctatgagagcgaagacaatggcataatcccaacgcctaagggaacaattgcgtggaaagacgattccccgtgggaaaccaatgctttcaaaccgagagtgactgtcaagaataccggctccgtggctctttcggattaccatgcccagctttggttccgtgtcccgcaaggaaaaaatcttgccgttccatctcctgacgcatggtatacgccggaatcccaagcctctgcccaaaacataaacggcactgtttggatgctggatatgcattttgacaggcatatattgtatccgggagattccgtcagcgaaggcaatattggcttgcatttgaccgactggggcttgtttgacaaaactgtttgcggcattgctctcaaagataaagacgggaatatattgttcggcagagagcctagtgttgcggaatgcgaaagctacaacggcccaaatcttttgcagccattgtattccataaaggaataaaaagaggcaattatgaaacggagtttgcttgcggttttgtgcgttgttttattgggatgtgtgagtattgacggcattggctatgacaaagacgaggctgaatataagtggggggagtgggatgaccctagaataatatccatagtggatgattctttggctgttttggcaatttataaagcttattacaaagagtggaaggaatgcggttttgaggggtgccgtactgaaagagaaatcgcaaattttcatgttggattgtttttggttaactatagggaaaaacaagaacctatatggggagatactttggattataatttaaggatagttaatgattattttaaacactcttccgtgctagtatttgatagaaatcataataagttcggtttttggaaaataggaacaaagaaagtggaacttattgattatagcggtaatgggcggtgggatatagccagaccttttacaaacggaaatatacttttaattggcgaaccgagctatatattggaaacagaaagcaggcagttaaaacaatttaatttttccggggaatatgaatggctgtctaaatgcggaaatagtcagatgaaaagagagtgggtatataatgaggaacaacaacaaggttattatgattataaatatgattatgcgaatatatcttatattggaggcgaattagtttgcattaaaggtaatgaaacagcaaataattttgaattaaccgtaaacaatgttgttaaagatacaagcagcctaggcagacatatctatgaacgtataacaagatggaacgtgaattatgtaatggatgcgagaaataaaatttataaaattgacactttgaatttcaaatttgacagcacatacgcctctatgtatatcagtgagtatagtgcttattttgacgatttccaaggtacttcggtacgttattctacacaagatttgcttggagttaacaattagttaaggagacccttatgaaaaagttcatcagttcaacaacagtcattgccgcattatgcacggtagctatcacccaagcatccgaatcattcggcggctttggcatttccgtttatccgggcaaaaacggggcgagcattgcctccgtgctgcccaactcgccagccgcccaagcagggctgcaagcgggggacgtgataatttccgtgaacggaacgcttctatcttccgtggttcctgaaaaacagatttctctgctcagagggaattcaggctcttccgttgatttgaaagtcagcagaagcggggaaagcataagcattttcgcaaaacgagctttgatttccgttcaggatattgaaaatcaagacatttccgcatggcttggcaaaagcaagaacctgaacgtggaagaccttaattacttggcctcgcaaaaaataggcgatggctatgagtttctggggcttatgcagaaagggctgctcataagctccaatatggaaagtttgaatcccaagcagattcatcaaatttctttgaaaaaagaatccccggccaatgtccagtccacgccagcagccaatgcgttgaatttcgctaactttagcacaatttccttttcccttgccaatgaagcaaaaaactcaaggattgcggttttgaatgtcaaggggtcaactgtttggcagaagaatttagggaaactgccagccggtgccaataacattgattggagcggggcaagcctccccgccggttcttaccatttagtgctggaaactgacggcaaggctttgtcttataagtttgatttgaggtgataaacatacagtcggcccaatatatggctccttttatgagaggtttctatcttccccccatgcccttttgtaaagcattcaaaaaaacaacgatttttgctgttttattgcttgaaattgcaatttttgcaaagtcaccgcagcaaaacgtgcttatattacactcttacaatcaaaattttccatgggcagatcaaatcattcaaagcatacaagatgttttaacggaaagcagcaatgtgaaaattcatattgaatacataaatattatagcaacgtctgaattggaaattttggaagtttacaagacgcttgaaagcaagtacagagactttaaatttgatgcggtgataactgttgattacccggcttttgattttgcaaaacggttcaaaaaacggttatgggaagaaatccccattgtgtcttgcgcaataagccgaactcaagctaagaccgtggattccgctaattccttgtggtcgggtgtttatgaatattatgatgtagctgcgcaaatagattttataaatcgtatgcagaataaaattgaaaggattatattcataaccgataatacccaagccgggcaagatataagggaacaactcaatacggattcgtatattaatcaaagagagataaatttggaagtatggaaagagccggtatgggcgagtattcctaaatttctttcgttactcgattccacacgggacgcagttgtacttgccggtacaaatcttagcgattctgctaatgtttcgcataacttatggcaagtattaaccgaatacgtgaacgagcatagcaatgcccccgtatattccttttgggacgtaggggtacaaaacggagtggttggcggcaatgtgatttttgcccccttaatgggaaaaaatacaggattaatcgctgcggctatcctagccagcaatggcagctacagaccgggttttcaaagaaatgcaaatatacccatgcttgacgataaagctgcgctcagcagacatctgagttttgacaaacttccacaagaaacaatcaggctcaataaaacggattctaaggcggattcatggctggctaacgcatatctgggatatcagggttatgtatctaacatgatgaatgtaataattgcagagtctgttatcatagtgctattaggttttgctttttatgcgtatttcaaacgctcaaacagaaaactgttgaaggaaataaacactgttaaggaagcgaataaggcaaaaagtttgtttttggcaaacatgagccatgagataagaacgcctcttaattcaatactgggattttccgaactgcttttgagcaaaagcacaaatttgagcgatgagcaaatggaatggtgcaaaaccatagaaacatcctcctatcatttgcgcgatacatttaacaatataatggatttttcaaaaattgaagccggaacccttgaaattaaggaagagtgggttaacatattttccttgcttgacgatttgataagtgtttgcaggcattatttgctttacaagaatatcaagatttccagggagcctatcaggttttatgttctgccgtctattaaaatccctagatttataaaaacagacccggtcaagttaaagcaggttctggtaaatttggtgagcaatgcgctcaaattcacaaacaaaggcacggtaaaattaattgccagccatataccctatgaagacggttgcaaaattctttttgaaataaaagatactggcattggcatttcaaaagagaatatcgaaaaaatattcaaaccttttgaacaggtagataagggacgttccagaaaatacgaaggctccggattagggctttcaatatcgcaagacattttgaaggccatgggttctaatttagaggttaaaagcaataatcacggcagttgcttttattttactctatttgtaaaaacaaaagaagaatctttttacaagaggttttttaacaaggaaaatcaaagagttgccgttcacaaccaaagcaaggaagtattgaaattcatgagcgatggcattaaaaccattaatggaattccaactgaatctaccgacatagaagttcttttgagcttaagcaatcatgatttgctgatagccgaagcagaccgctttacgagtactcaaatacagagaatagctaccctgtatcccaaggttatacttatattttacaaagaaagcgacagagtagaaaaaataaagcatgatttcccaaaatttgaatgtattttatcccccatcaaaagcggagacattacgaatgcggtgcggaagctgtacgccacggattagtttactatattgaaagttcctaataattgaggagatttagacaaatgaaactcaaagccaaattaagcctacttgtaacagccattttagtggttgtagtgaccggaatcgccgtattgctggtcaatgaaatgtctagcatgagccgcaatctcagcatccaggggattagatatcttgcaaccgaccaggctacatattggaaagggcggcaagatacccgtttgcaagcgctgcacattctcgcagaggtaatgggggaatatgagaatatgccggcggaaaccagacgggaccgccttgatgatatgatgaagggagtcataactgccgacccctatattcttcaattatactccgtttggaaacccaacgccgtagatggcatggacgccgaatacataggcaggcccggctctacccccaccggtcaatatgccacaacttatactagggaatcaggaagtctgcaagttcgcactaccggagatgttgccccttcaatggcttatatcaacggtaccaattcaaagaatgatagagtagagcagcccattatcaggaatatgggtggaaaagactttcttttgctcagattgatggttcctataatcaatcctcgcactaaagaaacggtaggcggtgttggctatcttttggacttatcggtgatacagcccgcagttcagcaagtgatgaaagagaatccggaaattgccgctttaacaatttttgccagcaacgggtttattttggggcacaaggtgccggagcgggttggcaaaacgctaaaagaagcggaaacaatattcggcgaacatgctgatgccgctaatcttgccgttaaggaagggcgagaataccagttaaatacatattcacccgtgctgagttcaaaagtagagcttgttgttttgcctttcaccctcggcacttccggtactacatggtcggtaatggtggttatatccgaagatcatattttgaccccaatacgatctgcaaccagaaatgccgttatcattgcggtgcttgccataattgtatcttcaataatcctttttgttgtcctgagcggcgtggttaaacccatcgttaaggtaacagaaaccctaaaagacatttccgagggcgaaggcgacctcacgcagagcatcaaggttcaatctaaagatgaaatcggggatttagcccgctacttcaacaaacttatggaggctctaagaatccccattggcgaggtgaaaaagatagtggtttccttagcctctgtttccgaggaattatccgccgttagcaagcagttagcgagcggctcggaaaaggccgtgactcaaagcaatactgttgcaagcacaacggagcagatggcggtgaacataaacgcaatggcaagcggcgcagaagaggcttctgtcaacgctaatgaggtggccggcgccgcagagcagatgagcacaaatatgaatacaatagccagtgctgttgaagagatgagcgcaagcataagccaaatagcgagcaatgccggcgaagcccgcaaagtagcgggagatgcaacggcaaaatccaacgatgcaaccgatgtgatgagcaaactaggtactgcggcaaaggaaatcggcaaggttaccgatgtaatcaaaagcatagcggacaaaacaaatttgcttgcacttaatgcaaccattgaggcggcgagcgcaggcgaagccggcaagggttttgcagttgtagccggtgagatcaaggaacttgcaaaccaaagcgctcaaagcgcagacgatatcgcacgcagaatagacggcattcagcaaggaaccgggactgcggttaaggttatcagcgatgtatctgatattatcattaagattaaccaatctattgaatccatagccggctatgttgaccagcaaaccaaggccagcaacgagatagcgagcaatgtagcgcaggcgaacacgggcgcaaagcgtgtggccagcgctataggcgaggtagcgcacggcgcaaacgatgttagccgcaatgcgggagaagcagcaaagggcgcaagcaatgtaagccataatgttgttggcatgagccaagcggcaaaggagaattcgcaaggagctttgcaagtgaatcaaagcgcagatgatttattcaaaatgtccgaacagttgcggatggctatggataagttcaaggtatgagatacgccactgcccccgccgcataacccaaagcggctagtggggttattcttttaaggtaccaaccaaaagtcaaatttttatccatgcccatagccgcaactcctgctgcagaacctatgactagcatacttccgcctgtgccggcacaataggatacaaacccccaaaacaagccgtcttctctgaaaatatccgaagcgttatctatgacatacattttcattgttgcggcaacgagcggaacattatcaacaatagcggaaagagtgccaatggcaagagttattatgcggatatcgccaatgttctcatccaatatttttgccaaagctgcaagctggcccgttgaacccaaacatcctacggcaagcataatgccggcaaaaaacaaaacacttgacatatcaatttctttaagagcatgaaaaatactcagacgatctacatcgtaagcatatttgcgccccaaaagttcagtgacaatccatagaacacccaaaacaaaaaacatggcaatatacggcggaacatggaaaaaagttttaattaccggtaccattaaaaggccgccgataccgacagtgaaaagtgtatttttctcatacgaagacggtttttgcgttactaattctgcctgtgccgatttcgagcgaactttgcccttaacaatgaaactgacaattataacggggactaagagacaaattatgcttggcaaaaataaggattctataatgcctactgcggaaatctgtttgccaatccaaagcatagttgtggtcacatcaccaattgggctccatgcgccgccggcgtttgccgctataactattaagccggtaaaaaatagcctgtcctttgtatcatcaaccattttgcggcagagagtcaccatgactatggttgttgttaaattatccaaaactgcgctcaaaaagaaagttataaatgagattatccacattagagtttttgcattatcggtttttatgcgagaagttatcaatgaaaaaccatcgtttgcatctattacagccactatagtcatagcacccattaaaaagaataaaatttgagacaaatcgccaaaggtatcaaacaactgatgagaaacgagttccaaaccgtctccatgaggagatccttgaaatctaaaccataccagccaaagcgccgctcccaaaaaaagcgcgcttgcggatttatttaccttgatataatgttcaagggcaatagctaaatatccgagtacaaaaatgattgcaatggcggttagaatcatagcataataaatttagtttctgttatttggtaaaggggttaatgattgggaaattgggagtgaaggtggggatttttgggatgaatggtgtttccgaggcgtgatgctaatagggacaatggaagttttggacgataaaaagacgaaaaaagaaatctggaaggatgaatatgaaatgtattacaaaggcggcagagatgcggaaaacggtagatattatagtaattttcgttcggaggattttggggtggaatgaaagagatagaaaaatatgcgattatatttgctattttactatattatcctatatgaaaaaaatactcggtttggatttgggaaccagcagcattggctgggcgttggtgaacgaagcggaaaatgatgaggaaagctcttcaattgttctgttgggagtcagaattattaattatgataattttgtcagcacaaaaacagggaaggaatcaaaggagccggaaaaagatttcgcaggcggtaaaggaatttctcctaatgcaggaagaactctcaagcgtagtatgcgccgtaatttgcaacggtataaacttcgccgtgaaaatttgatagaaatcttgaaagaatacaaatttatttctaacgaaagcattttgtctgaaaatggcaatagaactacttttgaaacataccgtctaagagccaaagcggctaaagaagaaatttcgctggagcaatttgcccgcgtgttactgatgataaataaaaaacgtggttataaaagtagtcgcaaggcaaaaaatactgaagaaggaactttaatagacggaattgaaatagcagaagaattgtacgatagaaatttaactcccggagaatattgtttggaacttttacggaaaaatacaaaagcattgttacctgatttttaccgctctgatctacaaacagaatttaatagaatttgggaaaaacaaaaggaattttatcctgacatattgattgtgcaattaaaagaaaatttacaaggtaaaaatgaaaaacaaacttgggctatttgtagagaaccttttggtatagttggtgctaaaagaaatggagataaaggagaacaagaaaaagaaaattatgaatggcgagcaaaagccttaaatgaaaaaatagatttagaatatttagctatagttttacaaaagataaattcgcaaataaatggtagtagtggttatttgggcaaaatcagcgatagaagcaaagaactttattttaataaacaaactgttgggcaatacctaatggcaattttagataaaaattcaaatacaagtttacgaaatatgatattttatcgtcaggattatttagatgaattcgaaactttgtggagcaaacaagcagaatttcacatagaattgacagaaactttaaaaaaagaaattagagatgtagtaatcttctaccaacgtaaattaaaaagtcaaaaaaatttaataagtttctgcgaatttgaaaatcgtaaaattgaagttgaaattgacgggaaaaaaaagataaaaatcattggaaaccgtgttattcctcgttcttcacctttatttcaagaatttaaaatttggcaaattttaaacaacattgaagttacagataaaaattcaggtgagattacacttttaagtaaagaagaaaaggaaaaattatttgctgaattacaaaaagcagagagtttaagcacaaaaaaagcattggaaattttatttgaaaaaagagcaaaaaattattcaatagagaattataaagaaaaaatagaaggcaataaaacaagagcgaaaatttgcgaaattttgaacaaaactttagcagacgagaaactaaatgaactttggcatttgctctattcttgggaaagtgaaaattcaaatttggctgaaaaactagaaaaaaaatatgtttatccatcagacattgcaaagaaactttccaatataacttttttggatgattatgggaatctatctgcaagggcaattaaaaaaatcttacctcatctaaaaaatggtaaacaatataacgaagcgtgtgaacttgcgggttatgcattctctaaaagttctttaacaaaagaacaaattgaaaataaaatactcaaaaatagattggaaattttgccaaaaaactctttgcgaaatccagttgtggaaaaaattcttaatcaaatggtaaatgttataaattccataattgatatttatggcaaacctgatgagattagaatagaattagcaagagaattaaaaaagggggcaaaagaaagagaggaaatggctgccagcatagcatatgcaacaaaagaaaatgaaagaataaaaaaacttttgcagtctgctccatttaacattgcaaatacaagtaaaaacgatattattcgttataaattgtacgaagaactcgcaagcaatagctatcgtactctgtattcaaatacttatatacctcaagaaagcttatttaccaaagattttgatattgagcatataattccgcaatctcggctttttgatgattcttttagtaataaaactctagaaaaaaggcaagaaaatatagaaaaaggaaattctactgcctatgattggatggctaaaaaaggcgaaaaagaattagcagattatgaaataaaaattaaaaatctttttgaccaagaaaaaatttcacgtgcaaaatataacaaccttaaaaggagagaaaaggatattcctgatgattttattgatagggatattagagatactcagtacatagcaaaaaaggcacgagaaatgttacaggagttagtcagagttgttgtacctacaactggttcggtcacggctcatttgcgtgaagattggcagttggtaaatgttatgcaagaattaaattttccaaaatatgaaagacttggacttgtagaagaaatagaaaacaaagatggacaaaaaattaagagaataaaagaatggacaaaacgaaatgatcaccgacatcatgcaatggacgcactaacagttgcttttacaaaatatgctcatattcaattttttaatcatataaattcacattatgattctacaagtgaaatttatggtataaaacaaaaatattttactaatgacaataaagcattaccgccaatcccattaaaaaattttagagtagaagcaaaaaaacaattggaaaagattttggtttctattaaggcaaaaaataaagttgtcactacaaatataaataaggtaaataatcaaaaaacattaacaccaagaggacaattacataatgaaactatttatggtagccaaaaacaaaatgtagtaaaagaagaagctataaatgcaaaatttaatgaagcgaaaattttgacagtaaccaaactcgcatacagagaggcattattaaaacgtttacgagaaaacgaaaatgatcctaaaaaagcgtttacggggaaaaatagtttagccaaaaatccgatttatttagacaatatgcatacgaaacagatgccggaaaaagtgaagactgttacatttgaaatcgtttatacaattcgtaaaccaatagataaagatttaaatgtagaaaaagttgttgatgtaaaagtaagagaaattttgaaagatagattgaataaatacaataatgatccgaaagaagcgtttgtcaatataaaagaaaatccgatatggctgaatgaaaaaaaaaggatttctataaagtatgtaactattttcggtgtaagtaatgtcgaagcattacacgataagcatgataaggacggcaataaacagccagttggttttgtaagtacctccaataatcaccatgtagcaatttaccgtgatgaagacggaaatttacaggagaatgtagtatcgttttatgacactgttaaaagagccaatgcgggtttacctgtaatagataaggaatataagcaaagcgagggctggcaatttctttttactatgaaacaaaacgaatattttgttttctcgaatgaaaaaacagggtttgacccgaaaaaagttgatttaatgaatcctgaaaattatcatttgattagcccaaatctatttagagtacaaaaaattgcctcaaaaaattatatgtttagacatcatttagaaactaaagtatcttttgaaactaaggaaatggaaaaacaattaagaggaattgcttgggagttgtatcaaagtacggaaaaactaaaatatattgtaaaaattcgtgttaatcacattgggcaaattatacaagttggagaatactgaataaataaacccgaaaacagatatgattaaacaaacacttgatttttccaatcctgcttatttgagcacttcaaatgctcaacttgtaatcaaaacatcggaaaaaacgataacccgcccaatagaagatattggtgttgtaatattagataatcaacaaattacaattacacaaagtgcaatagcgctattactggaaaataatgtggcaataataacaacgaattcaaaacatttaccagttgggatgtttttaaatttagacggtaacacattacaaagcaataggtttcaaaaacaaatagaagcgagtgaaccgctcaaaaagtcgctctggcagcaaactgtacatgcaaaaattataaatcaggctgcagttttaaaacgacaaggcaaagatatcaaacgattggattttttggcaaataccgtgaatagtggagatacaaataactgtgaagcacaggcagcatcttattattggagtcttgtttttgaaaattatattcaaaatttctctcgttcaccagaaggtgagccgccaaataatctgcttaactatggatatgcgatagtcagagctgcaattgcccgtgccttagttggttccgggcttttgccaacatttggaattttccataaaaatcaatacaatgcatactgcttagcagatgatattatggaaccttatcgtccttatgtggatttagcagtacttggtttacttggagatttatccttggaactaacttctgaaataaaaaaacatctcttaaatattcttgcctgcgattgtttttttgagcgagaaaaaagccctatgcttgtggctttaactcgcactacatcatctcttgttgcgtgttttgaaggaaaaaagaaaaagatactatatccgagaatttatgaacctaagtgctcttaaccaataccgtattatgtggataatggtattttttgacttgcctaccgaaaccaaagaggataagcggaggcatgctcaatttcggaaagaccttataaaagatggttttgttatggggcaactttccgtttattggcgacactgtgcaagcaaggaaaatatggaagttcatattgagcgtgtcaaaaaatttttacaaccaaatggcaaagtttgcattttgcacttaacagacaagcagttcggtgatatgcaaatcttttatggcaaaaaagacagcctacctccggtaggtccggtacagttggagatgttttgaaattttgtatatttatcgttaatgaaaccaattcacaataaggattattccgttgtgaaaacatttagtgcctcggctatctctggggtgtgcctctctgcaaagagaggcatttttatttcaaataaagctgattattaaaatttaggttgtttagagcctcacttgcaaggtctttcaatgttttaaaataagaaacggattctagatttccctaaaatccgctcttttttgtatttctaagagcctccataagtggctcaaattaggaaagttacaaacacaaaggttgcgaacaatcctaatttagaaaaaatgaaaccaattcacaacctgcgaacagatgcgaacgaacctacgtagttgcgaacaatcctaatttagaaaaaatgaaaccaattcacaactcaagcacgatgcaaggcacattagccatcgttgcgaacaatcctaatttagaaaaaatgaaaccaattcacaacctatgatgactgcgtaaaagcacttatggggttgcgaacaatcctaatttagaaaaaatgaaaccaattcacaactaattcggatgccgtgcttaaaactgaatgttgcgaacaatcctaatttagaaaaaatgaaaccaattcacaacgggtgggaagagtttatgaatcttataatcgttgcgaacaatcctaatttagaaaaaatgaaaccaattcacaacaatagttgaggtagtcgcggatgcgattggttgcgaacaatcctaatttagaaaaaatgaaaccaattcacaaccgacattccatataatacttgcagaaagcagttgcgaacaatcctaatttagaaaaaatgaaaccaattcacaacgcaaatatccgtatatcattttatccccccgttgcgaacaatcctaatttagaaaaaatgaaaccaattcacaaccaactggcctgggattgtattttccgcaagttgcgaacaatcctaatttagaaaaaatgaaaccaattcacaactggtgtaagtggcgtaggaatttggcaattgttgcgaacaatcctaatttagaaaaaatgaaaccaattcacaacctcaggtcaaggtgtatgtgctcagttccggttgcgaacaatcctaatttagaaaaaatgaaaccaattcacaacggcgctgtctacactttctacagaaactttgttgcgaacaatcctaatttagaaaaaatgaaaccaattcacaaccttcctgcattaggatcccaaactttttttgttgcgaacaatcctaatttagaaaaaatgaaaccaattcacaacagaacaggctacgtatggaaatgcgggcatgttgcgaacaatcctaatttagaaaaaatgaaaccaattcacaacggtataaagccgatgatggagatggagacggttgcgaacaatcctaatttagaaaaaatgaaaccaattcacaacgcgttggcttggcctactcccccagctattgcggggttgggattgatacttttgattgtgccgggtcgcgcattctcaagtttttttactgcggaggctatcgttcttccggtcaaattatccgtaagcggttttcttattccttttcctgtaaagaaattattgtcgcccctaagctgtttaaatgtttgtccgtcaacgctttcccccagattgtttgctatgttcatccactttacgcgctcgctgaaatctgtcccaaatgctttgtcaaattctttcaattgctcaagcaattttgttttgcgattatttccttctatattttcaagatttttggcaagtctgtcctgtgctgtatttttgttttccggaactctcaaagcgtcaaacaaagcctctcttgcgcccagcttgcccgccattgctctatacgcttctaccgcagccgtttcgccttcggtttccgctatgttcataagctggtttcttagattgaaataagcgtctttgagagccttaacctcgccgtccggccttcccatctgctcccgcttgaaatcatcttccaaaagctggcctatgcgctggcgggcattgttaagctcctttgcggtcatttcccgtactttcctaggtgggtttttgcttcttgctatttgctgcccctcagcattgaataaaacgggcttttccgttttaacctcaaacacgctttctggagccggagctttgggtttctgttcgtaaaatatctccgcttcttttggcagccgtctttgtgtggcttcctctattgttgtcaaaccgccgccacccgcctcttctaaaacacgcttttcatattcggttaaattcttgactgcagcttccggctttaccttggtttgcgagcggtctaaaaattcttgcacggttttattctctggaaacttcccttcgtcaaaatgcttgtaatctataaggtcttctgcaatctgggcttgcgttttgtaattctgcggcattttcgccctgccttccggcgtggctgccgcattcaaaaattccggcttcacattgtttttgtttgccagccttaacagcagtttgtcaaactccgcttggcttaaaccgcggcctagcagtttagccgctccttgcagaacggtatttgtcgccgcgcccataacaatatctctgtctaattgcatgtcgtctgttgtaactacaggtcttgctaatcccattgccgctccgccggctgcgccttcaaccgcgggttttgcgacattgttcagcaataccgacgccgctttatttttgatggcgtttcctaaatttccaaggcccggtattttaaccggaatagctgcacccggtataagcaaagggtctctaattacgccttgcgctatatctcccagagtgctacgttccctatcattcgatttggcttcgcctaaggattgcatataatcttcataaaagctattgtcgcccatcaccccgtcagcaatagcaccaattgacctgccgccaaggcttagcatatcgtccgaaccggattttgttatgaaaggcttttcgctctttcttgcgatttcgtccgcagttctcggaaaatatttagacaacaagggattatccgcctctatttgttttttgcgagctgcttctatttcatgctcttggtattcttgaggagtataaatttcaaactcagaaggatcaagttctgattccaacagtaatttagttacatcatttttgctttctcgatcccttatttcaatgctaccatcaactttgtcaattataaagaacttcatgctgcctccttaaagattaggggaaatcttatttctttttgtttattattttttggtctatgaaggccaaggataaaatccaaacgcagtagaataggaatgcgcacattccgtgccaaagcgccggaactcttgctatcgcacctccgccccctacaccatcgggaggcggttgctccacaagcaggcttagcaaaatagcgggaataatgcccagcagatacagcgatgtttccaacgcgcctttcttggctttgaagtaatttgctataacgcgcctcatatctataatatacattttttttcataaaaacctcatttttttaatttgcttaaccttctatctacttgcttctcttccgtattaggatagcgatttctcaaacgctttatagccgcgtcaaattccctttgtgcaagttttttattttggccggttattatttcccaaattccctttgtggttggatctatgccggctttattcaaaatatcgttgtaagttgggtccagctgcgctatatctgccccattgttttccaaattgggattgttccatataatggatttaatcaggtttatatccgataattcgttattttcttttctctcggagaaccccgccgatctcttagcggctataagagctaaccgcttcgtctcttcttctatttcacgaatagtttttcctgaatttttagcaatttcgcctttccattgttcttgtgccgttttcttttgattggggttaaggttataactatcggcccaaatttcaaaatcaacgggagaaaaatcttttgcattgcccactgattttttcaaatcaagttttgcttggatgtcaaaatctttataatcatccgcctcgagcgtgttgctggacttacttgtttgcattgacttgccagcatcacccttttcgcccatacccgaaacgcctatgaatgtactacctcttattttctggttacccatcagagcggtcaaatattcgcgggcttgcttttcacggttgctctgggcttggtactgtccttgtaaatcgtttatctgttcatcaaattcagatgccgcctgaatagccgcttcttctctagtgtaattaccactcgcatacaattgattatagcgacttgtccggtttgccatagccgagttaagacttgcaaggctgctctgcttcttgctctcagcttcccacaatagcctctgggcgttgttagcgtcatcctgcaataatttgttctctgataattctctatttaaattctgctcttccaatttatactccctgttcgtcaaatcggcaagcgccgtctggtcgtatggcaagcccatcatcatgttttggtactgctcaatcgcgaacttttccctgtcccagtccttcttgtcccagttgacggcgttttttccgaagtcgaggagccttccgccgccgtctttggccagcccgaacgcttttgtgaagaaacccggctccttgggcggctccgccggcttgggcaatgcgggccgcgcctccgacgcaggagcgggcatcccaaacggcgcgggccgggtcgttgcgggctcccccgagggaactccccggccgcccccgaaactcgtcataatctctttgtaaatgcccggctcgttctgctgcccccagtgcatagcctccaaaatatcttcttggctaagttggtcaaatttcgaagttccgtagttttccatgcctattgctcctaatgcgatctcttttccttgtcttgctcgaatgaaatgaatgttttgaacgagccgctcagttccgaaaccttgtccgaaatatctcccagcctcttcccgaatgaggccagcgaatcgaacatcttcacgaaattttcgtctatccgcttgaactggttttcgtagtatttgtccatgttgttgtgaagctccatgtgcgaatcctgccaagcctcgtttttgtctttggattttgaccgctccttgcggtcaaggtatatataagccattattcctaccaccaaaacaaaaagcattatgtgcagaaaaccttggttgctggcctgcgccaccacgcctaaaatgcccgtggcgtccgccgtgcctgcaatcgttcctgttatgtcattgtccatgcttgtaattttatcagccgaaaatgctttggctcgagaacgtgggtctcccattgaaaattttaggagcgatctgaacgggctgcctccgcgggggccgctcgtagcttgcggcgaggcaaagggactccaagcggtcagggcttcgccctatcttcttcttt

SEQ ID NO: 2307 - DNA, 20693 bp, synthetic construct
  misc_feature 1..20693: note = Synthetic
  source 1..20693: mol_type = other DNA
ttcgttgtttatttttacttgcaatctgtgcgtttggaggacatgctctttaagcaaatttggttgtgcggtcatttgtgcgtttgcttaatgcgcatgtcacttagcgccggactatcgttcacttagatttatcattatatgatacaatttaattttctttccatttctcaaatgttttgctactccaattttaatgtcagtaaaattgtaatcatttatttcttcataatcaataaatttataattatatacgtgttttgaaataaaggctttgtatttattccagagtttagcaaagtccttcgcagtagaatatgttattatataattgttttctaatccagttgtgtcatatctaaatagtttgtcgagatgaagaattacataatccgtttttaatgagtcaagaattaaggcttcaataattgatttaggactaccatctttttctgttataaatatgtcaatttctccactttttttaccttcatttgatgtactccattgagtttggtccttaattgagaagccccttgcttcaaccaaatttgctaaatacttgttcctttcattctcatcagaattgtttgcccagtattttttatcaccttgcatttttgcacttgcaaaaattagtgaatcaactagctcactattagatttattagtaagtgtttcaaaagcctttaaacaatcagaaggtttatctatttcattaactaattgctcaataattactgggttatgagttgggaataaatttttgaacatcctaccaagactatctgattcaactttttttttattgctatgctcaataactgatttaagatatgagagaaaattatattcctccgtaccctgttgcagctctcttaaccttacatttagttttgttatctcagaactaaaatgtatcgtaaaatatggttcgaaaattttctcacttacaaagttgcccaaactacttgctactgacttttcattcaatctttgctttaaagttgaattagttatttctgaataacatagataaacattgtcaagttctgacctgtaatcaagccaattatttggttgttgattacatagtttttgcaaagatgttagcattttataaaagctaaactgcaaattttcaagcttataattaaatgaaaatacgtctctttgaaaaaggatattcccaagctcacgtatgtactcttttgcagaaccccatctattattgattatttcaccaagaattgaaactaccttaaaataaaaattagagtcaattcgattttctaattcttcattggatttaatgaaataggatttactaattgttaaagctttagaacattcctcctcagacactgaggttaatgccttttggaaattaataagtccaagatttaataaactttcagaaactaattctgcttctgaatcatctaatttctgtttgtaaattatttcaatttcttcatttgagtcgtcataatacaagtatagatcctttaaacgttggagctctataaaaatctctgaacttggtaaccaatcatcaattagcaaacttaaaccttgtcttgattttagttttcctaatacgaccaagtctgtaaacaattctagcccaatttttctaacaaaagagttttctttttcatccaatataatttcacgcattgaagagtttatagttttttcttcaaggtttattattgaaccaacaaaatcattctcaagaaaactaattttctcaggacgactcagagttttaaacgcttgtatttcaaaatctttattcattagaatacatattcatcgactgcaaattctttttgattttttaaaacgcctgataattttttttcagctgttccgattaatatttgcaatttatctccatatcttgattctatgctttgtagaacactggctaaaccatctagatactttgaatctgcttcctctttcccaggactatcaattattaataagcgtgtatgtctgccaaaattaaactcgatatcaagttggattaggctcaaataaaatgctattttagcccttaactgctcaccctcagctatattttcaaaagtcagatactcattgtcctgtttgtagtaaatttcgaaattgtccttaatcaaaacttctgaaattgaagttaacccaaaatcatgaatctcatttttcattaattccgaaagtctatctaaaacttttgttcctaattcaaatcttcgttctgatagttttccaatcgctgaatctagaaggtcgatttttgtttcataatttgagtcttgaattatttcttgagacgttatttgttgtatttgaaaatttaacactgctttttctgatacaagttcttcttttctagaatcggaaggatttactttactcttttcggaatttattatattttctaattcttgaagtttcttagataaagaagatacatcttgaatcccatcaagcattttttcggaactgacaatatccgaataaagagaattgaatctttcctgaaaaatgtcattttgttttgaaagcgtagatatttccgactctaaattttcaatagtgatttttaaattttcaattttatctttaaatacttcaatatcaacgccatcttcattatccagaattgattcgctgcacaatgagcatttatgctcatgcaatctagattgtttttgtatttctgtaacatcatgattacagctaggacaatatttaatatccaaattggaaaacaaaataccaatatccacaaactcttttaagtcattactttgcttattcgctttctctaactctttttttagtcgaaaaatctcagattgatttgtttgttgttttgttttaattgaatttaattctttgttctttgattgctttgctttttcaatttctattgatttcctattctccgattgaattaaaccaagaagcgaattatattcaatgtaaagtggtgctagattaaccttttccttgcttattatttgaatttcattcaactcaatatttatatctgtgagtctttgctgaaatttctccaagttttgttgtttttgttttttctgtctttctgtaaaagattgctcttttgctttttcataattaagcaaatccttttttattgtcaatctgtttattggataagtcaattttagacctaaaagcatttgaaaaacttttttcccttggtctccatacattaggctagtggaatcttttgattcaagtaggatagatttaaaataagttttccaactagctccagcctcaattaaatcatccttgtctttttgggaagatttctgtgtccacttcaaagaataatatgtgaattgctgaaagaaaaagtcatttattaaatcttgataggatgtttcactatttgcatcaaaaatgacctcatcagaacaattttccaattcatctaatgaattaaaagaaccattgaataatccggcataaattctatatttcgacaaatctaaaaatactgtgtactttttctcatttatactaaagtttacaaaagcatgattaatccactttttaatattatcctttaatgaatttgttccagtgagtgcgtattttataattttaaaaatacttgattttccctttagattgtctgcaataataatattgagtcctgtttcaaaaggtaaagaaaaattaattttagcacctgaataatcttgattttctgagacacccttttcaccaagcagagttacattgtcaattaatagtcttttacccgttgacattggagtgtctctaccgtattcatcatttagattaagtaattcttcaacttcagatttagctaattgctctttatactcttcgtataattcatctgtaaattttttaaaatcgaaattcataatttctctgaataaaggttaaagaattctgcattaacattatcttggattccacctatatactctctataacatgtgtttttatattcctcaatttgatattgagatattcttaattgacttccggttaaatctccgaagtaatttttgattaaaccacatctctcaacataccaatttaatgcagataatgactttatagtgctttcaaacttgtctattgcatattgtgtaatgaaatactttttttcaattgtcttaaggtcaatactttttttgcttgagaaatcaataaaatcaacacttttcaaaaaagcaattacattatcgatatcctcatatgctccaaaaaagaatctttccatttctaatcgtctgataacaggctccttatttccgaaaatatcttttacaattttcttaatctccaattgttttggcaagtcaacttttgcaatatttattaattcaaatgataagtaatcaggatttcttaataaaaagtcaattttctgaatacgttgttcacttttgaaaatcctttttaaattggggaaatttaaatcagaataaggctcactaaagacatagagtatcaagaatattcttaatctgtctttgtaaattcttattttttcattttcatccatattttcaatattctatgtgtgtgttggcaaaaatttggctcttttgcaagctgaagaatcagcctgtgggtttgggcttgcaaatgtgccaaatgtgcgtcggctgctttttacaatgaacgccaacttatttatatacggaacttttattctcttagccagccatattggatggatatgcggaagttttatgtttataacatctttaccatcttataaaaaagaagaaaattccttatgcaatttaactgtattttattaactaccaaatagtttttcttatttctaattaaataagggcgtaaattgaatcgggtttcatttgatgtttacctacaaacattaaatgaaaaaggtaagtgatggtataagcatcctatggcaacgatttgatacaaaacgaagcatccaagggaacaagccaaaatgactgtttttaatgcttaaacaaattccctttaatacattcctattgcagctagaaacatataaaaagggaatttttgagatttaaataatttagcaattaatttcttctggtattattttttgagtagtttctccaaatactcgattttgtctttttctgccttaactagacgttcataaagttcaacgattttctccacagtattaaaagtcggctggtaatttacggaacttgaaatcaaagtagaattatcactactattattgttgtaagtattattaataatattaaaaacagcttcatccgaaaaattctcgataccttctttagttacgcctaaaacatttgcaatctgttccagtttgtcatcttcaatcttttctgactgttcaattttagatactgcctgttggctaatgccaagtttttctgcaagggtttcctgtttcattccccttagttccctgatacggccaatctttctgcctatgtggtttggttttgttgctgtttccataaaccaaatataagattttttctaaaaatcaccatacccgtaaaaaacaaatttgtagttgtattatacaatgtgctttggttcggtacattggacttttgtgcttagtttatgtaaaacaaaatatcatggaaacaaaagcacccaaaaagttcccatttcaaaaagaattgatttcactaatccaaaaggaacttacacttcattcagtctatgtcattagtgtatatcccgaaaaaaggaaacaggacgtatatttgacccccataaataagaacaccaaaaggcaggtaacatataccttgctcattattggacataaatcaccacgtaagaaccttggggatcttatggcttacctctacaacaaaacgcaacagcgatgcaaggtatatgccattttccatacccttgccaacatcatgtacaggatagatgttggggataattttttgacccgtgccatttcacagaccccctgcatgtacaaagaggatgatgcccttctgaggttcagccaataccagatatgtttccacaggcttgtatataaaacgataaaggaaggctggatgaaccgtatgaaaagggcggactatttgctaacggtaataaacactatagaggataatgaagaacccaattccaaactggcagtggcgcactgtgccgtggaacagatgtgcttggcactcttgaacctattttgggaatataagccgcaccattattcactggactacctattgcacctatgcagccacttcacccaattgccaaacaggatattcccaaggacgactttcggtctgcaacgccaatattatatgctctgcaatgcacaggatatcttacgtttcaaggacaacaatgaattttcaaagaatgatgcccataaggtcgccaaattatgcgaacggttctatgatgaagccgtaacacttggtaaggaacaattaaaacaccttaaggaactccattgtcggcaagatgtaaaatcccaataggggcataaagcccatgaaaagaaaaaaaaatcaatcattaaaaatcgcatatggaagcaaacaacacaccgaacaggacggacagggaaacactggaggaagccattaagctcttgaaccccagaacccgcaagcgttacaaacgggaggacaatgccaccatgcaggaagtcacctttgaggtagaggacaatggcgaactgcggtatattatatcctgcctgttgaggacatgcatcttggcattggacagtgagaatgactttgcatcgccaaggctgagcaattgctctaaggaactgaccatagcgaccgtattggacctggtggacagcttactgccagatgcacaactggcaagctatgatgccattgaaaaactgttattggaaaggaaccaacattaggcataaaagcgttaaaattagggattaccaataaatgtttgtattatgatatttttacggattaaaagccccaacatctatcgagctaatactatgaagtgtttttggaaaataaaggacgtaaagttgatattttagtaaaaaaatcattggttttactgggctatccccattttttagtaaaaaccaaatttcaatagccttataaacacttctagaacttcaaattttactaaaaggcagcaaagagtattaagggccaactttttcacggaaaaacacattgattctattggctttcggatgtttttccgtgaaaaatgattggcattcaatccatttaaaccctcaaaactacctaaaactaagggggaataaaccgtaacatcgctttagcgtgttaccctcttgcttttcccttagttttacaatcacggttatatagagaattttttacatagtaagtactatgtaataagtaactttatatcgagggaaaactcctttacttactattaaatgtttggacttttcctaagtagtatttttttattttttattaccttttattataataagtatgtatatttgttcataaatttttatcgttcacgaataatgaacgtgtaaaataatgaacataaagaatcaataatatgaatgaagtcgatattctaaataatgcgattcataatttagagaaagatatccccttaacatgggattggaaaatgttggattataataaagatactggtattgatggagaattaaatattgtaattaataatcaacaaactgtattgcttgtagaggtaaaaagggatgttaaaaatcaccaactgtttaacattattaattataaaaataaatttaacaattttcttttggtggctgaaaaactatatccaaaagtaaaaaaggaacttagggaaaaccaagtgaattatttagagggcaatgggaatgtgtatatcaataaagatggactgtttctctacatagatacaaataaaacggataaacctcaaaaagataagggaaacagggcatttactaaaacaggtttaaaagttctgtttcaattcttgttagaccctcaattaataaatcaaacccaacgggatattgcagaaattactaatgttgctttgggcaatattcctttaatcataaacggtttactagaaacgaacttgatattaaagttgaacaaaaatgaatatgtaattaataattatgaagaattccttaacaagtggattacagaatttgagcaaaccttgaaacccaacatttttaagcaacgttttagatttcagaataataaccaagaatggagaaatattcattttaattatgaaaaaacggtgtggggtggcgaacctgcgggagatattataaccaatcacctacgaccagaaaaatttactatttacaccaaggaaactaataaagaattaatgttgaattatagactattaccagacaatgaaggcgatatatgggtgtatgatatgttttggacaaataatatgaatacaaacacagcacctgaacaattggtttatacagatttaatgattaccaacgataaaagatgcaaagaaaccgcaaaactgatttttaatgagtacatccaaccaaacatataaagaattagcaattccctacttcaaggaagtttttgatattattgataaagtcatgttaaaactaaatgtgccttattatctcattggtgcaagtgccatagcattggaattattaaaagatggcattaaaccaagcaggggtaccaaagatattgattttgccatcatgatttcttccattcgagagtttgaaacaattgttaaagaactcagcaattatggattcaataaagttgaagcaccttggactttatacaatgaaaagttcaacgtcgttatagacttattgccttttggtgaaattgaggaaaagtttacactaaatttcaataaacgtaatgcagatttacattttttaggttttagtgaagtattaaaagaaccagaaacagtacaaattgaagaaaagattgttcaaataccatccttaccagggatggttgtattaaagctaattgcttggagtgataggccagaagaacgtaatagtgatttaggagatgttttaaaaattatagaacattatttcagccttaatttagatgaaatagttgaattccataatgacatctttccagaagaaggggaactggatcaactcaaaatagcagcgagggtgttgggtagaaaagcaagagcgtttttggatgtttccccggccatcaatgaaagaatactgaaaaccattaacgataatgttattaaggtcgaaaactcggaaatagccaagcaatggattcggaacaaagactggaatctggaatatgcagttgagattttggatgagttaaggatagggctaattgaagaataaaaaataagtggctttatcctaaactaaggtataatattagctttcaatctttgcgcatataactttttggaattgtcaaacaattaatttttcaccggggtatttcgctaacaattaaacagagccactctttttaattgacagtttaattttatagaaatacatgagctaaagaatagattcttatagctccaatagaaaaaaaacagtcaattttattataaataagaggaaaattcatcaaaaaataagaatgtttttgtagatttatacggtcaattgatggggggccttgtataaagctcacgaagtttcattataaaaaaagatttaataatacgctaagttgatatgtcctggacgttttgacttagggcttttattgtttagttagagaaacctttaggcataaaaaatgccccctgattatggacaaggagcaacccaaatgttttcacaacggaataatccttattgtgaattgctttcagtgctacaaatataataaaataacctaaagttgaaatacggttttccgtaaatatgttttggcaattggttgtaatttttgacttttaattgttaaataaaataaaggaaatgaaacggattttaggattagacttaggaacaaccagcattggttttgcatatattaaagagggtgaaaatgaaaaagaactctcatctattgaaaagattggtgttcgagttaatccattaacgacagatgaacagacaaattttgaaaaagggaaaccattaaccaccaatgctgatagaacgttaaaacgtggagcaagacgcaatcttgaccgttaccaactgcgcagagaagacttgattgagattttaaaaaaagctagtttaatttctgatgatagtattttaacagaaaacggaaaaaacacaacttttgaaacttggcgtttgcgagcaaaagccgtgaacgaaaaaatagaaaaacacgaatttgctcgtgtgcttttggcgattaataaaaaacgtggttacaaaagcagccgaaaaacaaaaaatgaggaagatggacaagcagttgatggaatgggtattgccaaacttttgtatgaagaaaaccttacacccggacaattatcgtttcaaattttacaaaatggaaaaacattacttcctgatttttatcgttcagatttacaggcagagtttaataaagtttggaactttcaaaagcaattttattctgaaatttttaccgatgaattttacaaagaattgcaaggcaaaggacagcgggcaacttctgccttgttttggataacgtgcaaattcaatatcgccgaaataaaagatttggaagatagcctaaaaactgaaaaaacaattaaattcaacaaaaggcagcaaaagaaattacaagcctataagtggagaagtgatgctatttctaagcaactgccaaaggaagaagtcgcttatgtattaactgaaatcaacaacgatttaaataaatcaagtggttatctcggagcaatttcagatagaagcaaaaaattgtacttcaataaagaaaccgtcggacaacatctttacaggcagctacagaaaaatcagcatacacgtttaaagaatcaagtgttttaccggcaagattatctcgatgagtttgaaattatttgggaaactcaagccaaatttcattcagaattaacaaaagaattgaaggaagaaattcgtgatatagttattttctaccaacgaaaactgaaatcacaaaaaggactcatcagtttttgtgagtttgaaagcagagaaattgtaaaaaatggtagggaaaaaacagttgggttacgtgttgcctcaaaatcttcatctatgtttcaagagtttaagatttggcaaattttaagcaacttggagttcagaaataaaactactaaggaaaaactttcgctcgatttagaagcgaaagaaattttgtttgaagaattgaatttaaaaggtaacttatcggcaagcaaaataatagaactattaggttgtgaatccaaagattgggaattaaactataaaaccattgaaggcaaccgcactaacaaatccttgtatgaagcctatctgaaaatcttggaaatagaaggctatgatgtaaaagacttgctgaaagtaaagtccaataaagatgaattagagttagacgatttgaatgttcccgctaccaaaatcaaaaatatggtgaacaagattttcgataccttagaaatcagtaccgaaatattggattttgatgcggatttggacggaaaggattttgaaaaacaagcttcttatcaactgtggcatttgttgtattctgccgaagatgacagcaaaaagtacagtgaagacgatattttaacctacggaaatgacaacatcgggctgaaaaagcagttgtgtgccaaatttggtttcaagcctgaacacgctaaaattttggtaaatgttgattttcaagatgactacggaaatctttccagcaaagcaatgagaaaaatttatccttatatcaaagaacaccagtattctgatgcttgcgaacaggcgggttatcgccattccaaatattcattaagcaaagaagaactcaaaaagagagaattaaaaccacatttggaattgcttaaaaagaacagtttacgcaatcctgtggtggagaaaatcctcaaccaaatggttaatgttgtgaatacactgattgataacgaaaagaaaaaagacccgaatttcaagtttgatgaaatccgcattgagttggctcgtgagttgaagaaaaatgccaaagaacgagcagaaatgactaccaatatcaacgcggcaaaaatgcgacacgagaaaatcgtaaaacgtttgcaaagcgaatttggtgttgccaacccaactcgaaacgacatcattcgctacaaactgtacgaagaactgaaaaacaacggttacaaagatttatacacgaatacgtatatcccgagagaaaaattgtttactaaagaaattgatattgagcacatcattccacaatccaaagcatttgatgacagtttttccaataaaacaatttgttacagagaggaaaatttgaaaaagggcaatagaactgccatagattatattcaaagcgaatatggaggcgaaaagcttgaagaatacttaaacagaattactgcactgaacaaaaattggggtaaagacaaacaagaagaaggcatcagcaaagccaaattccaaaaattgcaaaaacgggaaagcgaaataggtgaaggttttgcggaaagagatttgcgggatagccaatacattgcaaaaaaagccaaaagtatgttgtttgaaattacaccttcggtggtttctacttcgggaagtattaccgaccgtttgcgtgaagattgggatttaatcaacgtgatgaaagaactcaatttgcctaaatacaggatgttggggcttgcagaaatacaggagcgtaaatttggcaaacaagtagaagtaattactgattggactaaacgaaacgaccaccgccaccacgctatggatgcgcttgcggttgcttttactaagcgaaaccacattcaatacctaaactatttgaatgctagaaagaacgaaaatcataaactacacgcaaacatcattgccattgaaaaaaaggaaaccgaattggtggaaaatggtaatggcagtaaaaaacgattgtttaaaaaaccattgccaaatttccgccaagtagccaaagagcacttggaaaacgtattggtttctcacaaagcgaaaaataaagtagttactaaaaataagaacaaaaccaaatcgaaaaaaggagaaaaagttaaaattgaactcacgccaagaggtcaattgcataaagaaacagtttatgggaaatatcactattacaacagtaaagaagaaaaggtaggaacaaaatttaataaagaaaccatcgcgcaagtaagtaatccactttatagaaaattgttgttgcaacgattggaagaaaacaacaatgacccaaaaaaagcttttggaggtaaaaatgcgttggtaaaaaatctgatttatctcgataaaatcaaaactgaagttttacctgaaaaagtaaagttggtttggttggaagaggatttttccatccgaaaggatattacacccgaaaatttcaaagatttaaaaaccattgaaaaagtattggacgatggcgtaaaaagggttttgaaaaaacgcttatcagactttggtaacgaccctaaaaaagccttctccgatttgggtaaaaacccaatctggcttaatgaagaaaaaggtatatccattaaacgggtgactatttcgggcgtgaaaaatgctgaacacttgcactataaaaaggaccatttaggcaattttattttggatgatgacggacataaaattcctgtgggttatgtaagtacaggcaataaccaccatatagcaatttatagagatgaaaatggtgaattgcttgattacgttgttagcttttcagatgccgtaaaacgtaaaagttatgggcttccaattgttcctaaggatacaaataaattgtgggataaagtttttcagttaggaattgataaccaatcgattttagcgacattaccaaggcaagggctgcaacttgagttttcaatgaagcagaatgagtgctttgtgtttcctaatgaagcaatggatttcaatcccaaagaggttgatttacataaccctaattacaaaaagttaataagtccaaatttgtttattgtccaaactatttcgaaagttatgtatggtaataatgctgtaagagattatgtttttagacatcatttagatacaactaaagataaatcctctgcattgaaaggggtctctcatcaaataataaaaagtttatctcatttacatggaattgtaaaagtccgcataaaccaccttggagatattgtaagtgttggagaatattaaaaagaggataatatgattaaacgtaccctatttttcggtaatcctgcctatttaagtacacgaaatgagcagttggtagttaattttccagaggaagataaggaggaaaaaaccattgctattgaagatttgggttatgtggtgttagaagatccgcagattaccattaccaatggcttgttgatgaagctagtgcaaaacaaaacggctgtgattacctgtgatagacagcatttgccgaatgggttattacagccacttgtggggcatagcgaacaaagtgagcgcatacgctatcaactaaatgccagtgtgcctttaaaaaagcaattgtggcaacaaacggtaatagccaaaatagataaccaggccgcccattttttacaaagaggtaaaaatgccttgcgtttaaaacggtatgcaagagatattaaaagtggcgattttaataatgaagaagctttggcagcagcgtattattttcagcatttatttgaaaaacaagtaccggaattcagccgtaatcaaaaaggtatgcctcctaacaacctgctaaattacggctatgccattttgcgtgccatcgcagctagggcattggtaagcagtgggctgttaccttctgtgggtatttttcaccacaataagtacaatgcgttttgtttggcagatgatgtgatggagccttacaggccttttgtagatgcggtagtgtatgatatggtagaagacaacatgggtgctgttgaagaaatgaccaccaatcttaagtctgtattgttgaccattccggcaatggacgtggtgttagatggaaagctgagcccgcttatgaacgccatgagccgaacaacggccagtttatatgactgttttgagggaagtaaacgtaaaattttatacccaatttttccataaatggaagaaaaatatgggagcgaaccgtttttcacgtttaaaccaatacagaagcatgtgggtactggtattttttgatttgccaacagaaaccgctaccgaaagaaaggtagccacaaagtttcgtaaaaacttattagatgatggttttgccatgtttcagtttagtatttatatgcggttttgtgccagtagggaaaatgcagaggtacacgtaaagcgtacaaagagggcgttgccaaaaaaggggaaaataggtattttacaaattaccgataagcaatttggaatgattgaactttttcatgggcaaaaagagatagaacctgaaacgcccagtcagcagttagaactcttttagaatttcgtcatgctgaatttatttcagcatgacataaagcaattgcatttaaaaaatcaagttaagtaaagtagaaaatctaaaaattaatggatttagtgtattttaacagatttttaaaaaacaggataccagccttttacggcaagtatcctgtgaattctctataaatttaaagaactgaaagcaattcacaacatgactccacaagatagagtgatccattatcctgtgaattctctataaatttaaagaactgaaagcaattcacaacggaccaataaaagtattattattgccgtgccctgtgaattctctataaatttaaagaactgaaagcaattcacaacgctttagaactttataaaaatgtagaaatacctgtgaattctctataaatttaaagaactgaaagcaattcacaacacaaagtgaccgatgattttttattgttcacctgtgaattctctataaatttaaagaactgaaagcaattcacaactatgctctttattttctttagcaaccttgccctgtgaattctctataaatttaaagaactgaaagcaattcacaacataaattactaggttgcgttagggtcaacgcctgtgaattctctataaatttaaagaactgaaagcaattcacaacacctttatccataatcgaaagtttatctttcctgtgaattctctataaatttaaagaactgaaagcaattcacaactagcaatctaaatggatcaatttggattgacctgtgaattctctataaatttaaagaactgaaagcaattcacaacgaatgatatattttttcacttggttggtttcctgtgaattctctataaatttaaagaactgaaagcaattcacaacgcttcgggcggtggtgatggttagcgaaggcctgtgaattctctataaatttaaagaactgaaagcaattcacaacccaataccatatatgctgataagcgtaccgcctgtgaattctctataaatttaaagaactgaaagcaattcacaacgcgtaaacgtattggtacactagggtgtaccctgtgaattctctataaatttaaagaactgaaagcaattcacaaccaaaatttgtaaatgaagctacatatgttccctgtgaattctctataaatttaaagaactgaaagcaattcacaacactaacattatgaaacaatttaactctattcctgtgaattctctataaatttaaagaactgaaagcaattcacaactggtcaggatttatggagtttaagtaatgccctgtgaattctctataaatttaaagaactgaaagcaattcacaaccgcaagttgaacaattcgcggcggacactacctgtgaattctctataaatttaaagaactgaaagcaattcacaacgcaaaatccaaaagtcctatttttttaatacctgtgaattctctataaatttaaagaactgaaagcaattcacaacttgcaggttatggtcaattttctgtaacagcctgtgaattctctataaatttaaagaactgaaagcaattcacaacgaataaagaagctttagaaaaggctaaactcctgtgaattctctataaatttaaagaactgaaagcaattcacaacgcccaaacaagctaaaacattgaggcaaaacctgtgaattctctataaatttaaagaactgaaagcaattcacaactattttttccgacgcttttttacgtttaatcctgtgaattctctataaatttaaagaactgaaagcaattcacaacaatacgtaaatgtattggtttgggtttttgcctgtgaattctctataaatttaaagaactgaaagcaattcacaacacaaacttcacacaccatataggcgtactccctgtgaattctctataaatttaaagaactgaaagcaattcacaacatacgggctaaagatcaagaaattattgacctgtgaattctctataaatttaaagaactgaaagcaattcacaacattctgcaaacacaattaaaaactacgtgcctgtgaattctctataaatttaaagaactgaaagcaattcacaacataggcagcaataaataatactccggatgccctgtgaattctctataaatttaaagaactgaaagcaattcacaacgtgctaatttattgtttgatgccatgaatcctgtgaattctctataaatttaaagaactgaaagcaattcacaaccttttaccatttcaaaaagaacaccgttttcctgtgaattctctataaatttaaagaactgaaagcaattcacaacgcttgggaagaattggagcattaccaaaaacctgtgaattctctataaatttaaagaactgaaagcaattcacaacaagatgcttctgaagatgacattgaagctgcctgtgaattctctataaatttaaagaactgaaagcaattcacaactatgacattatcaattacaaaaaagggggcctgtgaattctctataaatttaaagaactgaaagcaattcacaacagatgggcggcctatgtaactgttggatttcctgtgaattctctataaatttaaagaactgaaagcaattcacaactcgagtggttaataaacacaaacaccttacctgtgaattctctataaatttaaagaactgaaagcaattcacaacggcctcggtaacattgtaaaataagataagcctgtgaattctctataaatttaaagaactgaaagcaattcacaacacaaaagttaaacagccaaaaaaacctaagcctgtgaattctctataaatttaaagaactgaaagcaattcacaacaccagttccattaaccgaagatttattacgcctgtgaattctctataaatttaaagaactgaaagcaattcacaacgatttacaaaaagagataaataccattgtcctgtgaattctctataaatttaaagaactgaaagcaattcacaactataatgatatgactatcgatgctgcgactcctgtgaattctctataaatttaaagaactgaaagcaattcacaacttgatatatcttcggtagctgtcggactttcctgtgaattctctataaatttaaagaactgaaagcaattcacaacccacagcccaattacatagacaataggatgcctgtgaattctctataaatttaaagaactgaaagcaattcacaacaaatagctggatggttgattcatttaccaacctgtgaattctctataaatttaaagaactgaaagcaattcacaacgggccagccacgccggtttcgagaagggtgcctgtgaattctctataaatttaaagaactgaaagcaattcacaacttgtattgataggctcagcggcatttgtttcctgtgaattctctataaatttaaagaactgaaagcaattcacaactacaattttgaattgttaaattaaccaaatcctgtgaattctctataaatttaaagaactgaaagcaattcacaacgatacagatattcatcaaagtaaaggtaaacctgtgaattctctataaatttaaagaactgaaagcaattcacaacagtaaatgaatttgcgaatattgtagccaacctgtgaattctctataaatttaaagaactgaaagcaattcacaacaaagggtggcaattaataactataaatatgcctgtgaattctctataaatttaaagaactgaaagcaattcacaaccggtgatacgtttggattgattggatgcatcctgtgaattctctataaatttaaagaactgaaagcaattcacaactaacaatggaaactacaaaaacgttcgtatcctgtgaattctctataaatttaaagaactgaaagcaattcacaacataggcttgacattaagtaatgatccaatgcctgtgaattctctataaatttaaagaactgaaagcaattcacaacacattctgcatttgcgccaattctttgagcctgtgaattctctataaatttaaagaactgaaaagtgacccgtcctgaaataaggctacataattttaaacattatgtacaaaaatgacaaagtaatcagacggtattcggaaccttttaaactgaaaattctggacgaaatcacaactggaaaacttaacaaaaaccaactaggcaaactttatggcattgcgcctaccaccattaacgaatggatcaggaagtacaaccgtaagaacctaatgaacacaagggtaaaagtggaaacaaaagacgagataacacgaatcaaggaactgcaaaaagagatcggacagcttaaaaagctactcctaaaaaaggatttggatgcattggtactggattcatacttggaagtcgcagcagaagacctgggctacaaatctgtggctgaactaaaaaaaaagctaagtataaagccttgatcaaagccaaagaaaaaggtaagggatttgcttctttaactactataaccaattttttggacataaacgcaatgcttactataagtataaaaatagagctgataagcgtttaaaactagaacagcagattattgggatagttaagaaaagacgcaagtcccttccaagggaaggcgtgcgtaaacttgttaaatccttagatgatgagtttaccaaagccaaccttaaagtcggcagggatactttgtttaacgtccttagaaaacatcaaatgctaacacttagaaagaaatatagctctagaacaactaactctttgcacaggttctataagtataaaaacatcattaaagatattgaggttacaagacctaaccaagtgtgggcctctgacataacctatatcagaacggtaaaaggattttgttacctggcgttaataactgatatgtattcaagaaagattgttggttatgaccttagtgatagcctggaactaaacggatgcgtgagggcccttaacaaagctttatatcatgctaaaaacacaaaaggactcattc

SEQ ID NO: 2308 - DNA, 20691 bp, synthetic construct
  misc_feature 1..20691: note = Synthetic
  source 1..20691: mol_type = other DNA
agtggcgatccattcgacgtggcaacacttgatgcagagcgaacacgtgtgtctacattgttgcgcaataacggattcttctattaccaaccttcgtatgcaacatatcttgccgataccttggccatgatggataaggcacaggtgcgactgcagtatgccgatagcttgccgtcgagagtaggcaagcaatggtatataggatgtatcaaccttgagatgcgccgtactgccacgcaagagttgaccgatacggtgaaccataaaatatacacaatgatatattcgggaagacgtcagcctatacgaagcttagtattgatacgcgacatgaagcttcgtccgcataaactatatagttatgccgactatgtgcagacaataaacacactaacctcaaagggactcttctcgcgtgtggacttggggtttgcaccgcgcgacacatcagaggcatgcaatgtgcttgacattacgctcaactgtgtgtttgacaaaccttatgatatatattttgagggcaaccttgtaggaaagacaacggggcgtgttggtccgggtatgacacttggttttgccaaacgtaacgcctttcgtggaggtgagaaactgtcggttaatcttaatggatcgtacgaatggcagacaggacatagagctgatggcacaagttccaagttcaactcgtatgagtatggggccgatgtgtcgcttgagtttccacgcctgctctttatagataactacctcactaagcgacgcctgaagaagtggcagaaaggtaagcgtgttataccttattatactacaccaaacacactgttgaaggcggcaagcaatgtgcttaaccgctcgggctacttcaagcgccacatcgtgtcgggcgaattgacttataccattcagccttcggctacaaggctgcatcagttctcgccacttatactacagtatgagtttatgaaggacaagtcggctgcattcaacgaggtgttgcaacagagtccgtatcttatggtttcgatggccgaccagtttgtgcctaaaatgcgatacacatttacctatcagtcgccatctacctatcgtaatccaatctactggcagaccacagtgagcgaggcatcaaacatattggcattaggctatctggcttttggacagcggtggaaagagacgggcaagaagatgtttaagaatccatttgcacagttcctgaaggttgagaccgacttgcgcaagacgtggcaggtgacagagcatagtcagatagtgggacatatcaatacgggtgtggtatgggcttatggcaatgccaagtcggctccgtatagcgagcagttttatgtaggtggagctaatagtatacgtgctttcaatgttcgaagcattggtccaggtagctactataccaatcagtcaaagttgtcgtatatggaccagactggagacatcaaactcttggccaaccttgagtatcgtccgcgtataatgggcaatctatatggtgcactcttccttgatgcaggcaacgtatgggctttgcgcaatgatggctaccgcacaggctcgcagcttcgcctgaagaacatatttaaggagacagctcttggtaccggtataggcatacgctatgatatggacttctttgttctgcgtctcgactggggcgtaggcatacacgtgccctacaagaatggattctacaacttcgatcatttcaaggactcgcagagtctgcacttcgccattggatacccgttctaaggagtgggtagagttgttgtttttatcacctcctacttgcctatagagaagtggtagcggcaatggctggtatacttcttgccaggctcaagcaatgcgctcggccattgaggcttattgggcgagtcgggatagtgctgggtttcgaggcacacagccaagtggcgcggatatcggtagccgtgcttggcggtgaaggaagcgtcgaggaagttgcccgtgtatacctgtatgcccggctcgttggtgtagacatccatgcgtatgcctgtggcaggattataaagggaagctgctatgagcttgtcgttgcccttacccttacgccacgtgttgagacaccagttgtggtcgaatccgctggcgttgcgtgtcatgtcaaactgcttgttgttgatgtcgcggcttagcggagtaaggcgtctgaagtccatcggtgtgcccgcaacgctaagctcctcgccagtagtcatgtacgtagtgtcggcaggagtgtagcggttggcattgatatagagcatctggttctctccatcgtgcgacgggtcgccattaaggttgaagtaagagtggttggtcatgttgataaaggtcttcttagacgacgtcgcctcgtagcgtatgtctatcgagttgtcggacgtaagcgtatacgtaacggtagcgttgacgttgccggggaatccgttgtcgccgtcgggcgagaagatgcacatctgcaatgtcgagtcgttgagctggcgtccgtcgtacaccttgtattgccaaccggtgggaccgccgtgcagacaatggccgtagttgttctgcggcagctgtatggtcttgccgtcaatggttatgcggccctggtttatgcggttggcatagcggccgatggctgctccaaagtcgctgccaaagtgttcgcggtcggcatactgtgctatattgtcgtagccaagcacaacgtcctgcatctttccgttgcggtcgggcaccatctctcgcacacgtctgccgtgcatattgccttgcggcacaaagcgctcaaacagagggttggtgttaggcagatagttgacgccaccgaagtaggagccagcccacatgccaccgtcacggtcctgaaacaggcagtagagcggattgtcggacaacgagaaggggtcggcagggttgtacataaagtgttgcacggagcgtgtcgccacattatatatatacagtcccatttcggacgcagcccaaatctcgttctgcttctttgtcaccattctcacaaatatattcttgccgtcgtatctgtcggcaataatgttgcattgtctggtgcttgtgtttacctcgcacaggccgtgtcggtcggcaccgatatatagccggtcggcagagtagggcagtatggacgacacaatgtcgttggcaaaggggtgcgagccgtcggcagcggtaaatggctgcacgttgcgcagcgacaggtcggcactgtatagtccatcgccgaagagtcctaaccatatacggttgtccttgccaaggctcatgcccacaacattgctgtagctaggcagagggttgttggtaagcgagtgctccttgatgtcgtagcgaactcgtcgttgtaggcacgataaattttgaaggatgtgccgtcgaagcggtttagtccctcctttgttccaatccatataaaaccggtacggtcttgcataatggtgtagactgtgctctgcgagagtccgttctgtacgccgtagtgcttaaacatatagcttgccttgcatggggcaaagcaaggcaagcaatgtaagtaggcaggtaatgatattgttcttgttcataaacagattgtttcgtattgtatttgcgactcaaaattactaataaatcacaatatccgtatcatcattcagttcttattttttagctgcgtgcttaaatgcacgtagctgtcgttacttgaggaagttgaccgtgtgctcgggcgagtagagctcccaaagcgatgccactgtccagcccggagcgaagaggttgttgtagaagcccttgccgttgcggccgtagtcccatgtggtgtgctgcacaacctcgggatagtagccaggcttggcaatgtcgaagtggtgctcgttggtaggcatcaactggcacagcgacgagtagataacgtcgtacatcttggcaaagcgcttctcgccggttacggttgacagccacttgacgatgtgcggcagctcgaagacaaagacgtcgatatggttgttctctaccgacacgttgctccaaccgcgcgaacggaacccaacatcgcctagcatctgacccttggcaaacggcacgtcccatgtatagtaccacgacatggcaaagtaggcagcctgacggcagaggtcgatgtagtgggcgcgctccttacccttggtcaccatagccaaataataggtcgaggtaacggcagctatggcagcctccttgtcctcacagttggcgtcgagggtagacgagaagtagtcgctcttggaaatgatgttcttctccacatagtcgacagtgcgctttgcggctgcaaggtagcgcttgtcgccaaagtacttccaatccataacaagggtagatgtagccgatggtgtgctgccgccagaggcgtcgatgtcggtaccgttgtcgctgtacttgcgggcaaagctgccgtcgagcttctgtatagctataaggttgtcgagcagggtgcgcatcttcttctcccaatccttatgctggcgtccgtgctggcgcttgtacttgagataatgcagtacggcatatactgcctcgctctgctgtcggatagagtggacaacgtttttgggcatgccctcgttgaagttgacaaagtcgtagaagtagccagccggtgtaaatccgttctgcttgaagctctcgataatgctctcgcccatctgcttgaggttgttgtcgccgtgagcctcgccccattctatctcgttgaaggcattgagcaacactctgccgcagaaaccaatctgcatctctcgtgccggtttgcagtcgttggtaaggatcgtaagaccagagttgtacttcaggggaaaatcggcaacgtacgactcgcggaagtagttgcacagctgtgccttgacctcctcggcagacatctgctgcttgagaggctctggctgcatcttgtcgaagctgtactgccacatgctgcttacaaagtcgccatacgatgcagccttggtttggcgtatgcgccacgtcagcgtcttctcttcgccggctttaagcttgacaaacgacgtaaccgacggagcgagggtgagcttgcgtatgtagcgtcgaggtgtctccacatagggatagccaaaggtgagcttggccttgcccgtctcgttgtcgaagccaaggtagcctatagtggtgttgccggggagtataatctcgccctgcgttagctgggtctgaacgtcggcagcgtccttctctacacgcagcacgctccagccgctgcccgtagttgtgctgtacacgctggtaagagggatggagagacggtcgtccctgaagtttcagctgctgcttgtagcaaacgagggagcctccttgggcgaacgcatatgtttttagttgttgttgtctaaggcatggcatagtgcatggttggctttagccacacgtttggcgtcgaccttaagcaccttgcggtcgtaggttacgagtccgttgacctcgccctccacgtcggtggtttgggtatatacggcagccgagaaaccagtcttgacaagctgttgcagcttgtcggtatactcgacgtatcggtttgtgacctccttaacattcttgaattcggcatagccccagttcttgtcgtcttgccatagatgttgcttgacgggaagtccgagtccgccgtattcgccaagaacggtagggcggttggcatcgtatagcataatggatgggtcggggtagtgatgtatgtcgagcatgtcgcccacggcatagtggttgccaccgcttgcggggttgacaagacgtgtagggtcgtaggctttagtccattccacaatttcttgtgtcttgaactgtccccaacgctcgttgaagggagtccatgtaacgatgcagggataaggctgcaaggcgtcgataatctctttccattcgttgcggaagttgttctccgactcggcgctgtgctttacctcggctccgttgtagaagttgtacatctgccactcgggccaagagtcgccgcacggcatatcctgccataccagtacgccaagacggtcgcaccatgtgtaccaacgggcaggctccgtcttcatgtgcttgcgtatcatgttgaagccaagacgctttgccagttggatgtcgtagcgcagggcttcgtcgttgggagcggtgtacagtccgtcgggccaatagccctggtcaagcggacccatctggaagatgtcgcggttgttgagctgtatgcgcataatgccgttggcgtcacgtcgtgttgaaatcttgcgcatagcggcatagctctccactttgtccacctgcttgccgtccttgaacagacttatattagccgtatacaggtacggatcgtcaggactccataggtgcggattgtcgatagtaaggtcgacaggctgtccggcggcagccttgccagtggctataatcttcttgccgtctgatattgtaacctccacaatgccctcgtgcgtactggtaagaggtgtaatgcaaaggcggttgttgtcgatatcgcttacagtgttaagggctgtgatgtggctggcggctaccggctcaatccacacggtttgccagatgcccgtaacaggtgtgtaccatataccttcaggcttagacttctgcttgccaacgggctgatagccgtcggtagttgggtcgaacacacgtatggttatgttctgtagttgcttggcattgtctatatatggggttatgtcgagactgaacggggcgtagcctccgcggtgcgaaccaatgcgtatgtcgttgatgtagacatcggcttgccagtcgacagcaccaaagtgaagcaggatgtggtccgacagccagtcggcagggatgtcgaaggtgcggctataccatagctcctggtctttgccaacggtcttcataacgccagacaaactcgactcgacagcaaacggaacaagtatcttgccgtcagcattgcccatgttggcagctccacgttggcgtatagagtagttccacagaccgtccaagctctgccagcggttgcgctgcatgataggacggggatattcggttgatatattgttgggcgacacttgggctgcccattgtgtcttgattttgttgccttgcgcactccactgtgcattggcggctacaacaccagccaatgacagcagagtagagactaacaaactcttaatcaaaaatttattcattattctgtatgctttgtgtctctataggtttagagacgtgttattattcagtcttcaacaatcttgccttctatatactcaacgacattcttcttacagtcgttgcccgagtagtagctgtgcgatatggcgagccatatagtgtcggtatccttgaggaagaaagagctgtagtaggcgccttcgccgtaaggcagcgacgagaagggcatggtgcgatacttgaagttgtggccggtattgtcgcctatgcacacttggctgcggttggtctgccatgtgttgccgctttgtccgaggtgtcccatggcgacaatcggctgacttgttgttgaaaccgaaacacaggaacctgaccttgcagtatttcatatatattggtagctgcagttttcttagcctccttcatgtcaacaacacctacagcgccagttaggtcggctttgcgttgtgtaccataaccaatgacaaccacttcgccaaggtcgttctccattgttttcatcccgatgttgacaactttgcgtccgtcaacagtaatgtcggtatcgtcgtatccgacataagagaaacgcagacgctccttgcctgacgcctcaatggtgtaattgccgtcgatgtcggttactgccattttcttgcttccaagcgaacgaatggtaactccaataagaggttcacccgtagtggcatcttttacctggcccttaacgctctgtgccgatgccgacaacggaaccgaaatgagaccagacaacaaaagtgccttccacatttttgtctctttattcatacgtattttggttttaattaataggtttcctttaaattcctgctacaaagttaaatgttacatttttatagaaatgaaagatatgggtatataaatagaaataatgaactaaataagcgctattttgtagtattgaaccaattaaatatcaaaatggctcgatactacaataaatatattgataatgataatagttcttataactatattgcgtacttttgtatatgtacaaaatcataactctaaaaacaataataatataaatatttaactatgcaaatgtcgttgttctcctcaaaagtgtctgctcgaattgcagggcttgttctattaatcattgttatctctgttaattgtacggcgcagagtaagtgtgctgcctatactgttgtagaaaatattagctacaaaaacgacaacttatccagctcgtatatatcagagcgttgtaagcttgatgtctactcatgcgataccttaaagaatgttccagttgtggtgtggtttcacggcggaggtttgacaagtggctctaaatacatacccgatgagttgaaagacaagggtatagtggttgttgctgttaattatcgtctgttgcctcgtgttaatattgatgagtgtcttgacgattgtgcagcagctgtagcatgggtgtttggtaatgttttgcgttttggtggtaataaacgtagcatatacttgtctggtcattctgccggtgggtatataacggcgatgcttggtcttgacaagacattacttgcacggtatggggttgacgccgacagtataaaggctcttgttccgtttagcggacagatgataagtcatttcgcttaccgtgatatgaatggtattggtaatctgcaaccacttgtcgacaaatttgcccctctctttcatgtgcgtccaaactgtccaccacttgtcctcataacaggtgatgcagagaccgagctcttagggcgttatgaggagaatctttatatgtggcgtatgatgaagctgtgtggacacactgctacatctatatacaagatagacggtcatgaccatggggcgatgtgtcatcctgcatttcatatactgttgcatacgatagcaaaataccgataaatccaactggtacaaacagcaaattcagttaaatgtagctaaaatctatagtaaataccaataaaatatcaatatttattaaatggtagacgaaatgtttggtagtttcaataaaaagtcgtacctttgcagtcgcaattcagagataggacgtttgtcttgtaaatctgagtatgtttttatggctaatatcgcggagtggagcagttggtagctcgccaggctcataacctggaggtcgcatgttcgagtcttgcctccgcaacatagattaaattttatggttaatatcgcggagtggagcagttggtagctcgccaggctcataacctggaggtcgcatgttcgagtcctgcctccgcaactaataacgacatagcaagttgtaatacaactggttatgtcgttttttttgttttagggtgcgacaaatctgcgccaaagattttgtacttttgcaaattgtattgcaaaagactgaaatcggctcatataatattgttgtgtttttaacaatctgtatttcttatgcaaatagttgttttacttaataaagatattggctcatataatattgttgtgtttttaacaatctgtatttcttatgcaaacaactgttttactctataaagatttttagcctcgttgtgttgcctaagacttgagaatataaaaaagcccaccgttaaggacgatgggcgaacctaatgttttcacaacggaataatccttattgtgatttgctcaaatttatatggcaaagatacataaaagaacataaccagccaaacaatagaagtgaaaaatttgcctaatagcatttaaatatataaatttgtaacaacctaaaagctatttgtatattaaataccattttgatatgaaaaaaatattaggacttgatcttggcaccaccagtataggatgggcatttgtcacagaggctgaaaacgaaaaagaaaagtcttcgattataaaactcggtgttcgtgtaaacccattaacagtagatgaacagacaaactttgaaaaaggtaaagccatcactaccaatgccgacagaacattgaagcgtacagtacgacgtaatttgcaacgttacaaattacgtcgcgagaatcttatatctttgttgaagaaggaaggcttcataaccgaagattccgtgctttgtgagaaaggaaacaacacaacattcgaaacacgtcgtttacgtgcaaaggctgttacagaggaaatatcactagaagaactggcgcgtgttctcatcatgcttaacaagaaacgtggctataagagtagtagaaaagcaaattccggtgaggaaggtaatctgattgatggtatgacggttgcccgaaaactatatgacgagcatctcacaccaggacaatatacctatcagcttttatgtaaaggaaagaaatacattcctgacttctatccttcagatctcattgcggagtttgaagccgtatggaattgccaaaaacaattctatacggatatgcttacagatgaactcagagaagcattacgtgacaagaacgaaaagcagacatgggcaatatgcgccgcaccgttaggattgaaaggcattaagcgtaatggcactgttgcagaccaacgtgttgagaattaccgttggcgtacagaagcccttaccaaacagcttcctcttgaacaagttgttattgtattgcagaaaattaatagccagatacgtggcacaagtggatacctcggagcaatcagcgaccgaagcaaagagttgtacttcaaccatctgacagtaggtcagtttcaaatgaaacaactatccgagaatccaaacataagtttgaagaatcaggttttctatcgtcaagactatcttgatgaatttgaacgtatatgggaaaaacaagctaaattccacaaagagctaactgaagaattgaaacatgagttgcgtgatattattattttctatcagcgcccgcttaaatcccagaaaagtctaataagctattgtgagtttgaaagcagtcagaaagaggttgtggtggacggaaagaagaaaaccataaccattggtttgcgtgtatgccccaagtcttcgcctttattccaatgttttaagatttggcaaagcataaataatctgcaaatcacaggcaatgtcatacctaaacaacaacttgacctctttggtgatactacagagtttgaccatggtacccgcatactgactgaagaagaaaagctcgacctatatcgtgaacttagcataaaagaaagtctttcagaagcagaaattataaaattgctttttggagggaaaaaaggattgagccttaattttcataaggtagaaggcaatcgtacaatggcaacttttatcaaggcttgccatactattcttgtcattaatggatacaatgattatgatttctcaaagatttcctacgacaagacgattgctatcataacacaggtttttgacgccttaggctttaagtctggcttcttgaattttaacccgactcttgaaggtaagggttatgagcgtcaggacacttatcggttgtggcatcttttgtattcgtattcggacgataactctgcaacaggaaatgaaaagcttgttgaacgaatcggcaatctcttgaatatggataaagaatctgctgcagcatttgcgtcaatcacttatgaatctgattatggtagccttagttctaaggctatgcgccgcattttaccacatatgatggatggattagagtatagtgttgcttgtgaatatgctggttatcgccactcccgtcgctcactcacaaaagaagaaatcatgtcgaaacctttagtcaacacaatacctcttcttccacgcaacagtctgcgcaatcccgtagtggagaaaattcttaatcaaatgataaatgtggtgaatgctgtaagcgagagctatggaaaaccagatgaaatacgcatcgaaatggcacgtgagcttaagaaaagcgctacagaacgtgaacaaatgacacgtgacattgcacgggcaaatatagaaaatgataaatatcgaaaggttttacaggaaaaattcaacatacaaaatgtaagtcgtaatgatataatacgctatcgactttatctcgaactggaggccaatggcttcaagaccctgtatacacagacatacataccacgcgagaaactgttcagcaaagagtttgacatcgagcatataatcccgcaagcacggttgtttgatgattcgttctctaacaagactcttgaggcgcgtagtgccaatatagagaaaggtagcacaactgcttacgactatgtgcttgcaaaatacggcgagcatggaagcaatggggctattgcatataaagaacgcatagaccacctttataaagacggtaaaataagcaagacaaaacacgataagttgttgatgactaccgacgatattcctgacggattcatcaaccgcgacttgcgtgatacacaatatatagcacgcaaggcacgtgaaatattagagagcacagtacgtgttgttgtgcctacaactggttctgtaacagatcgcttgcgagaggattggcaacttgtggatgtaatgaaggaacttaattgggacaaatacgaccaactcggacttacagagattgttaaagatcatgatggccgacaaatacgacgtataaaagattggacaaaacgtaatgatcatcgccaccatgctatggatgctctgaccattgcctttacaagacacagttacatacaatatctcaacaacctcaacgcacgcagtgacaagggtggcagcatatatgctatagagaagaaagaactctaccgtgataaaaacaataagttgcggtttattccacctatgccgcttggcgaattcagagtagaagcacgtcgccatctggagaatgtgcttatatcgattaaggcaaaaaacaaagtagttacacgcaacgtaaacatcacacgtggttctgatggcaaaacgcatcgtacggtacaactaactccacgtggtcagttgcataacgaaactgtatatggacatagatgtcagtgtatagttaaagaggaaaaagtgtgtagtgcatttaatatggaaaagataaataccgtcagcaatccacaatttcgtgaagcgctgttacgtagatatgctgagtttggcgatgcaaaaaaggcatttaccggcaagaacagtcttgataaaaatcctatatacctcaatgacgaccacacaaaacaagttcccaaaaaggttaagactgttacattcgaagaagtcttcactattcgcaagccgatagacaaagaccttaatatagataaggttgtggatgctcatatacgagaaatcttgcaacaacgcctatctgaatacggtgatgacgcaaagaaggcttttgccaatctcgacgaaaacccaatatggcttaaccgagaacgtggcattgccataaaacgtgtcaccatatacggtgtaagtaatgctatagcattacatgatagacgcgatatgcagggaaataaaatactcaaaagcaatggaacgcctacgccagctgactacgtaagtacaagcaacaatcatcatgtggcgatattcttggacgaaaaaggcaacttgcaggaacatgttgtgtctttctttgaggcaacagagcgatcacgacaacatctgcctattgtcgaccgcgaatacaacaagcatctagaatggaagtttctctttacaatgaaacgcaacgaatactttgtgtttcctaacgaaaagactggattcaatcccaatgagatagatctgcttgatcctaacaatgctgcagaaataagcaagaacctgtttagagtacagaaattagcaacaaagaattatttcttcagacatcatttggaaaccaatgtagatacgcctaaggaattgtctgggattacttataagtcacagcttggactaaaagggattgtcggcatcgtgaaagttcgtatcaatcatcttggacaaatagttgctgttggcgaatattaatagataaacaacaaacgccctatgataaagaaaactttatacttcggcaatccggcgtatctgtcgctgtgcatgggacaaatggtgataaggttaccagaagtggaaacagacaacaatctgcctgaacaaatcaaaaaacaggtagaagtgacaaaaccagtggaagacattggggtggtggtgctcgacaatcgacgcatcaccataacccaaggtttgatagaggctttgcttgaaaacaattgtgcagtcatcacatgcgattctcacagcctgccagtaggattaatgcttccgctttatggtaacactacacagaacgagcgttttcgtgatcagtttgctgcttctcttccattaaagaaacagctatggcagcaaactataaaaacgaaaattagcaatcaagctgcagttcttgctgcatgtgcaggccacaaatctcctactatgcaaagatggattgaagatgttcgcagcggtgatcctgacaatatagaagggcgtgccgctgcatactattggaagaatctgtttgatgggattgatggcttggagggttttacacgtggtagagatggagatgcacctaacaatcttcttaattacggctatgctatattgcgtgcagttgtggcgcgtgcccttgtgtcgagcggaatgttgccaacacttggcatacaccatcataatcgttataatgcctattgtcttgcggatgacataatggaaccatatcgtccttatgttgacgaacttgtttattcaatagtaagagaatatggagccgataatctggacttgtcaagagatctcaaggcacgattacttaccatacctacgttggatgttatgataggaggtaaatgtagccctttgatggttgctgtcacacaaactacggcatcgctatataagtgctttaccggagagttgcgacgcattgcttaccccttacgctaacttaaactcaacttcattatggaccgttttagtgaatatagagttatgtggatacttgtactttttgatttacccactgaaacaaagaaagatataaaagaatacaccttgttcagaaaaagattgcaacaagatggcttcactatgtttcagttttctatatatgtacgccattgtgcaagtatggaaaatgcagaagttcatatgaagcgagtctactcctttcttcctgaatttggaaaggtaggagttatatgcataacggataaacaattcggaaatattaaacttttttatggaaagaagccacaaaagcctaatgctccaggacaacaattggaacttttctaaccaattaaaaactataaaaggaaatatttagaaaaagaggtattcttcaataacgaagaatacctcttttattcaccaacattttattattctaatatatgtgccattttattgatattcaggtaaatacacatactatgttggtgattctaccgcaaaggtagtgaaatttgagcaaatcacaacgttgaacggtggcgaaaagctcacgtgtgtgttggtgattctaccgcaaaggtagtgaaatttgagcaaatcacaactacttgcatcccggattcatcactcttgctgttggtgattctaccgcaaaggtagtgaaatttgagcaaatcacaacttttcggggctgtgtaaaataacgacacggttggtgattctaccgcaaaggtagtgaaatttgagcaaatcacaacctcgttccgtgttcttcggtgctaacggtgttggtgattctaccgcaaaggtagtgaaatttgagcaaatcacaactaaaatgtctatggttaaacgaaagcggatgttggtgattctaccgcaaaggtagtgaaatttgagcaaatcacaacttataagtattttattgcgatggaatacggttggtgattctaccgcaaaggtagtgaaatttgagcaaatcacaactgaacagctggcaaagtctgctgtcaatagttggtgattctaccgcaaaggtagtgaaatttgagcaaatcacaacgcgcaataaccaaggagacaaatgctggaagttggtgattctaccgcaaaggtagtgaaatttgagcaaatcacaactttgcgcttgccggaacaatcaccgatgaagttggtgattctaccgcaaaggtagtgaaatttgagcaaatcacaacccttaaacctgtgcgtaactcttacgatacgttggtgattctaccgcaaaggtagtgaaatttgagcaaatcacaactcacggcagaaatgaggaagacaatcattagttggtgattctaccgcaaaggtagtgaaatttgagcaaatcacaactcattcttaactatattatgtactatgaatgttggtgattctaccgcaaaggtagtgaaatttgagcaaatcacaacattatttcaaaagtttcatttatctatatgttggtgattctaccgcaaaggtagtgaaatttgagcaaatcacaacgttcaggcttccgacaactacttttaagtgttggtgattctaccgcaaaggtagtaaaataacaatcaaataatattgttgcgtttctaataaatcaacaattttgtttatctttgccttattaatagaactcagcccatagattacaagtcagtattatccttatttcttacatcaggagggcttgactgtttcgacataacagaagcttccaatgttgtcggataagctcatggacatatttaccagtcgtcagtattcgactcatattaatgaattgtgacaaagtgaatgattcgattcagataacaagttttaatacgagaacaaatgaacaagtatagaacaaagatgaatagaatattttgcttagaaatagaatgggatcagaatatgcagcaaaacgcatgagtgatcttgcagagaaagaaatgccatactttacaaagttatttggattcaaggcattttagattcaaggataaatattttaaatcaagtatttatgaaacattttttattaactttattactgacatttattgtcggtgtttgctatgcacaaacagagcacatgaaatttaagggcgttccaatggaaggtacccttcagaacttcactagcaagttaaaagcaaaaggatttacaccaattggtattcaagacggtgtttctttgttgaatggtgaatttgccggttacaaggactgtaccatttatgctgtagctgataaaagcggaatgatctgtaaagtttccgtaacattccctactatggataaatggggagacctggaacggtgctatttgaactacaaatctatgctctcggaaaaatacggagagccaaaagattgtgtagaaaagttccaaaatgattatgccaatgataacaactccaaaaaacatgagttaagtatggacagatgtaaatactatagcgtcttcgatggagataatggcgaaattcaattagagattacccatcagagcataacttgctatgtaatgctcagttacttcgataacgccaaccaagaaaagttgagaaaacagattatggatgatctttaatcctttctagctttttgctgcaaagcacgcatataataggagtaaaacaactattgcatgcgtgcttattttttatctgttgttcagagaattcagtagttaaagtagttaagaagttcttgcaagcaagcttagggcgcgaaaaacttcttaactactttcgcttgcgaaacttaaattatttgatccataaaatattgtggatgaaaaacaaacaaaaaaaggactttaccgaagtaaagccccttttaatggatttgtttgattgtatgttttgtgatccgcatgggtcacaagtaaaactactgtaactatttggttgtcagctttctttacttacgatatgcaaaggtaggtaatttttgggtaaaacgtgaactgttttacaaaaagtttacggaattatgattttttttgtgttaacgaatgtcaagcatatttggtcagttgaacaagaaaacgtatctttgtatcgctttttagtagtaacgcactaacataaggcgcatttaggatacttcaatcaacatatgtggagtcctcgttcaaagttcgaagcgttacacgaacggcgaatggggactcttttttttgtccccattcaaaggtcggagtggaagagacggctaaatacaccacgcaacatttcgacggtaaataaaatctgcaagtgggacccagggcagaagcgcaagagttgattggagaagacgcgggaaggacggtagcgaacaccgaaagcttcatacactaactgtcgttagctggcaagtggtggtgacgggggttgatcctgacgggactcatcgttatacagactctcacttatagacggattttcaagtcctctataaggggagagtctgctcaaaaagcatcagccttctgaaactcttttagaagtttaatgaagaatattgatgataaattattgtattttctctttgtttctttctctttattttagacaaaacttttaaaagtcgatattgtatagagaagtcgcgaagaaattaatataagagttgtttttagttacatatacattgtacttttattgctaaggtagccatccgtgaggacagctacctttttttgttggctttaatcgtcttttttaagccaagggtataacgggactaccctacaagttgttgacggtcgggagactgcttgttctggttcttctccagaataatggagcgcagctctttaatgatgccttccttaacaagtatttctgtttcgtacttcttcttaagcacggcaaggtcgggatgctcggtgacgagcattggctctttgcctcgtattagccattccgcagagatgtcggggaagagttgtaacacgtgttcgataaactccaacttaggtggctgtgagccgttgcaatagtttacgacggtagacggacgctggtcaagacgatcggcaagaccacgagccgagaggttgtaatgtcggcgtagggcttcgaggcgttcggtaatggttgtcatagctgtaaaatgtttattaatgtaatcgtatgtaaaaatatataaataaaaagtggttttatgcccaagtatttggatagttgcccatatagttgtacatttgcatcggtaaaacggtttataaccgttacataaacttatttattgtgcaaatatacagataatatggcaaagttgataaataaaacgaaaataattgttccaaaggaacaaatttccgtactgatgaatcggttcggatacaaaaaaacagctgtgtacaatgcgcttgcttaccgttcgcactcgagcgtggcacagaacatacgcaagatggccttggacttagggggaaggaaggtgagattgccgatgttcgaagaagaatagagaaagctgacaatcagatattaaagcagtttgtttaagatgtgacacggaggagtctgtgccgttagactattcgggctgttggttcgggaggataggcagttttttaaaatctttaaaaaccaatgctatgctgcaactttttacgacacgcacctatcaagatagggttgacgagatatacaagctgctcgagagtgacagggattgctcgctgaggctgtttgagtggcgcatgaggcggatacactgcctaaacttgaagattaaacaacgttctgccgacatgggtagaaaggaggagatatactaaggatatgttttggaagaaaaagaaagataaaaacaagtccgacacttgggggaaaactgcaaggacgggcaaatggagaagcacaaaatcgcttaaggataagcttgatagagtgttctcgacgtatatacgtttgcgagactcgaaggaatttggctttaagtacttcagatgtattagctgcggaagagtattgccgtttgagcaagctgactgcggacactacatatcacgaacgaacatggctctaaggttctcggaagacaattgttcggcgcaatgtcggcactgcaaccgctacaaggacggtaatatacttgactatcgccaggggttgataagaaagattggcgagcagagagtgatattactggaatcgaggaagcacgaaatgaagaaatggtcgaattgggaactggagaaacttattgagtactacagcaaggagaccgaacgactgaaaggaatgaattgataagctcatattggtatgtaaaatgttattaatgttagatgatagcagcggctataacgtgtatatacttagttgttttgcctgtctggtgcgtgagcataggatagttttaagggggcgtgactacggcttgggtagcgtagagttataaagaaatggttccgatgtgagggttcgattccctctgcctccacgataatcttattctaatgattatttgtcgatgcaacatgtggatgttgctgatagttaagcttttatcttttaaacggtaca

SEQ ID NO: 2309 - DNA, 20509 bp, synthetic construct
  source 1..20509: mol_type = other DNA
  misc_feature 1..20509: note = Synthetic
caatacctcgcttttggatagattttagaaaagaggttaattcttctccagttttgaattgttttaaaaaatcgtcgtctaaaaatttttcgctgtccataatatgtaaaatttaaaattaatcaaaaaaatatcgggggtctagacccccgatattttaaactttacacacttagtgagatactgccttaatatatcgtagtagaacttgcaatgtaattggatagaattatgaaaccttaatcatactttgatggaggttaatttttcttaactaaatttttattacctaattcaactactcataaaactcactataacgtcaaaatcatcaaggggaaaattcgataacctcttccgttgggcttatattttttaaaacactttaaaccaattatttaaggtgtttttttttatatttttatacaactatccaaatttcaataaaaaacaggataacaacttaaagtcattatcctgttttaaactgttagttatctaaattataatttcatccactcggtagcttttgtttgaatatttgaaaaatttactgagtttttagcattttgcaattgctggtctagttctttctgtgtcatattgaaataatctctagcaacttcatagggattttctcctcctacaattgctgattctgcatttgtatttaatctaattaacgctacataaacagaagccccaatttcatattgtaaattttctatgactgcttctagagtatctcgattagtgataccatagttatcgtctgtaatacttccaggaataaatggttccattgctctattaggaaatgcgtttcttaaagcaagcctttctacataacgtgctgtaccttcaagcttttcattttctgatgctgagtcaaaacctaacagtgcattttctgcagacctaatagcgacaaattgtcttaacttattttctaaatttgtaacactttctatatcattaggaaagtttttaaatatctgatgagtaagtgctcttagttctaaaaattcttgattcaaagtgggaaatggagaaattgcagagaatcgccaactgtcctggaaatcgtgaaaaggttcgtgaattataaaatcaatactagcaattgtgtagttatcaggattaaaaaatccgcctggaaaagtgcctaattgatcgccggctataacttctgcatctgtatatatttgaatgtaatatatactatctccaccaatgttaaaattataatcgtagaggccatttcccatattttcaataatgttaaatgcttcttgtgcttggtcatcgtaacgtactacgtttaaggacgcgttttcgccagcaggcacaactgttgctccagttattgtggattgtgggttaactatatagcccctatcaacaatgcctttatcattcttatgtattaaatacataggcgtatttgataggttgtaaccagaccaaatggattgagatgtcaacacattatttactgcactaatttgagaaaataattgagtgtctattactgcatctgttgctgttgtaacagttcctgttactggttttgctactggtcctacgtaatctgatgacaatataaggttagaagtgttttgtataattactacaaaagttacaaatttagctatatcactttctgttaaggtatatgtttttgatgttgctccatcaatcagagttacattggttcctgcagcatcgtctgcgcgccgccatgctattgttgtttttgaagtatcgtaatctaagggtgtaaagcctgatactttataagaagcagtaagctcttctcctacttgtggtgttcctgaaataatggcagtgctaattctatttttagagacttctgcgttatcgtcatcttttgagcaagctcctatgaccaaagctaggattaaaaattttaataggtttaattttgaaattttcattattattatgttttcattgtttcttctaagacaatagtatttttcattacacgtaaaaaaatattaaaatatttcaattaatttttcatagttatgtaaatcagttatttaaattttaaaaagtctaagtattttgaaattggaattaatagttttaaaataagtttacctttatattttttggttcttcgccaaaagttgtggattaaaggttttacaaaaaaaacaaaattttatgaaagagttatttatctcataaaagccttaatttaaaactacttaatggggtagattatattaaataaaatcacccttttttcttaaaccatactttttggcgaagaacctattttattttttataaagatggaggacagtttacttattaaacaattccaagaagggaatttaaagagttatgaaactctatataaaaagtattataaattacttgcagtatatgcaaagcagtttgtaaaggacctacatatttctgaagatattacacaagatacttttgttatgatttatgaaaagcggtcaaacatagaaatacacacctcttttaaatcttttatgtacacagctgtacgtaataactgccttaattatcttaaaaaggaagcaaaaatgatagatactccttttgcacaaaacgagcctattattgaagaagaagatgctaacactatttcaaatatagaactggcagaaaaactagctaaagctataaacaagctaccacgtcaaaacaaagaaatttttaaattaagtagatacagaggcttaacaaatgaagaaatagccactaaattaaatcttacaaaacgtacagtagaaacgcatattagtaatgcattaaaaaaattaagggtagatttattgcccattattttatttgtattacattttttttacttttagttacgtatttatggtttctaatctgtcctatttataaataagtcattatgaataaaaattacacccatataaatgacgcacaccttattgattatttacagaaacgaactacggagactgaaaataagcaaatagaaaactggatgcaggttaatgaagagaatcgcatacaatttgaaaacgtaaagcagttttggaaaatatcttttatggctaaagattttgaaaaaatagatactgataccagttgggaaaaagtggctcataaaattgaaaatagtacggtgcctaaagtacgtaaaatagatttttccatactctggaaagttgctgcatcttttattttgttactagggttaagtattcctttttttataagtaataatactaccttaactgctaccaccactaaggaatacaaattgccagacggtacgcaactctggttaaaaaagggaagtaaacttacctatactaatgattttaatgctgaaaagcgagatgtaaagctaacaggagaagcttactttaaagttgccgaaaataaatcaaaaccattttccataactataaataataccacaacaacagttttaggaacagaatttaaccttaaagctgataaaaccaataaaatttctcttactttaatagaagggagtgttaagttttctactgataaaacctatgaaattattaagccaggagaaactgtgagtactcaagaagatggtactcttacagttaattccactaaaaatgtaaacgttgattcttggaaaactaaaatatttcaatttaacaaaacagacttatcaaaagtgattaaaaacgttgctaacgcatacgatacccaacttattattgaaaatgaaaaccttttggattgtaagcttactgctacgtttaacaatcaatctttagatatgatcgtggagactttaactttactttataagttttctgtagtaaaagatggagatatgatacgattaattaatggtcgttgcgcgtcttaaatttgaactctatctgttacatagcgctttttataatgcttgtagttgcacctttacattgtgtagcacaggaagttgaaggtgttccgctcctgcgaaagtgtacccttaaaactgaaaaaaaaacgcttatagaagcactgaatactttagaggatgtaggtggttttacttttgcctattcggaaaatagtatagatttaaagcgcttagtttctgtaaacgaaactcagaaaacaatacttcaaatacttaaaaaacttttgcccaataaagcatatgcatttaaaagtataggaaatcaggtgcttatttataaagatgttaccaatgagtattatgttttgagtggctatgttagggaaaaagagagtctggaatcacttccagaagcatccgtttatatccctaaaatacaacaaggagtcacaacaaataactatggtttcttctctataaaattaaaaaaagggacctataacatcttaacttctcatgtaggttatagtaatattcctcaagtgattactattaataaaaatcatcaagttattatagaattaactttaggcgcagaaaatttagatgaagtaactatattaagttctgcctatcaaaaacccagtaaatcgcctcaaatgtctagcctacaaatctctaatagccaaatagaaagtacgccagtattattaggagagcgcgatatttttaaaaccttacagttgctgccaggaatacaatcgggcgtagaaggtagtgcacaggttttaataagaggcggttcaccaggccaaaatcttaccgtcctagacgaagcaacggtttataattcaaaccatttatttggttttatttctgtctataatgtagatgccgtaaaatctacaaaaatatataaaggcgcatttcctgctaaatatggagccaggctatctggagttatggatattacaatgaaggatggaaataaagaaaccatttctggagcagtcaatataggcatactatcctcttcgtttttactagaaggacctattcaaaaaggcaaaacttcttttttattaagtgggaggcgcagttttgtagatctaattgccagaccttttcaggctaattatgataaccaagccgatttgtttttttatgatatgaatgcaaaactgcatcatattataaatgagcgtaataacatatatttaagcagttactttggtaaagactcttttactacaagttcaaaaaagcaaatgaggagtaatgaggaacacctcagttggggaaatctaaccacaactgcgaggtggaaccatcagtatggtaataaattgttttctaatctatctttaatttacagtagttacaacctaaaagtaggctataaagaggctataaatacaataaaagaacgccaaagtaaatttgaagctttttcaagaattaaggattatggagtaaaattgtcttttgattatcatcctaataaaaatcacaatattacttttggactgcaaagtactgctcattattttacgccagaacgtaaagaattgtccttacaatcgggagcaatttcaaaaaacaaacaacgcttaaattctttagaaagttccatttattttgaagatgctatttcgctttcgcaaaagctaaccgctataacagggctacgttttaattattttaatacaaaccgatttaataacctgtcgctagaaccgcgattatctcttgcataccgattaaaatctaatgtagcgcttaaagcttcttacacaaaaatgaaccaatttgtgcatttactttctaatacaagaactggattacctacagatttgtgggtaagtagcacaaaaaaggtagcaccgcaacaagcagagcagtttgcttttggagtagcaaaagattttgataacacagggtattccttagagttggaaggatattataaaactttagaaaatattattgcttataaagagggtgcttcatttttagacattcaaaacttgcaagcaggacgaaatgtaagttgggaagacaatataacatcgggaaacggattggcttatggcgcagagtttttactacgaaaacaaactggaaaaatccaaggctggttaggttatacactgtcttggtcgcaaaggcaatttgatgagttaaatcaaggtaaaatgttcttttccaaatatgaccagaggcatcatataaacctggtaagcacttataaaccatcccataaaattacttggtcagcatcgtgggcgtatcgttcaggaactaatttaaccttacctaatttaaagggtttagatccagataataatttccctataggttctgatgcttcaaatttttttgtaacacctactacccagtttgctacaaaacgcaatagcgtaagaggtgcgcctactcactggctcaatgtaggtgttcaatttcataaaaaaacaaagcgtgataatctacgtacttggaatttttctatctataatatttatgcacgtagaaatccattgtattattatgtaagtgatggtaattctggacctacgggtataagtgattcaagtgaaattttaggagaatccctgcgtcgtgtctctgttttagtttttattccttctgttaattactcctataaattttaaatatgaaatattctatttatataatatcctttttactattactgcttaccagttgtgatgatgaggtaagtttggatgattttagtaatagtacagagcaattagttttaatatatggttacgtatcgccacaggatgaatttttaacagtgcaagtttctaaaaccctatcatctgtaagtaatatttcaaagtatgatgaaaaaaaatttacgattacacacgctgtagtaacattatcaaatattatgggagatagtgttgttttgcagtatgttcctaaagatttaaactatcagattgatgcatctcaatttaccatagtacccaatggaacatataatttatccgtactggtagatggtaaaacttttacctcttcttgtgttatcccttcaaatactgtttctcaaataaatcatcaactaacagataatctggatgaaaatggaaacttaaaagagtcagtaactattatttttaacgatattccagcagaatcaaatagatatatagtaggagctaaactaaataattttattgttgaatctaatttaaagtttggaaatcaaagatttgtaacagatcaaatagaagacggtacacaactattgtcttacggtttttttgcggtaagcgatacgcaaaccattacaaatattgctttacaagtagcaaacgttgccccaatcttatacgacaatttatttgcttcctatactaatagagaaaatagagacaaaccattctatgagataatcatcccccctaataatattataggagaaaaaggctatggtgtttttgctggatttcaaataatcgagaaggtaattgagtattaatgattgtccctgtgttttggtttaaaaagtttaaactctacctgcttgaggttataatttatgtaaagttatttaaaacaatgttttaaataacttttttactttttataagttgaatgcaggtttggttttagtaatcattcccacaatttaagtacattaaatgtttgaactatttttaaattcctcaataatcaaactacagtagccgctcttcctaagcattttcccatttacagaatacttcattactttaattataatgaactcgtttaaacttttttcaattggctgcaaaatgatctttttcactcactttttatcacttttttgttccgtagcaatgctatgcaactataaaatgatttcaattgagcaaaaaagtttaaacgagttcaatagcaaatacctaatcttaacaaaatcaaggataaattgctaaaaacttttatgcatttttaaaggtttggaaattcgcaatacatcaaaaaaaaggtgagagtcctaaaactcccaccttaaatgttttcacaacggaataatccttattgtgaattgctttcagtttataaatataagaatcttttttctaaacgtctttgtagaaaaccgcaattgtaactaaatattttattgtagttttaggtaacttactcaaaattagactatgaaacgaatcttaggattagatttaggaaccacctccataggctgggcatttgtaaatgaggcagaaaatgataaagaatcatcttcgattattaaaactggtgttcgcgtcattccactttctgcagatgaacaacaagattttaaaaaaggaaacaatattactattaatgccgacagaacgctaaaacgtagtatgcgccgtaatcttcagcgttataaacaacgaagaatagcggttattgaagagcttgttaaaattggttttatttctaaagaggactctttagccgaaggtggcaaaaatactacacacaatacttataaaacacgagcaatagctccaacagaaaaaatatcaaaaaaagactttgcaaaagtgcttttaatgataaataaaaaacgcggttataaaagtagccggaaggcaaataaccaagaagaaggccaattaattgacggtatggctattgccaaacaactgcacattaaaaaacttactccagggcaattttccttacagcttttagaaggtggaaagaagacactccccatttactacaagtctgatttgcaaaaagaatttgataccatatgggattttcaaaaacagttttatccagaacagctaactacagctcataaggaaggattaattggtttagggcaaagagcatcgggaacttattttgaaaaaactataggtactccaagggctgaaaataaaggaaaggaaaagaaactccaagagtatcagtggagaagaaaagccattacaaaacaacttgatcttaccgaagttgcttttatacttactgaacttaataatcaaatcaatcagtccaatggttatttgggagcaataagtgaccgaagtaaggaactgtattttaataatcttactgttggtcagtatttatacgaacagcttaaaaaaaatcctctggcctctttaaaaaatcaagtattttatcgccaggattatatggatgaatttgatgctatatggaatgagcaatcgaagcactaccccgaacttacggaagaaacaagaaagcagcttcgcaatatttctattttttaccaacgccgtttaaaatcccagaaaggacttattaatatttgcgaactagaaggtaaagaacgtgaagttacaattgatggtgaaaagaaaaagaaaattattggaccaagagtggctcccaagtcatcactagttttccaacaggctaaagtatggcaaaatattaatgcgataattatcacaaacaataaaacaaataaaaaaagaacactagatcaagaaattaaagaattactttttgaacaactaaatattaccaatagcctttcagataaagaggttttaaaatttctagcctcagtttcagacataaaaataaaagattggagtattaattttgaaaaaattgaaggaaatagaacgcttgcagcactttacaaagtatttgaaaaaattgtagaaattgaagggtatcctgaattttttaaagataaaaatggaggtgaaattagagagtccttagaaaaatgcttttgcgaaagcggaataaatactgggatactaaaattagaatttcaatcaaccggcaatgaatttgcaaagcaacccgcttaccaactgtggcatcttctgtattcttatgaagatgataattccccaacaggtattgaaagtttgattgttaagcttcaagaaaagtttggttttaaaattgcacatgctcaaatcttggcaaatattacttttcaagaagattatggtagtttaagtgtccgtgcgcttcgaaagatttatccttacctggaagaaggaaaaatgtacgatgaagcctgtatgctagcaggatacaatcattcaaattccctaacaactattgaaaatgaaaaaagaccacttttggaggctattaaaatccttaaaaaaaattccttacgaaatcctgtggttgagaagattttaaatcaaatgatccatgtggttaataccatcatcgcacacccagagatgggtagaccagatgaaatacgcgttgaacttgctagggaattgaaaaagacggcaaagcaacgtaatgatctgacaaaacaaataggagctgcaacaaaaaaacacgaagaaatccgagactatttaaaaaaagaaatagggcttaaatatgtaagtagaaaagatttaatcaaatataaattataccaggaattggctagcattggccataaaacattgtattctggaacctatgttgaattaaaagacttgttcttctccaataagtttgatgtagagcatattattccacaatcggtcatgtttgatgattcgttttcaaacaaaaccattgagttacgcaaagtaaatttggaaaaaggtaatgaaactgcatatgattattgtgagcgtaaagggtggttaaaaagctttgatagtagcgtacaagaagtgtttaaagccaaagggataaagtatggtaaactgaaaaagcttttaatgaaaaaagaagaaatcccaaaagatttcctaaaccgtgaccttggcaatacagcttttatatctaaaaaagccaatgaaattttaaagcaagtgacgcgcagggtgcaacccactagtggaaatatcaccgcaaaactacgtagtgattgggaattgataaacgtgcttaaagaacttaattgggataagtacaaggctgttggccttacttattatgattacaacaaacaggataaagctttgccccgtataaaagattggaccaaacggaatgatcataggcaccatgccatggacgctattacagttgcatttacaaaacctgcttttgtccaatatcttaataatatgaatgcagaaagtaataaaggtattattattcaaaagattaaagataaatttacctaccgtgataaaaaagacgggaggaagtttattaagccctatgacacgatacgtgaagatgcaaaaaaacacctttctgaaatctttatatcgcacaaagcaaaaaataaagtagttactcgaaataagaacaaaataaaaattaaaggcaaaaataattataaaatacaaaaggttttaactccaagaggacaactacataaagaaaccatttacggcaaatcaaaatactatgtggttaaggaagaaaagattaatggctcctttaataaagagaagataagcacaattaccaatctaatttttagaaatgcagtattagaacgtttactggtaaatgaaaatgatcctaaaaaagcatttactggtaaaaatgctttgactaaaaatccaatttttactgaaggttcggaaaatagtgtaccacttgttgtgaaaactcaggttttaaaatctcaatacaccatcagaaaagagatttcctcagatcttaaaattgataaagtagttgaccagggcattaagaaaattttacaaattcgccttaaagcgtttggagggaagcctaaacttgcttttgcaaatttggaagaaaacccaatttggcttaataaagaaaaaggaatatctattaaaagagtaactatcacaggagttagcaacgcagaatcattgcatgatgctggagatctaaatggaaataaactggaaaataaatatggtgcgttaatccctaaagactttgtgagtactggaaataaccaccacgtagctatatatagagatgaaaaaggaaatttacaagaagaggttgtttcattttacgaagctgtaattcgaaaaaatataggagaatctatcataaaaatgaatcatgaaaaaggatggaaactcgaatttacattgaaacaaaatgaaatgtttttatttcctaaagatgattttattccgaacgaaatagacttgtttgcacctgaaaataggaaaattataaatcaaaacctatttagagtacaaaaaatttcaacaaaagactatgtattcaatcatcatttagaaaccatggcagtaagcgctgatgattttaaaaataaaaaaatgttatccaatttgacctataaacgttatcgaagcgagaaatcccttgaaggaatagtaaaagtaagattaaaccatttgggagaaattgttcaactaggagaatattaaaaatgataaaacgcactcttttttttgcaaatcccgcttacctgagcactaaaaatgaacagctggtggtaaaatttcctgataacgaaaaagaggaaaaagctgttgctattgaagacttgggatatgttgttttggaaaatccacagattacaattaccaatggattactaatgaaacttgtacaaaataaaacagcggtaattacttgcgataagcaacatttgccctgctcgttattgcaaccccttgtaggtcatacggaacagaccgaacggatgcggcaccagcttaacgctagtattccccttaaaaaaaacctttggcaacaaaccattgctgccaagatttataatcaagctatccatcttgaaacaagaggttataatgggctcaaattacgtaactggagcaacactgtaaaaagtggtgatacaggaaaccttgaagctattgctgctgcttactattttcaaaatctatttagtgaagtagaaacttttagtcggaatcagaaaggaactgcgccaaataacttgcttaactatggatacgctattttacgtgcaattgtagctagagccttagtaagtagtggaatgctaccttccgtaggaattttccaccgtaataagtataatgccttttgccttgccgatgatattatggaaccttatcgtatttatgtagatgccattgtatacgaaattgtagcaacgggatgtgatataagtgtgctctctcaaaatctaaaatctaagcttttatcaattcctaccttaaatgtttatattgatggcaaatggtctcctttaatgaatgccgttagccggacgacaagtagcctatatgattgttttcagggaatgagccgaaaaatcttatatcctgaatattgtattcgccaaatattaaagtaatgaacttagataatttttctcgacttaatcaatatagatctatgtgggtacttgtattttttgatttaccaacggaaacccgtgcggaaagaaaagtggcttcgaaatttagaaaaacattgctaaacgatgggtttgcaatgtttcaatttagtatttatatgcgcttttgtgcgagtaaagaaaattcaagagttcatattcggcggactaaaaataaccttccaaaaaagggcaaagtctgtattatgcaaattactgataaacaatttggaatgatggaactttttcatggtcaaaaggaagtagaatcagaaacccctagtcaacaactggaacttttttagaatgtcaaatatcattctaaaccttttaagagtataaaaatttctattcttttttaatcctaatttaatacataaaaaacagtataccagcaagatacagctagtatactgtgattgatcctctaaaataaagaactgaaagcaattcacaacgtaaatcttcatatcctttctggtagtttcactgtgattgatcctctaaaataaagaactgaaagcaattcacaactaatctcggctcaatacatactcaaactccactgtgattgatcctctaaaataaagaactgaaagcaattcacaacgaataacccaagcattatgaaatatgatgcactgtgattgatcctctaaaataaagaactgaaagcaattcacaacaattattaatctaatatctaaattctctctactgtgattgatcctctaaaataaagaactgaaagcaattcacaacttaaccatctgcaactttcctgcttgtttgactgtgattgatcctctaaaataaagaactgaaagcaattcacaacacaaaattatactcctcataagcatccttgactgtgattgatcctctaaaataaagaactgaaagcaattcacaacacaatgtttgcagatgcagtaaaagaaacaactgtgattgatcctctaaaataaagaactgaaagcaattcacaacgctaaatacttttttaactctatttgatgaactgtgattgatcctctaaaataaagaactgaaagcaattcacaacaggtattatagcggatttaaatctaactcgactgtgattgatcctctaaaataaagaactgaaagcaattcacaacgcaaacgataacctcgcatcctttccctctactgtgattgatcctctaaaataaagaactgaaagcaattcacaacagtattatacaggataagcaacttggtttaactgtgattgatcctctaaaataaagaactgaaagcaattcacaacgagcgagtatttaatttacatcaaaaccaaactgtgattgatcctctaaaataaagaactgaaagcaattcacaacggacatacagttgatatattacacgacccaactgtgattgatcctctaaaataaagaactgaaagcaattcacaaccagatgctttatgtattgtgcagtttgggaactgtgattgatcctctaaaataaagaactgaaagcaattcacaacaatctttgagtttggcattttcgtgaacttactgtgattgatcctctaaaataaagaactgaaagcaattcacaactgatacattcaacatcgctcccttaactgactgtgattgatcctctaaaataaagaactgaaagcaattcacaacataaaattgtactcctcataagcatccttgactgtgattgatcctctaaaataaagaactgaaagcaattcacaacacttttacattagataatgggagtttcaaactgtgattgatcctctaaaataaagaactgaaagcaattcacaacgttgataggtataaatttcactcaatgtgtactgtgattgatcctctaaaataaagaactgaaagcaattcacaactataatgaaaccaacaaacaaatccaataactgtgattgatcctctaaaataaagaactgaaagcaattcacaacttattacatcaaagtatgtccagatcaatcactgtgattgatcctctaaaataaagaactgaaagcaattcacaactactttctcgcaatcaacaactctgcaattactgtgattgatcctctaaaataaagaactgaaagcaattcacaacgagataagtaaacaaaaaagttacgtatgaactgtgattgatcctctaaaataaagaactgaaagcaattcacaaccatcgtcaataaatagtccaaatagtacggactgtgattgatcctctaaaataaagaactgaaagcaattcacaacctcgacttcaaaatttgcctctaatccttgactgtgattgatcctctaaaataaagaactgaaagcaattcacaacaatgctaatgataatttgttagtaattataactgtgattgatcctctaaaataaagaactgaaagcaattcacaacctccctgaagtttacaagaggaatgtttaaactgtgattgatcctctaaaataaagaactgaaagcaattcacaacattattatcctctatagattcccaaacctcactgtgattgatcctctaaaataaagaactgaaagcaattcacaacaaagcgtataaaatgactacaaaagaagttactgtgattgatcctctaaaataaagaactgaaagcaattcacaacgatcatcaattagaatattctaaaaaattactgtgattgatcctctaaaataaagaactgaaagcaattcacaacggagaattaaacgatgaaatgacttcgcaaactgtgattgatcctctaaaataaagaactgaaagcaattcacaacgttgcttatggtgctacgtttaaatcaatgactgtgattgatcctctaaaataaagaactgaaagcaattcacaacaagagagaaatataaagccaagtgaaccaaactgtgattgatcctctaaaataaagaactgaaagcaattcacaacttcatgatagcgtattcttctgattattatactgtgattgatcctctaaaataaagaactgaaagcaattcacaatccacttttaaagttttatttctacttctgttatattaaatccaccaaatactccgtatgcattttctccttcaatattagttggtgcaattatagggtcagtaaaaaagtcttctcctagatctttatttataaattctgccctcaaaaaatcgtaaagtattttttcggtattactaacttgtatcttaaatttactttctgtcacgttatcgtaattatataagccgtagaagtacccgtctgcaattacaacagatttacttccctttacatctgttacaaactgattagaagaaaaacgtactgcgccactatcttcagtaatttcttctttacctaaagctgttttttgtttatgtgaataaagaaattttgctccaataatataaaaattatctttattctctatatcatttacagtaactcgtaattttttgtttccattaaattcaaaatttgtgttatcactaattttttgttgtattttctcaactttttctagtggaattacacatgaagatttaaattctttacctgttactataacgcttaagtaatattttttacctggctttacaaattgacttgttacgggtgcttcataatttaatgattcttgattgtagtttaatctaatttcattttttgcttcatctaaaatggttacaatagctcctttaataacataatcttcatcagaagtaaccttttcgcctcttactttagatttagatacctgtacctttaaggtaacatcttggggggatataaaaccattgattatagttaattgttcttgatctaataagtcactagaatctacatctacttcgcaaccaaacaaccatatacttaatattagtagtattgtgttttttatatatctcataatcttatttattacttatattatctgttttgtattttacaactgacagacattatttaaatttattttttacttgcttttggcatactttttaaacttcaattaaaataaatattaaagcataaacaaccattttaaaatttataagtgtaattaaatgatggtataaattgtaaaactgacactttaattaacttatcattattattaaaaaagtagtagaaagggttttttctaccataaatattataaatcgaaaaaccccatgttcgttctctattcttttttaattttttatgaaattgaattcccagatccaatcgatgataactctcgcctcttaaattattttgatttgcactaaatgattttgtgcctcctccgcctatgcttgaaaattgtccaaaactacctactccacttataggaaagtttcccgcacttgctaatgattttttatctaaaacattaaaattattccctgttgaatacacccatgttccagacaatgttattcgattactgggtttgtatatacctactaatgataggtcgtgtcttcgatcataccttgagtaaaactttctacctctgttaatctcttcaaattgcctttctgaccacgatagtgtgtaccctagccatcctgtaagctttcctgtttttttacgaattaaaaactctgctccatacgcccatccttggcctgttgttatgttgtcttcccagtcaatttcttctcccgtttcaagatcatctatcgataaaaaagaagccccattcttgtaagaaattacattatccatttttttataatacccttctaaggtaagtgcataacccttatctaaaaagtcttttgcaacacctaatgcatattgttccgacagttgtggttttaatctatcggtagaggatacccaaagatccgtaggcaaacctacgcctgaatttgataataagtgaatatactgattcatttttgcaaaggatcctttgatagctaaatcaggcttaaggttccatgcaattgctgctcttggctcaaaattaaggtaatttgtagatttaaattgaaaatgtgttagcctaaggcctggggatacacttactgtattgcttattttccaatcatcctcaaaatacaggccactttctaacgattttattttttgagtaaccttgctatttctgattcctgtcccacttactttagattgtttaggcacaaaattgtggttagttgttattactccaaatcgaattgaatgcgctggatttggaaaaaattcaaaatccgctttaattccaaagtcattaattgttgagtttgtttctgacttcaaactttcattttgataactctcgcttaaagaaattccaaaattataattactgtaaataaatgatgtattagaaaaaaacttttcattaaattgatgattccaccttagtgttgacgtaatattcccccaacctaaattgtccttgtaattatacctaccttcattatcaacaaaagaaaacttatcttggcctaaataattgctccaatacaacttatttttttcattaaaaatatgatgtattttaaaattaatatccataaagtaatacccaacttttgaatctttagattgaaatggtcttgttaatatatccgcataagtcctacgtccgctaaatataaatgacgttttgcctttgcttattggcccctccaacaatactgaggtggatattaatcctaaatttattttacccgtaaatcgttctttatttccgttttttgtgtctattttaagaacagaagataaccgacctccaaacctagcagggaatccgcctttatatgtttctatagattttatagcatctccattaaatactgaaaaaatgccaaataaatgattggaattgtaaactggtgcttcgtccaatataattaagttttgatcaggcgtacctcctcgcacaaaaaaacctgcactaccttcatttcccccttggattcctggtagtaactgcagtgcttttatcacatctttttcacctaaaatagcaggtatatcttctatttctgaaggcgtaatagttactacactcatttgggtaacctgactttcttttactcctttatcagtatttataacaacttcatctaaattttccgactctaatttcatgtcaaaattaatagtctgattttcggttaagtttatactttttttaattgtaccatatcccacataggacactacaatatcatgctctccttcagtaattgttagcgaataaaacccataattattagtaacagcgcctactttactattgagtatatatatatagatacaaatggcaaggattcctgactaccttgctccttaacgtaaccactaattgtatgttttttagacactcctttgtctattttttcttgacaaatcccttcatataatcccaatgaaaaaaatccgattataaaaattactaattgttttttcatttttttttaattttatgatttgtataactactcaattaaaatttggaatgcttaaagctgttgtttttaaactattaattgatccttatattaacaattatcttatttatagtgccaactatttctcctcttcaaaacattactattctagtaaaacgaatcaacttactaatgttgcactatttacaattcgttttacataattataaaacaacttcattcaaaaataccctactttatttttcataataccctacaaacttgtacaaatgttaattttaatattatattatattatactgatatggggcgaccttttttttagattaatttataccgctcaaaagatttttttagctatggataggctattttacgtgcagttgaagctaggtcccctttaattaatgccgttagtagaacgacaagtagtctctctgattatttttaggagatgaaactaaaaatattatatcctgaatattgtattcgctaagagattaaagtaatgaacttagataatttttattgacataatcaatatagatctatgtggatacttgtattttttgatttaccaacggaagcccgtgcggaaagaaaagaggcttcgatatttagaaaaaaattgctagacgatgggttcgcaatgtttaaatttagtatttatatgcgcttttgtgggagtaaagaaaattcaagagttcatattcggcagactaaaaataacttcccaaaaaagggctgggtctgttttatgcaaattactgataaacaatttggaatgatggaactttttcatggcccgaagtatgtagaatcagaaacccctagtcaacaactggaacttttttagaatgtcaaatatcattctaaaccttttaagagtataaaaatttctattctttttt

SEQ ID NO: 2310 - DNA, 20338 bp, synthetic construct
  misc_feature 1..20338: note = Synthetic
  source 1..20338: mol_type = other DNA
cgatagttataccataggagaacaagtagccttgcatgaaagttttccttaccaatgggtacaacttttcagaaatgaaaatgtttcatttgcggcagccgaaattatcgctaaaacgggctggactaccggcgaattattgagccagctggaaaaaataaaattgcaacccgtttaccactttgtaagtttactcattggcgtaaataatcaatacaggggccaggaaatagctttatttcaaaaagagtttaagctactattgcataaagcaattgaattttcaggaggccacccggatcatgtttttgtgctcagcatccccgattggggggtgacgccctttgcctcgggcagaaaccgggcagaaattgaaaaagaaatagatgcttataatctaatttgtaaagagcaagccttgcaatcaggcgctcactttttaaatatcacatcggcacaaaggataaatagcctgtcggcagcaggcttagcccccgacgggctgcatccgtctgcagccgaatatcatgagtgggcaacaaaattatttcagttggccaagaccctgtaaataatttttatttagctattaggaaatttatttgaatgtgatataataagttattacagaattttactttttcatatgaatctgtaagtttttaatgaataatcatattactgaaagtatcaaggtgagaatatctttatttcctgttaccgtctcccgccggtatatcgggagttatagaaacctaacaccctttctctttgtttattgtatattaaaaacctgccccaaattttattcttttagagagaaataaggatttatttgtccttatatgcctgggcctcaaacacctgctggccggttttataaaccggctaacttatgcctgtaaatgtttacagggaagctgccttttttattttgaaatgatacttaaaagattaatatttgtttaccaaaattaattttatgaagtctttacttaccctattgctcataatctccatgtcggccattggccaaaacccgcaaagcccatattcaaaatttggaaatattacattggaggatatgcaaagaaaaatatatcctattgacagcaatgcgaatgccgttattttgagcgatatcggcgaaacggcattaaagggaaattctaccggctggttttcttttaccatcaaaaggcatgcggtagtgcatatattaaataaaacaggttacagagaggcaactctgcaaatcccgctgtatgtagatggccggaacaaagaggagatcacccgattaaaagcggttacatataacctggaaaatggaaaaataattaccactaaacttgaaaaatcagctcaatttaccgaagatgtagacctgcatcaccaattggtaaaattcactatgccacaggtgaaggaaggcagcatcatagaataccagtacgaagtaaattcagattttatctccgttttagatccctggtattttcaaagtactacggcgcctaccttatggagcgaattcaatttttctgtccccgatttttttagttatgattttttgagccggggttacctgccttttagttttaccagcaaaaaagtgagaacagatgattttgatgtatccaattccaggtcaacctctgctaccgacagggcaaggatttctaccggggtaaccgattatgtttgggctatgaaagatgtacctgagttaaaagtagaaagctttaccaattcaatccgcaaccatatcgccaggatggagtttcagctggcttcacaaaatcacccactcttaacccgtgattttagatccacctggcaagccgtgatgaaaagtttactggaatctgaaaattttggagaaaaactgaatagtagtaatggctggatgtcaacagaagtaaaaccattgtatgcggggatgaataataccgctgataaagtaaaagctatattttattatgtacgggatcattttacctgcactgggaataccgggatttttaccaaccagtctttgaaagatgtatttaaaacaaagaaggggagtgtagcagaaattaatcttcttttaacggctatcttacgctatgcaggcatggaagctgcgccggttttaataagtacaagagcgcatgggtatgcttttgaattctctcccatgatcaacaattttaattatgtaattgtgagctgcaatgatgatcagcaaaactattacctggatgccagcgatgaaagactagggtttaataagctacccctggaatgctataacggccatgcccgtatggcgaatccagtagctaccgggcttaatttttctgctgatgcattaaaagaaacaaaaacaacagtactctttttctcccgggataaagaggggaaatggggcggatccgtaacccaatcacccggctattacgagtcttaccaaatccgtaaatcaatagccgaaaagggatcagaaaaattttttaaagaaatacaggaaacttacgggcctgcttctgtaattacccaaccttctatagacgcattgcagaattatgatataccccttacccttaaatataatattcaattaaataccggcgacgatgatattatttatatcaatcccacatttgccgaagggtataaaaaaaatccgttctcagctgcagaaagggattacccggtagaaatgccttatacctccgatgaaacaattatctccaccattagtattcccgatggatatatggtagatgagatccccaaacaaatgatccttaaattagatcccgagggaaatactgtttttgaataccggatttctcaatcagaaaaattaatttcatttaaaagcaggatgaagattaacccggccttatatatgccggaagcttaccccggcttaagggaattttttaacctggttgtaaaaaaacaaaatgaacaaattgttttcaagaagaaaaaataattatgcataaaattgtattgtcaattaccatcctgtttgttttttcttcgcaggctgccgacagaaaattcccggtaagctccattcctttgccattattgaaaaatgcaaatgtggttaagcgcatggaacaaacggagtttaccattttaaacccgggcgcttctgtattaaaatcacattatgccttaaccatcctgaatgaaaatgggaggaaccatgccgctttggaaatttattacgataaactaaggcaggtaccttcaattgaaggcatcttgtatgatgcacttggaaatgagataaaaaaattaaaaaacaaagacattggtgaccagagtgcaatagatgataataacctcatggaggatagccggaaaaaagtacataatttttattgcggtaattatccatacacaattgaatatatagtagaacaaaaattcaatactaccttttttttcccttcctggctgccacaggaagatgaagactatgcggtggaagaaagttctttttctatcagcttcccgccaaattatcctgttcgttaccgggcatttaattaccggggtgagccagtaaaatttaccgggaaagataaaactactatgacctggagcatcctaaatatgcccgctataaaagcaaaatttgcagtagccgcctggcgagaccttaccaccctggtttattttgccccttcccaatttgaaatacagggatataaaggagatatgaccacctggaaagattttgggttgtttcaaaactcattgaatgccggcagggatgtactgccgcaacatgtaattgataaagtaaacagcctcactgcgggcattaccgatgtaaaagaaaagatcagaattttatatgaatatttacagcaaaatacacgctatatcagcatccagctggggattggcggatggcaaccttatgaggcaacttacgtggcagcaaaaggctatggagattgtaaagccctggccaattatatgcacagcctgttaaaagctgcaaatatacgttcagtttataccattgtatatgcaggcaggtccgcttatgcaaaaacgagattgattgaagatttcccgtctaaccagtttaatcatgtaattctttgcgtgcccctggacaaagatagtgtatggctggaatgtaccgatcaaaatatacctgcaggatatatgagtgattttaccgcaaacagaaaagcgcttatgattactgaagaaggaggcgtattggtttctaccccccggtatggcctgaatgagaatgaacaaataagaactatacaagctgtaatggataatagcggctcgctgaatatgagtgtaaataccgtttatacatgtgtacagcaagatgagctaagcagcatgatacactctttatcaaaagaaaaagtagaaagatatttgcaaaggagattccagctttcaacctacgaggtaaatcattttaactacagtgagaaaaaatcaagcgccccgaaaatcgatgagcagcttactatttctgtaccgaactatgcgacagtttcgggtaaaaggatttttattacacccaatattttaaataaagcaggcgcatatcttactgaagacagcctgcgacaaacggattttgttttagccccggcataccgggataaagaccttgtggaaataaaaattcccgaaggatatggaatagaatcatttcccaaaaacatttcgctgcatacaaaatttggcacttattctatttcagcaaaattagaaaacaataaaatcatctattcaagaaccagggaattatatgaaggcagctacccgccagctgaccaaaaagagattatctcattttacaatgaaatttatatggcagaccgggccaggattgtattggttaaaagcaaaacagactaatctcccagcattgtgtgccatttggcaggatcctgttttacatatataaataaacaggcagctgtaaaaaacgaaattaaatacaaatgcaatctataccctattaaggttaatattttaatatatttacttactgatatgggattatgaaacaaaaattatgggtattcaggctgtatgcctgttttgttttttgctttgtgtttcaggtaaaaatattttcacagcccattcataaagccaatgtaataaactccgaccaggggctttcacaaaattctgtatatgccattcatcgggatgtaaaagggtttttatggattggtacaggagatggcttaaaccgttatgatggcaaacaggtaaaagtatttcgtaaaacatcttcaaattcggggagtgtgcttaaagggttttctgttcattcaatgaccgaagataatcagcataatctttggttcagtacagaaagaaacctggttcaataccacatgccctcccaggttttcactgaaattatacccttcgatgattctgcttcttaccctggcaataaagtgctaatagatgtagatacacttaataataccatctggttattacaaccagccgtttgcattttcagttataattatgtaactaaaaaatttaaaaggtttaacctgcccggtaatgcaacccgtaaaatgatttttttaaattcaaatgcggtattggatgcccatggaaatatctggatgggttctacagatggtttgtatggttacgatataaaaaagaatgtatggaaacagtattaccagggttatgaattgttacggctttgcaaggatgcttttggcaaaatatggcttttaaacgaaaataatttatacagctttgatcccgcaacgctttggctaaaagttttaaaaaatcataaatcaaaatcaattacttatatttcattagcagccgatcagcgggggtatgtgtgggtaggcacactgaacggcattctttattacgcttcttcattagatgatgaaataaattggggagccaatataaatgcattggctttttctcaaaatatcctggaattacgatgcttatatgttgacagggacaacctgctgtggattggaaccgaagggggtggcgttatacaggtgaatttagaacccggtaatttccatatttttcccaacccggatgatccgggtaaccttaaaactttatacattaaaagtatattttgtgatgatgattcaaaagtatggttaggtacttttaaaaaagggatatatattttagatccgggtacgggtacatctaccgtattaccgattccggccaacaaaaattttaaaaaatttgcagatgttgtatatacgataactaaagatgcagagggcatttactggattgggtatgatggttgcctgattgcttataataaaggcctgggtaaattttatttccataacctgcctggcatcctatcagacaagaggccgataataaataaaattagttttcataaaaatgaaatgctgttatccgccactactggtttatataaagtggttacgcaaaatgcaggtagttcagtcagctttaaaaagatactatccacagctatcatggaagctctttatacttccgacggaagtttttgggcatcttccctgtatgtagggctcataaaagtttatgatgatttaagctttactactttttttaaggataatggttttagatgcttaactgaagataaggaacacggaattttatggggcgcttcacaaatggggctgctggcttatcacctgcaaaccggtaaaagccggttttataatgaaagcgatgggttaatgaatacctacctgtacgggatcataagagacggaaaagaaatttgggtgagttcaaataatggaatttcatgcgcccgggtaaactttaaaaatgggagcattttccccaccttacaatttaaaaattattttaagcccgatgggcttcagagtaatgaattcaatacaggcgcttatgccatttcgaaagaaggcgttatttattttggaggtatcaatggcttaaattggtttcaatcaaaaaatatttcagaaaataagtaccggcctgccgtgtcgtttaccagtttaaaaataaatgataaggcctatgcgggtgatactgccattgaatttaaaaaagcaataacggtgcagtataatgccaatactcttaccattggttttatgggtttagaattttctaatccgaaaggcattagttaccagtataaactggaagggcttgaaaaggattggacctatggaaaaaatactgacctggtgcggtatgctaatttagcgccgggtacctatcaatttagattaatggcttctaacgccgatggattaatgggagaagaagcatcacttcttatacaggtattaccgcctttttacagtacctggtggttccggttgctcatggccatcctggtaatatctatggttatcatcattacccataaactttcacagtataaattaaaaagaaaaatcaggcatttggaaaaattaaaactggtaaacgatgagcgtataaggatttcaaaagaaatgcacgacgacctgggggccggccttacacaaatatctttgataagtgaagcagctaagcaaatttataaggagggcgggtacccgcaagaagaattaaaaaatatttctgctacatcccggcaattgatagaaaatgtaagtgaaattatttgggccatgaatcctgagtttgataccatatcgggtatgtttgcgtatttgagagagcaattgggcaaactcctggaatactccgggaaatcctatgaattaaattttcctgaaaattatacggaaggtaaaatatcaaatattcgccgtaaaaatatttcgatgctcctgaaagaagcagtaaataattcaattaagcacagccatgccagttcggtgtttgtaaaattatctatcatcggaaatacgctgcacatggaggtaaaagataacgggcatggctttgataccactaccgtatcctgcggcaatggccttaaaaattttacttaccggtcagccttaatagggggcagcgctaaaatcatctctcatgcccggggtacagaaatttattttagcataccactttaataccattttttaaaaggataataataccgatgtttgaagaagaaatgcattcattagccatcatagaagacgaccctaccgtcttgaagtacttgaaccggattatcggggaagcatttccgggtattgaaatatttctctacagcaacgggaaaaccgcctgtgctgaactggctgataaagaagtagagatggttctctttgatatagaactcccggggatgagcggaattgaatgtttgtatatcctaaaagcccgcagcccccagttaaaatgtatgatgctcaccaattttgatgatgcagataatatttttaaagctttaaaagcaggagccagcagttatattttaaaaaacacccagcccgaaaaaattatagaagcgataagggaactcaataacggcggctcgcccatgagcagccaaatagcccgcaaggtattatcggcattccaggagcatgtgaatacccacaacgatttttttcattccttaagccagagagagcaggagctcatccagtatttggctaaagggtaccggtataaagaaattgcggcaaaattatttatcagtgaagataccgtaagaacgcacatcaggaatatttatggaaaactccaggtaaattcccgattggaggcgctcagaaaaacggggcttctttaaaacgaataatgcctgctactactattatcacattttttgggtgtgggttattgtataagtttacatcataacttaaaaaataaatttatgaaattacgtaatgcagtctatgtattagcaactgttttccttgttttatctgtcagttgcaaaaaagatagcacccctggagatccctacaaatgcactacttgtaaaactacgcccgatgccctggcagctaatgatgcgagcagcaaaggggtttacaaaggagtagtgattggttctacaggtaccatttattttaacattgccaataacggtagtaccatcaatgccgttatggtattagataatgtatctaccacgcttactgcttcggtaagctgggttgccggtatatcttatgtgtcaccctttaccggaaccatcaatgggtcaccggtggttattacattccaggtagatgccaacgggcaaaacccggtgatattaacttcatccatccccggccacccgagtgcccagttcactttagtgaaggaattatccacttcgttaattgaatgttttgaaggtacctatacctctaccagacctgaaaccggtactttcaatttattgctttcccggtcactgggccgttttggcggatcctccagggaaaccggttccactaccagcgaagatattgatgaaggcaccattgatgcaagtggcaatttaatttctaatggccaacccatgggccatttagacggcgatgtaataaccggtactttccacgattcacagggtaatacggttacgataaatgcccaccgaactttataatctatttttctgaaatctatttttcattacaggcatcatacccgtttgtagcatgaggccccggtaaggaaagcagaaagagaattaaaattgtattagcataaaacctccgcaaggaggttttattttttttatgctgccgtatgaaaggaggggcaaataatatttttcgcaactgcctgctacctggctcccgggtttcttttttatattagtgtagcgggctatttataaaaaaataacggctcaataaaaagaccggcccttgcagaattgattttaaaataaaattgataaattgggaatgaaaaagcccccgtcaaagtcgagggcaacttaatgttttcacaacgggataaacccttattgcgatttgcttcgttgtaaaaatagatataatcgaatcaataatcaaaatttatgagtaaaaaaattttaggacttgatcttggaactacttcaattggttgggcttttgtaagagaagctgaagattttcaggaagaatcatccatagaaaggataggcgtgagagtaaatccattaacaacagatgaacaaataaattttgaaaaagggaagcctatatctgtaaatgcagatcgcacccttaaacgtggagcaagacgcaacttacaacgatacaaacaacgcagaactaacctcatacaattattaaaacaatataaaataataaatgaaaatacaattctagcagaagacgataaaaatacaacgcacagtacttatgcattacgggcaaaagcagtatctgaaaaaataagcaaagaggcctttgccagagttttgttgatgattaataaaaaaagggggtataaaagcagccggaaagccaaaaatgaagatgaagggcaagccatagatggaatgtcagttgcaaaaagattgtatgaggaagatataactccggggcaactttgcctgcaattgctgaaagaaggtaaaaaaaaattaccagatttctatctttctgatctgcaagcagaacttgaaaaaatctggaattttcagaaaaaattctatccggaaatattaactgatgaatttaaaaaagaaattgaaggaaagggacaacgagcaacatcagcaagtttttgggctaaatataaatttaatacagctgaaaataaaggttcaagagacgaaaagaaaatgcaagcatgggaatggagaagcaaagcgataaatacacaacttacaagagaagaagtagcatatgtaattactgaaatcaacaataatattaataattcaagtggctaccttggtgcaatcagtgatagaagcaaagagctttattttaataaagaaacagttggagagtatttattcaggcaattacgctacagtcctcatacaagagtaaagaatcaagtattttaccggcaagattacttagatgaatttgaaactatttgggaaaaccaatcaagatatcataacgaactgactaatgaactgaaatcagaaataagggatgtagtaatattttatcagagaaaattaaaatctcaaaagggcttgataagcttttgtgagtttgaaagcaagcaaattgagattcaaaaagatggaaagattgtaaagaaaataattggattaaaagtttcgcctaagtcctcaccattatttcaggaatttaaaatatggcaaatactgcagaacctggaatttacaaataaagaaactaaggaaaagaaagtaccagattttgaagcaaaaaatcttctttttgaagaactcaatattaagggaaacttaaaaggtgaaaaggcgattgaaatattaggatataaaccaaaagaatggttggtaaattataaagaattagatgggaatcgtactaaccaggtgttatatgaaggatacttaaagatattggaagtagaaggttatgatattaaggatttactaaaaataaaatcaaataaagatgaagttaatctttcagaattatcaaagcctgtttctgaaataaaagatttaataaaatcaatctttgaatccctaaatattaatacagccatactcgactttaatcctgaattagaaggaaaagattttgaaagacaagcatcttaccagttatggcatttattatattcatatgaaggcgacaattctaatacgggcaacgatgaattgtataggctattatatcaaaaattcgggtttggtaaagagcatgcccaaattttagctaatttatcgttttcacaagattacgggagtttgagtgccaaagcaatgcgaaaaatttatcctttcattaaagagaatagttatagtgaagcttgttcacttgccggttacaatcattcatcctctattacaaaggaagaaaatgacaaaagagaattaaaagaaaaattggaattgcttcctaaaaatagtcttcgcaatcctgtagttgaaaaaattctgaatcagatggtaaatgtcataaacgccatcattgcagacccttccatgggaaggccagatgagattcggattgaactagcaagggaattaaagaaaaacgcagctgaaagggcagaaatgacaatacatattaataaagcaaaatctgagcatgataattacaggaaaatacttactaccgaatttggaatacccaaccctactcgaaatgatataatcaggtataaattatatgaagagttaaaagtaaatggttacaaaacactttattctaatacatatataccaagagagaagttattttcaaaggaatttgacgtagaacatattatacctaaggcattattatttgatgatagtttttctaataaaacaatttgtgcaagacaggagaacttagataagggtaacaaaacagctttcgattttattcagtctttctatggaaaggaaaaatttgaagaatatttacaaagaattgagagtcttgcaaaaattaaagaaggtgatacattcgtaattagtaaagcgaagtataaaaaacttttactaccagaaatcgaaataggagagggatttatagaaagagatttgcgcaacagccaatatattgccaagaaggccaaaagtatgctgctggatatatgtaaaacagttgtcccaacaactggaagcattactgaccgtttacgagaagactggggactcattaatattatgcaggaactgaattttgaaaaatataaaaaattgggtttgattgaaatggttgagaaaaaagatggtagtttcaaagaacgtattacagattggaccaaacgcaatgatcatcgccatcatgctatggatgctttaacagttgcatttacaaagcataatcacattcagtatcttaattatctgaatgcccgtaaaaatgaaaaccataaaatgcatgggaatgtaattgcaatagaacaaaaagaaacggaacttcttgtagatagtgtaggtaaaagaaagaggaagtttaaattgcctatatctaattttcgggaagttgccaaaatgcatttagaaaacattttggtttcctataaagccaaaaataaagttgcaactaaaaacaagaaccgttttaaaacaaaaaatggggagaaagttaaaatagaactaactccgagagggcaactgcataaggaaactgtatatggcaaaatgaaaaaatatgaaactaaagaagaaataattggttctaaatttgatgaagcaacgatattgaaagtagccaatcttgaacaacgaaatgcattactccaaagattaaaagagaataacaacgaccctaaaaaagcatttagtggaaaaaatagtttaaaaagcaatcccctctattatggggttgatagcaagccaatacctgagaggataaagattgtttggttggaagatgattataccattcgaaaagaaattacaccagatttaaaaattgataaagtaatagatattggaattcggcgtatccttgaaaatagattagcagaattcaatggaaatgcaaaagaagctttttcaaatcttgaaaaaaatcctatttggctaaatgaaggtaaaagaattgcgataaaaagagttaccattagtggcgtaaaaaatgccgaaacactgcattataaaaaagatcatttaggccatgaaatgcttgataagcaggggaaaagaatacctgtagattttgttagtacaggtaacaatcatcatgttgcaatatacaaagatgataaaagtgatttacaagaaaaggttgtatcattttatgaagctgtagaaagaataaatcaagaattacccataattgataaatcttttaaccatgatttaggctggcaattcctttttacgatgaaacaaaatgagtattttgtcttcccgagagatggttttgacccttatgaaattgatttattaaatcctgataattataaaataattagtcccaatctatttagagtacaaaaaattgctactaaaaattacgtattcaatcatcatcttgaaacaaaagcagttgatggagaattattaaaaactaaaaaagatctatctgatataacttaccgctttattcaaacacctgttaatctcaaaaatattattaaagttcgtataaaccatattggtcaaatcgtaaaaattggagaatattaaaaaataaaatgatagtggtttcgttaggtattggtaaaaccaccaatatccatgataaagcggactctttattttgggaaccctgcgtatttaaaaaccaataacgaccagcttgttattgatatgcccaatgctgttgaatcaaaatcaacacccattgaagatatcggcttgctggtgctggaccaccagcaaattaccattacacaagccttactggctaaattattagccaataatacggccgttataacctgcgataatacccaccatcccaccggcatgatgctaagcctcgacgggcatagcctgcaaagccagaaattccgggcgcagctcgctgctaccatcccgctaaaaaaacaactctggcaacaaaccgtaatagctaaaataaaaaaccaggcagccctgctggccggtaccaggcaggaaaataaaatattaataaaccttgctttagaggtaaaaagcggcgatgctgaaaactgcgaagcacaggccgctgcctattactggaaaaaactgttcccgggtttcctggcatttaaaagagaccggtatgggccgccccccaataatttactgaattatggctatgctatccttcgggcatctgtagcccgtagcctggtggcaagcggcctgcttcctaccctgggcatacatcaccgcaaccagtacaatgcctattgcctggccgatgatatcatggagccataccgcccctatgtggactataccgtttaccatattgtgatgaataatggtaagtatcttgagatgactccttctatgaaaaaagatttactggccatacctgccatggatgtaaccatcgatggcaaaaagagccccctgatgaatgccgtgcagcgaaccacggccagcctggcaaaatgttatgaaggctgttccaggaaaatattatatcctgaaatggaatgaaaaactggcgcactataaaccggaaaaatgtttcacagattcaatgcttatcgtattatgtgggtacttgtatttttcgacctgccaaccgaaaccaaaaaagaaaggaaaatatatgcccgtttccgtaaagacattatggccgatgggtttactatgttccagttcagtatttacctgcggcattgcgccagccgggaaaatgccaatgtacatatagaaagggtaaagaaaatattgccacaaaaagggcatataggcattatgtgtattaccgataaacagtttggaatgatggaaatattcaggggccaaaatatggtggatgcgccggaaacagtgcaacaactagaactattctaaaaaaatcattcaaaaaagtagctggtggggccatatcatttttgtaaatttcctaattaaaacggggtgaacaggaataaaaaatgctcaatcagagcatttttttaattctaaaacttagttcaagatcattaaaatcagcaacttataaggttcgtactgtgaaagaactaagctactaaaaaatttgaaagcaaatcacaacaagcggctccggtttgtgttattaataaaactgtgaaagaactaagctactaaaaaatttgaaagcaaatcacaactaaatatacttttttcatttttataatttactgtgaaagaactaagctactaaaaaatttgaaagcaaatcacaacatcggccttacagcgttgagccaaaaggaactgtgaaagaactaagctactaaaaaatttgaaagcaaatcacaactcagttactacctgcgctcagtgaatgactactgtgaaagaactaagctactaaaaaatttgaaagcaaatcacaacatagcatccccgttataattggcgccactaactgtgaaagaactaagctactaaaaaatttgaaagcaaatcacaaccaaaatgctaataacggtactgcgttaaaaactgtgaaagaactaagctactaaaaaatttgaaagcaaatcacaaccacgcctccggtggatagcttcactgctttactgtgaaagaactaagctactaaaaaatttgaaagcaaatcacaactattcttccacggcatgaccggcaacggcaactgtgaaagaactaagctactaaaaaatttgaaagcaaatcacaactccagtgggaaagttgttatttttggctctactgtgaaagaactaagctactaaaaaatttgaaagcaaatcacaacctccagatcttagcagtttctgcagcaattactgtgaaagaactaagctactaaaaaatttgaaagcaaatcacaacaaccgcaaatacaactgtaatctcagtggaactgtgaaagaactaagctactaaaaaatttgaaagcaaatcacaacacaaaacgtccggactcgttaaagaataaactgtgaaagaactaagctactaaaaaatttgaaagcaaatcacaacagtcatataattaactgttttttcattaaactgtgaaagaactaagctactaaaaaatttgaaagcaaatcacaacctcagttactggctggcaatatactggcgaactgtgaaagaactaagctactaaaaaatttgaaagcaaatcacaactgttgttcaattcaaacggtgctgtgtactactgtgaaagaactaagctactaaaaaatttgaaagcaaatcacaactaccgtgtaaatgtatattttcagttccgactgtgaaagaactaagctactaaaaaatttgaaagcaaatcacaacagtaatgtaattaactgttttttcattaaactgtgaaagaactaagctactaaaaaatttgaaagcaaatcacaacaaagaaaatatgcggcacttataattaaaaactgtgaaagaactaagctactaaaaaatttgaaagcaaatcacaacatacacccagcaagtatttccatgcctgtgactgtgaaagaactaagctactaaaaaatttgaaagcaaatcacaacaccaatggttcacatactgcaacgatacaaactgtgaaagaactaagctactaaaaaatttgaaagcaaatcacaactacctcctaatttctgcctggccctacctaactgtgaaagaactaagctactaaaaaatttgaaagcaaatcacaactaatcatgttatgtaatttgacctaatcgactgtgaaagaactaagctactaaaaaatttgaaagcaaatcacaacaaacgtgcagtgcggaacagggttatttgactgtgaaagaactaagctactaaaaaatttgaaagcaaatcacaacccttactgttcccacgacctggtagtcgttactgtgaaagaactaagctactaaaaaatttgaaagcaaatcacaactaaacttttgtacgagctacttcacttaaaactgtgaaagaactaagctactaaaaaatttgaaagcaaatcacaactgtatctttcaatatatgcggcccgtttggactgtgaaagaactaagctactaaaaaatttgaaagcaaatcacaactacttgctactgccttaaatgttgctaaggactgtgaaagaactaagctactaaaaaatttgaaagcaaatcacaactaacaaagccagatccatcgaataagacaactgtgaaagaactaagctactaaaaaatttgaaagcaaatcacaacttacattcaacaagcagcaacggtgcatctactgtgaaagaactaagctactaaaaaatttgaaagcaaatcacaacataatcacctgcttcccaaactacatcagtactgtgaaagaactaagctactaaaaaatttgaaagcaaatcacaacatacctttaaaattatatgcactttctccgactgtgaaagaactaagctactaaaaaatttgaaagcaaatcacaacattgaatgagttggagattggctatcccgaactgtgaaagaactaagctactaaaaaatttgaaagcaaatcacaacgccccagccgggttacgccctgggctataaactgtgaaagaactaagctactaaaaaatttgaaagcaaatcacaacccaggaagaattttaccagggctgttttgaactgtgaaagaactaagctactaaaaaatttgaaagcaaatcacaacgcagcctgacgggaccatatttaaaatacactgtgaaagaactaagctactaaaaaatttgaaagcaaatcacaacacctccgaattaattttatatgcaaaatcaactgtgaaagaactaagctactaaaaaatttgaaagcaaatcacaacaatgtggcataatgggtacgctaaggcaatactgtgaaagaactaagctactaaaaaatttgaaagcaaatcacaactacttcgtagattgataaatattgtacaggactgtgaaagaactaagctactaaaaaatttgaaagcaaatcacaacttgtaaccattcattctttttacttctacaactgtgaaagaactaagctactaaaaaatttgaaagcaaatcacaacgagcaaacttcgcagtatgtaagatggggtactgtgaaagaactaagctactaaaaaatttgaaagcaaatcatccctacgacatagtagggatgaaagaactaagctactaaaaaatttgaaagcaaatcacaacctcagttactggctggcaatatactggcgaactgtgaaagaactaagctactaaaaaatttgaaagcaaatcacaacccttactgttcccacgacctggtagtcgttactgtgaaagaactaagctactaaaaaatttgaaagcaaatcacaactaaacttttgtacgagctacttcacttaaaactgtgaaagaactaagctactaaaaaatttgaaagcaaatcacaactgtatctttcaatatatgcggcccgtttggactgtgaaagaactaagctactaaaaaatttgaaagcaaatcacaactacttgctactgccttaaatgttgctaaggactgtgaaagaactaagctactaaaaaatttgaaagcaaatcacaactaacaaagccagatccatcgaataagacaactgtgaaagaactaagctactaaaaaatttgaaagcaaatcacaacttacattcaacaagcagcaacggtgcatctactgtgaaagaactaagctactaaaaaatttgaaagcaaatcacaacataatcacctgcttcccaaactacatcagtactgtgaaagaactaagctactaaaaaatttgaaagcaaatcacaacatacctttaaaattatatgcactttctccgactgtgaaagaactaagctactaaaaaatttgaaagcaaatcacaacattgaatgagttggagattggctatcccgaactgtgaaagaactaagctactaaaaaatttgaaagcaaatcacaacgccccagccgggttacgccctgggctataaactgtgaaagaactaagctactaaaaaatttgaaagcaaatcacaacccaggaagaattttaccagggctgttttgaactgtgaaagaactaagctactaaaaaatttgaaagcaaatcacaacgcagcctgacgggaccatatttaaaatacactgtgaaagaactaagctactaaaaaatttgaaagcaaatcacaacacctccgaattaattttatatgcaaaatcaactgtgaaagaactaagctactaaaaaatttgaaagcaaatcacaacaatgtggcataatgggtacgctaaggcaatactgtgaaagaactaagctactaaaaaatttgaaagcaaatcacaactacttcgtagattgataaatattgtacaggactgtgaaagaactaagctactaaaaaatttgaaagcaaatcacaacttgtaaccattcattctttttacttctacaactgtgaaagaactaagctactaaaaaatttgaaagcaaatcacaacgagcaaacttcgcagtatgtaagatggggtactgtgaaagaactaagctactaaaaaatttgaaagcaaatcatccctacgacatagtagggatgaaagaactaagctactaaaaaatttgaaagcaaatcatccctacggcatagtagggatgaaagaactaagctactaa

SEQ ID NO: 2311 - DNA, 20304 bp, synthetic construct
  misc_feature 1..20304: note = Synthetic
  source 1..20304: mol_type = other DNA
ggttttccttcaaggggttgcgtaaaatgctcataccccttcaaaccacgaagagtttgaggacatttggcataaatatcatcacttagaaaagtggtgtcaacacgtggataggtggtgaacttcttctcgtagaggctctgaataagttgtaaggtctgttctgcggaatagccgaacttacggttgcaatccacctgcaaagaagtcaaatcgtagagtcgaggcggtgcttccgttccctttttcttctgaatatcagtcaccgtaaaaggttgcccttcaatagattggagaacttccctaccctcttcttccgtcaagaactctatctgcttgtagatagggcccttactcttgatggtcttgccttcttctgcagcagccttcacttctgcggcatcctctgcttccgcttcctcatcatgagcgatggcggtgaatttggtgtcgcggtagagtgtggagagcacccaactttgtttgggcacaaaactctctatctcctgttgacggcgcacaatcaacgccaaagtgggtgtctgcacacgtccgacagaaagcacctgcttctcctgaccatacttgagcgtgtagagacgtgtggcattcatgccgagtgtccagtcaccgatggcacggcaaagtcctgcctcatagagtgactggtattcaatttggtctttcagattgttgaaaccctcacggatggcttcctctgtcaacgaagaaatccacagacgtttgacaggacattttgccccagccttctgcatcacccaacgctgaatcagttcaccctcctgccctgcatcaccgcagttgatgatactatcagcagcctgcatgagtttctcaatcgtggcaaactgacgcttcaccccgtcatcatccttcagacgaataccgaaacgtgcaggaatcatcggcaggtcccataaatcccaacgcttccagcgctcaaaatattcatgaggattcttcagctcgcacaaatgtccgaacgtccaagtgacctgatagccattgccctcaatgtagccttgcttcatttctttggctcccaacacgttggcaatgtcacgtgccacactcggtttctccgctatacaaacaatcatgagtgtttctgttggtcgtgcagttccttcgcctgccgcaagatgtcgctggcaaagatgaagtcttccagtttcttgttggtggcatccatgatttccttgttgctgccctgccattcggcacgtccttcgcagatgaaggtgatgttttcaccaatgcccatcacggagttcatgtcgtgggtgttgacgatggtggtgattttatcctcatgcgtgatgccagcaatgagttcgtcaatcacgatgctcgtcttagggtcaagacctgagttcggttcgtcacagaaaagatatttcggttgcagcacaatggcacgcgcgatagccacacgcttctgcataccacccgaaatctcgccggggaacttgttttcagctccttgcagattgacacgcgccaaacaatcaagtgccctgcgtttgcggtcttcgtaagcatcatacgaaaacatgtttaagggaaacatcacgttgtccaacaccgacatggagtcgaacagcgcagcactctggaaaatcatgcccatctcacggcgaagcaagattttctccttcttcgacaaagacacaaaatcacggtcatcgtagtaaatgcttcccttggtcggtgtgagcaatcccacgatgttcttcatcagcaccgtcttaccactaccactctgaccaatgatgaggttcacctcaccatcgcggaacgtggcattgatgtcctgaagcacttccctgtcctcaaaactcttgtataagttttctacttttatcatgtcagcatgtttgtcaagaaaatatcagaaaagagtacaagaatactgctggtcaccacagcatcggtgctcgacttacccacttccacactgccgccttccacggtgtaacccttgtaggcagagacgctggtgatgatgaagccataaacaaccgccttgatcataccgcaccagaagaaccattggttgaactgataacggaaaccctcatccagttcaggcacagtggtggttcccatcaacgaggtggcgtatgcacccatgatacccgccgccacactcaatgtaaccaagatgggcatgatggtcatcagccctactatcttaggcagtatgaggtaattagcagaattgacacccatgatgtcaagcgcatcaatctgctgcgtgatgcgcatggtgccaatctccgaagcaatgttcgaccccaccttacccgcaagaatcagacacatgatgctcgatgaaaactccagcaacataatctcacgcgtcgtgtaaccaaccaccatacgtggcatccacggactctgaatgttcaacttgatttgaagacaaatcaccgcaccgatgaagaaggagatgatgagcacgatgccaatcgaattatatcccaattgatacatctccgtgacatattgcttcaagaacattctccatctgtctggctgtgaaagcacacgccccatcagcatgacatacctacccagatgggttaatccactctttattgaaagcacttctattgcgattttaatgatttataaatggcaaaatcttggcaaaattagtcatttttgttcaaaagaaccgcttttaacatagttttttcttttataaagtgactaatcgccaaacaattcgtacttttgtaactaatttgaattgatatggagctaaataaacaatccataaccaccaacgcgggggatgagaacataccagagttttctgacgaccggaacacactctacactcgtaatcttgtcaagacatatggcaagcgcactgtggcaaacaatgtgtccatcagtgtgcgtcaaggagagattgtaggactgttgggaccgaacggagcaggaaagaccacgtcgttctacatgacgacgggtttggtggtgcccaatagcggacgggtgttcatcaacgatgaggaaatcaccaaagaccctgtttccacccgtgccaagaaaggcgtgggctatttggcgcaagaggcaagcgtgttccgcaccatgagcgtggaagacaacatcatgaccgtgctggagatgaaatacaagtccaccgaagagcagcgggagcatctcgaacggttgctcgacgagttcaacctgcagaaagtgcggaagaaccgcggaaatcagctgtcgggaggtgagcgacgacgttgtgagattgcccgttgtcttgccatcgaccccaaattcatcatgcttgacgagccgttcgccggtgtggaccctatcgcagtggaggacattcagtatgtggtgtggaagttgaaagaccgcaacatcggcatcctcatcaccgaccacaacgtgcaggagaccctctgcatcaccgaccgcgcctatctcctcttcgaagggcgcatcctcttcaaaggcacaccgcccgagctggcaagcaaccccatcgtgaaagagaagtacctcggaagcaattttgtgcttcgtccaaaagacttccagatgattgaagagaagaagaaaagagagttggaggataattaacacattaatatattaaatgacagaaaccgaaaagttagtgaagtcctgcatcgcaggcatccaagaaaagaagggaaagaaaatacgtgtagtcaacctcgaaggcattgacgatactatcaccaaatatctcgtcatcggcgaaggcaactcgcccagtcaggtggcagccatcacagaatctgtgcgcgatttcgctcgcaaggagcagaatgcgcgtccgtcggcattggacggaacaagaaacaacctctgggttgccatcgactttattgatgtagtggtgcatatcttcgtacccgatgcacgcgagttctacgatgttgacaacctttgggaagacgctgaaatcactgacattccagacattgattgacgaaacatgagtacaaacaacaataacagcaacaacaaactgcaaaagccacgtttcaacttcacgtggctctatatcctgctcattgtaggattggcattcatgatattcacacgccacgacacatcggcttcacgcagtgtcgattacaccaccttcaaggaatttgtgaacaagggatatgtggctgatgtaactgtcaacaaagacaacaacaccctcacccttgccatcgattccaaacacgagaagcaagtctttggtgctgtgagcaagaacaagaaacccgcccgcatcaaggtggagtttggttccattgacaatctggagagttacctcgacgcacagaacaaagagggcaacttcaaaggcaaggtcacttacgaacgcgataacgacttctttacgaatctcttgtggaacttcgcgcccctcgtcatcatcatcctcatttggttctttatcatgagaggaatgggtggcggcggcttcatgggaggtgctggcaacatcttctccgtaggaaagtcgaaagcgcagctcttcgagaaagacgacaagaactctccgcaaatcaccttcaaggacgtggctggacaagctggtgccaagcaggaagtgcaggagattgtcgatttcctgaagaagccagagaaatacaccaacctcggtggtaagattccaaagggagccctcttggtgggtcctcccggaaccggtaagacactgcttgccaaggcagtggcaggcgaagcaggtgtgcccttcttctccatgtcaggttccgagtttgtcgagatgttcgtaggtgtgggcgccagccgtgtgcgtgacctcttccagcaggcaaaagccaaagcaccttgcatcatcttcatcgacgagattgacgccattggtcgtgcacgcagcaagaccgcagccatgggaggcaacgacgagcgcgaaagcaccctcaaccagctcctcaccgagatggacggcttcggcaccaacagcggcatcatcatcttggcagccaccaaccgtgctgacatcctcgacggcgccttgctccgtgcaggtcgcttcgaccgtcagattcatgtggatctgcccgacctgaacgaacgtaaggaaatcttcatggtacacctgaagccattaaagatagacgaaacggtagatgtggctcagttggcacgccagacaccaggtttttctggtgccgacatcgccaacgtctgcaacgaggcagccctcatcgcagcccgcaacaacaaggagtgggtggacaagcagtgtttcctcgatgccgttgaccgcatcatcggtggcttggagaaaaagaccaaactgctcacggcacaagagaagcgcaccattgcccttcacgaggcaggacacgccaccatctcttggttcctcgaatatgccaacccattggtcaaagtcaccatcgtgccacgtggtcaagcccttggcgcagcatggtacatgcctgaagagcgccagatttccaccaaggaagagatactcgacgacatctgtgcgacactcggtggacgtgccgctgaagaactcttcacgggacgcatctccacaggagccatgaacgacttggagaaagtcaccaagcgcgcctacggcatgattgcctatgcaggtatgggcgacaaactgcccaacctctgctactacgacaatcaggagtaccagttcagcaagccttatagcgacaagactgccgagaccatcgacgaagaagtgcgcaccctcattgcaggcgaatatgaacgtgccaagaaagtgcttttggagcacaaggacggtcatgcacaactggcacaaagactcatagaaaaagaagtcatctttgctgaagacctcgaagacatctttggcaagcgcccatggacctcacgcaccgacgaaatcctcgcatccaatgccgaagacgagcagaaggaaggtgagcaaccctccagcggtaccgaccacaagaaagagaacgaggaaatcatccgtcagaagattgtgcaggcagtccttgagaaggcagagaaagccaaagagaacggacaggatgccgacaatcccccctccgacaaaccaaccgaaaccgacaaaccaaaagaaacgtgaaaaatctgattatacgtgccatcacgggtgcactattcgtcatcgtccttgtgggcggaatcgtgttcaacccctactctctcctgattctcttcaccgtcatcacagccttgacggtgtgggaattcactacgattgtcaatcgtcacatgcacctgcatgtcaaccgtttcatcaccaccgttgcggcagcctacctctatgtcgccgtgtgggcattcaacaccaacatcatgggcgcggaggtcttcatcccctacctcatttccatcatctacctgttggtgtctgaaatctacttcgaccgccccgaaaacatccagaactggggcatgaccttcatggcacagctctacatcgctctgccattcgcatcgctgaacacactttgtttcatcagcacaccagcaggagtgacctactactactggtacgccctgtcgttgttcatcttcctgtgggcaagcgacaccggcgcctacctgttcggttcatggctgggcaagcaccacctcttcccgcgcatctctcccaagaaatcatgggaaggcagcatcggtggaggcatcacagccattgccgcctcacaaatcattgccagtttcatcccctttgccgagacactctccgacaccacaagccgcctcctgtgggcaggacttgccgtgctcaccgtcattgtcggcacatggggcgacctcgtcgagtcagtgctcaagcgccgtctcggcatcaaagactccggcaacatcctaccagggcatggaggcatgctcgatcgctttgatagttcactgctcgccattcccgcagcagtcgtctatgtctatacaattatgcttaatataattcactaaacaactatgactgaaattcagaaccccactgaggaacctgtagtggaacctacagccgaacctgcaaccgaacccgttgcagcagaagaaacagcagccgttgcagaaactgcaaccgagccagtagccgaagaagccgctgagccagtagccgaagacgctgccgaagagcctcaggcagaaacctcaactacttctttcgccacctacgaaaccgaagcagaagtcgtcaaccgtctccgcgagatttcagaaagcgacgaagaggtcactcgccaagaactcgacagcctcaaaagcaacttctaccgcatccatcgccaagaggcagatgccgcctacaagaagttcatcgaagaaggaggtgcagccgaggagtatgctccagaacccgaccccgaagagaccgccttcaaggaattgatggcagccatccgcgagaagcgtgcagccattgctgccgcattggaacaggaacgcgaggcaaactatcagaagaaactcgaaatcatcgacaagataaaagcgctcacggacaatcccgacgagattaaccgtgcctacaacgacttcaaggaacttcagcagcagtggaacgacatcaaggaagtgccagcagaacacgccaccaccctctggaaaacctaccagcaggcagtcgaggcattctacgacaccctcaagctgagcaacgaactccgcgcctacgacttcaagaagaacctggagcgcaagaccgccctctgcgaggcagccgagaaactggcagaagagaccgacatcatcgtcgccttccgcaagttgcagcagctccatcaggacttccgcgagacaggcccagtggcaagcgaactgcgcgaggaaatctggacacgtttcaaagatgcctccaccgtcatcaacaagcgccatcaggaatacttcgaagcccgcaagcagaaggaagaggagaacctcgaaaagaagaccgccatctgcgaaaccatcgaaggcttcgacatcgaaggactgaaaacctttgcagaatggaacgccatctcagagaaaatcaccgccttgcaggcagagtggaaaaccatcggctacgcaccccagaagatgaacaccaaaatcttcgagcgcttccgtgccgcatgcgaccacttcttcacccgcaagaacgaatacttccagtcagtacgcgaaaacctcaaccagaactatgccctcaagctcgaactcgtcgagcaggcagaagcactgaaggacagcaccgactggaaaaccaccaccgacgcactcgtcgaactgcagaagaaatggaaggaaatcggcaccgtgcctaagaagtacagcgaccagatttgggagcgcttcaacgcagcctgcgatgccttctttgcagccaagaaagaggcaaacaagggtgcaaacgaagagcagcacgccaacttggagaagaagcgcgccatcatcgacgccctcacagccatcgtgcccgaagagttcgaaggcgacctccgcacccgactccgtgaagcacaggacgaatggaaccagattggtcacgtgcccttcaaggagaaagacaagctctacaaacttctccgcgaacagatggaccgtctttatggctatgccaacgaacatgccgccaagcgtcgcatcgaccgcttcaaggagagcatcaagggaggcaacggaggtgatgtacgttcacgccttctccgtcagcttgacatcctcaacaacgagatcaagacctacgagaacaacctcggcttcctcaccctcagcagcaaatccaagcagggcaacagcctcatcgaagagctcaaccgcaagatggagaagctcaaggcagacaaggaagaagtcagagccaaactgaaagcactcgacgagcagtaatgctcaccgcatcataccaaaaggagggttgccaccaacggcacaccctcctttctatttaccccccccttcatccgaatgaaaaaacaaaaatttaaccatttctttgaaaatgaaaaatgaaagaatgagaaaatgaaatatctacgatgtgtctgtcaacgctaaactctcaacctttaacattatacattatcactcaattctgtttcatattacacaggtagtccactggagggtagtactaatcaattctgcagtgccccgtctgttcgcccaccgctgttaaggtatctcacccatacaggtgttggtgtctcacccatacatgtgtcggtgtctcacccatacacccaacgaggtctcactcatagaactatcctttggtgttcctttagtcctcctttagtgctccttgtgttcgtagtggtaagatagtagtaaggtagtaggttcgtagtgataaggtagatgtgggtagtagttgtcacttgtcaactcaaaaagtttatcgcaagggttaaaggtaaaaaatcattttgagcctttttccattcctgtacagcgcatttgttatcattttcccgatgttgttgacggcaataaaatctggaataatcttacgtttcttttgtattgtgttcggttttcactaacgttggcttcgccgaactttggatgcgcctcaacaataaaaataaaaaaattattctttcattttgtattgtgctcggctttcactaactttgcaataataaaaccgaaaaaagtggaacctgtaccgtgatttggaacaacataggcgtacctttgctgtcaaaaatcattaaccatcaaaaaacaacaagatgaaagacctgaatcaattcgtgagtgtatatcccgtttctataatctcaagatttcaatcaagaaaccttctatacaataaatagcccccgttaaggacgagggcagcaacctgaatgttttcacaacggaataatccttattgtgatttgcttcaaattagtgaggcaaatgtacgatgtttttttatttcatacaaatttatttgataaaaaaattgtttttctgtaaatttggcggcaaataacttcaaattagaaaaaccaaaaccattatgaaaaagattttaggcctcgacttaggcactacaagcatcggctgggctgtggtgaatgaagccacaaacaaagaagaaaaatcatctatcgtcaaattgggtgttcgtgtgaaccccttaacagttgatgaacaaaccaacttcgaaaagggaaaacccatcacaaccaatgctgatagaaccttaaagcgtagtatgcgccgcaatttgcaacgctataaactgcgtagagagcatttgataagttgcttaaaagagaatggctttatcaccgatgattccatcttatgtgagaacggcaatagaacaacattcgagacctatcgccttcgtgccaaagctgcaacagaagaaatctctcttgaagaattggctcgcgttttacttatgattaacaaaaagcgtggctataaaagcaacagaaaggcaaaatctaatgacgaaggggaacttgttgacggtatgagcgtagcaaaaaccctttatgaagaagatatcactcctggacaatactcactccagctactttgcaacggaaagaaatatctccccgacttttaccagtcagaccttcgtgttgaactgcaaaaaatttgggagaaacaacagacgttctaccccgacatattgacacctgatttcatgcaagtgcttgaaggtaaaagcaagaccaacacttcaaagattttctacgcacgttatggaattcatactgctgacaacaaaagcaaggacaaaaaacgtcaagcatacgaatggcgtgtcgatggcttaacccgtcaactaaacattgaagaagtggcttatgtcatcagtgacttaaacggactcatcaatggttcaagtggatacttgggaaaaatcagtgacagaagcaaaaacttgtatttcaacaaacttaccgttgggcagtatctgatgcaggaattagacaaaaatcctaatgtcagtttgaaaaatcaggtcttctatcggcaagactatcttgatgaatttgaaaccatatggaacacacaatcccaatatcacccagaactcacctgtgaactcaagaaagatattgggaacatgattatcttctatcagcgaccattgaagagtcaaaaaggtttggtggcaatttgcgagttggaaaatgaacaacgagaagtggaggttgatggtgtcaaaaaacttatcaccgcaggttgtaaagtatgccctaaatcttctcccctatttcaagagttccgcatgtggcaacgcttgaatgacgtgatagtctatgattccaatgctaaagcagacctgtttggaaacggcacagcgaccaagcgccgtttgacagaggaagaaatgaacactctcgcctttgagctaaacattaagggcaagttgaccaaacaacaggcactaaaatgcttatttggcaaggcaacaggacttgacatgaacttcaaagagctggacggtaatgaaacacaagcaaaattgttcgaagcctatttgaagattgtggaaatgtccggccatgaaggctacgattatgccaaattaaatgcatctcaaatctttgatgtagttgaaaaagtttttgcaggattagggtttaacacagccccactctatttcgatgcatccattgagggcaagcaatttgacaaacagccgatgtatcaactatggcacttgctttattcttatgaaggagacaattctaaaactggcgatgaaagtttagtaaagaaaatacgagacatcttccatttcgacaacgatgactatgccaaaattattgcaggcatttcattcaagcctgattatggcagtctcagtgctaaagccatcaaaaagattcttccatttatgaaagcaggtaatgattatagcttggcatgtgaatatgcacaatacaatcattccaaacgttcactgacaaaagaggaactcgaaaagaaagaactgaaagaccatctggatttattacctaagaatagccttcggaatcctgtggtcgagaagattctcaatcagatgatcaatgtggtgaatgaagtcgtcaagacctatggacctctcgacgaaatccgcatagaaatggctcgcgaactgaagaaaagtgcaaaagaacgcgaagaggcaaccaatgaaatcaatgctgcaaatatccgtcacgaagccatcaagaagattcttcaggctgcacctttcaacattgaacacgttagccgtaacgacatcatacgttataaactatacgaagaattgaaagataatggttacaaaaccctttattccaacacatacatttccaaagaaaaactgttcagcagagaatttgatatagaacatatcattcctcaagcacgtttgttcgacgattcattctccaacaaaacacttgaaagccgtagcatcaaccaagagaaaggaaatgccaccgcttttgacttcgtaaaggagaaatatggagaagaaggtacaaaagcatacaaacaacgcattgatgaactgctcaaacagaaagtactcagtaaagcaaaacacgacaaattgctgatgacgattgatgacatcccagaggatttcatcaatcgtgacttgcgagacactcaatatattgcaagaaaggcacgtgaaattttggaacaaatcgtcaaagtcgttgtaccaactactggaaagattacagaccgccttcgtgaagattggcaattggtaaatgtcatgcaagaactgaatctgccgaaatatcgagaattaggacttatcgaaacattcaagaaagacggcaacgaggttgtgcgcatcaaagactggacaaaacgaaacgaccatcgccaccatgcaatggatgcattgacgatagcattcaccaagttgagtttcatccaatacttaaacaacctgaatgcacgaagcgataaatcaagcagcatctatggcattgaacagaaagaactatatcgtgacaaacacggaagtttacgattccttccaccaatgccattggatgaattccgagcagaagccaaacggcaactggaacagattcttgtatctatcaagtccaagacaaaagtggttacacgcaatgtcaataaatccaagtcgaaaaaagcagaaaagggatttaataaacgtgttcaattgaccccacgcggacaattacacaatgaaaccatttatggcagcagtcagcgatatgtgaccaaagaagaaaaagtaggttcgtcctttgatgctgagaaaattgccacagtggccaacaaagcatacagagaagcgttacgacaccgtctggatgcatacgatggagatgcaaagaaagcattcacaggcaagaactctttggaaaaagcacctatctggctggatgatttgcacacacgcgctgtacctattaaggtgaaatgtgtaacgatggaaaccatctacactattcgcaaacctatctcaaaagatttgagaattgaaaaggtcgttgacaaacatattcaagacattcttcgtgtgcgcctcgaagaatatggaggtgatgccaacagggcgttctccaacttggacgagaatcctatttggttgaatgaagagaaaggaattcggattaagagtgttgccatcaatgcaggattgagtaaacctgaagccatccatgtgaagcgaaaccaattcgggaaacccatcctcaatgaaagaggaaacaaacaagcagcagatttcgtacaaacagccaacaaccatcatgtcgccattttccgtgacgcaaacggtaaactccaagagcacattgtatcattttacgaggctaccatgcgcgcaaatcagggatggcctatcattgacaaagagtacaatcaaacagaaggatgggaattcttattttccatgaaacaaaatgagtatttcgtattcccagataaggacttctgtcctgctgattatgacttaatgaatccagataattatgccatcataagccctcatttgttccgagttcaaaagttggcctcaaaagattatttctttagacaccatctcgaaacaactgtagaagacaaaaacgaactgagagatatgacttggaaacgaatccgaaattgtgatgagctacaaggtatcgttaaagttcgtgttaatcacattggtcaaattgttgcagtaggataatactaacatgattaagaagaccctctacttcggcaatcccatgtacctcagcctccgcaatgcccaactggtgttgcggaagcctgatgcggacaaattggaagagtcgttcaaacaagatgccgaacggaccattccgattgaggatatcggtgtggtggtgctcgacaacaggcgcatcaccatcacaactggggcgatggaggctctgctcggcaacaactgtgccatcatcacttgtgacagtaccaacttgcctgtgggactgatgctgcctctcagcgggaataccacacaaagtgagcgtttccgcaaccaaattgatgcatcgctgcccctaaagaaacagctttggcaacagactatccgacaaaagattttgaatcaggcaacggtgctgaacaaaaacactggagcgattgtcaagaacatgcaagtgtgggcaaatgaggtgaagagcggtgaccctgacaatcttgaagcacgtgctgccgcctactattggcgaaacctcttcccctctctccccaactttgtgcgtggacgggagggtgacccacccaacaacctgctcaattatggctatgccatccttcgggcttgcgtggctcgtggattggtggggagcggactcttgcccacattgggcatccatcaccataaccgttacaacgcttattgcctggctgacgacatcatggagccttaccgtcctttcgtggacgatttggtcatcaacatcatgcaaaagtaccccgattacaccgaactgacacagagcatcaagacagcccttctcatgattccgtcactcgacgtgatgctggatggaaaacggagtccactaatgattgccgttggtcaaacaactgccagccttgccaaatgcttcaacggagaactgcgtaaaattgcctatcctgaattgtagaaaacagcgaacatgagcagtttgtcacgcctcaccgaataccgagttatgtggattttagtattcttcgacttgcccacagaaaccaagaaggacaagaaacgctatacggattttcgcaagaaactccaagctgacggattcaccatgttccagttctccatctacatccgacactgtgccagtagcgagaacgcagaggtacatttaaaaagagttaaatcttttctaccagagtttggaaaggtcggattgctaactataactgacaaacagttcggcaacatgcaactattctatggccagaaaccaactgagcccaaaacgcctggagtgcagttagaattattctgaaaatgaaaaaaccagccgtcgagctggttttttcatatcacacacccttcttttttattttctaattacacctacaacttattaatactcttttacttacaaagattcaggtgtatatgactctgcaaagatactaatttgaaagcaaatcacaaccatagtgcgaaagacaaataaacgaataccggtgtatatgactctgcaaagatactaatttgaaagcaaatcacaacctcgacaagcaacatcaccgcttctggtgcggtgtatatgactctgcaaagatactaatttgaaagcaaatcacaactcctgtcatcgaattggaatgtcgcatcggaggtgtatatgactctgcaaagatactaatttgaaagcaaatcacaacatactggactcaatcaccttcacgagattaggtgtatatgactctgcaaagatactaatttgaaagcaaatcacaacgcatccaccgtgatgttgatatagtttagtggtgtatatgactctgcaaagatactaatttgaaagcaaatcacaacaactccgattttcgctactatcaacaggcgggtgtatatgactctgcaaagatactaatttgaaagcaaatcacaacttaccacctgatgcgtgaccttaacactccggtgtatatgactctgcaaagatactaatttgaaagcaaatcacaacacatatcatagccataacgaacagaatgtggtgtatatgactctgcaaagatactaatttgaaagcaaatcacaactgttcggaagtgcttgagtgattgcaagggggtgtatatgactctgcaaagatactaatttgaaagcaaatcacaacaatcatcaatcagcttcacgccatggaaggggtgtatatgactctgcaaagatactaatttgaaagcaaatcacaacaatgacaagttgaagaagcagctctctcttggtgtatatgactctgcaaagatactaatttgaaagcaaatcacaacagaaggaatatgatgcaattcttgagaagaggtgtatatgactctgcaaagatactaatttgaaagcaaatcacaacgaagttgacaaggtgactccgacatacaccggtgtatatgactctgcaaagatactaatttgaaagcaaatcacaactggtatgctgttgtagcttgcttcgccgaggtgtatatgactctgcaaagatactaatttgaaagcaaatcacaacgagaggtttgcggaatggggattgattaggggtgtatatgactctgcaaagatactaatttgaaagcaaatcacaacttcttcacgaagatacgcacactccgagttggtgtatatgactctgcaaagatactaatttgaaagcaaatcacaacagaccgctgccaaaattgtggcaggtatttggtgtatatgactctgcaaagatactaatttgaaagcaaatcacaacgtagtctttgttggaggaggattttttttcggtgtatatgactctgcaaagatactaatttgaaagcaaatcacaacgccttcatgtagagcatcgtgtcgtatagcggtgtatatgactctgcaaagatactaatttgaaagcaaatcacaacccgccgatggcataggtgaaagcattgccgggtgtatatgactctgcaaagatactaatttgaaagcaaatcacaacatgatgaccgtcccgccatctgtgttgttgggtgtatatgactctgcaaagatactaatttgaaagcaaatcacaacgagggagagcagccttccgaagaggctccggtgtatatgactctgcaaagatactaatttgaaagcaaatcacaacactttctcttcaatgttcgcctcgccaatcggtgtatatgactctgcaaagatactaatttgaaagcaaatcacaacacctctcgcatcagtccgatgatgtatgagggtgtatatgactctgcaaagatactaatttgaaagcaaatcacaacgtcgaggatgacgatggaaaatgactgatggtgtatatgactctgcaaagatactaatttgaaagcaaatcacaacacacaagccgtattggatggaaagaaaacgggtgtatatgactctgcaaagatactaatttgaaagcaaatcacaacagcgccatgtaaggagaatagggagttgtcggtgtatatgactctgcaaagatactaatttgaaagcaaatcacaaccctccagctgatcgttcttccacgccagacggtgtatatgactctgcaaagatactaatttgaaagcaaatcacaaccttctggcacctgttaggcactgacctccaggtgtatatgactctgcaaagatactaatttgaaagcaaatcacaactgtgcgttttgtgaagttgagattgcaaaaagaagtgtttttgatgtgttttcacatgatattaaaataaatatcatttttattaagtattattttgtggatgatattaaaattcatacctttgtgttgtcaaaacaaacagatttatttaattattaaaaaatgaagtacaatgaattagaaaagaaactcaaaaaaattggatgttacgacacaggcgaacaacaaaatggccaccctttatggttcagccctgtaacaggaaaatttttcaagatgagcaatcacggaagcgatgaggtggcaaaaggaactctttactcaatcaaaaaggcagctggtctcaaatgaccagcagccttcaaaaaaatagcctacaaatcaatcaataacaaataatcttaatttccacagagaatttagggttccccaaattgtattaacaatgagaaagactaaagcaatcatcgaacgcgccaacgatggtaattacagcgtttacatggatgctgacgatgtcagctaccttgtgacaggcacaggcgcaacagtagaagaagctgtaaaatgcttcgaggatggttacagcgacatgaaagcgttctacacaaaaaaaggtatgaagtttgaagaattggagttcgtatatgaatatgacatggcttcttttctttcctactattccaagaatttctctcttgctggtttatcgaggctcactggaatcaatcagggtcagttgagtcactatatgacaggaagacgtaagccatcacgtatgacagtcatgaagatgcagaactccattcacaaattcgctggtgagttggaaagagtgaacttcgtttagtatcatttttcattttttataaataaatctgttgccttccacagcaatgtggagggctttttatttcccgagttctttctttagcacctttctcccttcgtggatgcgtcgcttggtgtatatgactctgcaaagatactaatttgaaagcaaatcacaaccaacaggattgactaaaaaaaactatgcagaggaagtttttggaagctaaaggctgaaaaactgcggcttttttgttttgttttccgaaaaaatgtaactttgcgaaatcatttgtacaacaacatcttgataacctattcagatatgagtatgaagtatttgactatcatgttgatgatgtctggcctgattgtgtcggcatgcagcaacaaactgaagagctacggctcggacgttgagagtgattctattgagagtgattccattgcaagggtgacacagcggctggattcgatagatgcggaatattatgtgaaggagcggagcatcgagtccatcagaagggtgtgggctgacaagaagattaaggtggatgccgaccctgctgcgctgggcatcagtcagctggccctggcgttctgtcagacttatccacagtgtgacacgaacgaggcactgaggagatatcttgtcgctccgcacactgacggcaaggatttggatagcctttccttcaagtcgccgacctataagcacacgtttacctactggattgagcctgcgttgaagaacggttacattcgcagcatgggggaaacgcaggttgaccgcaccacgtatgtgtgcttctggaaccgcaagaacgggcacaagctgtttgcggccttcatggaggagtgttgggagacttcgacgtgggaggagtgtctggtggtgttctacgactatgatcccgctacgagggtgatgagtcctgaacctgcgctgacggacttgattgaaaagcgcatgagggattatgacgcgtattcggtcgttctgcctaaggagggtaaggacatcatggtcatgggcttcatctttggtgatgaggaggaagaggaagacaacagtgaatacgtggagctgaatctgaaatggaacggtatgacgtttaattggggaaattgaactgaaagaggatgtgacttgaatgaatcagccccgaaagttttgtgtgactttcggggctgattcggtggatttataggattgattcaaatccacacacaggattttgcatgggttccgtttcggctcactcgtaaacacctgtgtctgtcttaaacaaaaacactctcaagtaataaaaccacagatttagccgattaaacggatttataattttcgaccacgaatttcacgaattgggagagccttggcggcacttgggaaaccatccggacggggctttcgccaagaaagccaaaaattcgtttaattggctacgccgagctgaaggttcgtataattggctacgccgagctaaaggttcgtggtcaagaaaatctgtttaatccgctcaatcgttccgcaggaacttgttttacaaagacataccgcttcgcgatgattaaacagattgggcggatttataggatttgaatcattttgtctggaaataaatttgaatgattttgaaaagattt

SEQ ID NO: 2312 - DNA, 20068 bp, synthetic construct
  misc_feature 1..20068: note = Synthetic
  source 1..20068: mol_type = other DNA
cattcgagggaatatcgatcgaaccttgtgccatccacaagggattgtgaatcgtactgtgttccgccaaatcggcaaaagcaacgatatttcgtgcctgatcataattgccttttttgttggtgatccaaacttcgatacgtgtaatcgaaaccgcagactgaatgtaaggcgctttgctcatcgccttgtcaaattgattacggaaaaaataaccgagaaaaaaatgtctgttttcatcgtactgatcggctccaaattcgaagggtgtagtttgtacacctccttgtgaacttacggtttttgcttctgaattttgttgggaaaacaccgtattcacatgcaatttgccaaactgtaaatcggctttgattccgaaaagtgcagcaccgccattgatcagggagttggaggtggtcatactcacatttccggcttcgatgtgcttgaggatttcgtcttccttgccgtcataggccagtttaatgcgtttggcatcgaagtcgaacatggcttcggtgtcgtaattgatgccgaaattgattttgtctcccactttcacatctgcgttcaattgaatgttttggtcgaaatcgagcatcgtccttttacgcgaatgctccggcaacacaggattgtcggttaccgttcgtttgatgccggttgtcagatcaatcgagccgcgagcattgaattgcactcctcccgggccgaaaatttcaccaagtatattattggattttctcagagaagaaaatgagagcggttcgttctctttctgtttcgtttggtgattaaaggcatttttttctttgaaatagttttgggtagccattcgaactctataacgcgtatattcgtccggagtcatgctgaaaggctcgtcgataaccgtatttccgatgatattgcgaaaaacatagcgattcgttttcgggtcgaattcgacgttggtctgaatatttgaaggtgtttgcaaatctacggccgtagatttggtaagatcttccggtttctcgacaatggttttcttcacgggaaaccgaatgtcagtgctatcttttgagacattatcctgacaaaaaagatttctgtttccgttgaatatcaatagaaacagaaaaaaaatacctatgtattcgaatcttttcagagaagccgttttatcgattgacaaaaggcgcctgcgataagagggcgcatttctctgaaattacgcaatcacaatcttttgagcgcttccttaatgattgcttcaaccggaagagacgaagattctttgagaatcgccgaaacgactttttgtgaagcaacttgcggaaatccgagcatcaccaatgccgcaattgcttcatggccagtgcccgacaagtcggctttggtcggcaattgaatgctgccttgcgaatcggtcattttgattttgtccttgagatcgacaatgatgcgttgtgccgtttttgctccgattcccttcacggattgcaataccgcaacgttttcggtagcaatcaccgattccagttcttttgcactcagcgacgacaatataactctcgcagtacttggcccgactcccgaaacgcttatcagcaaaagaaaaatatcgcgttcgtgtttgtcggcaaagccgaaaagaacatgcgcatcttcacgaatgacttcgtggacaaagatttttgccgatttttcaccgttgagaatgctgtaagtatttagcgaaatattcgcgaaaaatcctattccgttgcagtcaatcgtaatggacgcaggtgtcagctcggctatttcgcctttcaagtaatctatcatcgtttctttcaaaaaaaagttggaatattgcgtaattccgtactaataacggaaaaaacggcaataacgtatattttttataatctttctttaacccggttatatctttaaagcgtttcataaaaccgagcgttttttcttgttgtttaaaaaatattatgatcaaactcatgtgttttcgccaatccgccttcgcccgtttctttgtagagcgacggcaggtcgtggccggtttgtttcattacggctacgacacggtcgaatgaaacgcgatggattccgtcggtgaacgacgagtaaagattggcatcgagtgctcgtgcggcggcataagcatttcgttcgatacagggaatttgaaccagaccgcataccggatcgcacgtcatacccaaatgatgttcgagtcccatttcggcggcatattctatttgtgccggacttccaccgaaaagttgacttgctgcagctgccgccatagcacaagccacacccacttcgccctgacagcccacttctgcacccgagatggatgcattcgttttaaccgtgttgccgaacaaaccggccgtagcaagtgcgcgcagaatccgcatatcgctaaattcgcgaatttcctgcagatgatatagtaccgccggcatcaccccgctcgaaccacaagtgggagcggttacgatttcgccgcctgcggcgttttcttccgcaacggcaagtgcatacgcaaagacgagaccacgcgattgaagcgatgctttgtagcctttggctttgatgtagtagctcgcagccttacgatgcagcccgagtggcccgggaagcacgccttcgttgtcgagtcctctttttacggcggcgcgcatgacttcccacacgcgctgcagataattccatatattattcccttcgcattcttctacatattcccaataacttttccccgtttttttgcaccaggcaagaatttcggtaatggtattcatattgtagatttcgcgctcctgctcagggtcgagccctacgattttttctccgtcggaaagcgcaccgccacctatactgtaaaccgtccacgaatctacaactttttcgtctgcgcctattgcttcgaacttcatagcgttgggatggaacggcaaaaatatttgtgcttgccattcgatggtagtcggtgctataggattgagaacgcccatgattgccacatccgtgaggtggcctttaccggtagcagcgaggctgccgtaaagcgttaccacgaagcgcgaagcatgaggattacgttcgagaaaaagttgggcagctcttttgggccccatcgtgtggctgcttgatggtccgtttccgatgcgatagagttgtttgagcgatttcattcagctatctcataattttttttgtcaataagtctccctgatatggcggatggttatcggcgtttttttggcagctttgagctcgggtgaagtgatttcgataacacgcttttcgccgggcatcaaatcgatgaagttatccgagaatcgggcgccgagtacgggtatttcgataaacacatcttttgccagcttcgaacttgacagtgtaaccgtatatttgccgtcggcatagacgattttggaattcaccttcgtttcgggtagatttagtttgttaggccaataaaagaagtaatcttttgaagaaaccattttccctttcgcgtcgcttaaccaggcatgaatgaccgtgtttgctttgtcggattccgaaatcagcgacgaaacatcaatgcttttgacgatttggctcgaattggcttttgcgttcactttttctttcaattccttcaccacgcctttcgaaaaatcgatcacttgaatggtcagttttagattgtcgatatcgctcaggtagtccgacatggtataataattcagcttgttgtcagcgaattttacgccgagtgcgagtggagcaaacacatcgcgcatgcgatagtgttgcgccttccaattgttgtagtaatcgatgctcgaccacgaaactacaggccagtcgtcgttgatttgccaatacagggcacccatgcagtaaggtctgccacgacgattggcttcaacggcttcttccatgccgttgccctgcattaccagacccagatatacgaaatcttcgaagtttttcggttcatggaaatacatatccatatattgcttgatgatgacgttccccacgccacttttctgatgaattttcatcacatccgaattgatgtcgaaatccttttcggtggcaaacgtgcgaatggttttcatctcgggaaacgattgaaatccgaattcgcttgcgaatcgtggaagtcggtcggccattgcctcgaatggcattcgcccgtgccataatccccagtcgtgtacatcgctcgatttgaacgattctatttttccccaactcgaattatagggcgaaccgtgaatatagcttcgtgtgccgtcgtattgcgacaacagatcgggaatcaaagttctgaaggttttatcatatccttttttccacagctccattgtttcaggcgtatatcttttgtcccagccccaatagcgcaatccttcttctatttcgttgttgccgcaccagaaagcgagcgaggcatgattgcgtaatcgtttcacgttgtaaatcacttcttcgctcacatttttcagaaatgcatcgtcggacgggtagggcgtacatccgaaaatgaaatcctgccacacgagaatccctttttcgtcggccaggtgataaaaataatcgtcttcataggttccgcctccccacacacggatgaaattcatgttggccgaagtaatattgtcgaacaatcgctgatagtaggccgagtcctgctgcgtgcggagaatttcgcccggaatataattggcgcccttagcgaaaaacggaatatcgtttacttcgaaataaaacgatttcccgatctcgtcgtctttctgaaccagttgcactttgcgcagtccgactctctcggatttttcggcaattgcctgatttccaaacaacagttttgccctaaagtcatacaaataaggcttgacccaattaacgggcatccatcttttgggatgatcgatttgaagcggaatcgataccacatttttacccggattgagcactacgtcttttgaaatggtttttttggattcatctttcaatccatattcaatggtaatgcttgcattgacaggttgcggctctatagaataaatttcgagctgattatcgatgatcgctttctctttcgttacggaagtttgtttcacgaaaaaatcgtcgatgcgggctttatcgtaaaaagtgagtgtaacaggcttccaaattcccatctgcaccagccgcattccccagtcccaaccgaactggtaaggcgctttccggctgtaaacgctaagcttgggcgttccgtgatcgttatccgccggatagtcgaacccggccgtagctgctgccggcaacatgcgggtgatgggcgaaaaaaatcggacgtaaagattattttcccctttgcgaagaagatgctttaccgaaattttgtgaccgacaaacatgttttgtgattggagaatgcgcgatccgttgaggaaaacatcggcatgcgtgtccaacccttcgaaaaacaaaagggcatcatcgtgattgagcagctcttcggagagtgtaaacgattttttgaaatcccaatcttctttttcgggccattgaacctcattttcgtttgttccgaaatagggatcgggaagcactttgtgacggatcagatcacgttgcacggagccgggaacctcggcgtcgtaccattgatttttgccggtttgcgaaaattgccagccgtcattcagcttcagcgtttcaactttgctttggccaaaaagcagacagggcaaaaaggcgatccaaaggaaaataatcgatttcttcatgtttacgaatgatatgtcggtttatgaatattttcggaaaaaattggtgatcttcaataaaaagctaaatctgcatcatatgaattgttctcccataattggctgcaaatataaccataagttaagaaactgcagcccaaaaaagaataaaatgaacgacttttggaaacggtattttaggttcatttgttgtaataatgcgggaaaaattcttatttttgtttctcgataacgcatttttgcgacataaatttgctaaaatacagaaatggccgaaaaaggtacatcaacattcaaacagtcctacaaacagctttattcgtttcttcgcaagaaaatgaatagagcagaggtgacgaagcttaaaaacattgtcgaaaaatcggtactctcggcattggaaagatccgaaaccgatgcattcgaaaagttgtgggccgaaattcgcacggctatcacggctatcgaagagttgaatgtgcgacaacccgaagtttgtgccatcctgctctaccatcctattctgcgaggagattactctatggaggaggccgcaaaatcgtttggagaagagacttccatcattttgcgcgggattgaaaaaatcaacgaattcggcgataaaaaagctgcggtggaatcggaaaactacatcaagttactgctatcgatggcagaagatatcagggtagttttcattattattgcccaacatttgcgacagatgcgcgaagccaaaaatttggataacgctgcgcgcttggccctttcggtggaatccacctatctgtatgcgccgctggcacatcgaatgggtttgtattccatcaaatcggagcttgaagacctttcgctcaaatataccgatcggaagacgtacgacttcatcgctcacaaactcaatgaaaccaagcgttcgcgcgaccggtatattcaggaatttatcgaaccgttaaagtcccgcctcgatcagacaggattgaagtacgagataaaggggcgtaccaaatcgatacattccatcaacaacaagctcaaaaaacagcaggtagaattcgaaggaatatatgacctgtttgccatccgcattatcctcgatgccccgatagaacaggaaaaggcacaatgctggcaggtttattctatcgttaccgatatgtatcagcctaatcccaagcgattgaaagattggctttccatccccaaaagcaatggatacgagtcgctgcatattaccgtgctgggtcccgaatcgaaatgggtggaggtgcaaattcgcacgcgccgcatggatgaaattgccgaacacggcttggctgcacattggaaatataagggagtgaaagaggaaagcgaatttgacgggtggctcaattcgctgcgcgagtcacttgaagacaaggatgttgagctcaaggaaaaattggtggattttcgtcttgatctttacgatgaggaaattttcgttttcacgcccaaaggagatcttattcgattgcccaaaggtgccacggtgctcgattttgcctttgccatccactccaaactgggcgcaagttgcgtttcgggcaacgtcaacggcaagaatgtccccattaaatatgttctcaaaagcggcgatcaggtttccatcaacacgtcctcgcatcagtctcccaaacaagattggctcaacattgtggtaacctcgaaagcaaagagcaagattcgacaactgctgaaagaggaagccgccaaacaggcagatttggctaaagaaatgcttgcgcgccgcatgaaaaaccgcaaaatagagatggatgacggcattttcatgcagcttatcaaaaaactgaaatacaaaacagcaaccgatttttatgccgatatcgcttccgaaaaaatagatgccaattgggttatcgatcgctatgtggaactcgaaaatcgggatgcggcttcttataacactgtgaacacggcgagcgccgaaaattttgttctcaatcccgaacgagtttcggatgaacaggacgaactcatcatcgatcagaatcttacgggaatcgaatacaaactggccaaatgttgcaatccgattttcggagacgagatttttggatttgtttcttccaacggcattaaaatacatcgcgtcaactgtccgaatgccgaaaatatgttttcgcggtttggataccgcatcgttaaagcccgctggtcggggaaatcgagcggcacttcaaattataccactattttaagggtaatcggaaacgatcagattaatattgtgtccaaccttatgtccattatttcgaaagaggcggacgtgaaaatgcgttcgatcagcatcgattccaacgatggactgtttcaggggaatatctctgtttcattggcaaatacatccatcctcgagcaacttatccgcaaactgagtgccgtgaaaggcgtaaaatcggttagtcgtctcaattgaacggtttcactgctttttttgcaggcgcggccttgctatcgatttgtggaagcaagtcctgcacataacttcgttcgaaatctttggggcgaagaatctcgccgtcggcagcaatcaaatcaagatcgatcaccactttaccctttgctttgtcctccggggttctgcccaaacgtttttcgatctctttcaactgtgcattaatttcgtcggcaccggccgaatgataggcgacggcaagaacattcacaaacgggcgcttgtaatggtcgctatgaggctttgtcgtcaaagcttccgtaaaaacaatttccggaaacagattttcgagcatttgtcgggcttcggtcaagttcgaccgcgcctgaaaatttgaactgatgcttaacaaataggcgtgcatatctacgattgaaacgacaaagatactccggatttttcatgaaatgtatccctgttttgaaaaattcagccgtcgggttgaatgccaaagctatttgttaaatagattttactcgctctgcgaatagtaatatcgctccacgtagaaatagtttatcttccttgttatacgaatcaatcgcttaaacctaacaagttttcaaaacttgttaggtttttagttaactaataaaaataactgcaaatattcacctaatatcacattcttttcaattcgtaaatttgttcacgttcatttatgtttatgtatagatattaagccgaaatgtctcttttatattgattttcacactttctaacgcgatgagtaggttttgcgtcacaacatttgtcactttccattttgcggaccgacttttgaccgcgaacaaaatgtactttccaaaatgaccaacggcattttaccgcagataaaggtcactttccgtattgaggaacgacttttcatccactactatgcttagttcgttaacaaaacatgatatatttcttctttttcgataactatttttaagggagagtggcttttgaccgcggtcaaaagccgttcctcgcggcgacgagtaggttttatccgtgaacaaaggtcgttcgttttaacgtcgaataacctttttcggatgacaacgatcgttcctcattttgcggagtgaacatttcaaacagacattggtcgttccgcgcaatgcgtagtaagcaaatcggcaaaaaaaggtcgttccgcatcctgcggaaagggtgttttaccgataaaaacctgttccgcaaagtgaaaagtaggttttgtctctgcacaaaagccgttcctcgtgataacaaacgataaattttcgtgtgaaattaccgttcctttaacagttcatcgaccttttcgggcagcgattggttgttcggcaaaacgatgagtaagaatttcgccggggtgaatggaagaatgaaggaaaggaagaaaaaatttgtgtttgaagatggaccctttttgaacggaaataacgaaatcccttttttcaaaagaaataactatgtttgcttatgtagccggcgaatcggaagaaccgtttaaaagcaatttaaatatcgattaaacaggatagatatatatataaaaatgcctcctgattgatggacaagaggcaacccaaatgttttcacaacggaatcatccttattgtgatttgctttcaaatttatgcttcaaagataaagcttttttcttatagaaaaaatatttaacacaaaaaaatgattatatttacagccgaatataatgaattgaaaattaatattatataaaatataaactatgaagaccgtattaggcctcgatttaggcacaaattcaattggttgggcgttggtgaaagaggcagaaaatgaaagcgaaaaatccgaaattattagacttggcgtacgagtaaatcctttgacagtggatgaattgcaaaattttgaaaaagggaaaagcattaccacgaatgcagatagaaccttaaagagaagtatgcgtcgcaatttgcagcgctacaaattaaggcgagaaaacttaatcaaaattcttaaagaaaataatttcatcacggatgaaaccattttatcggaaaatggcaatttcactactttcgaaacttatcgtttgagagctaaagcagctacggaagaaataacacttgaacaatttgcccgcgtactattaatgatcaacaaaaaacgtggctataaaagcagcagaaaagccaaaggcaatgaagatggagctttaattgacggaatggaggttgctaaaaaactttatgacgaacaattgactccgggtcagtattgcttggaactacttcaaaatgggaaaaagtatctccctgatttttatcgttccgacttactacaggaatttgacaggatttttgagaaacaaatgactttctatccggaagtgcttacgaaagaattacaggaggagctacgtggtaaaaaacgagatgccgtatgggcaatctgttcgaaagcatttaaagaaaaagggtttgaattagttggcaccaaacgtcaaggaaatgcaggggatcaaaaaatcgaaaattttgtatggagagccaaaggtttaaccgaaaagctggatttagagcaatttgtaattgtgatacagcaaataaacattcagattaatagttcgagtggatatttgggcgcaataagcgaccgcagcaaagagttatacttccataagataacaaatcctgatggaactacacgagctcaaacagttggagaatatcaaatggaaatattgaagaataatcccaatgcaagtttacgaaatatggtattttatcgtcaggattatttggatgaatttaatacgatttgggaaacacaagccgcatttcataaggaattaacggctgaattgaaacgggaaattcgcgatgtcgtgattttttatcaacgtccgttgaaaagtcagaaaagtttgatcagcttttgcgaatttgaaagtcgaaaaatcgaagttgaaatgaatggcaaaaagaaaatccagacgattggtagcagggtaattccacgctcttctccattgtttcaggaatttaagatttggcaaattttgaataatattgaagtatttggcaaaggacgaaaaaacaagaaacaaaaagaaaaatccctttttagcgatatggaagaccctttgcaaattggaggaaggagagaattatatcaggaggaaaaagaactattggcagaggagctttcgataagaaaagagttgaaaaagacagatgtattaaaattattgtttgataacccgaaagaactggatatgaattttaattccattcagggaaatttaacccaagcagtattttttgaagcatacaagcggattattgaattaagcgggcacgaaatagagattgaaaaaaaatctgccaaagagattctaaaagctgttgaagaggttttcagtgtattaggttttaatacagatattttgtattttgattcgaacaagatgcttgacaaacaaccgatgtataaattatggcatttgttatactcttttgaaggagatagctctaaaacaggaaatcaaaacttaattgataagattacagaactttgcggatttgataaagaattttctaaaattttggcgaatgtaacttttcaggacgattatggtagcctttcaactaaagcaatacgaaaaatattaccttatttgaaagcaggtaacaaatatgatgttgcatgccaatatgcaggatatcgacattcagcgagctctttgaacaaggaagaaataaacactaaaaactacaaagagcgtcttaatattttgccgaaaaattcattgcggaatccggtagtggaaaaaatccttaaccaaatgatcaatgtaattaatttgattattgacacttatggtaaaccggatgaaatacggatcgaattggctcgtgaattgaaaaagaatgcaaaagaaagggaagaactaaccaaatcaattgccgatacaaccaaattgcatgagcaatataaagagactttgtatagaccaccattcaatctctcttatattagccacaacgatattgttcgttataagctttatgaggaattgaaagaaaatggatataaaacattgtattccaatacatatatatctcctgcagcattattcagcggagattttgatattgagcatattattcctcagtcgcgtctttttgacgattctttttccaataaaacattggaacttagaagcattaatattgaaaaagggaatagaactgcttacgattttatcaaagaaaaatatggcgaatcaggcgaagaaaacaacttggacaattatctttcccgcattgaggatttgtacaaaaaaggtatcctttcacgagctaaatacaacaaattaaaaatgcaggaaaaagatattcccgaaggttttattaatcgagatttagctaattcacaatacattgcaaaatatgccaaaacgatgttgggcgaattggttaaatttgtggtatctacaacaggctcgattacagatagattacgtgaggattggcagttggttgacgtaatgaaagaattgaattgggaaaaatattataatcttggtttgacagaagaatttatcaacgaagaaggacagagaatccgtaaaattaaggactggacgaaacgaaatgatcatcggcatcacgcaatggatgcgcttactgttgcttttaccaaacgccaatttattcagtatctcaacaaccttaatgctcgacgacttgatgagagtcaaggcatttcaaatgcagaaaaagaagaacaggataattatgccattggtgccgaagatgttattttaagtacgagagatgtactgggtatagaaaagaaatacttataccgcgataacaaaaacaaactccgttttgtccctcccataccgcttgacgaattcagagcagaagcaaaacgtcagttagaaaacacattgatttcaattaaggcgaaaaataaagtaacgaccaaaaatatcaatataacgaagaaaaagggcggcgtaaataaaaaagaacagttaacacctcgtggacagctacacaacgaaacagtttacggaagccataaagaatatgtagtgaaaatagaaacggttaatgcaaaattcgataacgaaaaaattgccacagtagccaaccctgcttatcgagtagctctaactgaacggttgcaacaattcaacaatgatccgaaaaaagcatttacagggggaaacgctctctcaaaaaagccgatatggttggacgaacttcataccaaacaagttcctgaaaaagttaaaacggtgagttttgaaatcgtctatactattcgtaaggatatatcacctgatttgaaggtggataaggtaattgataaaaaaatcagacaaatactcgagaatcgattgaaagagtttggcggaaatgccaagcaggcattctccaatttagatgaaaatcctatttggctcaacaaggagaaaggaatttccataaaacgtgttacaatttatggggtgaataatgtagaatcattgcatgacaaaaagaataaggaaggaaaattgattttagatgaaaatgggaataagcaaccggttgattttgtaaatactggtaataatcaccacgtcgctatttatcgagatgcagagggtaatttgcaagaaaaggttgtatcgttttacgaagcagtaaacagacgcaatctcgggttacctgtgatagataaaaattataaatccgatgaaggatgggaatttctcttcagcatgaaacaaaacgaatattttgtattcccaaacgaaaaaacgggatttaatcccaacgaaatagacttgctcgatcctgacaactattcgttgatcagcacgaacttgtttagagttcaaaaaattacaacaaaggattatactttcaggcatcatttagaaacaaatgttgaaaacaataatctattaaaagggattacatggattagaaccggattaaatggtttgtcaaacattgtaaagataaggataaatcatttgggtcaaatcgtttcggtaggagaatattaattcataaaaataaacttatgtccaaatcagccttaaagaaagaattgctcaaactcaccaaagagcaattggtagagcaaatcctcgatttgtatgaaaagaataaatcgataaaagagttttacgatttttatctcaatccacacaatgaaaaagagttggtggagaagtacaaaaagatcattcggaaagagttcaatgtggaaaggcctgaacgaggcagcgagaaattctcggtagccaaaaaagcgatttcagaatttaaaagcttgcagccttcgcccgaggctttggctgatgtaatgctctatttgcccgaaagtgcctgcgaactgacgtattgttacggcgattattccgaacaattttatgattcgacgtacaacaactacaaggccgcattggagtttatcgcaaaacaccatctgctggatgagttcaaactgcgtgccgagcaatgtgtcaaatgggcttctccctgtggatacggttttgcaaatgatattgcagatatttattatgaattttatcaagattaaaacgattctgagtgtatgatcaagcgcacgctctattttggcaatccggcttatctttcgttgaaaaaggagcaattggtcgttcaactgcccgaagtagtcaaaaatgaagatttgcccgaaaaaatgaagcaggaatcggttgtcaccattcccatcgaagacattggcgtggtgattctcgaccacaagcaaattacggttacccaaggcttgatggagaaactacttgagaataactgtgcactcattacttgcgacagcaaccacatgcctgtcggactgatgttgcctttagcggggaacacgattcaaacggaacgtttcagcgatcaaatcaatgcctccgttccactaaaaaagcagctttggcagcaaaccgttcaagccaaaatcgaaaatcaggcctacgtgctcgataaaatggccggaggagtcattaagaatatgaacgcttgggcggctgacgttaaaagtggcgatcccgacaattacgaagctcgtgccgcggtgtattattgggcaaatctttttccgaatattcgaggattttccagaaatcgggatggcgttccacccaacaatctgttgaattatggttatgccgttttgcgtgcagtggtagcccgatcgcttgtagcaagtggattgcttccgacgctgggcattcatcatcgcaacaaatacaacgcctattgtttggccgacgatgtgatggagccttacaggccatttgtcgatcgcttggtttttgaaatcgttgccgaaaatgaaaatattgacgaaataacacaacctatgaaaacccgattattgggaattccgattctcgacgtaatgatcaacgggcaacgaagcccgttgatggtcgccgtggggcaaaccacggcatccctctatcactgtttttcgggagaaatccgaaaaataaaatatccttcatttacttaaaatgtcgatttggaggattaggggcatttatggaacgttttagcgaatacagaattatgtgggttttggtttttttcgacttgccgaccgaaacaaaaaaagatcggaaaacatacaccgatttcagggataaactgatcaaagacggattcaccatgtttcaattttccatttacctgcgtcattgtgccagtgcagaaaatgcacaggttcatatccaacgggtaaaaaagaatttgccgcccaaagggaatataggcattttgtgcattaccgacaagcagtttggcaatatggaactgttcgttgggaaagaagagaaaaaagtatccacgccctatcaacagttggaattgttttaatgaatatggacaaaaaagaattgctgaaaactcacgaattactttgtgaatcatacattaaacttatgaacgacaaagaagtaatgttgaattttaccaaaccgcaattggaatcgatgtatgcatccaaaattggtgtattgcaaatagagattttaaaactgcagctcgaaatcaaagcactcaaacgccaaatcgaaatggcacaagccgaaatcaatcaaaacaaagttcccaatttcgatcaaatagaagcggatattgccggtcaacttttggaagctcaaatggagattatgttcaaaacttacgaattggaggtggccaaacaatttttaagtcatttggcctctcccgacaaaaaagtcgatataagaaaatttttcaggcgattggccaaggcattgcatccggatgtgaatcccgaattatcgtcgtcgaaaaaagagatttggaacaaagtgctttgggcctacgagcatggcgatatggaacaactgaaagcattggaaatcatttatgcaaaagaaatttcggaatcggaaaatgccaaaaacgaaatgagtgaagatgaactcaacttgttaaatcacacactttcagaaggaatcggagtgcttgaacaacaaataacagagctcaacaactcctttccgttttcgatgcgggaacaaatcttaaatgaagattggataaatggagaaagatcgagattgcaattacaaatggaagaattgaaaacatatggcgaagaacaaaaacaaaaatacgctctaataaaagccgcttatgaataacgatgaaagcttaattaaagttgattctgcgcttttggcagcattaagctcgcatgccatccaattcaatgttttctcgaaagatattctggtattggaaacagtggttgccggcacttcttttcgtgatctttccaaagtaaatgagcatttggaaaatcggataaaacttgaagtcaaacgcgaagccgacaacaaatacgacccttttgccgtttcgctatattttggcgagaccaaaattggttatcttcccaaaacgaagaatgagaccatcgctcgtttgctggatgcagggaagagcttttttgcccagctttcggcaaaagaatgggaaggcacgtggcttcggttggaaatcaaggtgtatttgaacgattgattccttcttcttatcagatgtacaataaaaaatcccgcttattaacgggattttttgttttctgaccaacattttttattttctgattttgtctgtaaatctttgataatttgcaaataatacacatccagttgtatcagaatatcaaagatataaatttcgaaagcaaatcacaactacgtcttgctcgtatcttttggcattgccgttgtatcagaatatcaaagatataaatttcgaaagcaaatcacaacctactggtgcaccttattctggattacattgttgtatcagaatatcaaagatataaatttcgaaagcaaatcacaacacatgtccttgcaagtgctatctcgaactgttgtatcagaatatcaaagatataaatttcgaaagcaaatcacaacctatatttttgactatttgcattttaattgttgtatcagaatatcaaagatataaatttcgaaagcaaatcacaacacttagaactatacagccaagctaatgcagttgtatcagaatatcaaagatataaatttcgaaagcaaatcacaactgggcaatgatttgaatacaagggtgacaggttgtatcagaatatcaaagatataaatttcgaaagcaaatcacaacctgtgacacttactgatgttgctgaacctcgttgtatcagaatatcaaagatataaatttcgaaagcaaatcacaacggttcggcattggtgcaaaaatctttccaagttgtatcagaatatcaaagatataaatttcgaaagcaaatcacaaccgtcgaaattatcctccgtcagaaacaatgttgtatcagaatatcaaagatataaatttcgaaagcaaatcacaaccattataggcttatactcgtcaatacctttgttgtatcagaatatcaaagatataaatttcgaaagcaaatcacaacatatgaagattacgtgcatcggtgacatgcgttgtatcagaatatcaaagatataaatttcgaaagcaaatcacaacctatttccattacttccatgcccgggaagtgttgtatcagaatatcaaagatataaatttcgaaagcaaatcacaacataatcgtccacataggcattgtagatcgagttgtatcagaatatcaaagatataaatttcgaaagcaaatcacaacacgaaacgcatacaaaggcgtattgggaaggttgtatcagaatatcaaagatataaatttcgaaagcaaatcacaactgatacatcataataccacttccagcgttggttgtatcagaatatcaaagatataaatttcgaaagcaaatcacaacaatcataaattaaaactataataatcacctgttgtatcagaatatcaaagatataaatttcgaaagcaaatcacaacattttctaactttgggccatctttaccgggttgtatcagaatatcaaagatataaatttcgaaagcaaatcacaacaaagctcaatatgcgaaaagacatgtagtgttgtatcagaatatcaaagatataaatttcgaaagcaaatcacaacgagaaggtacagtatatgcattctcatctgttgtatcagaatatcaaagatataaatttcgaaagcaaatcacaacccatatcttttaattaataaaatcattaccgttgtatcagaatatcaaagatataaatttcgaaagcaaatcacaaccgctgcggtcagtttcatttgaagatcggagttgtatcagaatatcaaagatataaatttcgaaagcaaatcacaacccttacgtcaaagtgtgcttccgctcccaggttgtatcagaatatcaaagtatattagccctcaaaaaaaccgagcagtaaaaaataaaagttatttttacaactgctatggaaaagagaaagaatattacatcgaaaatcaaggttgaaatagttttatccttgttacgtggagaggatcctgagttagttagccgtgaatacggagttactctggccgacatcaatctttggcgggatcaatttatagagagtggcgctgacgggtttaagcgaaagcccgatgattcaaagctcattgctgccgagcgtaagatcgggcaattgcagatggagcttgaacttacaaaaaaaaagaacgaattggcagcaaaactaaaaaggagatgatttctattttgataaatgaacgttatccactaacagggaagccatatccgaaacgtttgatttttaaagttgtcggttacagcagcagtacctggtatgaaaaccctactcccaaaacaggcaagcgtggcagaaaacccaaacacagtgatgaagaggttttacaggagattaaaaaagaaatcaagaagagtaagtttaactctgaaggctatatcaaagtgaagaatcgcatggcaaaaagaaagataaacgctctggtagcgggcaaggcacgtgtgaaccgcatcatgcgggaaaacagcctgctgagcccctacagaaggcccgggaagacgaataagcgtgaacacgatgggactataaccacggatgcacccaatgtaatgtgggctacagatggaaagaagttctggattgagggatcgggttggcactggttctttggtgtaatagatcactttaacgatgagattatctcgtggcatatcgcaaagaaaggtaatcgttttgcagccatgcaaccggtcagagcagctgtacgtaaaa

SEQ ID NO: 2313 - DNA, 19816 bp, synthetic construct
  misc_feature 1..19816: note = Synthetic
  variation 17704..19694: note = n is a, c, g, or t
  source 1..19816: mol_type = other DNA
aaatgggccaaaaacttaatagcgctgatgaccaaattggagcactacaatttttaatcaaactcagtcctcctgattccgtcaaatcctatttcgatacctaccaacagctgagcgatagcgtgcagctggcgcgcagtgcggccaagaaccagtttgcgctcatccgctatgaagtggaaaaaaacaaggcggacaatttacggttgcagaacgaggtcaataagcagcgcatacgggtcactatggttatcgcgttgaccttgcttgcttcggtaagtggtttttattggtacaagcggcgcaagcaacgtctggaggtggaagcgcagaaccgcatcaaggaacataagctcaaaacctccaagaaagtacacgatgtggtggccaacggattgtaccaagttatgtctgagatagaatataaagaggatatcaatagggaggatatattagaccgactggaatatatgtatgaaaagtcccgtgatatttcctatgaacaagaaggactgccatcggatcagccggatttcggccagaaaatagccaaattgctctattcatttcaatcccattcaagggagattgttcctgcaggcaacgactgtcaggtatggggacatgtgcccgagcagacccaaagtgaaatagagcatatcctgcgggaattgatggtcaatatgcgcaaacacagccgcgccagtctggtggtggtcaagtttgagcaacgagatggtcatctatatatccactacagtgacaatggtgtaggtttgtcagaaacattccggtatggcaatgggcttcggaatacgggaaaccgtattgaaagcctcggtgggcatattacttttgacagcgaggagggaaaaggactgaaaattcagatttcattcccattgtcttaaactaaaaaagatgttcaagaaagtactgattgccgaagaccaagaagctgccaatatgtccttgcgtatcacgctcgaaagactgggcattgccgaccccaaatacgtattctactgtgatgatgcacttacgtggataaaaagtgcgttaaagcaggggcagccctatgacctactgatcaccgacctgtcctttgaagaggatcaacctcaacgcatctctggtggcgaggaactggcgagggaggcaaaggccgtgcagccagaactgaaagtcatcgtattttcggccgagggtaggccggacgaggtagaccgtcttttccgcgaatgtgccatcgatggttttgtgcgcaaggcccggcgtgacgccgaacatttgtctcaggccattcaggtagtttaccaagggaagtgctatatatccccggatatcaaaaaggctggtcagcaaagaaacacctatgagttcagtacgttggatctcgccatcatcgagctattggtagaaggcataccgcagaaaaacttcccggtttacctgcaagagcggaatatcagaccgtccagcttaagcagcgtggaaaagcgactcaacctaatgcgggaaatgcttggtgtttccaataacgggcagctgatagcctattgcaaagatatcgggattatctagcttttaagtatttgtctcacaacgccgccattatcttaatatgcctgaataagcacttctgccgggatgtgcagtttttcggtgagcttacggatcatggccaagctcagttttctctttccggataggatttcggattttctggatctgtggcccaatatttctgataggtccgcttcagacatgttcatctgttccaacctgaacttgatggcttccaacgggttcggttgaggaacgggatagtgctcgttttcataggccttaatcagcatggaaagaatctccagttcgtcagaggttttggaatctggttttatgtctttctgcatcaatgtataaacccgcaaaagggcttcttcatactgctgctcatttcttatcggttttaacataactcacttgttttgcatctattttgtcatactccttatgtgtaccaaaccaaacgatgaatacaatctttagtcggtactcgatgtccactattaatctatatgcattaccatggatattaaaaatcactcttttgtcagtcagtacggaggcattgcgatattgcgcttttagctcattaggattggcccaatctgtggtgcttgtctcttcataccaagatagcaaggcttgctccacttggggaaacttctcccagtaatttttcaatgtctttaccgcgatgatccgcatgtgcaaatatatacaaaatgttaccgttttggtaacattttgcgcggtgtgtaaatatttcatcatggattttttgaaataaatacggctttacggtttcccgtaaggatggtggcggtggcttggctatttttgttacgtaaaacattgaaaaatagccatggatatcaaacttaaactagagcaactccatcagcgggtcatcgggctgaaagatcagatcaatacggaggaagccaccaaaaatgcttttgtattgccttttatccagatattgggatatgatatctttaatcctacggaagtaatccccgaatttatttcggacataggtacaaaaaagggcgaaaaggtggattatgtcatccgcaaaaatggtgaacccatattgattatcgagtgcaagcactggaaggaaaatgccgatgcgcacaattcccagctgcatcgctattatcacgtgtccaaggcaaggtttggcgtgctcaccaatgggctgatctacaatttctatacagatctggagaaacccaacatcatggatgaaaaaccttttttgaccattaacatagaggacttgaaggacaactccatcaaggtactcgaaagcttcaccaagagtagttacaacctcgaaagcatcctcgattcggcagaagcattgaagtacatcaaggctatcaggaaggaatttgaaaaggaagtggatagtccgtctgatgagatggtcaagctcttggtcaaccgattttttgacaagccattaacggccaatcggatggtggcctttaaagaatatgccaaaaaggcgctgatgctctccataaatgagtccatcaacgaccgcttaaaatcggcattgcatatcaacgataagatcgagaagccagaagaaggcaagatcaaccccatcgatgagaacaatgatctcccaaagatcgtgaccacggaagaggaactggagggctttcatatcgtgaaggctgtctcacgggagaaaatccctgtcgagcgcatttcctgccgggatacgcaatcttattttggggtgctgctggacaacaacaatagaaagccaatatgtaggttgcattttaatacccaaaagaagtacctcgaattgtttcacaatgggaaagatgcgggagagaagatcttgttgaatagcttggatgaaatatacggctataggaaccaattgcatcaggcgattgagaattatgggtaagtgtaggtgaaagataatcaagagatttaaaatgtaaagatatggcttggagcttccgtagacgaataaaaataatgctgggtgttcatttgaacttaagcagaagtggtatatcgacttctattggggtcaagggggcgagcatgacctttggtaggaatggaacatacttgaacaccagtgtgcctttgttgggtgtttacaataggcagaaactcccgacaggcaattcaaatccgcaaccagattatcctgtttggcaggcagagcgcttggataatatatttagtgcggatgttcatggaataaccagtcagaacatgcaagggatgaaagaagcaataatattggctcgtcaacaacgccaggagttaaagcatgatttggtgcaaatacaatcggtgcttgctaagtcaaaaatgaaactgacgttgagttatatactgctttatggtttcataaaaaagactattcctgcaaatctgaaagtcgatatagaagcccagaaagaagctattgagcagacacaagaacaaattgacaaatgctatatacagctggacgttgaacttgattcgggttttcggaaaaaatacgatgtattggtagacgcatttcaaaagttgactacctgccataagatttgggacgtaacaagtgcccattttcaagacaggattgttgcgcgttcgtcggcaagtacggtggttaataggcgaagggtgagtttcgcaatacagtctcttcccgatattaaatcatctttcgaagcactttactttcaaaatgcgaacggagctgatctttatttctatccgagttttatcgtcatgcattctagtaaatctgagtttgccatcattggatttgatgaaattgatttacagcacagttatgtgcggtttacggaaacggaaagtgtcccacaagattcgaaagtgatcgacaaaacttgggtcaaggtcaataagaatggcactcccgatagacggtttaagggcaactatcaaattccggtagtgcgttatggcgagatacgtttgcgcaccaataccggattgaatgaagagtatgaattcagcaattgcgaatttgccgaggagtttggtaaggtatttaaagactatcaagcaatgataaaacgagcacagccctttaatggagtttaaaacctaccttttgaacacagaattccgagggccgaattcaaaaaaagagcatataagcatcacccaaattaaataaaacacatactcatatggataccacaattagtttagaactacaaagccactttttgcgactctatcaaatggcctgttcagatgaaaacttcgatgtgttggaaatgaaactgctctatctctttgcaaaagaaagaggtgtcagtatagaacggttaaataatattttgacaaatccagttcagcgtatggagctgcctgtatccgttgaaaaaaggatagaatatttgtatgacttagccgtgatgatatgggtggataaggaagtaacggaagacgagtacaacctgttgaaaaagtattgccggacatttgaatttttagaagaaaatattacaggtatatgcgactatctcattgactgcgcaaaacaagagaagcaactttatgaagtgttggattcaataaattaaagaccatggaaatcaaaaaactatttgccactaggaagccggaagaacggggaagtgccgctcttgtggatgaggaacaagatgaacagaaagttagggttacttattaccaaagcggttatggtgcagcacttaaggcaatgggaggtcctttgaattttaaagcttgtctggaaaacgtctataccagttttgagcagcagtgtcgagatcaagaagcccaacaaatcaaattaaagcagccctacgttgaagaaaaaagccgcaagcaaagcgagttgaaaaatacggaggcagccattgccatttttgaagaaaagaggcaacaagtttcagagaaaatagatgtcgttaagcatgaaattgaagatgtgaaacaccatccggcaaaatatggattggactctactaagaagccccaggcccagttttacatcggacttatattgctgctccctatttctgtatacttatttgtcttttatatttcggcgtcttattcagctttttttaaggatttttcaaatgatagccttactgccgccatatttgatgcgcaggctttcaacaaggcattgcaagacggttggttagaaggagttttggtggtaaccataccatcggtctttttgggattaggttacgttatccacatggtgcaaaaagaaaaaggcaaaaaaaacacgttcaggatggtggctctatacatcattacatttctgtttgatgcactgttggcctatcaaatagagaaaaagatctatgagttcaacaagacgctggattcggctccttacaatctcaaagtagccttgggagaagcggaattttggatgattatcttcgcaggttttgtagtttaccttatttggggattagttttcgatattaccatgaaggaacatgagaatttagataagattaagggttttatcaaaacgaaactggaggaactgatacggctcgaaacgagcaagaatgagataacggatgaaattaatagcttgaggaagaaggtcgtagagattacgggaaaaatcaccgagctgcaggctgtgatagatggctttatcatgaacctaaagcaatatctactctaccataatcaatataaggaaggttggtttcaggccgtaacttccgagatagcgttagcgcaatcggcgcagcaaaaaatgctggaggagtgcgaatcgatcgccaacgagcatttacaaaaactcaatctattagattccagctttcaaaacgttgtttactctaaaatctcttagccatgggaaataaaattgtttttgcaattggtttaggcttattatgtttagcgattggtttatgccttaaggggtgtggtacaggaacgaatgggaacagccccatgagtgtgtcacctggaccaacaccaaaatcaaaagaagacctaaatgtcagtatcctgctggatctttcggataggatagatcccataaaatatcccagcccctcgatggagttctacaaaagagatctaggctatatagaagctattggcaaggcatttgaagcgcatttgagatctaaacaagtcatcaagatcaatgaccagattcaggtatatttcgagccggaaccgctcgatgcggaaatcgataacctggcaaaagagctaaaattgtcttttactaaagccaacgctaccaaagcaggaattgaaaaggtgtcgcctcaattcacttccgttgctacaaaaatctacgagcaagctattcaggataagaaatatatagggtcggatatttgggggtttttcaaaaataaagtcaatgattactgtattaagcccgatcataggaatattctttttattctcacagatggatatatgtttcatcaagactccaagttcatggatgaaaataagagctcttatcttactcccgagctcgttagagccttaaagctgaatacgtcaaaatacaatgacttgatcaatgaaaaaggatatggttttgtgaaggctaatgacaatcttgacgatttggaagtcatagttcttggggtcaatccagccaaaggcaacccttttgaaggagacgtcattaaggcatattgggagaagtggcttgccgacatgaaaatagaaaactatgttataaagcctgccgacttaccttccaacctagataacgccattcaaacgtatgtcaataaataaaccctttggtttgacttggaaatttagaattttagtagtgctattctgtttggttaatggcgcttgctacaggcggctggatagggacgcatatcctggccggtcaactaatatcgtaaatgacaagcaaagccaagagccgaccgatagcgaaaagcgccgaaaatggaaaaagggccttgtctacgtcaccaaggtgatagacggcgataccttttgggtggatgatggtgtcaagaaaacaaaagtaaggttcattggcatagatgcgccggaaatacgcaactctgcccacaagaaaaagggttattttgcggcagaggctaaggaatatgtggccaagcttaccgggtaccaatgggttcggctggaactggacgtgcggaaaatagacccctatcaacgtttgctggcctatatctacctggaagacggcacgttcctgaatgccgatttggtggccaagggatacgctgtagtcgatacccatctgcccaatgtgaaatatgtggatttgttcgtggaattgcagcgggcagcaaggcaagaaaaactggggctttgggcggagtaaggtatgcttagcaaatactaccagatctgtttcaccttatatttttcaaagttggagtccgcagttataatggttagtttgtccaccatagcttgactaatcagcattcggtcaaatgggtctcggtggtaaagttccaatgatattaagctctccgtatgtgcgatggtaatcggtagtaggttaaagccgttcttctctatttcaagatataattctcggaatgatatgtccagttgtaacttgccaagattgagttttatggccatctcccaaaatgtggccgtactaatataacggtcatgtatcggattttctatcaatgctctcgctttccctgaaagttgcttatcaccattgataaaccaaagaaaagcatgtgtgtccagtaggtatgacattacatatagtctttgaaatcatccaaaggttcgtcaaaatcagcactcattttgatcttaccctgggcacttccaaatttagcaggctttttgggggtagatttggttttgctcaggaggaagtccacaaagtcgctcacttcctttttcaagtcaggaggtaaggactccagctttgtatttaatgtcaactttcccataaacgcaaagttaggtaaacaggcttataaatacaattcctttattacggtttcccgtaaggaatgggcgcctatgtggagtagttttggagggataagcaagttgataaatagttagttgaaaaaaagatgaagccgcccatattactcctctttctgttcctcaataccgtctgtaccagtaccaagacggccaatgaatttgcagatactgtttacctctgcggtagtggcaaaggaaaaaaataccatctcacggctgactgccgaggcttgagcaattgtagttacaaatcggtgaaaacgaccctgaaaaaagcaaagaaggaagggaaaaccttatgtggatgggaagattaaaagaaggccgatcccgataggaaaggcagtacttatactgagaatcacctatagattaaataaaaaaatgcgaaaaaccttactctatttgtccctgcttttggggctgctgtacccgctgtcatcggaaacccgcgtacttccttatgaagaatcggttatctttcagaaggaagccaccgtatacatcacccgcactggagcaaaataccaccgtgacggttgccgctacctatctaagagcaagattaagacgatcaaaaaggaagccgtcaagaatggctatgaagcgtgtaaggtatgcaggccttaaattggccgatgacaggagggtatgaaaaaacttattgaatttatcaaggcctttgtaaggggagaagaagccgaaatagagattgcactggaatggtatgacctggttactatcgcgttggctattggtttgatagttacatggctggtcaaactgtaaagggaaacctccaggttgagataaataagggcgagttgccccgccttaaatgttttgttcacgtcgtattaattggctactagcgttcacgaaacatttgggcataaaaaagccccgaagatagtcgaggcgctaaatgttttcacaacggaataatccttattgtgatttgctttcataagcaaagataatatatgttttggtacttgcaatacgggaaaccgtagttttgaataatttttatccttatcttaggaggacttaaactggtaactaaatgatatgaagacaatattagggttggatttgggaacgaactcggtagggcgggcgttggctaaatataatttggaagtgctgaatcaaaaaaggactacctatattaggtagtccccaaagaaagcaaatcacaactcagtaagtgaaaaatatttggaatttcactccaaaattgtattagcgaggcattgtataaagatagcagatgaagctaaactcattgcatgcaactctaatgtggttagaggtattaacccggctctcccgctctgcaaaggtatagaatgattctgtatgtccaaatattttttcttactgaagatttttttatttttgtaatcttactgacagttttttagttatgaatattcataaaaatatactcggccttgatcttggcaccacttccatcggttttgcccacgtcattgagggcaatacgcctgaacaatctgaaatcgtacaaataggtgtccgtgtaaacccattgactacggatgaacagagcaatttcgaaaaaggaaaaccagtatcggaaaatgccgatagaacgttgaagaggggcatgcgccgtaatcttgatcgttatcaattgcgtaggaaaaatctgatagatgtattgctgaaagctaatttcatttccaacgagacgatactggcggaggacggcaaacatactacgcacgaaacctggagattgcgatcgaaagctgttacggggaaaatcgaaaaagaggaattggcgcgtgtgcttttggcgattaataaaaagcgtggttataaaagtagccgaaaggccaagaatgaggatgaagggcaggccattgacggaatggccgtggcgaaaagattatatgaggaaaatcttacacctggacaattggcctatcaattattgcaggatggaaaaaagcatatccctgatttttaccgctcggatctgcaagcggaatttgataaggtctggaaatttcaaaagcaattctatcccgaaattcttacggacgatttttataaaaacctgcaaggaaaaggacaacgtgcgacttccgctgccttttggggaacttatgggtttaataccgccgaaaacaagggaaacagggatgaaaagaaattgcaggcctataaatggagaagcgagtccgtttcgcagcagttggaaaaggaggaagtagcttatgtgattacggaaatcaacagtaacctgaacagttcgagcggttatctgggagccatttccgacaggagcaaggaattgtactttaataaggagaccgttggtcagtatctgtacaagcaattacaagccaatccacatacaaggctgaaaaatcaagtgttttatcgtcaggattatctggatgagtttgaagctatttggaaagagcaatccaaatatcatttggaactgaccaatgagctgaaggccgagatacgcgacatcgtgattttctatcaacgaaagctcaagtcacaaaaaggcttaatcagtttttgcgaatttgaatcgcaggaaaaaaccattggtgggaaaaagaaaaccataggtctgaaggttgcccctaaatcttcgccgttgtttcaggagttcaagatttggcaagtgttgcagaatgtgttggttcgtaaaaagggaagccgaaaacgaaccgtaagaacaacagggcagccctctttgcctgaaggggagcaggagatttttgcattcgataagtatgccaggcaaacgcttttcgatgagttgaacattaaaggaaatttgtctgctagtaaagcgttggaggtcttaggctacaggtcggcagattgggagctgaactatcccattctggaaggcaatcgcactagcaaagtcctgtacgacgcgtatttgaggatattggaaatcgaaggatacgatgaggatttgttgaaattgaaaggcaaagatgatatcgatgtgtccgaattgaaagctcctgcttctgaaatcaaggaaatggtaagtcgtatttttggaatcctgaacatcaatacggaaatccttgaatttgatgccgaattggacggaaaagcatttgaacagcaagcgtcctatgcattgtggcatttgctgtattcatacgaaggtgataattctcccagcggaaacgaaaagctatacgctttattggaaacaaaattcggctttaagcaagagcatgctaggattttggccaatgtgccgttatcggatgactatggaaacttgagcaccaaagccatgcgccagatgtatccgcacatcaaggaagtttcgtatgacaaagcggcggcaatagcagggtatcggcattccaaaaattcgttgacggtagaagaaatcaagaaccgtccgttgaaagacaaattggaattgttgaaaaaaaacagcttgcgcaatcctgtggtggagaaaattctcaaccaaatggtgaatgtcgtgaatgccctgattgagaagaacagtgagaaaaacgagaatggggatattgtcaactatttcaaatttgatgaaatccgtatagagctggcacgtgaactgaaaaagaatgccaaagaacgtgctgaaatgaccgtcaatatcaacgctgcaaaatcggcccacgaaaagatatttaaattattgcaaatggagtttggcgttaagcaccctacgagaaatgacatcatccgctaccgattgtatgaagagctgaagaataacggttacaaggatttatatacgaatacatatattccgcgagaaattctgtttagcaaacagatcgacatcgaccatattctgccgcaatcacggttgtttgacgacagtttttcaaacaagaccattgtctatcgccacacgaatctggataaaggtaacttgaccacatttgactatatgggcagtaggcttggtggcctacaactcaatgaatacgtctcacgcattgagcacctgtaccaactaggcttgaagaacaaggaggaaggcatttccaaagcaaagtatcaaaaactgttaaagcaagctgtcgatatcggagacgggtttatagagagggatttgcgggatagccagtatattgccaaaaaagccaaaggtatgctgtatgaaattactcggtcggtagtatccacttcgggcagtattacggacaggctacgtgaagattggggtttggtcaatatcatgcaggaattaaatttcagcaagttcaagagcttggggttgaccgaactcgtggaaaagaaagacggcacgttcaaggaacgtatcgtagattggacaaagcgcaacgaccatcgccatcacgctatggatgccttgactgtagctttcaccaagcaccagcatatcaattacctgaatcacctcaatgcccgatacaacgaattgcacaaggaatatagaaacataaaaggcatcgaagaaaaggaaacgcactgggaatacgatgacgaaggcaataaaaaacgagtgttcaatctgcccatcccgaatttcagggagcaggccaaagtgcacttggaaaacgtattagtgtcacacaaagcgaagaacaaggtcgtcaccaaaaacaagaataagataaaaaccaaaaacggcgaaaaagtaaaggttgaattgacaccaagagggcaattgcataaggaaacggtttatggtaagtatcagtactacgtcaacaaagaagaaaaagtcagcacgaagttcgatgaggtaaccatcgttcgtgttgccaatcccttgttcagaaagttgttgttgcaacgcctgcaagagaacggaaacgatcccaaaaaagctttcggaggtaagaatgcattgagcaagaatcccatttatctcgacgatgagaaaaacgagcttttgcccgaaaccgttaaactcagctggctggaagaagattactctataagaaaagacgttacccctgagaacctaaaggatgtgaagactatcgaaaaggtattggatgctaatgtaaaacgtgttttgctgaatcgactgggggcatttggaaacgatcctaaaaaggcattttccaatctggataaagatccaatttggctgaacgaggaaaaaggaatccgtattaagagggtaacgatttcgggagtaaaaaatgcagaaccattacattacaagaaagatcatttgggcaaacctatcttggatgatgaaggccgaaaaatcccagttgacttcgtcagcaccggaaacaatcaccatgttgctatttacagagatgataaaggaaatcttcaagaaagggttgtctcactctttgatgccgtccaattggtcaatgcaggggaacccgttattgacaggcaattcaatcaaggattgggttggcaatttctatttaccatgaaacagaatgaatattttgtgtttccaaatgaaaaagcaggatttgatcccaaggaaatagatttgttggatccgcaaaataaaagattgattagtcctaatttgtttagggtgcagaagattgcttcgaagaattatttttttagacatcatttggaaacaacggttgaagagaagaaagaactaaaggatatagtatataagcctcaattaggattaaatgcagtaaaagatattttcaaagtccgtatcaatcatttgggagatattataagtgttggagaatactaagtcgagatgacatgaaccgtaccgacttccttaaatcattaggcttgggagcaggaggattagtcctaccttccaactcttttttgcagaccaagcctgtaaaaatctacgacaattatttgcgtgggatgatgcattatgatttccggaagataagagaaagtataaaagaaggggatgaagtccagctcttccgggagcaggacaatatgtatgacagttttgcggttcaggtaaattttggtgagtatcgtttaggttatttggccgcttatgaaaacattgtcattgccaatatgctcgattcgggcgttggacttagggcgtacgtcagccaaaaagatctgcaacgtcatgcacaggaatggttggccatagaagtgtttgccgagctggtcgtcccaactcagaaactgattgatagtgcttgctgacaaccgtgccgatgatgcgccagatgtttatcgattaggcgaagtttaagctgattttaagcgttatataatggttggttctagactagaacacctatgaaaagatagaagacatgagtgaaattataatataccaagaaaatgataacgatgttcagattgaagttcagtttgagaatgaaacattttggttgtcccttaatcaaatagcagaattgtttgatcgggataaatctgttatttcaagacatttaaagaatgtttttgactctggtgaattgcagaaagaagtggttgttgcaaaaaatgcaacaaccactcaacacggagctgtgaaagggaaaatgcaaaccaaacatgtcgaatattatagtctcgatgccattctctctgttgggtatcgggtaaactccaagcaaggcacacagttccgtatttgggctacacaaagattaaaagagtaccttgtgaacggatattcgctcaatcagaaacgtctgaatgaaatggaacaaattatttttcaaatcaaatcgtatttgcgctatggacaagataattctatatcaaacagaaaataatcaaacgcaggtagaagtacagtttgatgaggaaacggtgtggttatcgcaaggacagattgcatctttattcggaacacaacgtcctgcaattaccaagcatttgaacaatatttttaaatctggtgaactaagtgaagaagtggtcagttccattttggaacataccactcaacatggtgcaattcaaggaaaaactcaatccgtaaaaactaaatactacaatcttgatgcgattatatctattggttacagagtaaattcgacaagagcaacacaattccgtcaatgggctactcaacgcttgaaagagtatcttgtgcaaggctatgccattaatcaaaaacgcttggatgaactgcaacaaaccgtacaacttatccaaaaatctattagcgaagataccaatataacagaagccaaaggcttactcgaaatcatcagccaatatacccaaagcttcgtgttgcttaatcaatacgatagtaataccataaaaactgataggctgagtgatgaaattacttatgagatagattacaaagaagcaaaacccgctattctggaactgaaaagacagctgattgaaaagaaggaagctaccggtctttttggcaacgaaaaagataatagtttcgaaggaacattgcagagcatcgttcagacgtttggaggtcagtatttatatccaagtatagaagaacaagcggcacatttgctctacttcattatcaagaaccacccctttaccgatggtaacaagcgcataggggcctttatgtttatatggtttttggagaagaacaaacatcggtttaagcgggatggtgaaataaaaataaatgataacgccttagtggcattggcgttattagtggcgcaaagcgatcccgtagaaaaagaaccgatgatcaaattaatcacacagcttatcaacaatcgataatatgatcaaacgtaccttgatgttctccaatccggcctatttgaaccataaaaatagccagctggtggtttcctttcccgacaaggaaaaggaagatcgtacggtacccattgaggatgtcggtgtagtggtattggaaaaccagcagatcaccatttcgcacggctgtattgctgcgttgttgcagaataatgttgcggttgtttcttgcgatagcagccatatgcctacgggcctcattctgcccttggacggaggccatacgcaggccgagcggttcaggtaccagatcgaagcttctgttccgttgaagaagcaattgtggcagcaaaccatacagcagaagatatataatcaagcacaggtgctgcaggaagtcgggattcctgcggataatttgctgcgttggtccaggtctgtgaagtcgggcgatccggataattatgagggtagggccgcagcctattactggcagaatatctttggagcctttatggaattcaataggcatcgggcaggagaaccgccgaacaacctgttgaactacggctatgcgatactacgcgcggttgtggccagaagtctggtatcctcgggcttgttgcctaccctggggattttccatcgcaacaagtacaatgcctattgcctggccgatgacattatggagccatatcgtccctttgtggatcgtgtcgtttatggaatcgtctcggaggagggcgactatacgatcttggatacctccctaaaaacacgcttgcttcaggtgccccaggtagatgtccggtttgacgatatgaccagccctttgcttgttggtgtttccaggacgacggcttctcttgcgcgctgtttcgaaggggtgagcagaaagataaattatcccacgctatgagaaagggaagcataaaactgataaaatgtgaaccgtctaaaccaatatcgcgtattgtggatcctggtattctttgatctacccaccgaaacaaagaaggataggagggcgcatgcaaaatttcgtaaggagattatgcaggatggatttaccatgtttcagttttcgatctacctgcgccattgcaacagccgcgagaatgccgaggtccatatcaagcgggtcaagaggctgcttcctgaaaaaggccatgtgggaatactcacgattacggacaagcagtttggcgacatcgaactgtttgtcggcaaagagcttgggaagcggccggatgcaccacagcaacttgaacttttttaaaccaagtttatatcattatgcatggcatattattatgaaaaagttttccacatgctgccttttgtaacatgtggggcttgtaaaaggtaagaataggatggggaaaattcatttagaaataaaaaatccaagccaaacatgcttggattttttatttctaaattttgaatcaactgattgattgtcattgannnnnnnnnnnnnnnnnnnnnnnnnnnnnnnnnnnnnnnnnnnnnnnnnnnnnnnnnnnnnnnnnnnnnnnnnnnnnnnnnnnnnnnnnnnnnnnnnnnnnnnnnnnnnnnnnnnnnnnnnnnnnnnnnnnnnnnnnnnnnnnnnnnnnnnnnnnnnnnnnnnnnnnnnnnnnnnnnnnnnnnnnnnnnnnnnnnnnnnnnnnnnnnnnnnnnnnnnnnnnnnnnnnnnnnnnnnnnnnnnnnnnnnnnnnnnnnnnnnnnnnnnnnnnnnnnnnnnnnnnnnnnnnnnnnnnnnnnnnnnnnnnnnnnnnnnnnnnnnnnnnnnnnnnnnnnnnnnnnnnnnnnnnnnnnnnnnnnnnnnnnnnnnnnnnnnnnnnnnnnnnnnnnnnnnnnnnnnnnnnnnnnnnnnnnnnnnnnnnnnnnnnnnnnnnnnnnnnnnnnnnnnnnnnnnnnnnnnnnnnnnnnnnnnnnnnnnnnnnnnnnnnnnnnnnnnnnnnnnnnnnnnnnnnnnnnnnnnnnnnnnnnnnnnnnnnnnnnnnnnnnnnnnnnnnnnnnnnnnnnnnnnnnnnnnnnnnnnnnnnnnnnnnnnnnnnnnnnnnnnnnnnnnnnnnnnnnnnnnnnnnnnnnnnnnnnnnnnnnnnnnnnnnnnnnnnnnnnnnnnnnnnnnnnnnnnnnnnnnnnnnnnnnnnnnnnnnnnnnnnnnnnnnnnnnnnnnnnnnnnnnnnnnnnnnnnnnnnnnnnnnnnnnnnnnnnnnnnnnnnnnnnnnnnnnnnnnnnnnnnnnnnnnnnnnnnnnnnnnnnnnnnnnnnnnnnnnnnnnnnnnnnnnnnnnnnnnnnnnnnnnnnnnnnnnnnnnnnnnnnnnnnnnnnnnnnnnnnnnnnnnnnnnnnnnnnnnnnnnnnnnnnnnnnnnnnnnnnnnnnnnnnnnnnnnnnnnnnnnnnnnnnnnnnnnnnnnnnnnnnnnnnnnnnnnnnnnnnnnnnnnnnnnnnnnnnnnnnnnnnnnnnnnnnnnnnnnnnnnnnnnnnnnnnnnnnnnnnnnnnnnnnnnnnnnnnnnnnnnnnnnnnnnnnnnnnnnnnnnnnnnnnnnnnnnnnnnnnnnnnnnnnnnnnnnnnnnnnnnnnnnnnnnnnnnnnnnnnnnnnnnnnnnnnnnnnnnnnnnnnnnnnnnnnnnnnnnnnnnnnnnnnnnnnnnnnnnnnnnnnnnnnnnnnnnnnnnnnnnnnnnnnnnnnnnnnnnnnnnnnnnnnnnnnnnnnnnnnnnnnnnnnnnnnnnnnnnnnnnnnnnnnnnnnnnnnnnnnnnnnnnnnnnnnnnnnnnnnnnnnnnnnnnnnnnnnnnnnnnnnnnnnnnnnnnnnnnnnnnnnnnnnnnnnnnnnnnnnnnnnnnnnnnnnnnnnnnnnnnnnnnnnnnnnnnnnnnnnnnnnnnnnnnnnnnnnnnnnnnnnnnnnnnnnnnnnnnnnnnnnnnnnnnnnnnnnnnnnnnnnnnnnnnnnnnnnnnnnnnnnnnnnnnnnnnnnnnnnnnnnnnnnnnnnnnnnnnnnnnnnnnnnnnnnnnnnnnnnnnnnnnnnnnnnnnnnnnnnnnnnnnnnnnnnnnnnnnnnnnnnnnnnnnnnnnnnnnnnnnnnnnnnnnnnnnnnnnnnnnnnnnnnnnnnnnnnnnnnnnnnnnnnnnnnnnnnnnnnnnnnnnnnnnnnnnnnnnnnnnnnnnnnnnnnnnnnnnnnnnnnnnnnnnnnnnnnnnnnnnnnnnnnnnnnnnnnnnnnnnnnnnnnnnnnnnnnnnnnnnnnnnnnnnnnnnnnnnnnnnnnnnnnnnnnnnnnnnnnnnnnnnnnnnnnnnnnnnnnnnnnnnnnnnnnnnnnnnnnnnnnnnnnnnnnnnnnnnnnnnnnnnnnnnnnnnnnnnnnnnnnnnnnnnnnnnnnnnnnnnnnnnnnnnnnnnnnnnnnnnnnnnnnnnnnnnnnnnnnnnnnnnnnnnnnnnnnnnnnnnnnnnnnnnnnnngttgttccgaatatcagtaattcaaagaaagaaagcaaatcacaacgtacagggatttagcctgctggaagacacggttgttccgaatatcagtaattcaaagaaagaaagcaaatcacaac

SEQ ID NO: 2314 - DNA, 19601 bp, synthetic construct
  misc_feature 1..19601: note = Synthetic
  source 1..19601: mol_type = other DNA
aaaaaagtttcaatctggttgatctctccttttacccaggggaggtaatctgaaatccagccaataaagcgggaagcaaaattatgcagcgcattatatgtatatgattgattttctgtttgttttggtattaagtgcaccatatctgccagccaaaaaaaaagactgatcaacaggcataccttcaacagactgaataaaatacccataatcatgttcaaagcacccaattgaatgatttttacaaccttttcgagaagttttccaacccaaaggatcaaaatataaacaagcacaaaaaccaggatgtagcaaataaatggcagccattttgaatgacctgtatagggttgcaccagttccatcaacttatgggtgagtttaaggcaggctattattgctatgatgaacgcaataagagaagcgacctcaataataaagcccttgcgaaaaccggcaatcacagccagggcaagcggcaatataagtaccaggtcaatggtgttcatgattcttttaacccagcaattctttcgccagggctgaaatcacctttccatctgctttcccggctaatgctttcattgccaatggcatcaatttgccaatgttttgtgccccggcaagattattttcaacaattatccctcctattattacccgcacgtcttcctcgctcatttgcttgggaagaaacgactcaataacgctgagttcttcctgctccgcttttgcaagatcgggcctgtcttgtttgatatagatttcaagtgaatcttttcgctgctttacaagcttttgcagcagttttatttctgtatcggcatcaagttcagcatcgcccttttctgttttcgccacgattattgcagcttttattgccctgaatgcgcgcagagatgcttcatcttttgctttcatggcagttttaatgccttcatttgcagtttctgtcaggttcatgatatttaaattatttgatggtgcaaaataacaacaattcggtctctcaacattgtttcaaatgccaagtttggtaaaatatgttttaaatttgagtgattagaaatatttaatacaataataaaagatgaaagcagtctggaatggagaaaccatcgctgaaagtgataagaccattgtagtggaagggaatcattatttccctgtggataccgtaaaaaaaggaatatttaaaagaaagcgaaacccatacggtttgcccctggaaaggattggcatcttattacacaattgatgtaaacggttttgaaaataaggacgctgcctggttttatcctgatacaaaaccggcagccaaacagatcgagaattatattgccttctggaaaggtgttgaagtaacaaaatgaaagacaggcaaaactttcccggcggtgcaaaatgggaagacctggtaggctattccaggatggtcaaatctggaaatatgatatgggtgtcgggtacagtagcggaggatgacaatggagaagtcattggccttaacgatgcttacacccagacaaaattcattattcaaaaaatagagaaatttttatcaatggctggtgcatccttagaaaatgtagtacgaaccaggctttttgtgactgacatttccaggtgggaagaaatcgggaaagctcatggtgagttttttgccaacatcaagcctgccacaacgatggttgaagttaaagcgcttataggtcctgattatcttgttgagattgaaatggatgcagtgatataggggtcaggggttagtaataagaatataagaaaaacaatgcctactctctttactgatgaatgatgaatgttaactttcaatccctgtttgcagcgccgaagccaatacttgatttggtaccagtctttttcatgtcttcttttaaggaaagcataaaaagcgctgcctgtgctgcctcttcacctttattaccaaaggaaccgccagctctttcttttgcctgttccatggtatcaactgtgagtaccccataacctacaggatggtttgcccgagcctgcaactggatcaacgttaaggtaactgcttccgagagataatggaaatgtggtgtttctccttttacgatgcatccaagtgccacaaccatgtccactttttcatattcgagaagatattgcgcacccaaaggcaattcaaaagcaccgggaacttcttttacaagaatgttttcaggttccaagccagcgtttagtagtgtttcttttgcggattgaagaagcaaatccgttatttccttatgccatccggatactacaatccctgctttcttctttttagcggcttcattgagggtataagctggggtgcgctctgtgttctggctggaagacatatcaattcaattaactgatggggatgaggctaatctttgtaaccgttttctgcccaggccctggatacatatttatctatgtctattccatccctacctgttgcatatttgtctttaatctttttaaaggcctcataggctttatcatattcgcccaatttctcatagacaagaccggcttttttataaaacctaggtgtcgtaaactgattgtcgtcaaaattcgctgccttcatgtagtactttgcagcagattcataatcttttagctgtgaataagcatccccaatacctcctaatgcaagaggataaacaataaggcttttcaggtgaaagtcttcaaggttatctatcgcttcctggtatttgccttctttaagtttttccatacctatcatgtagtgggcatcctgtccggcctttgttccaccgtattcatcagccacgtcttcaaggccggttgcatatccgtcacctttcagggcaagcttaaaggaatcctgttcgtaataacgttctgccctgaacatggccttttgtgcttcagcctcacggccactgttatagtaaaaataaccgccaacggccaaaatcaaaacgccaaggccaatgcccccgtaaatgacaattttgcggtttttttcgaagaaatctgtaaaagaaaatgcaataggcctgtttgaaggcacattactgaccttttcttcgattacttcggtattttctagattttctggtgttttcatgtcgtgcttaaaaaaagaatggcaaatttagatattaattacaatttaataatctttcaggaaaggataatcctcttctttataaatatctaagtaaatttcagaaggatcaggatacgaagactgctccgcaaactgcaccgcttcttcaatttcctgctttactttatcgtttatttgagttaatttatcttcacttgcaaggccctcgctttgaatggtgtgcagcacatgatcaatgggatctttcgccttgaactcatccagttcttctcgggtgcggtatttggccgggtcactcatagaatgtcccttgtatctgtatgtttttatttctagaaaagtaggcgtgaaggcccttgcccgctcggctgcttctgaaatggcatgatggacggcctcacattccatcccgttcacctggaaggagggcatttcataagctgaaccaattttataaagatccgggacgttggtagttctttccactgcggttcccattccgtactcattgttctcgcatataaatatcacaggtagcttccaaagcatcgccagggtaaaagtttcatgaagggcaccctgtcttacagcgccatcgcccataaaacaaaggcaaatcttgcctgtcttgttatatttttcagcaaaagcgatacccgcaccaagaggtatctgcgcgccaacaataccatggccgccatagaaattatgttcttttgaaaacatgtgcatcgagccgcctttgcctcgtgaacatccggttgtcttgccaaacagctcagccatgacctccttggcaggtattcccattcccaaagcatgggcatggtccctgtaagcagttatgactttgtcacctggctggatagcggtcaacatccctgccgctatcgcttcctggccaatgtataaatgcaggaaaccacgaatagcggtgccgtacaactgtgccgatttttcttcaaaccgacgcattaaaagcatcttttcataccaatacaaataggtatcagcgctaaacccgttaatggttttagatgcaggtttcgcttgttttttatcggaaactttttccgctgtctgtgccataaaaaaaatgtaaccgcaaaattaggcaattttttaagacggaaaacccataatttagccccgaaaatgatgaagcgccttgggatgaagacaaaattgaataggtttggcatagttctgttgctattgttctgtgtttgcagcatggctttgcgatcagaaaggacaaccaagggcaatgacattgatggcgtttggcttacccaatccaaagaatccatgattgaaataagcaagacaggcggcaattatgtcggcaaaatcatctggctcaagtttccaatcagtccttatacccacaaaccaaaggttgatatcaaaaaccccgatcccaagctcagggaccgccccatcattggtcttaaccttcttcttagtttcaaatacgccaccgataccaaaaccggcgaaggcgacatatacgaccccaaatcaggcagtgtatatagttgcaaagccaccctgcaggaccccaacacactcaacatccgtggttatatcggcgcactctggatgggattggggaggactgaggtttggaagaggataaaataattacgaattaagaattaggaatcaatacattagcacattgcattcctttccatttttggattttttttcataattaccagtttatatacttgtgctgaacgtgttaagtgtcacatttgggtttacatttatgccaaatggtaaacccttcataagttttctgaatgctattagtttggtttataagtcttaaagtggtaattcgaaatttgtgatttgagcttcgcacgttagccatcttcgtcagtcttgtataagtacccctcgcgccagccaattcgtaattcctaatttttaattcctaattggccctacctacatatatagcgaactgcccaagtgggtgggtgttattgaaaaatattttttaacttatttttatccaatgagttataaagaaatatatttttgggtttgtcgtcacttttatattgcttctcgccaaaccaataaaaaagcgacccgagagtcgctttaaaagttttcactacggaataattttctgagtttcaggatttagtatatttggcaaaaaaagcccccgttaaagtcgagggcaacttgatgtttacacaacgggataacccttattgtgatttgcttcgcagcaaagataaataaaacacgcaaatgaaaaaaattcttggtttagatcttggtactacgtccatagggtgggctttagtcaatgaagctgaaactgaaaacgaactgtcctcaattataaaaattggggtaagggtaaatcctctttcaacagatgaacagaccaattttgaaaaaggaaaacctataacaataaatgctgaccgtacattaaaacgcagtgcaaggcggaatctacagaggtataagcaacggagagaaaacctgattaatgtattaaaaaaaaacggcctcattaatgaggatacaattttaactgagacagaaaaacattcgacacatactacttatgctttacgttcactggcggctaccgaagaaattaataaagaagcatttgttcgtgtcctattgatgatcaataaaaaaagaggttataaaagtagccgaaaagtaaaaaatgaagaagatggacaagcaattgacggcatgtcagttgctaaaagattatacgaagaaaacctaacacccggtcagctatgctatactttgttaaaggatggaaagaaatttatacccgatttttaccgttccgatttaaacacagaactagaaaaaatatggaattttcaaaagcagttttacccggaaatccttacctatgacttcaaaaaagaaatccaaggaaaaggtctaagagttacatctgcaatcttttggaacaaatatggtttcaatacttccgaaaacaaaggaagccgggaagaaaaaaaacaaagggcttatcaatggcgaagccaggcaattgatacacaactcaataaagaagaagttgctactgtaatctcagatgtcaatgggaatatcaataattcaagtggatacctgggcgctattggtgaccggagcaaagaactttattttaataaggaaacagttggccaatatctttataaacaattgaaagagaactttcattcacgtatgaaaaaccaggtcttttaccgacaggattatctcgacgagtttgaaataatatgggaaacccaagcgaggtttcacaaagaattgaccccaatcttaaaagaagaagtaagggacattgtaatattctatcagcgaaagttacggtctcaaaaaggattaatcagcttctgcgaatttgaaaataaaaaaatagaaattgaaaaagagggaaaaaaggtgaccaagaccattggatacaaagtggttccaaaatcatcgcctctctttcaggaattcaaaatatggcaaaacctaaatagcattttgcttagcaataaaaccaataaagaagaaaaaatcacccttgatttagaagagaaacaactgctttttgatgaactaaacataaaaggcaatcttaacaaagaaaaaatcctctctttgctgggaaatgatttcaaaacctgggaccttaattttagcaagattgaggggaaccgtacaaatcaatctttatacgaaggttacctaaagataatggaaaacgatggttatgatctaaagcaggtttttaaaataaaaagcaagaaagacgaagtagaactgaatgatttaagtatgcctgctttagaaattaaagaaattgttagttcagcacttaaaaatctatccataaacactgacatccttgagtttaatgccgaattggacggaaaggcatttgagcgacaaaattcttatcagctatggcatttgctttattcatacgaaggagatgggtcaaagtcaggcaacgataaactatgcgaactgctaaaaacaaaatttggttttgcacaagctcactccaatattttggcaaatattcctctatctgatgattatgggaatttgagcgcaaaggcaatcaggaaaatttttccgttccttaaagataacagatatgatgaggcttgcgcattggctggatacaaccattcttcttctttgacaaaagaagaaaatgatagccgcatattgaaaggaaggctggaaatattgccaaagaacagtcttcgtaacccagttgtagaaaaaatccttaatcaaatggtcaatgtaataaacgtaattattgatgacccaagccttggcaaacctgacgaaataagaattgaacttgcgagagaacttaaaaagaatgccaaagagcgggaagaaatgacaaaacaaattaatactgccacaatagaacatgacaaaatcaggcaaatcctcatgaatgaggatggtattcaaaacccaacccgaaatgacattatccggtttaaactttatcaggagctaagaaacaatgggtacaaaacactctattcaaacacctatatacaaagggaaatgctattctctaaagaatttgatatagaccacattataccccaggctttgttgtttgatgatagtttctctaataagactttgtgcgtaagacaggaaaacctggataaaagtaacaaatgcgccagtgattatattgaggcacttggcctagacaatctaaatgcgtttctgaaccgggttgaaacgctgtatgggtacaatgtaaaaagcgcaggcgaaggaataagtaaggctaaatacaaaaaacttcttatgaaagaagaagaaattggaaaggggttcatcgaacgcgatttaagggatagccaatatatagcaaagaaagccaggcaaatgctccaggaaatttgcaggaatgtaaatagcactaccggaagcgttactgaccgattgcgtgaagattggaatcttgtaaacgtgatgcaggaactcaatatggacaaatatcgcaaactgggcttgactgaaaggattgagaagaaggatggtggtacaaaggaaaggattatggactggagcaaacgcaatgatcaccgccatcatgcaatggacgcactgactgttgcatttacaaaacatagccacatacaataccttaataacctgaatgcaagaaaaatagaagacaaaaagggaaaagaaatctatggaatagaacaaaaggaaacctatatcgaaatagatgaaaacgggaatagaaaaaggaaatttaaaccaccttcaaataacttcagggttgaggcaaaagcacatctcgaaaacatctttatatcatttaaggccaagaataaagtatttactaaaaacaaaaacagatttaaaaccaaaacaggagaacacagcaaaactgaacttacgcctcgtggacaattgcacaaagaaaccgtatatggaaggataaaacaatatgtaactaaagaagagagagtaggtgtaaagtttgatgaacaaaccattttgaaagttgcatcagcaaagtaccgtattgcccttctcaaaagacttcaggaaaacacgaatgatcctaagaaagcctttacggggaaaaacagccttgcgaataacccaatatatctggatgaaacaaatcttgttagtgttccagaaaagataaaattagcttggatggaagaccagcttaccatccgcaaagaaataactccatccaatttcactgactataaagacattgaaaaagtaatagaccctattgtaagaaaattacttcagaaaaggctggaagatatgggcaatgctaaagacgccttctctaacttagatataaacccgatctggcttaattatgaaaaaggtattgcggtgaaacgagcaaatattaccggagtatcaacggctgaggcccttcaccacaaaaaagaccattttggcaaagttattcttgatgaaaatggggataaaatagcagtggattttgtaagtaccggaaataaccaccatgttgcaatatacagggatgaagcagggaacctacaagaacaacccgtttcattttacgaagccatacatagggtcaatgaaggtctaccaattattgaaaagacatttaaccaatcatttggttggtcgtttttattctcgatgaaacaaaatgaatattttgtattccctaatgacgaatttgagccaacagaatcatttttgagaaactctgaaaacaataaattaattagcccatatttgtttagggtgcaaaaaattacacctaaagattatttttttcgtcaccatttagaaaccagcgtagaagataaaaaacaattgcaaaatacagcgtataagagggccggattaaatgggattaaagggattattaaaatccgaattaatcacattggacaaatagtccatgttggcgaatattaaaaaatcatgatcaaacgcccccctatttcggaaacccggcctacctgaaaacgacctcaccccggccctctcctccaggagagggggcagtagcctgatagtttaataatgatagttaactttgacacacatatataggattgatgaaaaaagctaaatatttgaacagccccaaatcgcggatagagcggcaagtcattctctttgaggagttccttgcggaatcgtagcaaggaatgaattatttaggatgagataaaaaagacattacacatggcaacgcacgaagaaaaccttttcaataatgcttcgggaaagcagttcgagtatggcagggcgctgcggcaaaacctaaccccggcagagtttgtgctgtgggaaaaactgaggagcaggagactcggcggttttaagttcaggaggcaacaccccatagataaatacatcgctgatttctattgtcatgaggcgaggctggtagttgaagttgatgggggaatccataccataaaaatgaacaaggaatatgatatagaaagggacaatgtccttgataaactcggaattactactataaggtttactaatggggaagtgattggtgatatggtgaatgtgcttgaaaggattcttggttatttgacctcaccccggccctctcctttaggagagggggaaggagcctaacagtttaataatgatagttaacttcgacataagtataaaaatgatgagaaaagctaaatacgttaacgacctcaaatctgggatagagctgcaagtccttctcctcaaggagttccttgcggaatcgtagcaaggaatgaattatttaggatgaggtaaaaaaaaaccatgatcaaacgcaccctctatttcggaaaccctgcatacctgaaaaccaggaacgagcaaatagtagtgcaacttccggggccttccccctctcctcaaggagagggccggggtgaggtcgaaagacaagaagaaaaaacaatccctatagaagataccggagtggtgatcctcgaccatcagcaggtcaccatcagtcaagctttgttggcaaaacttatgaagaataacgtggctgttattagttgtgacgacacccatcaccctaccgggctatttctgccacttgcaaccaataccttacagagcatgaggttccgcacacagatcaatgcctcagagccacttaagaaacagctttggcagcagaccatacaggccaagatcagcaaccaggcagcgttgcttgaccaatacagcatccccaacaagaacatgcgccaatgggccaaagaggtccgcagcggcgaccccgataactacgaggcacgggcggcggcatactattggaaaaatatatttgggagcgcctcacccccgccctctcctgaaggagagggagaaagcggtgggcattttttgagggacaggttcggtgaaccacccaacaacatgctcaactatagctatgccattttgagggctataacagcgcgggcattggtgggcagcgggctattgccaacgctcggcatccaccaccgaaaccagtacaacgcttattgcctggcagatgatattatggaaccctacaggccttttgcggatgcactggtgcggggcatccttgaaaatgaaagcccgctctttacgatggatacagcccttaaaaagcaactgctaagcctgccaacgatggatgtggaaattgaaggcaaaaccagtccgctcatggtagcccttagcaccaccacggccagcctcaacgcctgtttcgagaaaaaaagaaaagaaatagcgtaccctgtcctcatttttaaatgatcaatacagcaatgatcaattatcaataatcaattgtcaataagtcagcatcagcctactggcgaagcaatttttcaacctttcaatttttcaatgtttcaattatttgcgcctcaatgaataccggattttgtgggttttagtactgttcgaccttcccaataacaataagaaggaaaacaagcaatatactaccttcaggaaaaaacttttgaaggatgggtttaccatgttccagttttcgatatacctgcggcactgcccaagccgggaaaacgctgatgtacacatcaaaagggtacgcatgaacctgccgccaacgggcaaggtgagtatattgaccattaccgataagcagttcgggatgatggagattttctatggcaaaaaatcaaaagaagcgccggaaggataccagcaattggaattgttttgactttgtccgcagaagccttggcgaaggtggaaggaattgcaaagggttataagattaacccatataaccctttacatatcctcaatcaaaaaaacgctgatgtaaaccttcgatccgggcaaaatgactcattttttttgttgcgtgaaaccgttataagcaattgataatcaaagaacaaagccctcctctgtttatatcagtcttgcaaagaacggaaattgaaagcaaatcacaaccactggcgttgcggtctttttctgttttgggtttatatcagtcttgcaaagaacggaaattgaaagcaaatcacaacgcgcattggcatgagggaaaaaccaaggatgtttatatcagtcttgcaaagaacggaaattgaaagcaaatcacaactggtcgcgtcagccaattcgtaattccctgtctgccgacaggcaggctaattcataattcccgcgcgaaagcaccatttggtgcgggtgggcgtaattttcaattgtcgtactaatgaacctcttataacgttagatgtactaatttgatttcagagtcgttgacttttgaaaagtcaatgactctgatactgacgcgcgcgctataacgttagatgtacttatatttgaatcagtaagaaaggttaaacacacttaaacaccatgaacaaaaattccaggctgttgtattggttattctgctttttgttattggctaatgtttccaaagctcagcaagtctatacactgagcatggatgatgccattgcgcttgctgaaaaacaaagtcctgatgcgcttcttgcgaaaaccaaataccggcagagctactggcggtacaggtattatcaggcagcgtatttgccggcattgagcctggctgccaatccatttaacatcacacggtcatatacccaggtaccattgtacgatggcagtatcgtttatgcgcaacaaagccttgccacttctacagttaacctatcattaacccaacagttagggcttaccggaggtgcattttcactaaattcgggtttacagcgaattgatcttttcaatatgtcttcaacatcttatctttcgacacccataaatattgcttacagtcagcctgtacttacttacaatgatctcaaatggcaaaaacgtatcgagcctctgtatttccaggaagcccgcaagcaatatgtaagtgacatggaagatgttcacattaaaactattacattgttctttgacatccttgccgcacaaagcagcatagaggaggccaaacttaacaaggcaaacagtgataccttatacaaactgggacaaggccgttacaatcttggaagaattgcagaaaatgaattgctccagcttgaattggacaacctcaacagcggcctgcaggttcagcaattttcaatagcctatagcggtgccattggaaaattaaaatcattcctgggtttggatgccaatgacagtttacatctgaaattaccaattgccccggatacactacaggtaagtatctcaatagcagcaattcaggcaaacagtaataatcccctatcagtatcattgcaacggcaagggatggaagcctcgcgggatgttgccaaagcaataggtaccaatggtgttcagggaaatgttttcgcattgtacggcttaaacggaaatgcaccaacagttagtcagtcttacacaaacccacaagaccaggaacagcttcaatttggtatttcgataccactgctggactggggcaaagcgcatggcgccatagagatggcaaaagcacaagaacaactcgccttgacaaatatcaaaaaatcaaaaactgattttgaccaggaggtaaccctggatgccgccgagtacaacctgcaaaaccagcagcttgttatcgccaccaaagccaataccgtaagccagcgaaggtactttattgcaaaggaaagatacctgcttgggaaaataggcattacagaactcaacatcgctcagacagaccgtgatgctgcccaaaaatcgtatattgacgtacttagaaattcatggatcaccttctataacctgagaaaaataaccctatacgatttcaacaaacagattcctcttgaaaagcaagtgacaggtgttttttgatccggaagtgtctaatctgtgaaattcggcgtaaatctgcgggagaattttaacggccaataaggaatttgcatattggaaccggttaattacgttctcttaaaattaagcaatgatttgttttacaaatatttgtagaaaatatatttacctaaatggttcagcccacttcggggttggtatttggcatttactattgtccactggtttcaccgatggttattcacgttcaaccctttcagggttgggaaaacaaagcatcgaacaaacactgccaactatctcatttgcaaccctgaaagggttgaatgtaattaaccgagggcgaaacccacggaagccccgcgcgacagcaaacaaccccaaccctctcctactccttctccttttatccctcctcgcattctcctgccaaaccaaaaaacatctttctaaagaacccgcccaggccatttccattgatacgctgaaaagcataaacgttactgccaccaccaagtatcaaggctttgagacccagtatttcaacttattacacaccaaactaagtgtaacccctgtctggaacctgcgtcacctgaatggaatagcaatcttaaccctgacacctcatgtctatccccaggatacccttactcttgatgccaaagattttaatatttatagcgtggaactggtgaatagaaatggcgattcattggcctctttaaattataaatacaatcgcaaaactcttagcattactccataccaaaaaacgcaatggttgcctggtgatacatttaatgttaagatcgtttacaccgcaaaacccgaagaccttattaaagacagtatcattcctaaccatgatgaacagggcctttattttgtaaatccagatggtacagattctgcggtaccacgcgaactatggagccagggcgaaacggaacataattcatgctggtttccaactattgatgcgccggaccagaaaatgacacaagagatcagcataacagtcgacacaggcctgacaacactttcaaacggtacgctggaatatacggaacaaaacggaaatggcacaaagacagaccattgggcactcgataaaccacattcggtttacctggcaatgatcgcagtcggcacatattctgaaattaaagacaaatggcgcgattcgatacccgtaaactattatgtagaacctgagtatgcgccctatgcaaaactggttttcgggcatacgccggcgatgatcgaattttattcaaagctgctgaattacgattttccgtggccaaaatacagccagatcgtcgtgcgtgatttcaccagcggggcgatggaaaatacgacagccgtaaccatgtatgaacccctgcaacacgatgaccgggcaaacctcgatgaaaccgatgaagaaataatttcacatgaactttttcatcattggttcggagaccttgtaacctgtaagagctgggccaatcttgcactgaatgagtcgtttgcacagtttgcagaaaaactctggacctcacatgaatacggaaaagaagaagccgatatagaatttaaaacagaccttgacgcataccttgctgaggcagcttataagaaggggcctatcatagaacattattattctgaccccgaagatcttttcgataaaacccgttatgaaaaaggtgctttggttttgaatatgttaaagcattatctcggcgacgaagttttctttaaagcgctgcacaactacctggttaccaatgcctacaaatgcgttgagatttctgatcttcagaaagcaatggaagaagcaagcggcaaagacctgaactggtttttcgatcaatggttcaacaaacccgggcatcctgtattggaaatcaggcagcaatatgatgctacaaacaaaaagctgtatgtctttgtaaaccaaacacaattagacgaaaagacacctgcttttaaaatcccgacagaacttgatgtctataatcatgatggacatgttgacaaacataaaatctggttaaagcatgcatcggatagttttagcttcaaaatggatgcccctcccctgcttgtaaattttgatgccgaaaaaattctgctgtgccataaaagtgatgtaaaacctaccggacaatggtactatcagtattttcataccccggaattattggacaggtacgaggctttaaaggcattgtccaaaaccccggaatcattatcaaaagattcaataattacactttgggcatcaggccttaaagaccattcatggtatattcgaaaaacggctattggcctgattgccactcaagggaaaatggttattgatacgctaataccccgaatggaacaattagcgctaacagataaaaattctattgttcgcagttcggcgcttgcatttatccaggataaagaaggtgtcatgtccaataatataagcctcaaagctttgcacgattcctcatattacgtcacgtccattgccattcacaacgtatttcttaacacgcccaatgcagattctgccatactggtgtctgaaatggctgaatttgaccactataggagtttagatgtccttgcatcagttgcggacatttatgcaagatatgctgatgccggcaaagcccttttctttaaaaatatggcggcaagaatgcaggccggttatgtgaacctgtatctgcttgattaccttaaatttcttattagaatgaacacagctgtcattcaacaaaatgaaaagtttatcctctctattggacatcttgcaaaaacagattgggaattaagttcatgtcagtattttctgaatgcacttgccgcaaatctttccgcaagatccgaaaatgaagccaaaaaaatagcggacgatttttcagacaaagcaaaacaattgaaaaagtaagctcaaaaaatcctaaaagaattagccgggtttaaaaataaattgctacatttcgctgtttatcgccgggatttttctgaaaaagctggccttaagatgtcttttcaaaaatgcttctaagattggcatatttgattggcgctgccaaccggttggtataaaataaattgaaggcctgctccttcaatttactgctttgttaaccaattatgctcacatatgaaacccctttacacaaaactttttttctctctttttattcttgtatttctgttaataggcaaagcaaatgcccaggatgcaggagttacacaattattatcccccaagaatcaatcgtgtggatcaaataatgctgttattcagataattgtgtataattatggcagctcaaccatatccaatattcccgtgaacatcagtgcaacagggacttatcccttttcattaacagatacactgaaaaaatccattacatcaagtggtcaggatactttcatattcagaacgactgtaaacagctcaggcggagggacatggcaatataaaatatggacatcattatcgggcgataaaaaccattctaatgatacactaagcggtaccattacaatcaattcattgcctgccagtccaaccggctcagctggaaacagatgtggggcagggccggtaactttcaaggccacatccccagtcaaaggatctacaatatactggtatgcagatactatttccaacacttctattgcaagcggtgattctatgaccaaaaatttgtccgcttctaccacctactatgcagcggtatcaagcgggtcagcttttgacagtttgagtacgaccttttcggggtcttcaaccaaaaacaggggtaatatgtttaatgttagggtattaaaagacataagaatagatagctttgatgtcgattttacggccaaaacaaatgatacggtttacatttcctataaatccggaacctattccggatatcagaccaatagctcggcctggacttcccttggaaagtattatgtcaaacctacttctgctttatcacctgcaagggcagttatcggaggcttgtccctaaaagcaggcagcctttacggtttttatgtttatataaaagcagcaggagtagttaccaaggcaaattttcttgctgaaaccaattccaccgacagcgcccataattctgacctgacaatttcttcaggagatgagcttgcaactatttttgcctcaaatacaagtggttatagatggaacggcaggatttattataccgggcaagggtgcttaagcccatttgccgccattacaggaaccatcaccccagtagtaaaatccttaaccctatctcaaaacaaaacatcggctggggtcttcaacctgggaacctccgccaatccagaccaggtttgcatggcagatactttgaaatatgacataagcgtacctgcaaattttttgaattctgattatggttccaagtggaaattatcattttcgataacgaccgcgaaaggttatagtaccacaaattatgcaattatatatccatcctcatctactaatgggctgatcagttttttcccaaacagcagtgatggtgacagtgtctatattcttaccgtaaatacaatcaatttggtaacaggttgcgatagctcctttatacgttacattaacatcaacccaacgatcaaaccaggattcaacgtaagtaatgtttgccttggccagctcaatacccttacctataccgcaactcctgcagggcagcttagttttatctgggcatttggggacggaaccacaatatctgatgccatcccaaattatcaataccagaccgctggcacatttaccattacccaaacggccgttaacgccggttgtcgcgcctcagtttcaaaatcagtcacaatatacaatggcccttacggatccggatttgccaaaggcacgccattcataggccagtttaatggtggcgattacccaaccccggattacgtatgtattggcgatacaaatacctatgttgtggttccaccaaaaggattaacaaactccgattatggtacaaaatgggtaatcacctcggtatccctcaaaaaattatccggttcagggcctgttagcaaagatacagcgacaacattcccatcgggcggtaaaagtggtactttcagttttcatcccagtaaaaatgctgatagcgtttttatcttgtccatgaatatcaaaacgcttccgggcaactgcgattcagtgataaccaggtatatacaggtaaatattaagccggtagtcggattttcattcataaataactgtacaggaacacctttgtcatttaaagacaccagtacagtacctttttatacgagtgtttcaaattggatatggtattttggtgatggcgatacaagtacagttcaaaacccgactcacgcctacacaaaagccggaacatatacagtaaaactcacagcttcaacaagtgaaggatgtggcaatacggttagcaaaacagtacaagaataccctcagccaatcataaagtttgggccgaaaacagaatgcaacggatctgcaacagattttttggattcaagcagtatttcaacgggtactatcaaaacctgggcatggaat

SEQ ID NO: 2315 - DNA, 19594 bp, synthetic construct
  misc_feature 1..19594: note = Synthetic
  source 1..19594: mol_type = other DNA
cggcctctactccaaaatcgccgtcggtgccacctatatgtatgagaaggatgtgcaggacaacaagagaggtgagaaggatctgtacagtgactcagacatcttgatcaacttccaggccacgttcgtcggttttgaggcaggctcagagagagtaagaggcttcgcagagcttggcgtaggtgagcagggtatcttctcagcaggtgtgcggatgaaattctaacgcttacactttttctcaccaatttttctcactaattaaaacatctcgcccacgggtctcccgtgggtgtttttttatgatgaccccatagaacgcctttcgctattcgtctttcgctattcgtctttcgttattcgcctttcgctattcgctttttgctctaccttttagcgcctttgtaggagtgcgggcctccgagcccgcatattcatcctaaaaaatgtcgggctcggaggcccgacctcctacctctggcacgatccttttcctgtctcgtgcgacaacaattgagggtgatgggcggttatgtcgcaattgaagtgtggtgtcgctcgcttttaagcaagaaatcgcaaaaaacctttgtgagccctaaaatgccccttatctttgcatcagaaacaacaaagacaggcccgcctgtcgaaatggaaataacaaaaaataaaaataacaataaaaaagatacgattatgaaaacaatggtattgacccagacaacagttgttcagttcgaagaatcgacaatgacaacaaaagtgaataatttcaagaaggctgcaaagaaattcttcaaggctgtgtacagaatccttatagtgaccagcccggtctatcctcagtacgtagagagcttgcagaggaagtcgtaaaccgcagcactcgtttcccccgacgacaccaggccccgtgccttcatatagagtttatttttcataatttaagcccggcagcagtcccacaatactgttgccgggctgtttaatgattgatcatgctttttcaagttgagcgaatgtgcaacttgaaattaatttttatgaactattgtaacgtcgaacacacattattacagaaaaaatcactaattattgcaataataaacgatgtaataaatttgcatagaagaaccccgtgggctacttttttcgttaaaagctcccttttgtttcattatctcatcaaaatgaattatctttgcaatttgggcgagtatgaaaggcttcagtttcaacattttgttgaagactgcggagttgctctactctattgagattttagaattttgatgattgatatgagaaagttgatattgattataatggcagccttttgcctcatgccatccactcctgcccagaccaacaagcacaagaagctggcggtggtgctcagtggtggtggcgccaagggaatggctcacatcggtgtgcttaaagtgcttgagcgggcgggcatcccgatcgacattgtgacaggcaccagtatgggaagtattgtaggtggtctctatgccacgggtatcagcgccagcaccctcgactctctggtgcgtgcccaggactggagctttgtgctctccgacaaggaagacctgagtcaccagaccctgaaggagcgagagaagcaaaacacctatctcatttccaagagtatcaacttcaaggggagaacactggccgatggtggtctgatagcaggtaagaacctcgatgtgcttttcaccagcctcatcggagagtataacgacagtctcgacttcaactccctcccgatccctttcgcctgtgtggccaccaatatcattgacaatacggagtatgtgttccacagcggactgctgcgccgagccatgcgcgccagtatggccatccccggagcattcgcccctgtgaggtatggagatatggtgctggtggacggtggtttgcgcaacaacttccctgtcgatatcgcacgggagatgggtgccgactacgtcatcggtgtcaccgtgcagggtgcacccaagacggccgaagacctgcactccaccacgagcattctctcccagatagtcgatgtgaactgtaagaacaaatacgaagccaaccttcagctgaccgacatacccatccgtgtcgacacccacggctatggatcggccagtttcacccccgctgccatcgacaccctcatccgccgtggtgaggaagaggccatgaagcactgggacgaaatcatcgccctgagagactccttaggcattaacctgagcgactcattagataatgtaatatctgtaccgcaggcctatcgaccccgtatgccgttgcctaataaccaccagcacaaggtgggccgtttcgtcttcgtcgacatgactgagaatgacgtgcagtttatccgcaacaagtttggtctgaaggaaggcaagagcatcgatgacaaccgtgccgacctcatcaccacctctatccgccgtgacctgttctacaaacaggcatcgtttcattttgacaagaacacctcgtcgggcaccaacgaagagacggccgtgttcatcgctggcgtgaagaggaccaatgaagtcaatctgggcatccgttttgacaccgaggagaaggtgtcgctcatcatgaacgccgacttccccctgcgcacggagatgcctgtcgacctggacatgacggtgcgtctgggcaagcgcaacatggggcgtgcagacctgacgttccatcctcagagtcgtttccgccacaccctgtcatatgctttccagcgcaatgacatcgacatcttttccaaaggcgaaaagtcctacaacctgacctactcacagcataccgcctccttcacattgctcaacttcgacattcgcaatttcaacttcgtcattggtccgcagtgggactattaccactatagttcgttgttgatagaccagacgaaggacatggagttcgagccgatgagacatgacaacttcatcagttaccaggcacaggtcaactataacggtgaggaccactggaccttccccacacgtggcgcacggttttttgccaagtttgcctattatactgacaacttcgtcgacttggacgacaagatcggcccgagagagttgacagccatgtggcgtatgtcgttcaaaatcaatcgctttttgtcggtgcagccgttgctctacggcagaattatggatgccgatgcggtgccctatatcctgcacaatacggtcggtggcgattggtttggccactatttcatccatcagatgcctttcccaggtgtgaaacatgtggagatcacgggcaacaagtttttcgccgctcaggggcaaatccaggccaatgtgacccagaacaacatcatccagctgcgtttcgctgcggcacagcaggccgacgagttcaagcagctgatgaaaagtcgcaccatgctgggtgcgacgctcggctatcactacaacaccttgttcggaccggtgggtgccacgttgggttatagcaataaaagcaagaaattttatgcgtttctcaatcttggtttcgtattttgaaatagtatagatcaaccatcatgaagataaaaactgactatctacaacattgtcttgccgaccactctgcggaggtgatggctggcaaaggcaagaatatcatccccccgccagaacgtgagccgctctggcgtgcctatttagaaaaattcaaagaccctctgattattgtgctgcttgtggtctttgtcttttcgatgggcgtctcctgttacgagacgtttgttttgggcaaaggccatgcggtactcatggaaccgatgggtgtgctggtggccctgctgcttgccacgggcgtgggcttcatcttcgaagtgaaggcggagcgggagttcgaggtgctcaacacggtgaagaacctccgtccggtgaaagtgtaccgacgggccgatgacggtcaagtgcgggtgtgccaggtggagaaacaagatgtggtggtgggcgactacgtgtttttggagagtggcgacgagatccctgccgacggcaccctgtgtaagagcatcaccctgacgattgacgagagcaatttcaccggcgagcctttcgctcataagacgaccgatgtggcatcggccaagtcagacaccacctatcctgtcaatttcctgctccgtggcagtactgtcattgagggaaatgccgtgatgcgtgtcacagccatcggtcttgacacagaggagggccgtggcgtgaagcgcacgcaggaaggttcggatgtccaaacccctctcaatcagcagctcgaccacttaggccgtctcatctccaaggtgagtttcgtcatcgctgcgttgatagtggtgggccgtatggtctactatttcttcttcgacggcgacccctccaatcatctcgatgtggtgcaagtgatagagtttgcccttgcttctgtcatgctggcagtcacactcatcgtggtggcggtgcctgagggactgcccatgagcatcacggtaagcttggcactcagtatgcgtaagatgctcaaggagaacaacttggtgcgcaagctccatgcatgcgagacgatgggagccgccaccgtgatctgcacagacaagactggcacgctgacacagaacaagatgactgtggtggacgcgtgtctcggtgaggactgtgaggcacgtgtcatcgaagacattgcctataactccaccgcccagttgtcttacgatgataaccaacggctccgcaccttgggcaaccccaccgagggcgctctgctgatgtggctgaaagagacccatgatatcgactaccgaccgatgcgtgcacagatgcacatcgtggagcaggtgcctttctccacggagcgtaaatacatgtcgaccaccgtggcgggcgccgatgagcgccatcaggtgcgctatgtgaagggtgctcctgaggtggtgatggcgatgtgtgatgagataggcggtggccgcagtgaggaagactatcaaaagatgctctccgactatcaaagccgtgccatgcgcacgttgggctttgcctgtcaggaggtggccgacggtcaggctggtgcgatgcgtttccttggtgtggtgggtatcgctgaccctgtgcgcgaagatgtgcgtgaggctattgagacctgtacccatcgtgccggtgtgcgggtcatcatcgtcacgggcgacactcccggcaccgcgatggagataggtcgtcaggtgggcttggtgtctgccggtgatggcacgattgtgaccactggtcctgcctttgccgcccttagcgacgaggaggcgctgcggctggtcgccgaccgtcgtctgaagattgtctcccgcgcacgtcccgatgacaaagcccgtttggtgacgctcctgcaacgtctgggcgaggtggtggcggtgaccggcgacggcaccaacgacgctcctgcgctgagcaaggcacaggtgggtctgtcgatgggcgacggcacggctcgcgccaaggaggcgagcgacatcaccatcatcgacaactccttctcgagcatcaacaaggccatcatgtggggccggtcgctctatctcaacatccagcgtttcatcctctatcagatgaccatcaatgtgtgtgcctgtctcatcgtgctctatggcacctttaccggtctcgactcccccttgacggtgacgcagatgctgtgggtcaacctcatcatggacacttttgccgccggggccctctcgtcgcttcccgccgaccatcgtgtgctcaacagtaagccgcgtcctccgcgcagtcatatcatcgaccggcggatgggctggcataccttatgggtgtcgatgatcttctttgtcctgctgttgggcttgtggcaacttctctggcatggcaatgccagttcggtggccgacgttttcagtagtgagcacttgcgcgatttggccaacggctttttcagtcacaaaaataaatctcatctctctggttatgagaggggcgtcttctttaccacgtttgtgctgatgcagttttggaacctgttcaacgcccgttatttccgcacaggccgcagcctcatgcgcgacttggtcggtgcggcgcatggtcgtcggcgtctctccgatatcttcagccgtgggttcctgttggtcgcagtggtcatcttgcttggtcaggtggctatcgtcaccttcgccggtggcatgttcaatgtcgagccccttcatgtcactgactggctttggctcctgctgtgcaccagtcctatactgatagtgggcgaggttattagaaacctcacccaccatcgtcgtatcacaagaccgtctgtcacttagtcggtcatcacattctctttctggatattcttgcagttgtggaactctgagggattctcagcgctgatgctgatattcttcagatagatattctcaatgggcttttctggcagtccgttgaagaagagggcgcggttggcgttgcggcacaccacgttctcgatatggatgtcacgaaactcgggcgtggtctcgtccaccggctgcatgtcggtgttgttggccatgtcgccgtcgcgctgcatctcgatcaccgacttgccgccatagtagagattgaagatgatggcgtcggcctggatgtcaaacatagagatgttgcggatgaagatgttgtcgacaaggccgcctctgcctcggcaactcttgaagcgcagacccacatcggtgccgaggaactggcagttttgcaccaggatgttgtgcacaccaccgctcatctcgctgcccacgacaaatccgccgtgaccctggaagacggtgcagccgtctacgaccacattttggcagggcatggcacgtctgcgtccgtcggcgtcttttccactcttgatacagatgccgtcgtcaccggcgtcgaaggtgctgttgacgatgagtgcgtttttgcatgactccaggtccagtccgtcgccgttttgtgcataggccgggttgcgagccagtacgttgtcaatgatgacattctcgcacatgagcggatggatgttccaggcgggcgagttttggaagataacgtctttgagcagcacatttttgcatcctacgaagctgacgagcacggggcgcaggaatcgtctgatagagagccagtcttcctccgagcgcacgttctgtggcacgttcatgtgtgccagcgagtcgcctttgaggtatccagccgagggataccacaggtcatcgcgcttgaacacaccgccctgcgaggtgatgcgtttccactgtccgtcggtcactttgttctttttgagggggcgccagtagacgccgttgccgtcgatggcaccttgtccggtgacggcgatgttggtggcgttgaaggccgacaggggcgactggcatcggcgggtgtccagaccctcaaaggaggtcttgatgatagggtagaggttttcgtcgccagagaagaggatgacggcacctttctccagatgcaggttgatgttgcttttgagcacgatggggccggtgaaccacacaccctgtggcacgatgagtttgccgccgcctttggcgctgagggcatcgatggctttgacgaaggcgtcggtgcagagggatgacccgtcgcccttggctccgaagtccgtgagtttgacactgttgttggggaagacaggcgctttcacttccggcatcttgaagggcaggttgtctgtgtatttcttgtaggggttggtggtctgcgcactcatggtcatgcatacgagggccagacagatggtgatgagaatgcttttggttttcattttagttgatgactatgtttttaagtagaatgaatattaattaggggtcagtaattagtaattaggagttcgtaattagtacttaggggccagtaattaggagttcgtaattagtacttaggggtttgtaattgtgcaaagatacattaaatttcgaaataatcatttgatttcgtttaaaaatcgttcttcctgccgtatttttgtcatgggtataggctttgattttgtttcctattcgtcgcttagttacttttgtttggcatctactgatgattatatccacttgttatgcaactctctcatacacgattatactcatctttttttcgatattttttggtatttacgtaaaaacaagttacatttgtccctgcataccacaatatactgaaagttgtacactgaacaaaaataaaagaatcctccgaataacgaaggactctcttaaatgttttcacaacggaataatccttattgtgaattgctttaaattagtgttgcaaaattatcaaataaatttcacacgcacaaattttctattgtttttctgaacaaataacacaaaaaatatcatgaaaagaattattggattagaccttggagtcagtagctgcggatgggcatacgtcaaagaagccgaaaacgaaaatgaaaaatcagaaatactgcgaataggagtaagagtgaatcctttgactgtagatgagcagagtaatttcgagaaaggtaaaagcatcacgactaatgcagaacgtcagatgaagcatagtgctcgtatcaacctacagcggtacaagttgcggcgtgaacaactcattgcttatttgaccaaggcaggtttcatcaataacgaaaccatcttttgtgaacatggaaataggacgactttcgaaacctatcgtcttcgtgccaaggcagcaagcgaagaaatcagtcttcccgaattggcgcgtgttcttctcatgattaataagaaacgtggttataagagcaatcgaaagacaaacggttctgaagaaggtgctttaattgacggtatggaagttgccaaatatctatatgaaaacgatattaccccaggacattattcttacgaactgctgaagcagggaaaaaaatatcttcctgacttttatcagtctgacatcaaggctgaattggataagatttgggattttcagaaatcgttctatcccgacatattgagcgacgatttcaagcaagtacttgcaggaaagagtaaaaccaattcgtcaaaaatcttccttgcacgctattccatttatacagcacaaaacaaagtaaaggacaagcgcatgcaagctatgaaatggcgttctgatgctttggcaagaaagctcaatatagaacagcttgcctacgtcatttgcgaacttaacggactcatcaacaattccagcgattatcttggaaaaatcagcgatcgaagtaaagagctgtattttcaaaacctgacagtgggtcaataccaaatgaaaatgttggacgaaaatcccaatgtgagtctgaaaaacatggttttctatcgccaagactatcttgatgagtttgaacgaatttgggagacacaggctcggttccatcccgaactgaatagagagcgtaagaaggagataggcaacatgattatcttctatcaacgtcctctgaaaagcaagaaaagcctcatcggcatttgcgagttggagggcaagaagatagagattgaagtgaaagacaaaaagaaaactattacagtgggcagcaaggtatgtccaaaatcctcacctctctttcaagagtttagaatttggcagcgtctcaatgacatcaaactcatacacctgataactcgccaagaatactgcttgagtcaagaccaaaaagaattgttggcaaaagaacttgaatacaaagccaagatgaacaaacagcagattctgaagtgtctgtcccttaatcataaagagtatgacatgaatttcaaggaagtggatggtaacaccactcaggctgtattgttcgatgcttacaggaaaatcattgaaatgtctggccatggagaacgtgatttctctaagatgagtgccaccgatattagctcactcgtcaaaagtgtttttggcgctttaggctttaacactaaattactccattttgatgctcaagcagcagacatctcacaggattccatgtaccagttgtggcatctcctttattcctacgaaagcgacaattccgctatgggtaatgaagcactaatacataaaatccaggaactttttcatttcgattctgatatttatgcaaaaatacttgctggcatttcctttaagtccgattacggaagtttaagtgctaaagccattaagaaaattctccctttcatgaaagagggtatcgactattcaacagcctgcgtttatgctggctataatcattccaagcgctctctctctaaagaagaactggataataaggaactgaaagaccgtctagacttacttcccaaaaatagcctgcgcaaccctgtcgtggagaagattcttaaccaaatggttaatgttatcaactctcttatagatacctacggcaaacccgatgaaatacgcattgagttggctcgcgaactgaagaaaagtgctaaagaacgcgaggccatgacagatgccatcaacatggctaatcgtgaaaatgaagaatacaaaaagattcttgaaaaagaattcggcatagcacatgtcagcaggaaagacattctccgctacaaactctacctagaactgaaagacaactttttccatacactctattctgatacctacattccacgtgaagaattattcagccacaattttgagattgagcacattatcccacaagcaatccttttcgacgattccttctccaacaagacccttgaaagtaaaagtattaatactgagaaaagcaattctacagcctatgactatgtaaagggaaaatatggcgaagaaggtgcaaaaacctacgagaagcgagttgaggcattattcaagaatggaacaatcagtaagacgaagatgaccaaactcttgatgacttcaaacgacattccaactgacttcatcaatcgagatttacgcgattctcagtacattgcaaaaaaggctagagagattctcgaagagatagtacgtgtcgtcgtacctacaacgggaagcatcaccgaccgtctacgtgatgattggcaactagtagatgtgatgagagaactcaattgggacaaatatgacaaactcggtctcaccgaaacctacgaggacaaagatgggaatatcatacgcagaatcaagaattggaccaagcgaaacgaccatcgtcatcatgccatggatgcactcaccattgcattcaccaagccttctttcatccaatatctgaacaatctgaatgcccgtagcgatcgttcgcatagcatttatggcatagagcagaaagaactctatcgagataagcataacaagttgcgttttaacccacctattcctttaaacgaattccgttcagaggcaaaacgtcatcttcaaaacatactcgtctccatcaaggcgaaaaataaggtagttacacgcaacgtaaacaagtcgaaatgcaagcaaggcttcaacactaaagtacaactcacacctcggggacaacttcacaacgaaatgatttatggaagacagcagagatatgtcacccatgaagaaaaggttggcgcatcgttctctgccgacaaaatagcgaccgttgccaacaaaaaacaacgagaagcacttcagttacgactgcaagcatacgataacgatgccaagaaagcattcactggtaaaaacgcactcgacaagaatccagtttggctcaacgaagaccatacagcctccgtacctctgagggtgaagtgcgtgacaacagaaaccatctacaccatccgcaagcctatcacaagtaacgattttgatgttaacaaggtagtagatacccgcatcaaacaaattctacaacaaagaatcgacgaatacaatggtgatgcaaataaggctttcagtaatcttgacgaaaacccaatttggctcaatcaagagaaaggcatcacaatcaaacgtgttgctataaatgcaggattgagaaatcctgaacctatacacgaaaagaaggacaagcagggtaaaaatattcctgttgactatgttcaaacaagcaacaaccaccatgttgccatcttcatcgatgaacaaggacatctacaagagcacattgtttcattctacgaagccactagcagagccatccaggaacttccaatcattgaaaaagattaccatacagaattcggatggaaattcctctttactttaaaacaaaacgaatactttgtttttcctgacatcgaaaatggattcaatcctaaagaaattgatttgatgaatgtagaaaattatgccattattagtcctcatctttttagagtgcaaaatttatctacaagagattatgtttttagacatcatcttgaaacaacggtcaataaaaataatattctaaaagaaatcacatggaaacgaattgtgtctttagacaagcttgcaaacatcgtaaaagtccgcataaatcacattggacaaatcgttgcagttggagaatactaaattatgattaagaaaacattatatttcggcagtccttcctacctcagcctacgaaatagccagttggtttatcgagttctccatttacatccgtcattgtgcaagcagtgaaaatgcagaggtacacttaaaaagagttaaatcttttcttccagaattcgggaaggtcggtttgctaactataactgacaaacaatttggcaatatccagcttttctatggcaaaaagccagagaaaacaagagcaccaggtgttcaattagaacttttttagatacaaaaaatcccacattacggtgggttttttgtatcacaaacctttcttttttattttctaatcatgcatataatgcattgaatttcagaataatattaagattcaggttgtttatgatatgcaaagatactaattttaaagcaattcacaactctaccacctgctgcaatggttctgctacagttgtttatgatatgcaaagatactaattttaaagcaattcacaacaagtctgatatcggtttgttcctcaaaaagttgtttatgatatgcaaagatactaattttaaagcaattcacaacacgacgacgcatgggcaaatgtgatgccaggttgtttatgatatgcaaagatactaattttaaagcaattcacaacgggcacttgcacggtgtcggtgtggctcttgttgtttatgatatgcaaagatactaattttaaagcaattcacaactggaagacgatcttgtatccggccttctcgttgtttatgatatgcaaagatactaattttaaagcaattcacaacacggccacaggctgcgcatgacggagacgggttgtttatgatatgcaaagatactaattttaaagcaattcacaacagcgtgtagcagaaccattgcagcaggtgggttgtttatgatatgcaaagatactaatttgaaagcaattcacaacactaagctcttttatctttcttgatgacaatcgagtcgggaaaggatgcttcattttctgactactgggcgcacgcttagaccgctgaagcggaggtagtagcctatggtcgcatagccgggatagaagtacaggtagtaggtgaggttcgagttcaaggggctctgcgtggatgtccagtagcagccgcacaagtcggcaccaaaaaggttggagtcgtagtgacatcccgatgcaggcaggaaaatgctactgccgttggttccggtgaagaatctcccgtgaacaccgtttaaggtggtccatgtagaagtgcagttgtctagcaactcattgagttgatcgtaggatggcatcacccatgagccgccccatttcacgttggcaacgtcatattccgtgccagcgatgtcgctgcctagatggtggcaggtttgttccgaaccatcgcaatggatgtaggtgttccaactgtaggtggtattttcttcagtctccccccaagcgtagtagccgccaaaatcttcgggcttggttgccccaacgttgcagcatgcccacttggttcctgacggcaggccgaggtcaatggcatgtgggtgtttgtcatcgggacaagatagtttcccaatgttttgttcggtttcttcatgggtattctcatcgtcatcatcaccacaagaagcgagacccaaccccatcactattgctatgcacagagccagcaaactccataaatatttcttatttttcattttccttgttgtcgattaagccattcttttctataggttaataaaaatcaatcaaaaacttcgtcttcttgatttaaacggttttagcctatccaatcagttgtatttcattcagataaaagaaagcctcaggatgtgtcttttttagtttgttgagtttggtgggcatagggtgttgaagagtctgtgatgctaacgtacctatatcgtttggagtatagtgtcgtatcccgttaattcctttctccaaaagtcgactgagataagccactttggcagcattgatgatggcagaatccaaggtgtacttctcgctgtgaatgaaattgccaatacgactaataccatcttgcaagagtttgtattcctcaggattcaccaaaccgcgcatacatatggtgatggccgtctggtagatgtcatcaagcacttgttgaatgtcatctgatggcaggttgcgatattgtagttccaccttggcaaacttcaggaaggtctggcgggtaacagagatgttttcggtgatgtcaaacagcgaggctacatcaaagagttgcttgataatctccatcgtacatttcttctggcccttgaagaatgggatgcccgtcgtgtgcggagcgaaagccgtcagtttgtcgcccaacaaatcctcatggctcggcaaactgaccgtgacgagaggttcgtctatcatcagcaacggactttgtatgggtagagacacaatctgggaatagtgcgtttcctcgaagagcacgtcaagcagtatcttgtcctgtccacccttacctggatagctcacttcgtagtagaatttggcgtgttgctttgggacttcagttcttgatatgcgctctacgagttccactttgccaaagccgtattcttctgcatactggctgagatattcctctatgacggtttctggaggacagatgatatcaatgtctattgacaatcgtttgctggtgttcaggtgaagcattagcgaactgccgcccttgaagatgaaaggacagccggaacgagccagtgcttcaagcagcgaaaaggcacggatggtcttttcaaccaatgctatgtcgcggacacccatttggcgggcggcctcggttatccactcaaggcttctactcttgggattgatcatggtctatcgtgtatatgatatgttcaactttctctttcctgttacggcgagaggcatatctaagtagtttgcgcatgttgacatgattcctctcacgcgcatactcatatatattgtatatctcggaaccgctggcaaatagcagttcgttgtcgccaatggaatccacaaggattttctctatacggggaacctgacaaccgtccacgatggtcagcggcgactgacctatcagttggcgcaccacgatggcatcagtacctgtcagataacggtcacagtcaataggtgaaggcgacaggaggatgtttctgtcaagtttcatctcctgcaaagcatggaataccgtctccataccgtccttctccacatccactaaaacatagccgatgtctggcacatggagcatgaacgaggcaagcacccgtgggctccagatacacacatcaaggagcggaaacttctgctttagattcaaatagatgtccttctccatcactgatggctgatatacgaattccggcagactgtcatgagccaatgcatagactccgcgcccaaccctatgaagtgagcctgatgcaagcatccggttaatctggagggtaattgcactggccttgatgcccgtctgctggcgggcaacttcatgcagcaggtttttccttaggaaagttcctccttgtgccactgcgtagttcaatataacttccgttgctgtcatatcagtgtttatcagtgcaaaagtatatcttttttgtcaaatacaaaaatattttgccaagaaagatataaattggctgttttttccataatgatgggcgtattctgactaaatccaacatcacagaatgattatctctatgtcaaaccatagattttggtacataaagtcttttcaccccaccattttagagccatactgggtagttaaacaatcttaaccaaatcttaaacattgttgaccctcgaccgcttcacaattgtcaaaaaaattaacaagacgacaacaaagaatccattatcgggtaataaaaagttatacttcgtatgaaaacaggctgcacctcgacaatgaaaaaagccttttttcattgtactcggtttgcactgtttttgtaccgtttaaaatggagcatttttaataggcattgactatcagagacttacataattacaaaggagttccatatgaaatggtcttggatttctcgagaatgatattggtgtcgcggagatttcgggaatgcttttttcgaaaataaagattattgagcccctgacgatcgaaaccttccgcccttcatacttgagcatggtcgtatagaggacaggaaatgtctggcttggacaggttcaccatgctcggaaaatcagaatccgaaaaaggaagtaatggaaaagcggggaatacaacttcaaatgttaccacaagaactgcttcatgtcgacatggacgcgcgggtggacataagagacggccaaatgaaagggataaatgaaaaagccctggtgttcactgtctttcgttatggcttccctgatacatcctttttgttaataactacacaagaattgttaataaggattaaggaaattgcaagttactacaaattgtagttactttgctgcagatttttagaaacgaagaaaacgaaaagattatgaagaaactgaccgacaaggaactgacgattatggaagtgctatgggaacatggtgagcagtccatccgcggtctcatcagcctcctccctgacgctgccgcccacttcaatacgatagccacctacgtacgtcggctggagatgcacggcatgataacgcataaggaactaagtcccaaattctatttgtatgatgcagctattacacgcgaacaatatataaatgccattcaaaaggagaatgttgttaagtttttcggcggttcgtatatgagtttcatatcggaattggtgaagaagcacgacgtgagcgttgacgaactgaaggaattgatacggatggtagaggaggagtgatatggggagttttgtagtatatattcttgagtgggcgctgtgcctttcggccttcctgctgttgtacaagatgtgctttagtggcagtacgttccatcgcttcaaccgtttcttcctgttgggtagtgtggtggtttctgccttgctgcctcttgcccacattactgccagcgagcagatggaacccatcgctgaggtttgccgactgaacacggaacagtttgagactgcacaaacgcttgtgacggaagtacgtgagcaaccgacagtaggacaacgtttttttgtctttttgacgctcgcctacgttatttacatggcgattcaagtaacaagctggctgaggtcggtcgtgaagatgctactcttcctgcgaggaaagcgtataaggagagtgggccactggatacggctggtggttcataacgaagagtatggcccattcagttggatgaactatattgtcatctcggacaaagaacaaggctttggccgtcgcgccagcatgctccatgaactgtcgcacatcaagctactgcatcctctcgacctggtgttcatcctgctgtgtacgctggtcaaccccgtgtgctggcttgtcatgaaggagataaaggtggttcacgaatacgaggctgatgatgaagtgatcaatcattatcacatccgtagccgtgactatcagcgattattagtcattcggacagttggggcggaggcctacgcgctggcctgttcgtttaatcttaacattaaaaaacgaattatcatgatgaagaagaaacagtcaacgtggtggcgcttgacgtggatggccgtcaccctcccgctcgtaggtgttgcgcttacggcattctcgaaacctaaagaagccttgaaggaggtggtggatagtagtgtcagaatcatcgaacagcccatcgctgaagcgctcagtcctgatgttgaagaagcagaagcagttgaattgcctgctccagcacctgtcaaggagatggaagccgttaaagcggtgaagccaggcgatacgattacaggcactgtgaaggcaaagaacggacagccgctccagaatgccaacctcgttgagatagacaagatagggcgtatcgtgaccgtagccgtcaccgacaagaacggccactataccatgaaggtggtgaatcccagcaacaagattcgctgctcacatgtaggatacaatatgcagtcgttcgacatcagtagccataagatagacatgacgatggaggagggtacgcagtttatgaatgtaaaagttgtgggacgtatcgacagcattgatagcagcagttggcgctacaaagaccgggataattccaacggagatgacggggcgttcaacattatggaacaggacccgaccttccctggcggcaaggctgaaatcatgaaatatctgagcgctcatcttcgctatcctgctgttgcccgggagatgcaggcggaggccgaagtcctggtgcggtttacggttgataagaccgggttcgtgcgctcacccatagtcgtagagacaaactcccaaacgccgctcgtcaccgctgagacggctaaggccgccaaggaaggcgatgaagaggccatagaagtcaccaagaactattatgacgccgtagaagccttgaaggaggaagccatccacgtggtgcgcaacatgccgcgatgggagccaggccgacagaacggcaaacgcatagagacctcgttcacgttgcccgtcagtttcaagttggacaagccttaacgctggctatttttctggtatcgtcagggatttttcatttatgtctttcatttaagcccctaggcgtttttatctgcatggggagtgtaaagtgggaatcaaggggacctgtccctttgattccccttgattctattgtcatagatttaataaagcagaccaaaaagccatagcggaatcttcttgccaagaccaatatcgataccatcgcttacgatatatccatcttcaacactctttatctgtttgaatcccttgctctttcctcccacttcgaagagccatttgccatccactaataaatcgccttggttaggcatcgagagtttgtgaccaacgcccacctgtgaagcgaaataggtctcacgcaccgttcctgcttcagcatgtggagtcagacagtgcatcagattggtgttataaaacaaaaccttttcaggcttcgtcagc

SEQ ID NO: 2316 - DNA, 19539 bp, synthetic construct
  misc_feature 1..19539: note = Synthetic
  source 1..19539: mol_type = other DNA
cattctgcgtaatggccacgcgctgcaggtcccacttcttgtcaaacggaccggcaatagcccagtcgtgcggtatgcgcacctgctgccaagcctgtttgtcgcgtgaaaactgccatccatcgcttagcgtaacctcctgtcgctgctgagccattgttgtcagcggcagcagaactcccaaaatcatcgttttaagatttcgtctcatagtagtttttcattaacagcgcgacaaaggtacaaaaagatattgataccaccaacgattagggctgcaaaagtaatattttttttgcaacccagttgcaaaaaatcgacattcataggcatttgcaaccctgttgcagaagttttgtagtacttttgcactcagaaaaaaaaataaaaacagaaaatatgacacatcaacatcatgatgcgtgctgcgagcacgatcatcacaagtgctgcgagcacgaacatcaccacgaacacagccacgagcaccaccatgagcacggcggaggcaagcagctgacagtcattgtgttaaccatcatactacttgttctggcagtagtcatcgagcacaactttacgctgccgacgtggcagctgttactcgtctacttagtgccttatctgctcattggccacgacacgctgaaagaagctgccgagggtattgccagcggcaacgccttcaacgagcacctgctcatgtcaatagccacgctgggagcactggccattggttttctgccaggtgccgagacagagtttcccgaggccgtcttcgtcatgcttttcttccagataggtgaactcttcgagggctatgccgaaggaaagagtcgtacaagcatcagccacctgatgaatatccgccccgacgtggcccatgtgctgagtagcacagccgacctggcggaaacgacgggcgacgacagcaaagacgtgaatcctgaggaggtagccataggttctactatcctcgtgcgtcctggcgagcgcattcccttggatggcgttgtcttgcgcggacagtcggccctcaacacggttgctctgacgggcgaatcgctgccacgcgacgtggctgttgacgacgaggtgacatcgggatgtgtcaatctgtcgggtgtactctacattcgcaccaccaagagttttggcgacagcaccgtatcaaagattatcgacctcgtagaacacgcagcagagagcaagtcgaagagtgagacattcatcacccgctttgcccgcatctacacgcccatcgtcgtcgcagcagccattctgctggctgtcgttccgccggtagtgtcactcctcgcctaccaaatgccgtttgcccagaccttctctgtctggctctaccgcgctctcacatttctggtagtcagctgtccctgcgccttggtcatcagcattccgctgaccttcttcggcggcattggcggagcctcgcgtcgcggcatcctcatcaagggttccacctatatggatgtactggccaaggtcgacacggtggtcttcgacaagacgggcacgctgacccgtggacagtttgccgtaactgccgtacactccggcgacgatgctgagcatgaaggcggccacacaacagccgatgcggaacaccggctgctccacctggcagcccacgtagagcacttctctacccaccccattggtgctgccttgcgcgatgctttccccgacgaggctaccgatggttgccaggtgagcgacgtagaagagatagccggtcagggcattcgtgcacgagtgggcaacgacatcgtctgtgtgggcaatacgaagatgatggaggccattggtgccaagtggatcgactgcacccatgtgggtaccattatccatgtagctattaataatgagtatgctggtcatatcgtcatcaacgaccaggtgaaagacgacagcgcagcagccgtcagccgactgaaagcgctgggcatcagccgtaccgtgatgctaaccggcgacagagagaatgtggcagcggacgtggcgcgccagctgcagttgacggcctaccacgcagaactgatgcctgccgacaaggtgggatatatggatcagttgcgcacagaaggcgacacgtcgaccatcgcctttgtgggcgacggcatcaacgatgcaccggtgctggcgcgagccgatgttggtattgccatgggaggactgggtagcgatgctgccatcgaggctgccgacgtggtgctgatggacgaccacccgtcaaagatagccaccgccatcagcatagcacgcaggacgatagccatagcccaccagaatgtctgctttgccattggcatcaaagctgccgtactgctcatggctgccgtgggattaagtacgatgtggatggccgtctttgccgatgtaggtgtgacggtgatagccgtgctcaacgcgatgcgaacgctgcgagtccctggcgaagaaagttgagataggcttcgacatcctcgtcataagctctgctacccgtgagtggttgaccgttgccgtcaacggccacatagaaaggttgtgcattggcgtggaaacggcggctctgcagatagctccacttggcgccgacggttcgcagggtatgggtgccacgctcgtcggtcacctcaacgggttctgccagcggcgtcttgtcgtcgacaaagagtgagacgaggatataatctttggtcagcaggtcggccacgcgcgggtctgtccatacggcagcctccatcttccgacagttgacacagccaaaacccgtaaagtctatcaacaccggtttaccctcggcacgtgctgcagcaagtccctgctcatagtcggtaaaacgggcttcgacgaccttgctgttgaggttgaaatcctgcgtattcataggtggtgcaaaggcactgacagccttacacggagcgccccacagacctggcagcatgtagacggcaaaggccagcgacacgagtccgcccatgatgcacactacgggcatggagcgcggcacagaaccgtcagcctcgtcgctctggaacttgagccatccacagagataggctcccagcagggcgaagatgacaatccacaacgagaggaacacctcgcggtcaaggatatgccaaccgtaggccaggtcggccaccgacaggaacttcagcgagaaagccagttcgatgaagcccagcgtaaccttcagcatgttcatccacgctcccgacttaggtgtctgcttaagccacgagggaaacagggcgaagagtgtgaagggcagtgccagggccacggcaaagcccagcatgcccagggcgggagccaaccagttgccgctggtagcggtctctacgagcagcagtccgatgatgggtgctgtacaggagaacgacaccaagaccaaggtgaaggccatgaggaagatgctgatgagtccggtggttgccgatgcctttgtgtcgacggcattcgcccacccttccggcagtctgatttcaaaccagccaaagaacgacagggcaaagaccacaagcaagaggaagagcgcgacattgaagacggcattggtagacatggcattcagggtgtcgctgccaaagagtgccgttaccaacagtcccaatcccagatagatgacaatgatgctggcgccgtaggtcagggcgtcgcgaatgcctttccgtcggtctgtcttggcacgcttcaggaagaagctgacggtcatggggatgatgggccagatgcagggcatcagcacggccagcagaccacccacgaagcccatcagcaggatatagagaagggaagcctcccccatcccctccaaagggaggggagttacggtagcagaatctactatggcagaatccacagcagtagtatcttcagtgggaatctctatgagtgctacggtatctgcagtaacctccttcgtttcctctttcttcacaagcgggtcaggttgcttacctttttctgcggcttcaatagcctctccctttagggggaggttggaggaggctttaaacgccacctccgtcggcggcatgcacatctcgtcgttgcaggcgccatactccagatagcagtcgatgctgtacttctgctgcgtaaaacggacacgctgcacgaactgggctgtcttctcaaagaacaacacctccatgtcgaacagcttgtcatattgcttgatgacatggccacgcggcttcaacttgccgacagtctccacgccctccatctttaccgcattgaacgtggcagaaatggggccgccattgcctaaatcggtggaatagacgtgccagccctcgtcaatagtcgcactaaaaacgatctcgccctcgtctcccttcagcatgttcagctgcgttgagaagtggacgggatcaaccatctgtccctgtacagtcaatactatcagccccagcaggaggcttgccatcagtcttttcattttttctttttggttggtaaacagctgcaaaggtacgaataagtgagaacaattcaaaacaaaagcagacttttgttatgaattgtcgagcgaaagttctttcgacgcagtcaaaggtacgaataagtgagaacatgacaaaggaatgctcaaataaatttggcatttcgctcacttattcgtacctttgcaaacgaaatggaaatcaagaagacaccacaagctgatatggagcagcgcaggactatgggattcctcctgggactcatccttgtgctggcggtgttctatgtggcgctggagtggaactcagcagaaacagcagccgacggcatagaccccattgacttgtcggacctgatgcacgagacggaactggtccccatgtcgaaccttgaaaccattgagcaactggaagagaagcagcccaacgaccagggcgagaaaatcaatatcgtcgacgatgatgtcgaagtagagcccatcgaagaggatgccggcaacgacgacgagcaactgctcaaggaactggaggaagagcaggacgacaaagcgctggctccgctgacggtagacccgcagaatccgctgaacttccatgtggtagaggacctgccgcaatatccgggtggtgccgtggagtttctgaagtggctcaccaagacgctgcgctatcccaccgtggccaaggaaaaccggacgcagggcaaggtggtggcagtattctacgtagaaaaggacggcagcatcacgggcatcaagattaccaagtcgctgtcggcagagtgtgaccgtgaggcgctgcgcgtacttcgcatgatgcctaaatggcagcctggcatctaccacgacgagccctgccgcaccaaggtgtgcatccccatcgtgttcaagttgtgagaaaaagatataataacaagagatatgctgaattcaagtgaaatcctgaagctggtcaacgactttctggcccagctgccctacgagagaaaacccaagtcgctgtacgaacccgtagagtatgtgttgtctattggcggaaagcgcatccgccccgtcttgacactcatggggtataacctatggaaagaggaccccgagcgcattctgatgcctgccgtcggactggaaacctaccacaactacacgctgctgcacgacgacctgatggacaatgccgacgttcgtcgtggacaccagacggtacaccgccgctggaatgccaacaaggccatcctctcgggcgactccatgctggtgctggcctatcagcgcatgcagcaggtgcctgccgagaaactgcctgccgtgctgagtctctttacggagaccgccctggagattggcgagggacaggagtacgacatgaccttcgagactcgcgacgacgtgacagaggatgagtatatcgagatgatacgactgaagaccagcgtgctgctggcctgtgcgctgaagattggtgcgctgctggccgatgcgccgcaagaagatgctgaccgtctgtatcgtgttggagaacaggtgggactggccttccagttgcaggacgacttgctcgacgtctatggcgacccgaaggtcttcggcaagtctattggtggcgacatcacatccaacaagaagacttacatgctcatcaatgccttcaaccgcgccaacgatgagcagcgcaaggaactggagcactggattggtgccaaggagtttaaccgccaggagaaggtggctgccgtgacccgcctgtacgacgagattggcatccgcgcactctgcgaagaaaagatcaactactatttccagcaggcccgccagacactcgccgaggtcaacgtgcccgaggaacgcaaggcacagctgcgccagtatatggacgaactgctccaccgcaacaagtaaaagtgtgctcgacggttcaccgtcgagaaagagcatgaactacatcgacacccactgccacctggacggcgaagagtttgccgaagaccgtgatgccgtcgtacagcgagcccgtgaggctggctgcacccggatttttctgcccgccatcgacgtcaagtcgtgtcacactgtgctcgacgtctgtgcccactatcccggctactgctaccccatgctgggtctgcaccccgaggaggtaaaggccgactggcgtgagcagctggatgccatccaccagcttcttcagtcccctctccctttggagagggcggagggtgaggttcctcccatcgccatcggcgaggtaggcctcgactactattggagccgcgagtttgagcaagaacagttgcaggcttttgaagagcaggtcaagtgggcggtagaactacagctgcccttgatgattcattgccgtaaggctcagaatgagatggtagctatattaaagaggtacgcgcgggaattgcctggcggcgtgttccattgtttcacgggcaacgaacaggaggcccgacagctgttggagttcgaccgcttcgttttgggcatcggcggtgtgctgaccttcaaaaagagtcacctgcccgaagtgctgcccgcctgtgttcccctcgaccgcatcgtcttagaaaccgacgccccctacatggcccccgtccctatgcgtggccagcgcaacgagtccgccttcattcgccacgtcgtcacccgcatggccgaggcctatggtgtcagcgaagaggagatttgccgccagaccactgccaccgccgaacgcatctttcatcttacttaaagtcggcaaaaaaacgagttcaagactgtcacactgacaaaacgccgatgtacagggcgtttgcagtctgttcagagactgtcaagactgacaagagactgacaacatttgctccagaaatcagctgtatttttgcacgtatcagctgtaccgctgcgcgtattagctgtaccactacacgtattagctgtagaagcaacaaattctctagagaatttcagtcgtatacagctgataccaaaaaactctttgaagtcaggctgtcagtctttcatcacaaaacatttaacattcatttatcttgattttctttgttttgtatagaataatctgtatctttgcactcgtaaggatataatagtgaaccaagatgagcgacatcgtacataatgatatagcgagtgaacctgcagcagctacttatggaatgagtgcagagttgcgtaatagcagtttgttgactgaggtccaaaatcttagtcgagaagacaaacactgtctggtcagatatttatataatacagatgaagccgggcttaattcttttgaagaactgaacgacgatcaccaaccttacacgctggatgagctcaatgcccgaattgacgaggctgaagaagaaatcgaacgtggcgaaggaaagtcttttgacgaaatgatggcaggtttcaggaaagaactattatggctcaagtaaagtggcagaagagggcagaaaacgaactctacagatatcttgttaaaggggttattgaatttggtgaaacaacggcaaataattttgcagcaaaggtatcatcgctcaataaagatttagaaaaatttccagaaataggatatcccgaaccgttattaaaaggcagaaagaaactttacagagcccgtcatattattggccgtttcaaattaatctactattattgcgaaagaacagatatagtacatatagcagacatttgggatacgaggcgagaacctacgaagttggcgaatagaataaagtaaatgtcacaggcccgtttgtgacctttcaaaaatgattttctagggctcccgtgagcacccctgcaaaaacaggtgtcacacctaacacccagtattactgagtgctacgtgtgactgcgacagcatttttcttaattatttctctctttttgttattcttctacttttgttatgcaatagggtgaaactggtgccagtccttgatgtcttctatataatatcgccaaattccgatttatcttgtactaattcttgtctggctgctgaccgtcgtgagccttccatgcgcactcggtaatcgtcatgtcggagaagactgccgtaaaggatgactcctcgggtgaacaggcatagatgccaaaactgatttcgtcggcaccggcatacatgtggcagatgcgcatctggctgaacttctcgccatccgtggagcactcgatgcggtagtcatcctcgcggcgcgaaaaacggtaccacatggtcttcacatcggcggggatggccgtcgtggcccagtcagagtagccgttgttagtggctacgctacccaagtgctggaactcctcgttctcgtattccaccgagcctttcagccagttctcgctgtcgagatacatcacgatgccacattggtcaaaacggtggtggctgctcgtaaagtcagtctttaccacaaaactgaagaacttctcgcgtgtcttcatctgcagcacaggggcattgtcgttctggaagtgatagtaagtgcgctgccagaggtcggtcttcggagcggtggtgatgcgaatggtatcattcttgatttcacacttcgcaggctcccgcgtccactggaggctgctcaaatcgatgtggccgctgtcagagagtgccacctttacgttgtcaacgaaatccatagtcgtttcctgtttgttctgctgtccgcatgccgtcagcaagaaaccgatgcttaataatgagaatagttgttttttcatattacttgattttacgtttcttcagtttcattttgtagtattattcttttgcttaaccagttcagtgaaacaggtgacaggtacctgtttcacatgtaaatctaaggcacaaagttagtaaaaaaatgaataaagtgcaaaacaattgacaatttttatatataaatctggtatctgtttcactcatcgcccatacgatatttgatgtcgtagttcttcgacgagcgaagcggcagaccgagcgaatgatgaagtcgagttcttcttccgtaaagccatagagttgatagactatacggtcgatttccttttcaaagtggatcactagaaccgtcccgactcttccgtcaaaaatgattttctggggctcccgtgagtaccccagcaaaaacaggtgtcacacctaacaccctgtaaaactgaacgttacatgtgactgtgacagcatttttcttaattatttctctattatgcacttcactgagtcggttaaatgaacgataatagttaagcaaacatttaacatgcctcaagccacgatgtacaaagggtttgaggcatgttatattaataggttaatagatttagcgaattttctttttctgagaggagcaagcccatagtcagacattggcattgtgactaaaaaagtccaccgttgaggacgatggaccaggacctaatgttttcacaacggaataatccttattgtgatttgctaaaaattagtgctgcaaagataaactttttctttgatagtaccaaatgtttcaaaagaaatttgtatttttgtagcagaaataattaaaaacgcaaaatattatgaaaaagatattaggtcttgacttaggaaccactagtattggatgggcacttgtcaatgaaaaagagaatgataaggagaagtcggaaatcatccgattaggagttagagtaaatcccttaaccgttgacgaaaagacaaacttcgagaaaggcaaatcaataactacaaatgctgacaggcgcttgaagcgtagtatgcatcgaaaccttcagcgctataaactgcgcagaaagaacttgattgaatgcctattagagcatcatatcataacagaagaaacaccactgttcgaacaagggaataaaactacattccaaacttacagagcaagagcaaaggctgtaacggaagaaatttctttagaagatttcgcccgagttttgctgatgataaacaaaaaacgaggctataagagcagtcgcaaagtaaaagatggtgaagaaggcgaactgattgacggcatggagattgccaagagactctacgaagagaatctaactcccggacaacttctgctatacctatataagaaaggtaagaaaaatagaccaattttctatcgttcagaccttcaggcggagtttgataagatatgggaagtacaatcagctttctaccccaacatcctgactaacgatttcaaatcgtctattcatggattcaataagactcagacatctggtgcattctatggagtctatcagatttacacagctaagaatagtggtaaggaaggatatcttcaatcactcacatggcgaacggaggccttaaaacgccaaatggatattgaggaagttgcttatattttagcagatatcaacggagctatcaacaactccagcaaacgtctagctatgataagcgacaggagcaaagaactctacttcaaccatcagacaataggtcaatacctgatgcaacgactggatgagaatcctaacaacagtttgaccaatattattttctatcgtcaggattatatggatgagtttgaaaccatctgggaaaaacagtctctgtatcatccagaacttaccacagaactcaaaaaagaaatccgcgacataattatcttctatcagcgcgacttgaagagttgcaagaatcttgttagctattgtgagtttgagcatgaggagagagaagttaccattgatgggaaaagaaaaaagatactaatcggcagtaaggtttgtcccaaatcatctcccatatttcaggaattcaaaatatggcagacactgaataatattgaagtatttttaacaaaccacaagcgcaaaaaaattcaaagagagaaagtgcagttatctctctttgatgacacagagattggtacactacaaaggtatcttaatcaagaagaaaaggacatcttatatcacgaattgtctatcagagaaaagatgagcaagaaagaagtccttaaactattatttggtgatgctaaagatcttgaccttaattataaggagattgaaggaaacagaacaatggcagccctcttcaaagcatatcaagacattatcagccttacaggaaatggtgaatatgattttgccaacatgtcaacagacaaggtattatccttgacttcagaaatctttgaaggattaggttacaagactgattttcttttattcgacccacaattagaagggaaagcgctcgaaaagcaacctgcttacagactatggcatttgctatattcttatgtgggagacaattccaatacaggtaatgaagcacttctaaaaaagattcaggaaatctgtggctttgaaaaagaatacgcaacgattctaagtaacgtctcgttatcaacagattacggaagtttgagtacgaaagcaatacgtaagttgctacctcacatgatgagagggtatgaatatagtgcagcttgtgagaaaatatatggaacacactctgcccgttcattaaccaaagaagaacttgccaacaaaatctacaaaacgcagctagagcaattgaaacgcaatagtctgcgcaaccctgtggtagagaagattctgaaccaaatgattaacgtcatcaacgatattgttaagacctatggtaaacctgatgaaatccgaatcgaattggctcgtaatttgaaaaagagtcaagaggaacgaaaggaactggacgaggccatcagaaaaacgacagcagaatacgacaagttgcgaaaggaactagaagaagaatttcatattcaatacgtttctaaaaatgaccttattcgttataggctctacaaggagctcaaaatgaatggttataaaactctctattctaacacctatatcccgagagaagaactattcagtaaacgattcgacattgagcacatcttacccaaggcacgcctatttgatgactcattctcaaacaaaacgcttgaagcccgtgatataaatattgaaaaaggcgacaaaactgcctatgattatgtcgcagataaatatgacgaagactatctggctaaatacgaaagccgcgtggaagaattatattcacaacatattatatcaaagaccaaacgcaataatctaatggcaagagaagcggacattccctctgactttttaaaaagagaactccgtgattcacaatatattgcaaggaaagcgcgtgaaatattagaagacatggtgcctattgtcgtgactacaacaggttctgtgacgaagcgactacgtgaagattggcagctagtaaacattatgcaagagttgaactgggagaaatacgatgccttaggattaaccgaacaatatactgacaagaatggtaatatcgtaaaacgtatcaaagactggactaagcgcaatgatcatcgccatcacgctatggacgctcttactattgcatttactaagcccagtattgttcagtacctcagcaacattaatgctcgcagtgacaagtcaagtagcatttatggaatagaacagaaagaactccatagagacgagcgtgaccataagcttgtatttaactccccgatgccattagatatattcagagctgaagctaagaaacaccttgaaagcatcttggtatctattaaagcaaaaaacaaggtcgtaacaaagaacattaataagtccaaaaccaaagatggtattctcaaaaaagtgcagttaacacctcgtggtgctttacataatgaaaccgtctatggcaagattcataattttgaggctgaatacaggaaagttgacagcaagtttacagaagatgtcatccttcgtgtatctagtcaaaagtatcgagaagctttactgaaacgtttggccgaatacgataatgatccgaagaaagcatttacaggaaagaacagcttagagaagaatcctatttggctgaatgccgaccattcttatgctgtacctctcaaggtgaagctatataaaatcgtggacgtattcaccatcaagaaagccgtagacaaggatctaaaactggataaggtcattgacaacaaggtacgtgcaattctccaagttcgtcttgatgaatttaatggtgatgcagcgaaagcattttcaaacctcgatgagaatccaatttggttaaatcaagaaaagggtatagccatcaagagagtgaagattagaggaatagctaacggtgaacccgtcaggatcaagagggatattatgggtaatatcatgaaagacgaaaacgggaatcctattcctaacgactatgtgaatactggcaacaatcatcatgtggcggtatttaaggatgcagaagggaaactgcaagaacacgttgtttctttttttgaggcaacaacaagagctattctcggctatccaattgttgacaagctatttagacattctgatggttgggagttcttgttctctatgaaacaaaatgagttttttgtatttcctaatgacaagacaggtttcaatccacaagaaacagaccttcaaaatgctaacaattggagcataataagtccgaatctgtatcgtgttcaaaaatttacaactggtgattatgtattccgacatcatttggaaacaactgttgaatctgataacgctttacgtgacattacctggaagcgcataagatccattcaagatttagatgggatagtgaaggtacgtttaaatcatctcggaaatatcattgcagttggagattattagcctatgattaaaaagactctatgttttagcaatcctgcatacctctcattgagagatgcccaactggtgattaaacttccagaagtagaaaaagccgagaacctctcagcagacttcaaaaagtctgctgaggtcactcgccctatagaagatattggtgtagtcgtgttggacaacaagcagattactattacacaaggagcattggaagcaatgctcgaaaacaactgtgcagtcatcacatgtgactcaaaccacatgcccgttggtctactactgccattagtgggcaacaccactcagaatgaacgattccgagaacaactcgacgcatccttgcccttacgaaagcaactctggcagcaaaccatgcaacagaaaattaggaatcaagctgcagtactgaacctctgttccaatgctgaaacaaaatgcatgcaggcatgggcgaatgatgtacgcagtggcgacccagacaactacgaagctcgtgcagcagtctattattggaagaatctgtttgggcatattcctggattcatcagggaacgtgaaggtgttgcgcctaacaatctgttaaactacggatatgccatccttcgtgcggtggtggcccgctcattggttgcaagcggactactccccaccttgggtattcaccatcataatcggtataatgcctactgcttggcagacgacatcatggaaccttatcggccctatgtggatcgtttggtttatgaaattacagaacaatatggtgtagacgtagaactctctaaggacatcaaggctgaactgctctccatccctacccttgacatagtcattggtggcaaacgaagtcccctgatggttggtgtagcacaaaccacagcctctctttacaaatgcttcagtggcgaactacgaaaaatcgcttatcccgatttaacatgattgcagaacgatttagcgaatacagggttatgtggctcttagtgcttttcgatttgccaacagagacgaagaaagatattcgcgaatatacgagattccgcaaacgtctcatcgaagatgggtttaccatgtttcagttctccatctacgtccgtcattgtgccagcatggaaaatgcggaagtacatcgtaaaagagtcaaggctatgttaccagagtttggcaaagtaggcattatgtgcatcactgacaaacaatttggtaatatagaattgttctttggcacaaaaccacagcagccaaacgcgccaggtcaacagctagagctgttttagaatgtttggcaaatctttagattatttaaatccttattgtggccattcaagcctaaaatggtgaaataggaatgcgaatattagaaaaggcgaattccattctgatcgtggaatccgcctttcttgcagtggcattttttcttttctaatttcctttgcaactttctggcattcaacaacttttctcaatcgtagtgtttatgcctctgcaaagatactaattttttagcaaatcacaacggagcaatagcgacagccgacattagggcagtgtttatgcctctgcaaagatactaattttttagcaaatcacaacacaaggatggacgtgaatttatcacgtttcagtgtttatgcctctgcaaagatactaattttttagcaaatcacaacagactccttttgaactctagtaacccatcagtgtttatgcctctgcaaagatactaattttttagcaaatcacaactagcccgcgactaaaccctttctaagaaaagtgtttatgcctctgcaaagatactaattttttagcaaatcacaaccgtgcgccgttgtagtgaatcatccagtgaagtgtttatgcctctgcaaagatactaattttttagcaaatcacaaccgtccagttgagcgacgcctgacgaatgtgagtgtttatgcctctgcaaagatactaattttttagcaaatcacaacacctatcccgctgaatactgatgcgtgggtagtgtttatgcctctgcaaagatactaattttttagcaaatcacaaccgtagtccttgaagcctatcagcttgcgggagtgtttatgcctctgcaaagatactaattttttagcaaatcacaacagtccgcccacggcaactactttcagaacaagtgtttatgcctctgcaaagatactaattttttagcaaatcacaacacacccacatattaaagtctttcgtcagcaagtgtttatgcctctgcaaagatactaattttttagcaaatcacaacacaaatgacacgatgagcttaccggtcgtaagtgtttatgcctctgcaaagatactaattttttagcaaatcacaacccatttttcattcttgttcatactcgtatagtgtttatgcctctgcaaagatactaattttttagcaaatcacaacttcttgacctcttgatgttgatttgtccacagtgtttatgcctctgcaaagatactaattttttagcaaatcacaacacaccaccctgacgcttaattatctataaagtgtttatgcctctgcaaagatactaattttttagcaaatcacaacctgaatcagagcgaggtaggcaagaccgccagtgtttatgcctctgcaaagatactaattttttagcaaatcacaactgcctcgcggaaccgacggcggtactcgcgagtgtttatgcctctgcaaagatactaattttttagcaaatcacaacctcgcgctgtacgagatgaacggcacggggagtgtttatgcctctgcaaagatactaattttttagcaaatcacaacacctcctccctgatgtgttccaaatggtgcagtgtttatgcctctgcaaagatactaattttttagcaaatcacaacccttcagtggctgtgcctgcttccactcctagtgtttatgcctctgcaaagatactaattttttagcaaatcacaactatttaaggcattttctttagtacaacttcgtgcagtcatcggctgaaatggctggcaagtgggagcagatagaacaggacggcgaccgctacaacctccagtaccgcacggctggtgatagcaaggtacgcccggaacacgctgcacttaatggtgtgacgttgccgccaagtgatccgttctggcagacatactacccacccaacggctggaactgccgctgcacagtcgtacaggttcgcaagaccaagtatccgaccaccccacgcgatgaggccatgcaacggggagcacaggccacaggaaaggacaccaaaggcatcttccagtttaatgctggtatggagcagaagacgttccctgactacaacccgtacaccatcaagcgttgtcgtgactgcgatatcgccaaaggcaaacttaacctggcattcgtgccggaaaacgaactatgcgaggcatgtcgattgttacgttccgtcaatagggacaaaaacaaggcagaatacaatcggttattaaatgcctccgactacaaggatgtaggtttccatgaggaaagcggtggagttaaggctacacacgtagggcacaagtttgatggaaagaaaggttggtatgagaccgatgttcaggatgctggatttcgtagcggccattctgttgtatttggtgaggagccccaagacatatataagcataagagctgtgaggggttatgggatggcttgccatttgaaatagccggtgcagagacagctacgtcaaacaacataagaaatgcactcaagcactgtgcttcaaaacctgatacgaagattgccgttatatacttccctaatgacaattttgatattggtgagttcaatattggcctttcaaagttcaatggtctcaggggtactccacaatataaattgtttgatttgatttattgcattcacggcgataagattatccaaataaaaaagccaagcatttaacttggctggaatgagagcgggtctctgaaggtttacccatccctcacgccgcaaagatacaaaaaaatccgcaacctccaaactttttgcggatttttttctattttatttgagtagaatcgcttatttgctcagtctgagcgtcctgaatagtctctataaccgcttttgtctttttcctgaggccgctttctgttgtatagccaagcataaatacgactacaagtataagtgagaaaataaaggaagctataacattaagaaatatagtttttcctgctgaatatgtgtgcttctttacaactggctcaacagacttttgaaagtcaaagttgatattgtttagctcatctctcacagcactcgcgacattctctcctaaaatagcagctgcactctctttatacttcgcaagttgactctccgttactgaggacataatgaaactttcgatatcggagtcagtaggagcggttcccttctttttcttgaagtcctcaataaattcaattttgtgccgtttgtagatgctatatgccagcaacccaatcacatcatcttgactggatacgagcttgctataaataaaattgtattgcttctcggccattacttctttccacttacaatacgagcgtaggactcatttgccctttgtgcgataagtgcatgggacaaagttactttccgctctccaataggagaacggtaggaaaaagttacacctttgcggtctgttacgattccggttctatgtggtgttgtcgttgttggtgtcatattattgattattacgatattctcgttctattgtgaactcgctgcaaaaatacaaaaaaatctgcaactaacaaacaaagtcacagattttttaacgaaaagttccttttttgttcaatctcagggtatttcaggccctacgacctccgtttcctgacctccgggcgacactaacttagcatccattggaacccgaatcctctgcgtctttttctcgatagaacgcacgaaggtaacattgtagacctcgacattctctatcagctcctcatggttgtggttcgtcagagtagcctgtatctccacatcaccgaaatggtcgccatgcagcccaagcatgacagtatgtatctgctcactcagatccagatcttcaatgctctgcagtcgcatttcgttgctatactctgacgatgcgccacctttccagtcggtgacgatgtgcagacgaacttctgcacgtgcctggtacccgttggctccgcgagtggtcatacgctcccacaggataggccggaactcgacgaacacagccggacgcggccagttggtttcctgctcgatatactccacgttattgttccacaagtccgcatgctggataatgtgctctgc

SEQ ID NO: 2317 - DNA, 19372 bp, synthetic construct
  variation 18670..18702: note = n is a, c, g, or t
  source 1..19372: mol_type = other DNA
  variation 19215..19230: note = n is a, c, g, or t
  misc_feature 1..19372: note = Synthetic
aaatcaagggtagtacctaaaaggtaaagtaggctctttctgtccactaagattttaatgcctttgtcttcgaagacctcatctttttccttcacttctgaatcaaaatcgaggtcatacatcaagccagagcatccaccaccttgaaccgacacgcgaatattatgattttcagttcttccttctttagagcgaagctgaaaaatcttgtcttttgctgattctgttactgttatcattatgctacaggattaagtactatactaaaaacggtaatggtgttgatatcgcgaccgtaataaagcttatcgagcgcatcgtacatatttccagcacggaaataggacgtatgcaattcgttttcgccttttgcgatccactgaatggtgtaagaaccatacttgtctttgtacgactgaacgtagtcaagcatttttcttaaggcatccaatttatcgataccaatttcggaatggaataaaaacgactgattgtgcctagggttaatggtaatcaagtcgagtttaattttgccatcgcgttgttgaaactcaaagctcaattcactccccttaatgctcaaataactttcgattttccgttgaagcctaatgctttccacatgaatgtcggtgcttgttccgctcataatcactcaattcttttttatccacccaaaatccaataatttcggattggctaaggaaacaggcgaaggcctactaaagtttccctttccgcccacaaagatagtcaatgattcaattaatctatgcgtaagatagaacacatcggcattgccgtcaagagtttagagaatgctaatgacctgtttgccaaactttttgggcaatcacattataaaatcgaggatgttttgactgaaggggtgaaaacttctttctttcaggttggccccaataagattgaattattggaagcgactaatcccgagagcccaatcgccaaattcattgaaaagaagggggaagggattcaccacattgcttttgatgtagaagatattgaagccgaaattcaacgattgaagacagaagggttcacggtgttgaatgaaatacccaaaaaaggagccgataataaaatggtctgtttccttcatccaaaatcaaccaatggcgttttagttgagctttgtcaggaaataaaatagtgaattggtcattgggcaactcccaaacctgatagctttgtcgaattacatcttcagtggatgaattgcatggttgaaccaattgctcaaagctgtcatgttttattgcgaaagccgtaaccctatgcctagtctacgtttgctttgtctatcgtctatcgtctatcgtctatcgtctaaaatagtatctttgcgacctcaacagtttatcagacatgtcagaaaaaagaacagagctttcagcacttggtgaatttggtttaataggtcgtttggctgagggcattaaaacccaaaacgaaactacgatcaaaggcattggcgatgatgccgctgtgatcgatgctggtaatcattttggtttattggctgctgatatgcttatggaaggcattcacttcgatttgtcatatatgccattgcagcatttaggttataaggccatttctgtcaacgtgtctgacattgcagcgatgaatggtaaacctgagcaagtcacggtttctttgggcttaagcaaccgcttttcggttgaagccatcgaagcactttatgaaggaatgaaagccgcagccaaagcctttagtgtggatattgttgggggcgataccaccgcttcgcaaagtggattggtgatttcgatttcaatttacggtactgtggaaaaggacaaggtttgctaccgtaaaggtgctggaatcaatgatatcctctgtgctacaggcgatttaggtgctgcatttatgggcttacaggtattagaaagagaaaagcaaacctttttggccaatccaaatgcccagccacagctagacgattatcaatacattgttcagcgtcaattaaagccgattgctcggatggacattattcatgaattggcagagtttggcgtagtaccgacatccatgatcgatatttcggatggattggcttcggaatgcctgcatttaggagctaattcaggtgttggtattcagatctatgaagacaagctgccctttgatagacagacttacgagacagcggtagaatttaatatcgatcctataacagccactttaaatgggggagaagactacgaattgctcttcaccatcaaacaagaggattacgttaagctagaaaaacacgaagacatccattttattggtcatactcaggcacttgagaaggggaatttcctagtaactaaaagcggaaatcaggtagcattaactgcccaaggctggaatcacttaaacataaagtaaaaaaataatcaaggcgaagctaaagaacactccaacaatggcagagttgaatttagccattgcagaactcttccgcctaagccctaaaaacccagaaatcaggacaagaaaagcagcgatataaatgagatattggtaatccacggactgcttaaaactagggttaatttgcctttttagcctgatgaaaccataaatcaagctgcgcttcacttcaatcatttcacctttttgaatcccgtttccttcataataagttttgaaagaaaagtcttcaagcgttacgatcgaatgccttatttcctttccgtatctgccataagctgtccagtgcgctactttttgaacctgtaattcccccaggttttgataaaatgcggcatcaacaaaaaaactaagcgcaaaaaggaataaaacgaaaccgattctggtggtggattttcgatagtgctcataatccgtgtcgacttttacaccagcttccgactcatattgctctcgccactctctttgggcagtttgttgatgggtttcatcatcattgtcctcaaaacggatgatgattttttcactgtcgaaatctgatctattgtcgctatttcctaaaatctcataagcttcggatagttcttgaaacgcggctaaggcttcttccgaaggatttacatcaggatgaacgagcaaggctttttggcgataagccttcttgatctcctcctgactggcggttttttcgacccctaatatttgataatagtctttaggcattcaatcgcaatccaattctaaattattagcatatttaggacatatttcagtcaaatgcagcccatccacttttttaacggccagtttttaccaaaagaagagataaaattttcggtagacgatgttggcttgcttcgcggctatagtgttttcgagtatttcaaggcttataagggaattcctgtctttatgaaagagcacttgaaccgttttgaaaactccgctgccctattgggtttgaaaattccttttacccgtctgaaaattgaagaagcaattctgagaatgttgaaacagaacaactatcctatttctggcattaagattttactcacagggggtaattctcccaatggtttttcggctggtaaacccaatatggctattctcaatcttgagacagaggattctgagaaagagttttatagccaaggagttagcgtaatgtcgcataattttaaccgtgaatttccgctggccaaaacgactaattatgccactgccgtaaaattggaatcggattggaagcaaaagggacatttggatgtgctttatcacgatggacgatgggtaagcgaagtagccagatcgaacgttttcgtagtgcttggcgataagttgattacaaatcaagagggagttttgccaggaattactcgtagtaaggtgcttgaattggctcctgaggtaggtttcgatctagaaatcaggccttttagtttggaggaggcactagctgccgatgagctttttatgaccagtacaaacaagagggtaatgccgattgtaaaagtggatgatcaattaatcgcgaatggaatggttggggcaaagacgaggcaattgatggaagcttttgatcaattgattaggaatgagctgaactcttaaactgccgccatttctaaaccaattacatcgagtagaaggtcgatgatttgggccggcaattgcttttctagttccttatatcggtaattgattacatggccatcttctagctgaaaagcgattcttccggtttgaatgcctttttcgaaagtcagaatttctagaacggtgttgttgattccatcgctgtaggtattattgatccgccaagtgaaagcttccctcatttctgccagcttgttgagcagccctttgaccatactttttgtttcttctgccaattctcccataaccgaatataaaccaagtagactatatagtgacgacctgaccgccatgtgaagcgggactttgtctgcactgtccaaacgaaattaagaaaactaaagtttacaacggaaacttgctttggtaagagcgggtttaacgctgattatgtgatggatggtcttttgcgtggtcccgttcaatgctttggtttgacttgcacgaaataggaagtcggtgaggtggccaaaaaaaggatgccacccctttcgaggtggcatcatcttcaaccaaaacattaaaatccaaatcagatctatctacacttttaactaaagcattacctaacacttcaagttaccaacacgattttaatattatattttaacccctaagggacatttatgttttataattttctaacgtggtcttggtcagtggtatttcaaaatcactgcgtttttatttaaaaaaccaacaaatacagaaccgcaagccctaggttatcgttccatcaacaaccataatttacttatgacacccttcgaaaatctacacttagatatcccagcaacagacaaaaagagaatcattattattggaggcggatttgccggaatccagatcgccaaaggcttaaaaggaaatgattatcaagtggttatgctggatagaaataattatcacaccttccaacccttgctatatcaagtggctactgctggccttgagcctgattcaattgctggggcgctaaggcagcttttcaatgattaccccggcttttactttcgaatggccaaagtcactcaaattcatcctcaagagcagaaaatcagcaccctgattggcgatttaaagtatgatactttgatcattgcgaacggttctaaaacgaactatttcggcaatcaagacatgttcaacctcacttttcccttgaagcaaataccgcaggcgctgaacctgagaagtcatatgttgcagaatttcgaacaaaccgttctcacaagagaggaagacgaaaaggacaggcttaccaattttgtagtcgtggggggtggcccaacaggggtggaagtttctggtgcattaggagaattaaaaaagcatgtattgccaaaagattaccctgacattgattttagcattatggatttgcacttggtagatgctgggccgcgtcttttggccggaatgtccgagaaagcaggtgccaaagcccttgaatacctcaaaggtttcgatgtcaatgtaaaactcaacacagttgtaaaaagctatgacggccgagatgtagtactttcggatggcacggtaatccctgcaaaaacggtgatttgggcggctggagtaaagggaaatatcattgatgggcttccagaaggcgcgattgagcgagggaggattttggtagacgattttaaccaggtaaaggggctgaaaaacgtttatgccattggtgatatcgccttgatgaaaacagagaattatcccaatggacaacccatggtagctcccgtggctattcagcaagggcaacaactggccaaaaatctgattcgcgcttcaaaaggtcaggaacagaaaatcttcaaatacagggacaagggctcaatggctacggtgggtagaaatcgtgccgtggttgatatgcccaagttcaccattggaggtttttttgcttggctcatttggatgttcgttcacttgctttctattgtaggctttagaaacaaactcgttgtttttagcaattgggtttggaattactttacttatgacagaggcacacgcttaatcatcagaactttcgttcgaaataagagctataagcaaggcgaaaccctttagacagacaggaatgggaaataggcatttctaattttctgcctttcataaaaagcgctcatgccaagtgcctaattattgctaatttttggccgtgaggaagaggagactttattggacattccaaatcattggttgggcattgcccgccttgatcaatttgactttggtttttgtgttcaacaacgactcagaaaagattaaaagccagttttttgaagccattccccaaagtgttttccccttctttatctctcattttgttttaaggcaaaccataataaaagcaaaatggctaacaacagaccttgttaagattttccccaaacttttgggattgattctgctcatcagtttttctgcaagtatgttttatcagctttttagagataatccattcgataaggcagtgatacttttggactttctgaccgctgccatcctttttgtgatttggacggccatttactttctctaccattacttagaaagcaataaccgttctttgaaatacgaggcggccatgaatgaaatgtaccttaaccagcttaagtcgcagctcaatccccattttatctttaatgcactaaatagcgttagggcattagtggatgaggacccttcgaaggccaaaattgccattacccaactttcgaatattctgcgcaactcgttgatcatggacaaaaagaaggtgatcagctttattgacgaactgaataccgtaaaggcctatttggccctagaatccatccgtttcgaagagcgcttaaaggttacttatgatattgaccctaattcaaatgagtttcagattccacccatgatgctccaaactttagttgaaaatgcgattaaacatggggtctccaacttagtcaaaggggggcacatagaaattagcactgtgattaaagattccgttcttagtttgaaaatccgtaatagtggacaatattacaacggaatcaaaaaaccagggaaaaagggaggctatggcctttcaaacaccaaagaacgactgcaattgatctacggatcgcaggcttctttcaatatttacaatgaaaatgataagtttgtaattaccgaggtgaaaattccacaatggatttagtcctcttacccattcaatatgaaagcactaataatcgatgatgaaagattagctcgtaaagagctcaccaacttacttcaagaatatccggaaatcgatatcgttggagaagctgtgaatgcagaagatgcacttgaaaaaattgaagccctaaaaccagaccttctctttttggacatacaaatgcccggaaaaactggttttgaattacttcaatcattggacaatgtacctgaagtgatttttacgaccgcatatgatgaatacgcactaaaggcattcgacttcaatgcactggattatttattgaagcctatcgagccagaccgtttaaaagagtcgatcaacaaactcctgaaacgttcgcagcccgatgaggccatttcgaccgatgagcgaaaattggggccgagcgatcgcgttttcgttaaggatggcgacaaatgttggttcgttaagctggaaaacatccgcttgttcgagtcggatggcaactatatcaaaatctatttcgacaattttaaacccatgattcacaagtcgttgaatgcattggatgagcgattggatgacagggctttctttagggccagccgcaaacacatcattaatttaacttgggtagaaagcattgaatcttggttcaatggaggtttaatggtagtgctcagaggtggcgacaaagtagaagtaagcagaagacaggctgcgcgatttaaggaaatgatgagtctataattgtttttaacagctgaaaactattgccaaaatcagtatctttaaactaatgatgaaaatagttttcggctttctgcttcttattcttagttattcgggaatcaatgctcaagtttcggctgatagcatcccattacgaccaactggctttcctgtcattgccaaagacactctgttctatctcaatattggcattggtccctattcagcagagcaaagagcgaatcaaatcaacaataaaattgctgactttctaacgaacgaatctctgcttgtagattctcttcatattgtaaaatcggcaaggatcaatgatatcaagtgcggtgattatttgttgatgagcataggcatggacgatgccaatgcactggggctcagcttggacaggacttccgattattattttcagctgcttaaaactgggctcgataaaactgctccttttagttttcggctgttaatcatcaacatcgtaattgccatacttattttggccgccttcctgtttggcctaaaatactataatcggttttttagggcggtatatactaaaatagaagcgcaaaagggcaatcgaatcaagggcattaacctaaaaaattacgaactcctaaaaccagaagtagagacctctatcttcatttatattgccaaaggcttaagagtcgcagttttggtattgattgtataccttcttttgccaaccgtctttagcctttttccttggacccaaggtattgctaacaccctttttcattacatcgttactccgctcaaggccattgggcaaggcttagtcgactatctgcccaatttactgaccataatcgtcacagtggtgatcaccaattatttcttaaagctgattaaattctttaagatggagattgaaaaaggaaacttggtgatccctggatttcatgcagattggtcgaagcctacttacaatatcttaaaggcaataattttggctttggtgcttattggaatattccctctattgccatttggaaattcagaaagctttaaaggcatatcggccttctttggtattcttattgcgtttgggggggcatcggccatttctaatgtaattgcagggattttggtcacctatatgcgttctttcaaaattggcgatagggttaggattggcgatgtagtgggcgatgtacaagaaaaatcgctgctgaacactcggatcaaaacgatcaagaatgaaatcatcaccattccgaattcaaatttgctcaccagcaacaccatgaactacaccactgccaacgatgaggacggcctgatccttcataccaccgttaccattgggtatgacgtgccttggagagaggtgcataaattgttgatagatgccggattaaaaaccgaatacatcaaaaagttgccaaaaccttatgtgcttcaaaccagcctagacgatttttatgtaagctaccaactgaatgtgaggacgagggacatagataaaatggcacgaatttattcagaattgcaccaaaatatccaagacggttttaacgaagcaggagtagaaatcatgtcgccacactacggagcacaccgcgatggtaaccaatccaccattccagccaatcatttacccaccgattacatcgcgccctggtttagggtaaaaaaggattgatttccgtattcgaaccaaacctccaaggtttccaaaaccttggaggttttttcgcgattcgattaataatcaaaaagcacactatttttatttcaataattcatatattgaaagcattcagctactgaataccaatctaagagactcatctgaacataaaaaaagccccgaagatagtcgaggcaaggctaaatgttttcacaacggaataatccttattgtgaattgctttcaaacatcataaaggtagtacttactttcaaagataaaaatttatgaaaaagatattaggactggatttgggaacgacctctataggatgggcttttgttaatgaagcagaaaatactgaagagacctcttcgattcagcagattggagttagagtaaaccctttatctactgaagaacaaactgactttgaaaaaggaaaaagcctgactctaaacgctgataggacggccaaaagaagtgctagaagaaatttggagcgattcaaactgcgcagaaggaatcttattgcccttttaattgaggctggtattatctctgaaactacagagctgagtgaaaatggcaaaggtactactttcgaaactttggctctccgggcgaaggccgctaatgaacgaatcgaaaaaaatgaattggctagaatattcttatcaataaataaaaaaagaggctataaaagcagtaggaaggcaaaaaatgaggatgaggggcaagccattgatggtatggctatcgccaaacgcctttatgaagaagacttaactcccgggcagctatgtctgaaatttttaaaggaggggaaaaaaatcttgcctgatttttatcggtccgatctacaagcagagtttgtcaaagtatgggagtttcaaaaaaggttttatccagaaatacttactgagaaaatcaaattagaagtagaaggtaaagggcagcgggctacttcagctattctaaaaaaggaatttgatatttatactgccgaaaacaaaggtacacgtgaagaaaaaagaattcaagcttatgaatggcgaagtaaagcgatttctgagaagttggatatttcagaagtggcgttcgttttggcagaaatcaataacaatttgaatgcctctagtggttatttgggtgccattagcgatcgaagcaaggaactctattttaataaagaaactgtaggtcaatacctctacaaacaaataaggcaaaatccacatactagaacaaaaggacaagtcttttatcgtcaagattacttggatgaatttgaaagtatttgggaaactcaaaggaattttcatcctgagctaaccgaaaaactaaaatctgaaattcgagatgtggttattttttaccaacgcaggcttaaatcgcaaaaaggacttattagtttttgtgaatttgaaagcaagcaaaaacttgttttggttgatggaactaagaagttaaaaacaattggagcaagggtagcaccaaaagcttctccgttatttcaagaattcaaaatttggcaaaacctttcaaacgtaatcatcaaaaataaaaagacgaaggagcttttcgaatttggcttagaaacaaaggagctactttttgaagagttaaatcttaaaggaaacctaaagaaagccgaggtattaaagttagtcaccgacaatcctcaagaatgggaattaaattattccgaactggaaggaaatagaactaatcaagtgttttatgaagcctaccaaaaaatcatccaatcagaaggaagtgaagattttgatttcaaaaagttaacagcacgggaggttaaggaagttgtaaaatcatttttagaatcaattggcgtaaactcaaagattttagagtttgatccaatgattgaaggggctgattttgaaaaacagttgtcgtttcaattatggcatctgttgtactcttacgaaggggataactcaacttctggaaatgaaagactgctgcaaaagctagaatcaaaatttggattcaaaagagagtatgctcttgtgttatcaaatgtggtctttcaggacgattacagtagtttgagcgccaaggcaataaggaaaatatttccattcataaaagaaagcaagttcagcgaggcttgtgaattggcgctttacaaccattccaaatccttaacaaaagaggcgaatgagaagcgttcgttgaagcctatactagacctgttaccaaaaaacagtcttcgaaatcctgttgtagagaagattttaaatcaaatggtcaatcttatcaatactattatcaaagacccaaccatgggtgtaccagatgaaattcgaattgaactggcgcgagaactaaagaaaaatgccaaggaacgcgaggaaatgacccagcaaatcaataaggctaaagataatcatgataaataccgaaaaataattcaatcagaatttggtgtttctaatccaacgcgaaacgatttgatccgctataaactttacatagagctggaatcagttggatacaaaaccctttattcaaacacctatatttcaaaggataaactgttcagtaaggagtttgatattgagcacataatccctaaatctcgtcttttcgatgatagcttctccaacaaaactttagaatcaagacaggtaaatattgaaaaaggcgaagatacggcctatgattttgttagtcagaaatacgatggctcgagattgaatcaattcactgccactgtggagttgctctttaaggacggcaaaataagtaaagccaagtacaagaaattgctcatgcaaggaaatgaaataggcgagggttttatagagcgtgatttaagagagagccaatatatagcaaaaaaggccaaagaaatgctttttgagatttgtagaagtgtcttatctacaagtggtagcatcacagacaagctccgtgaagactgggatttagtaaacgtaatgaaagaactgaatttagaaaaataccgctctttgggactaacagagtttgttgaattgaaagacggtaacaaaaaagaacagatcattgactggactaaacgaaacgaccatcgtcatcatgcgatggatgccttgactgtggcatttactaaacataaccatattcaatatctcaataacctgaatgctcgcaagaatgaaaacagtaaaaaccatgcagtgattatggccatagaacaaaaggaagttgaacgggatgaaaacaacaaaaaacgatttaaagcgccaatgctgaattttcgatctgaggctaagaaacaccttgagaacactttaatatcattcaaagcaaaaaataaggtcgttacacgaaataaaaacaaggtacaagggagcaagaaaattcagttaaccttaaccccaagaggtcaattgcacaaagaaactatctatggtttatcaaaaaagggatttgttaaggaagaaaaggttagtggcaaattcgatagagtaatgattgataaaatatcgaatccaattcacaaaatggccttagctaagcgattggaggaatttggcaatgacgcaaaaagggcatttactggtaaaaacgccccagataaaaacccaatttggattgaccaagaaaagacaaaaaaactacctgagaaagtaaagattctaagctttgagaaccaatatacgattaagaaggaagtttctcctgatttaaaattagagaaggtagttgacgaggctgttagaagaatcttacaacaaaggttgagcgaatttgaaaacgaccccaaaaaggcctttgtaaatttagacctaaatccaatttggctgaataaagaaaagggaatttgcgtcaaaagtgtaacaataacaggtgtgaacaatgctgaagctttgcatactaagaaaagccacctaggagaagaggtactggatgaatacaacaacccaattccagtggattttgtgagtacaggtaataatcaccatgttgccatttatagagatgctagtggcaatcttcaagaggaagtggtatcgttttatgaggcagttgctagggtaaatcaagagatgcagattataaataaaaatcacaaagaaggatgggagtttctttttaccatgaaacaaaatgaaatgttcgtttttccttcttttgctttcaatcccaaagaaattgacctattagacccaaagaattatgtacttataagtcctaatttatatagggttcaaaaatttacaatcaaagattattttttcagacatcatcttgagacgaatgtagatatgaatggcagcttaaaaaacattgcctggaggagagaaggattaaatggccttaatggtataattaaagtccgtttaaatcatctaggccagattgttaaagtaggagagtaatttaaaacagatcaaactttggggatgatcaggtaatagataagtatgcagcccgaaactttttatcatattttcaaccatgccaatggtgccgagaacctttttaggagggatgaaaattatcgctattttttgcagcaatgggcaaaatatataacgccagtagcgggtacttatgcttattgcttaatgccaaaccatattcattttttgatacgaacgcatccacaaacctccaaggtttccgaaaaccttggaggtttaaaaaatcaacctttcgaaaaaacactcagccaggccttttccaatttgttcaacagctataccaaggcctttaatagaatgtatgaccgtagaggctctttgtttatgcaaaactttaaacgcaaagaaataacatcggacagctatcttaccaccattgtaaattacatccatcgcaatccgattcaccatgggttttgtaaccacttggaggaatggccgcactcttcttataccacatttttagggaataaaccgactaaaatagaaaaggattataccctagaatggttcaatggaaaagaggggtttataaaatatcaccgcgaacaacagctactgtatgatatatcgctattgattgatttttaagttttcatccacccaccgaaacctccaaggtttttaaaaccttggaggtttgaggttaaaataatggccatgataaaacgtacccttctctttggcaacccagcctacttaagcacaaagaacgaacagttggtgatcaaataccctgacgagggacaggacagcaaaacagtagccatagaagatataggcgtattgcttttagaagaccctcaaattaccattacatcgggtttattggacaaactcactgccaatcaaacggccattatcacttgtgatcgcagtcatatgcccactggcttgctgatgccgctgagtgggcatagcgaacagcaagaaaggtttagggcacagctaggcgcaagtgaacctttgaagaaaaacctctggcaacagaccattcaagcaaaaatcaagaatcaggcgctccaccttaaatcccgaggcactgccatggacaatatgctgcattgggccaaaaatgtaacctctggcgatggccaaaatcatgaagcaagggctgcagcttactattggcaacatttgttcgatatccccacctttaatcgacatgctgctggcgaggctcccaacaacctgctcaattatggctatgccattttaagggccatttgtgcccgggctttggtaagcagtggactattgccactattgggcattcaccataaaaacaaatataacgcctactgcttggccgatgatattatggaaccttaccgcccttatgtagacctgatcgtttgccatattgtagacaaccaagatgattttgacacacttactaccagcttaaaaaaagagctgcttcaaatacccgtgttggacgtaagcatcgatgataaaaaaagtcccttgatggtggccatgagccggaccacaagttcgctctatgattgttttgctgggcacagccgaaaaattgtttatcctgatttttgaaacttacttcttccaaaccttggaggtttctaaaacctccaaggtttggatagttattctataaaatgagcatcgaaaaccacttctcacgcctaaaccaataccgttgtatgtgggtacttgtattcttcgacttgcccaccgaaaccaagaaagagcgggcggtggcttctaaattcagaaaatcattgttagacgatggtttcagtatgtttcaattttctatctatatgcgcttttcggccagcagagaaaatgccgaagtgcatatacaacgtgtaaaacgaaaattgcccgaacacggcaaggtgggcattatgcatattacagataagcaatttgggatgatggagttgttcaacggggtaaagcaagtagaaaccgaaaaacccgctcaacagctagagttgttttaaaaatggggataatttttttattcaaaaaactaaggtaattcgcagtataccaaccgattaactcggggtataactgcgaattatcacttaagataaatgtttgaaagcaattcacaacggcagcagcatctacactcaccgtattgtaactgcgaattatcacttaagataaatgtttgaaagcaattcacaacagtgcccgtgtgtggtgccgaatatatctactgcgaattatcacttaagataaatgtttgaaagcaattcacaactactgctgccagtggcagcaaagagcgtgtactgcgaattatcacttaagataaatgtttgaaagcaattcacaacattccagcatccaagccagcggtcgggtaaactgcgaattatcacttaagataaatgtttgaaagcaattcacaactttgaaagtgtagtttattttttcactttactgcgaattatcacttaagataaatgtttgaaagcaattcacaacaggatgagatcgacatcatgaaaagcaggtactgcgaattatcacttaagataaatgtttgaaagcaattcacaactattccttcgctgtgcaactaactgctaacactgcgaattatcacttaagataaatgtttgaaagcaattcacaaccctcttgcaaatcatttaccatctgtttaaactgcgaattatcacttaagataaatgtttgaaagcaattcacaacgcattgccttgaatcctgatggcgattatgactgcgaattatcacttaagataaatgtttgaaagcaattcacaactcacccactgagcgtcatgctctggatgctactgcgaattatcacttaagataaatgtttgaaagcaattcacaacagttgatactatcttcaattgcggatatctactgcgaattatcacttaagataaatgtttgaaagcaattcacaactaacgataagttgtaaatacaaacaatttaactgcgaattatcacttaagataaatgtttgaaagcaattcacaacgatgtcgattggactagtagcagcagctgactgcgaattatcacttaagataaatgtttgaaagcaattcacaacgataaaacctgatgcagaaggcaacacaatactgcgaattatcacttaagataaatgtttgaaagcaattcacaactttagctgttacaggtcattatgtaattgaactgcgaattatcacttaagataaatgtttgaaagcaattcacaacacgctaaataatcaatatcatgccaaaattactgcgaattatcacttaagataaatgtttgaaagcaattcacaactgtattggtggaaggatagaaagagcgcttactgcgaattatcacttaagataaatgtttgaaagcaattcacaacaagggggatagatggtgctagagttgacatactgcgaattatcacttaagataaatgtttgaaagcaattcacaacgataggaagtcaataatatatttcaacgatactgcgaattatcacttaagataaatgtttgaaagcaattcacaacggaaacatttcgaatgatggatagacgactactgcgaattatcacttaagataaatgtttgaaagcaattcacaacatattattatgaggtttatttattgagtcaactgcgaattatcacttaagataaatgtttgaaagcaattcacaacatagttctgcctgtatttctgattctcaatactgcgaattatcacttaagataaatgtttgaaagcaattcacaactgctgtctagttaccctagtgaaatcttaactgcgaattatcacttaagataaatgtttgaaagcaattcacaacatggggcgtggcggattggctcgatggcaaactgcgaattatcacttaagataaatgtttgaaagcaattcacaacacacttgaaattctaagatttcatcgtctaactgcgaattatcacttaagataaatgtttgaaagcaattcacaacccttcagaatgctttagcgagagaattaaaactgcgaattatcacttaagataaatgtttgaaagcaattcacaactactctcatcattgagttgtagtttctcttactgcgaattatcacttaagataaatgtttgaaagcaattcacaacccatgagctttaatgctcactatgccagtaactgcgaattatcacttaagataaatgtttgaaagcaattcacaaccatgttgcatgcccggcaccgctgggaagcactgcgaattatcacttaagataaatgtttgaaagcaattcacaacatgacgccatggtgtcgaaaaagcctgcatactgcgaattatcacttaagataaatgtttgaaagcaattcacaacattgaatatggaattaacggtttcataatactgcgaattatcacttaagataaatgtttgaaagcaattcacaacggtatcgaagaaactcttggcaaattcttgactgcgaattatcacttaagataaatgtttgaaagcaattcacaannnnnnnnnnnnnnnnnnnnnnnnnnnnnnnnnttcacaactaatgattgggctgcttttggtttgaaataactgcgaattatcacttaagataaatgtttgaaagcaattcacaacgagtcaaccagcccactgttgcaccaacaaactgcgaattatcacttaagataaatgtttgaaagcaattcacaacggaagctgagtgtaagtctacccaaatagtactgcgaattatcacttaagataaatgtttgaaagcaattcacaacgataagccgttttgggaagaacagacattaactgcgaattatcacttaagataaatgtttgaaagcaattcacaactaaaataacagggggaacttcttcccagttactgcgaattatcacttaagataaatgtttgaaagcaattcacaacgaggttctatgcgcttaggcttagcaatacactgcgaattatcacttaagataaatgtttgaaagcaattcacaactgaattcggttgtgataccgtagacaccacactgcgaattatcacttannnnnnnnnnnnnnnngcaattcacaactgttgttgctatgatctagcacacctaaactgcgaattatcacttaagataaatgtttgaaagcaattcacaactatagcacgtgttatgctctcgttgcggttactgcgaattatcacttaagataaat

SEQ ID NO: 2318 - DNA, 19371 bp, synthetic construct
  misc_feature 1..19371: note = Synthetic
  variation 18656..18773: note = n is a, c, g, or t
  source 1..19371: mol_type = other DNA
caggacggagagaaaatagctggcatgacaactgccgaccgcaaaggcttcgagagtgcagaacaggcagtgctgaagaaccagtattcagacctgattactggcaacaccaccattgccgccgttttcaccaatgcccagttcagcgtggcagacctccagaagattgccaacttggcagccacaggcatggcccgctgcatacgccccgtcttcacgatggctgacggcgacacggtctatgccttgtcgttgggttccggctcattgaaatcggacgtgaacacagtgggaatcctcgcttcgctcgtcatggagaaagccattgccgacgccatacgctccagcctgattcccgaaaaggaatacctttcgaatatctaaatacggagagaggagagtgcagcgaacactctcctctcttatctttctatacactctttatggaattattagaaaacatcctttacagacttttacagacttattacttaatgaataattattaaaaacaatttcttctacaccttggtaaacataaagtcgggtgttagcaaatataatgcaaagtattgtttgtggagaggcgaggatgtgtttaaaacaatattccaataataagattatccacaatcgtaccaacaagacgcagaaagcgtatctgtacaataagagggtgtgcctatatggacacaccctcttattgtgcattagaatagttttcccaaaaatcggtgacattttataacaaaaacatattatttctttataataattctaatttctttccgaaaatcttgtacctttgtactttgtcatttgtacttttatttatcacctttttctaacttcttcaatttccatgaaacattgtatgttaagaatgaagaatcataaaatgaagaatgaagaatgtagaatgaagaacaacggaaaaaacggaaaagaacggaaaaacggaaaatgtagtttttcatttcatctgatgatttcagtgaaaaaacaaaaaattgcaacgagcatttccgcttttctgaatcatttccgttttttccgttgttattcttcattcggagcgaagcgaccattcttcattcttcatttaattacttttctcctcttggtgccagctgtgacaacaacggcacaaaactcttaccaaatggcaggaccttacgaggtgattgcccgcgatggggagtttcggcacacgaagggaggaagcgaacgcgacatggaagctgcgttcgacatggctaccagaggacaagactcggaagcggtaagcatcatcaacgcctacgcctccacgctgcaacgcctcgatggtcacgacgcaccgttgtgcgccattcagtgcttcaagctcgtgagggccatgacgctgatgaaggcgcacgaaacgcctgaatggtctgccatgattaggcgtgcgctggtgccgatgatggcgaagttcgaggctgacagtccgtatgccaacggcaactggggtgccatcgtgaaccgtctgcgcatggcttgtgccatcttcatgcaggacagcacgctgtatcaggctgcgaaggactactatctgacggcgttcgacaacggttctctgcctcgctacatcagtgcgtcgggacaatgccaagagacgggacgcgaccaagggcacgtgcaactgggattggaagcgttggctcagacttgcgaaatggcatgggaacagggcgatgacctttggggtgcgctcgacaatcggctactgaaaggatttgaatatactgctcgctacaacttgggctacgacgtgccgtttgaaacgtggcaagactgcacaggactctactgcgactggacggagcctggagcgatgagtcggggaaaactttgggacatctacagcctgccatacaaacactacgtcgaaaggaaaggcttgcagatgccttacacggaacgcatcgtgaagggggagaagccgaaggtgaaggaatacaagaaactgcaccaagtgttcacctaccctgctcccgaaggcgcaccgctgaagcacgactacgaggtgtgggtgcaggcacgaggcagcaaggactggacgaagattgacacgtacatggcaaaggtgaatgcacccatcggcaacaacaagcaccgagtttcggaaatttcatacgcattcttcgacttcactggcgatgtctttgtgcgagtggtttgcaagaaccgaaaatacaaagaggcaagaatccgccccgactacagaggtgtcattgccaacgtgcagaacgattccacggttcagttcctgctcttccagcccgagaacgtgagtgtggagtttgacggtgacatcacgaacaatctcctgctcttcacgtccaaaccgcccgtttcgatggcagcagcgaagaaggaggcaaaacgccaacggcgcgacttcatctactacgctccaagcttctaccctcaggacaccatccgcatcccatcgaacaccaccgtctatctggctggaggcagctacttcgcaggcagctttgccgtggaggatgcccacgatgtgagcatcttgggacgaggtgtggcgcgtccgaagagcgggtacgaaggatgccatgtgcatcgcagtcggcaagtgctgattgacggactgatagtgaacacatgtcccgtgggtggcagcgatggtgtcacgctccacgacgtgcgcagcatctcgcatccaggatggggcgacggtctgaatgtctttgcatcgaacaacgtgctctacgaccgcgtgttctgtcgcaacagcgacgactgcaccactgcctacgccactcgtaagggtttctcaggcaatgcccgcaacatccgtatgcgcaactccacgctttgggcagacgtggctcaccccatcttcatcggaattcatggcaatgcagaacgtggcgacaccatcgagaacatcgtttacgagaacatcgacatcctctgccagagtgagccacaggtggattaccaaggatgccttgccatcaattgtggcgacaataacttggtgcgcaacgtgctgttcgacaacatccgcattgagcagattcatcagggaagcctctttcaggtgaaggtgggctacaaccagaagtattgcgctgccccaggtcgctccgtggaggacatcacgtttcgacacatccgctacaacggcgaaacgccttacctctcagtcatcaacggctacgatgcacagcgcaaagtcagtggtatcaccttcgaaggactgaaaatcaacggacagaccatctacgacgacatgccaggcaaaccgcgctggtatgccaccgccgactatgttccgatgtttgtagggaatcatgtagagaatgtgagcttctccaaaacagcaagcaacttgaatgtaaacaaagcattggcttattgttcacgccaagtggatagagcattggaagcgctgcgtccttacaacttcggcatgatgcctcgtaacatcctgcaagggcaaagcacatggaatctgcgtcctgccacgaaggaggaatggtgttcaggcttttggccaggcattctgtggatgtccttcgcatacaacaaaagcgaagctgtgaaaaaggcggcagaaggttacacacattcgcttgttccgctcacacagcaatcggttttcgaccacgacttggggttcatcgtcatcaactctttcttgaaagcatacgaacagacaggaaacgccgactacaaacaacgtgcattgcaagcagcagactcgttggcaaccctctacaactccaaggtgggaacccttctgagctggcctcgccacgtgaaagactatggcggacacaacaccatcatggacaacatgatgaatcttgaactccttttctgggcagcagagaatggaggcaacccacgactgaaggacatggctgtgcgtcatgcagaaaccaccatgaagcatcatttccgtcccgacggttcttgctatcacgtggctgtttatgacacactcacaggcgaattcaaacgaggactcacacaccaaggctacagcgacgaatcaatgtggagccgcggacaagcatgggccatctatggctacacgatggtctatcgtttcacccacgaacagcgtttcctccgctttgcgcagaaagtggcagacatctatctgaaacgtctgcaagaaaccagcgacgacatggtgcccctttgggacatggatgcgcctcgcggtgcaagcaaagatgcctcagccgcttgcgtcgtggcttctgccttgctcgaactcgacacctacattcccaacaaaggctaccgacaagcagcggagcaaatgctcagcgacctgagtaccgacaaataccagagccgtgagaagaatgtcagcttcctgctccattccactgggcaccatcccgctgggagcgagattgacgcaagcatcgtctatgccgattactactatatcgaagcacttctacgctatcaaaaactcatgaataacaagtaaaaaagaaccaacagcaaataacactaacaactaaataagaatgatgatgagaacatttttgttgaccatattgtggtgcctaatggttttcacaagccaggcacaagatgaacatctgaagatgcagttcgacttttccaatacgtcaggaacagatgtcacagacaccacatcgggcatcacagccaaactgatgggacaagccaccgtgatggcaatgggacagtaccatgtactcaaccttggcaacggaacaggctatctcgacatgacacgcagcgcaggtgagctggttcgctcactggaagatttcaccgtgtcggtctattaccgcgtggatgcagacgcatcgctctcaggcgcaggccatttcctttggtgcttctcacagtcggcagccaacacacagaccgcatcgccctacactgcctatcgactgaacgcacagcgcatggccacctccaccggcggctggggcagcgaaacaggcatggaagtgggcagtgccagtgaaaaaggcagctggattcacttcctctaccgtcagacaggcaagaaaggcgaactgttcctcaacggcaaaagagtagcacaactctccacaatgcccgtgctgaaggacgccttcactgccgtgccagcctacaactggattggccgtccaccattctcaggcgacaactatctgaaacagacactcgttaccgacttccgcctctacgacacagcagtcagcgacgacgtagtggcacaattcgccagccaattgtccgacctcgaatacgcctatcagcacggaggcggtggcgacaattcatccctgctcaacgccatcaccgaagcagaagcattgttggcacagtcatccagctatcccgaaggagccgttgtgatgctccgagatgcactgaccgtggctcgcaacatctcggaacaggatttaggacaaatcgccttcgacaacagcgagagcgacctccgcgaagtgatgagcagttacaagaccgccaagggaaaaagcttcgacgtgagcggcatcaactgcgactacgacaccaaccgaggcttccgtcatcctggcggattgcacacccaagccgacttcgaccgcatcaagcgacaactggaggagaagaacccaatcgtcgtggaagcatacgaaaaactgaaaaacgccgaatacgcacgctccgacatccagacctatcccgtggaagtcatcgtgcgaggaggcagttcaggacaaaactacatcaacgcagcccgcggagcaacgatggcataccagaatgcactgcgctggaagattgaaggaacgaaagccaatgccaacgcagccgtgcgcatcctcatggcatgggcacgcacctgcaagctggtgagcggcgactccaactgggcactcgccgcaggactctacggctaccaattcgcacaagcagccgaactcatgcgcgactacgaaggatggagccgcgaagacttcgagacattcaagcagtggatgctcaccgtgtggtatgcaggcaacatcaacttcctgcgtggacgcaacggcacatgggaaaactacgtcggcaaccaaggcggcatccgtccaggacactactggagcaactggccactctgcaacgcactggcagtcctctccatcggcatcctctgcgacgacgtgttcatctacaaccaaggcatgtcgttcatgaaatacgaccaagtaggcaccttccaagacccacgcacagccaacccaatcctcagcgacggctgcaccgaattcatcggcaacctcatcgtcaccaccagcgagtcagccctcgaaacaggggcatacggcaaactcggacagatgcaagagtcaggacgcgacggaggacacgcagccatggcactcggactcgccgtcgatatctgcaaactggcatggaaccaaggcgacgacctcttctcctacatggacaaccgcatggcagcaggcatcgaattcgttgctgcctgcacacagaacgtacaaggactgccttggaccaactacaaatacgtcgattgccgcacagcctggcacaacggctggctcatgacaggaccagccgaaccagccgaagtgcgcaactactggggcacagtcatcggacactacgaaggagtgaaaggcgtgaagatgccattcgcagagaaagcatacacacagatgggcatcgacgtgggaggcatgggcggaaccagcggaccatacgaccacctgggctactccgtactgatgaacacccacgacacccaactctgtcctgaagaccagcgaccaacactcctcaagccacgcatggaagtgaacggcaagaccatcgaccacaacgaactgggcggactgcgcaacacctacgtcgtgcaaagcacacagcccgtagccctcggcaccaccatcaagctcatgcctcaactgcccgaaggagaagaagacactgggcgctggcagtggaacacaggcgaaaacaccaaagacatcaccatcaccgccaaccgcagctacgtctatcgtgccacctacaccaacgccaacggcatccagagcgaacaggcattcaccatcgccgtcgaaggcgactgcaccccaagccccctgaactacagcatccaagccaacggagaacaagtaggcgacaccaccgccaccgtcttctatggcaccaagctcagcttcacagcaagcgatgcagcaggatggtatccagccgtcgtttgggacaacggaatgagcggttcgcaagtcaactacggacccatcaccaccgagcgcaccatccaagcctacgtactcagtcagggcgagcgcaaagaagtcgtcaacttccacatcaagctcaaatacctacagcccaacatcgcagtcaacggcactctgttggaaaacacaaccaccatcatagccacagaaggcgacaacatcaccctgcaaccatacgttccaacagcactcggaaaagtcaactacgcatggagcgacggttccaccgatgcaaccctcacactgagcaacatcgccacatccgccatccacaccgtcaccatcagctgggaaggccatagcgaaaccatccgctacgaagtcttcgtgaaaggcaacgacacatcacgcgtcatcccatccggcaactacatgctgcgccacgcagccacaggcacctacctcacctgcaacggactccagcagccagtcagcttcaccgaaggcagcacagaaaaccctcagcagaaccaaatctggtacatcaacccaaccagcaatcgccactccatcctctccctgcccgacagcctctcgctcagcctcttaggcagcaccacctcagtagtgctcaagtccttctacttcgaaggagccgaaggaatcgaacgctatgccctccactcaggcacaggctcatcctcccgctattggtccgtggcagaagacggaagcgtgagcatcaacacacaagcatccatcaccgacttccctttcgaactgataccagcagacgtatccagcatcgtctccaccctctccacatcgtcagcacaaggccacatctacgacctgcaaggacgcatcgtgaagaaccccgataagaaaggcatctacatccagaacggacgaaagttgctgataatccactaaaagaagaacaacgaaaacgaaaaagaggatgtgcctatttcgacacatcctctttttgtatagattcagaaaagctccgcatggtgcaaactaaaaatttccgttctttccgttctttccgcgagacataaaaatcttaccacgtggggataataatagtcccacagaaatgacggaaatgacagaaaagctccgcatggtgcggagcaaatatttccgttctttccgttctttccgtgggacataaataacttatcacgtggggataataatagtcccacggaaatgacagaaatgacagaaaggctccgcatggcgcaaactaaaaatttccgtcctttccgttctttccgtgggacataaaaacttatcacgtgaagattgctatcccgcgaaaatcctaaaaaatcccatttaaatcccctaaatccctgattagaactccaatctgaaccccttttgcttcagctcatcatatttgcttttattgaagctgaagaggaaagcctccctcttgggcgagttccgcaccgtttcgtccaacggcgtcaagatttccagatgcctcaacttgttgtagaagttccgacggtcaaaccgcacgtcgaggatagcctcataaagcaactgcaactccttgatggtaaacttgtcgttcagcaactcaaacccaatcggctcgaagtgaatctgcctgcgcaactccttcagagcagtccgcagcattaagtcgtggtcgaaagccagagaaggcacctcgtccagcgcaaaccattcagccttggcagcatcgtcgccacccttcacctcctgcatcttcaccaaagcatagtaggcaatcgtcagaacacgtccacgagggtcacgcccagggtcagagaaagcatgaaactgcctgatgtacgcatccctcagacccgtttcctcctgcaactccctcagcgcaccctcctcagccgattcctccatctgcaaaaagccccccggaaacgcccaacgacccttgaaaggttcaatgccacgttccaccagcaacaccctcagcctcgttccgtcgaaaccgaaaatcacgcagtcagtcgtaacactgggacgaggataatcataacaatacctcttcccttcaccactcttttcctccattccattcatattatatttccatgattaaggtctgaggtccaaggactaaggtctgaggttgcctttgacctttgacttttgacctaagacatttgacattattacgcaaaaatacaaaatcttttccaatccaccgccatttcttgcgtaaatttcacaattttcaacagaatcaacatccccaatcacttttacactgctcattggatgaataattttcaatcttcattctttccccaaaccacttgtcacacgccctcgtattgaagaatctgaaagcaagttatccttcaagataacggcattacggaactaccatttccgtcgaacgttcattttcccttcatcgaaccttcatcacatccgcatcgaaccttcgtcacatccataacgaaggttcaaagttttttcctgtcgtcattcccacattcttccttgtcattttcttctcttattgtttggtttttccgtcaaaacaaattacatttgccattgcattaccaaatcttgaaagaaagcataggagcaaaataaaagaatcctccgaaggacgaaggactctcttaaatgttttcacaacggaataatccttattgtgaattgcttcaaattagtgctgcaaaattattaaatcttttttatactcacaaatattcacacatttttttgaacaaataacacccacttgatatagtatgaaaagaattataggtttagaccttggagtcagcagttgcggatgggcatacgttaaagaagcggagaatgaggatgaaaagtccgaaattctgcgtataggagtaagagtgaatccactgaccgttgacgaacagagtaatttcgagaaaggcaaaagcattacgaccaatgcggagcgacaaatgaagcatagtgctcgtatcaatctgcaacgctacaagttgagacgtgaacacctcattgattatttgactaaagcagggttcatcaacgaaggaactctcctttgtgaaaatggaaacagaaccaccttcgagaccttccgtcttcgtgccaaagcagcaaacgaagaaatcagtctttctgaattagcacgtgtcttgctaatgattaacaagaagcgtggctacaagagcaacagaaaggcaaatggctcagaagaaggtgccttaatcgacggcatggcggttgccaaatatctttacgagaacgacattacccctggacaatatgcttacgaactgaagaaaaaaggcaaaaaacatcttcccgacttttatcagtctgacatcatggatgaattggacaagatatggaatttccaacaaccattctatcccaacatcctgaccgacgaattcagacaagtgctggcaggaaagagcaaaaccaattcgacaaaattgttccttgcacgctattccatttatacggcacagaataaagaaaaggacaaggtcttacaagccttgaaatggcgttctgatgctttggcaagaaagctcgacatcgaacagcttgcctatgtcatttgtgagctgaacggacttatcaacaatgcaagcgattatcttgggaaaatcagcgaccgaagcaaagaactgttttttcagaacctgaccgtgggacaataccaaatgaaaatgttggacgagaaccctaatgtcagtctgaaaaacatggtgttctatcgccaagactatctggatgagtttgaacgtatttgggaaacacaagcgaagttccatcccgaactaacaagagaacgaaagaaggagatcggcaacatgattatcttctatcagcgtcctctgaaaagcaagaaaagtctcatcagcatttgcgaattggaaggaaagcagatagaagtggaagtggagggaaaaaagaaaaccatcacagtgggaagcaaagtgtgccctaaatcctcacctctcttccaagagtttagaatctggcaacgtctcaacgacatcgaacttaccgacctgtcaactcgtcaaaaatacggtttgaatcaagaacaaaaggaattgttggcaaaagagcttgaatacaaacccaagatgaccaagcagcagatgctgaaatgcctgtccctcaagcccaaagactatgacatgaatttcaaggaagtggatgggaacaccactcaggcaatgctattcgaggcttacaggaaaatcatcgaaatgtcaggacacggagaacatgatttctccaaaatgtctgccagcgacattagcactctcgtcgaaagcgtctttgctgctttaggcttcaacaccagcgtactccattttgatgctcaagcagcagacatctcacaggattccatgtatcagttgtggcatctactctattcctacgaaagcgacaactccgctatgggcaacaaggcattgatatgcagaatccaagaactcttccatttcgattccgatgaatatgcaaagatacttgctggtatatccttcaagcccgattacggcagtttgagtgctaaagccatcaagaagattcttcctttcatgaaagagggcaatgactattcaactgcttgcgtgtatgctggctacaatcattccaagcgttctctcaccaaagaagaactggacaacaagccactgaaagaccatctcgacattctctccaaaaacagccttcgcaaccctgtcgtggaaaagattcttaaccagatgattaatgtggtcaattctctgattgacacctacggcaaacccgatgaaatacgtattgagttggctcgcgaactgaagaaaagtgccaaagaacgcgaggcaatgactgatgccatcaatgcggcaaatagagagaatgaagaatataagaaaattcttgaaacagaattccacattccacacgtcagcagaaacgacattctccgctacaaactctacctcgaactgaaagacaacggattccatacgttatattccgacacatatattccacgtgaaaagcttttcagtcgagatttcgacattgagcacatcatccctcaagccagtctcttcgatgattcattctccaacaaaaccctggaaagcagaagcatcaatatcgagaaaagcaattccacagcatacgattatgtgaagggaaaatatggtgaagaaggtgcgaaaaattacaagacgcgagtggaggatttattcaagaacggaacaatcagcaagacgaagatgactaagctcttgatgactgctgacgacattccaaccgacttcatcaatcgagatttgcgcgattcccagtacattgcaaaaaaggcaagagaaattctggaagaaatagtccgtgtcgttgttccaacaacaggaagtatcacagaccgacttcgcgaggactggcagctggtggatgtgatgaaagaactcaattgggacaagtatgaccaactcggtctcaccgaaaccttcgaggacaaggacggaaacaccatccgcagaatcaaggattggaccaagcgaaacgaccatcgccaccacgccatggatgcactcaccattgcattcaccaagccttctttcatccagtatctgaacaacctgaatgcacgaagcgaccgttcgcaaagcatctacggcatagaacggaaggaactctatcgcgataagcataacaagttgcgcttcaatccgccaattcctttagacgaattccgcacagaggcaaagcgtcatctgcagaacatactcgtttccatcaaggcgaaaaacaaagtggttacacgcaatgtgaacaagacaaaatgcaaggagggttttaacaccaaagtacaactcactcctcgcggtcaacttcacaacgaaacaatttacggaagccagcagcgatatgctattcatgaagaaaaggtaggtgcatcgtttactgccgaaaaaatagccaccgttgccaacaaaaagcaacgagaagcactgctggcacgactgcaagcatacaacaacgatgccaagaaagcattcactggtaaaaacgcactcgacaagaaccctgtttggctcaacgaagcccacaccacctccgtgcctctgaaagtgaagtgcttgacaatggaaaccatctacaccatccgaaagcctatcaacaaggatttaaaactcgacaaggttgtagattcccgcatcaagcaaatactgcaacaaaggctcgacaaatataaaggagatgccaacaaagcattcagcaatcttgatgaaaaccctatttggctcaatcaagagaaaggcattgccatcaaacgcgtggctatttttggagcggtttcagcaaaagctattagagataaaagagataaatatgggcatttcttgttggatgaaaacaaccaacaccaaccaagtgattatataaatactaacggaaatcatcacgttgctttttatgttgataaagaaggaaatatacacgactatattgttacattttttgaagcagtaatacgtgctataaacggctttcctattattgataaagaatacaataaaagtattggttggaacttccttttcacaatgaaacaaaatgaatattttgtgtttcctaacactaaaacaggattcaatccaaaagaatatgatttaacaaatgaatcttattatcatttaataagtccaaatctgtttagagtacaaagtatatcaaaaaaagaatatggcaatgcagtagtaagagattttatatttagacatcatttggaatcatctgtaaatgtctccataaaagatatcacatataaacaaatgaaatcattgtcctttgttaaagacatagtcaaggttagattaaatcacatcggtcaaatagtgtctgtaggagaatactaaacaatgattaagaaaacattatatttcggtagtccttcctacctgagcctacgcaatgcccagttggtctatcgtatgcctgaagtggaaaagaacgacactgtgcctgagagcttcaagaaagaggcagagcgaaccatccccatcgaagacatcggagtggtggtgattgacaataagcgcatcaccatcacgtctggcttgctggaagcactgctcgaaaacaactgcgcagtcatcacatgcgacagtaaaagtatgcccgtcggtttgatgctaccactttatggcaacactcttcagaacgaacgctttcacatccagattgacgcttctcttcctctgcgcaaatcgctttggcaacaaacagtcagacaaaaaatactgaatcaagccagcgtacttagaaaagccacaggcatcctgccgaagaacatgctgacgtgggcaaacaatgtgaaaagcggagacagcgagaatctggaagccagagctgcaacttactattggcggaacatattccccaacattcctgatttcatcagaggaaaggacgaagaaccacccaacaacttgctcaactatggctatgctatccttcgggcatgtgtggctcgtggactggttgcaagcggactcctacccacatttggcattcaccatcataatcgctacaatgcctactgcttagctgacgacatcatggagccatatcgtccttacgtggatgagctggtgattgatgtgatggcacgaatgggagatttttccgaactcacacgagacatcaaagccgaactacttgtcatcccaaccctcgacgtagtgattgacggaaagcgaagtcctctgatgattgctgtgggacaaaccacggcttccctctataaatgcttcagcggagaactaagaaaaatctcctatcccgaattgtcatgagcaactacgaacgactaagtgaataccgagttatgtgggttcttgtttttttcgatttgccaacagaaaccaagaaagacaagaaagcctacgtggatttccgaaagaatctacaaaaggacggattcaccatgttccagttctccatctacattcgtcattgtgccagcagcgaaaacgcagaagtacacttaaaaagagttaaatcctttttgcctgagttcggaaaggtcggtttgctaaccataactgacaaacaattcggaaacatccaattatttcatggcaaaaaacctgagaaagcacgcgctcctggcgtacaattagaactcttttagaaacaaaaaatcccacgttgaagtgggattttttatatcataaaccattcttttttaatttctaataatccgtgtagtattctgtatttcagtacaatactgggattcggttgtttatgatatgcaaagatactaattcgaaagcaattcacaacaacatgggatatctttctctgtctctttctgttgtttatgatatgcaaagatactaattcgaaagcaattcacaaccattcgctcattgacgtattgacaccgtacgttgtttatgatatgcaaagatactaattcgaaagcaattcacaacgatatgacaacaagggaacaacaactgctagttgtttatgatatgcaaagatactaattcgaaagcaattcacaacgcattgaagaatgtaaaggttgttgttattgttgtttatgatatgcaaagatactaattcgaaagcaattcacaacaaggttggataatacataattgtgggtttgttgtttatgatatgcaaagatactaattcgaaagcaattcacaacgctgcatggattggcttagatttgtgttatgttgtttatgatatgcaaagatactaattcgaaagcaattcacaactgataaaaatatgagaaaaaatttagccttgttgtttatgatatgcaaagatactaattcgaaagcaattcacaactatcttctcaagtaccagtcactccaaaaggttgtttatgatatgcaaagatactaattcgaaagcaattcacaacgctccagcctctggggaggtgtatcgtgaagttgtttatgatatgcaaagatactaattcgaaagcaattcacaacatcctatcaacaatttgctgacttctatttgttgtttatgatatgcaaagatactaattcgaaagcaattcacaaccaaaaaaacaatcaagaaaaagaaaaaaacgttgtttatgatatgcaaagatactaattcgaaagcaattcacaacctaatagtatttccctttttataataactgttgtttatgatatgcaaagatactaattcgaaagcaattcacaaccatttatttttaatcatattttgagatgctgttgtttatgatatgcaaagatactaattcgaaagcaattcacaacgcagcgagttggctgttaatggttcaattagttgtttatgatatgcaaagatactaattcgaaagcaattcacaacactatgaggtcgttgtcctatggactgcagttgtttatgatatgcaaagatactaattcgaaagcaattcacaactgttctgttatgagtaaaattcaatataagttgtttatgatatgcaaagatactaattcgaaagcaattcacaacagcgagcatataattctccatctgcccagcgttgtttatgatatgcaaagatactaattcgaaagcaattcacaactctttatatttataaatatgtttatcgtgagttgtttatgatatgcaaagatactaattcgaaagcaattcacaaccggaatttgaaatacttgtctgcgtatatgttgtttatgatatgcaaagatactaattcgaaagcaattcacaacaagtgcaatcatggaaagcaccaagtttatgttgtttatgatatgcaaagatactaattcgaaagcaattcaaaaacaaattcgggaaaaatgcacgttttcaggagaggaacgtgtataattgagtatctttgccatgaaatagttggcaaagcgaaaacagaaagaaagaaacggtatgaaaaagagaaaaaggaaggtagcaaaaaccactaccacgatgatggatgctatcaaagccatgaagcgtggaaaccgtgaggctcagcaagaaatgcttggccctggtttccacagctttaataaactgcatcaatcaaaaaagacttatacgcgaaaagtgaaacacaagggaaataagaatgaagaatgagcgcttcgcttaaatgaagaataataaaatgaagaattaagaatgatgaatgaagaatgaaaattactcatccaatgagcaatgtaaaatacattcttcattcttcattcatcattcttcattaaaaaaaactattctccgaagatgttctggaggcgggtttgcagggctttgcctcggagggctcggtcggtaatctttccctgcgggtcgatgaggatgttgtcggggatggcgtcaatcatatagacgggggaggcggcacattcccatcccttcaagtcggaaatctgcaaccatggcatcttgagctggcgaatggcttttacccacgcatcttttctctcgtcgaaggaaacgccgattacttcgaagcctttgctgtggtatttgttgtaggcttcaagcacgtttggcatttctgcacggcatggtccgcaccaggatgcccagaaatcgacgagtacccacttgccttctccaacgagttcgctgactttgtgcatcttgccgtcggggtctgccatttccagatcggtgtattgcttgccgatgaaggctgtcttgggactgtctttcggctggagcatctctgccacttcgtcttttgctttcttcaaatatggatgcttggagaacactaagttctgctgaaccagcttgtcgtattcctccacgccgttgtcgaagaaatagagttctgagaaggctaacggtatgagggaattacgttcttctttgaacactttgttggcgaatgctatctgctggtctattgcattgttcatttcctccatgagcttttcgctctgtgcctcaatctcggcttcggtcatcttggaagttttctccctgaaggtcttcatgaggttgtcctgttggatgtcgtatttggtgagccgctcgttgagtggtgatccttttagggtactgtcgttgacattgacgaggatgggtgtgccgtcgttgaagaacacggtcatccacgattgcttctctgcctggactgccatgaaggcatctttctcggcggtgccattgaacgagaacttgcctttggcaactacgacgctgtcgatggcttggttggtcaacttgtctatgagatagactttttttccttcgcctgcgtaggttccgctaacggaatacttcacctgctgtgccattgcgggcagacctgcggctatgagtgccgctaacaaaatttgcttcttcatgcagctcgtaagtatgtaagtttgtgagtttttaatcagggattttaaggatttnnnnnnnnnnnnnnnnnnnnnnnnnnnnnnnnnnnnnnnnnnnnnnnnnnnnnnnnnnnnnnnnnnnnnnnnnnnnnnnnnnnnnnnnnnnnnnnnnnnnnnnnnnnnnnnnnnnnnntacttaattgaggtttttgagttctcgctggatagcagtttttcagtcagcaaatttattcttttgagtcaacaaattatcacaaattatctcaaaaataaaaaataatttgtgccttgtttgtggccatttgttgacagaaaaagaaaaattcgttgattggctacgccgagctaaaaggttcacttttcacctttcacattttttatgagtttttcccagtctttgtcatcttctgccaggtcgttttccattttctgccgctgaaggcgatagacatcgatttgttcatcggtgatgttcatgatttgcttgcattgcctgaagtatttcttcatgtcggtgacgatgctatggctgctgagggcgtatgtgaatatatcgacttggagggtttgtggaaggctttgtattgcatgttggaaaaacatttgcttgtatagggagtcggccacttcgctcttgtaggacctgcggaggttgtagaatttttctacgttttctgtgaagtgtacattgccgacggtattgatggtttcgatgcttgatgagaagatgcgttcgatggcttcggtataatctattttttgtatcaggg

SEQ ID NO: 2319 - DNA, 19365 bp, synthetic construct
  source 1..19365: mol_type = other DNA
  misc_feature 1..19365: note = Synthetic
ttatcggcggttagggtttcctcttcatcccagtcaaaataaagattttctaagggtttatatactggagatagttttaccaataacggaatcagctgtttattgacaatagatttaacccaaatcctatccgaagtaaaacgggcattcgccagctcgtactgcacttccacagaacctacaaagcctttttcatcggtcaaacctgtgccaccaagatagcgtttggatatttcgttatcggcccttttgattaaagtatcgaaagtctccccactattggcgttggagaggttaggaatatcaaatttttcacccccacgcgcaatcataaagccattgcgcttgaaatgcgttgccatctcaaaaagttccatcatacggctgtcgtcctctcggtcagtggttataaataaaggcggaacaccgtatttgtctataaaatccagccaagaacccaaaccttttgacaccatcaattttattgagcatttaatagaagagaaaacatgtaataaagacgatatagtaatctatatcggggacagtttaacagaaaatggatatgattttttttaaatgatttagtaaagattattcttttttggtaattaaaatcccccaatattattatctattgttcaaaaatttcaagagaattatttatatatatcatttaaaaacgaaatagagtatggtgaaacattttaatagaggaactatatttataagaaaaaaaatgatttatcaataaaaaaacaccaaataaaaatagaaatttatacacaatattgactttcaaatagtcttttttttaacatctgttcggattaaatctactgctgtttccattgaaaagtatctatcaaatgctgaagatcatttttaatgtaatctaccgctggtgccaaagaatctggtttgggtctggtattaaaactcaaatctccggtaacgaaatattttgtactatccgtaatataaaactgtacattagaggcagtaggaccacttagtatataaaaattaccataaacttttttcttgggaaaactaaaagattgcgtttgtatggaagttgcttttattgtgtgtttatagaccattttttcggactctttaatgtgtgcctccaaatcatttttcagattaaaaaaagtcataaaaacataagcattcattttaggataagaaatattataccagccggtatttttacctttcgctactttagcaaaatgagaatattcaaaaacaaaaggcaattctccgtcaaaaacctgatattccggttttggatactccagcctaagctcacctttaggcttcggaaagggcttttcggaacaccccgccaccaaaaacataaatagtaaaaaagcaccatactttagcattttgcaaagataacgaataccgtgatatataccaacggcataatataaaaagaatttcatttatgtttcctaattcccatctgttttcatcaacataaacagcatataatatcttccttatttatataatttatatttttgtggtatggcaataaaaatacttttccaaacagaatccgtagaatggatagatgtgaaagctcctaccagagaagacctccacacactacattctaaatacaacataaataggatgttactggaggataccatcgaccccaatcactttccaaaatatgaagaagtagacggcataaaatttttcctcacccgagaaaatgtgcgattagagcgaaaaacactgaacggcattaacgacatcagcacaaaattgggcttttttttggtagaaaaaaccatcattaccgttcatagaatcaaaagcaaaagcatatcggagcttcaaggagaaattgcacaaaaacaaaatttgtacaaaaccatcactcctgaaaaacttgcactgaaactcgcactgaaagtaatgaaatcatacgatgatgagagcaagaaactaatgtctaatatagataaaatagaaaccgatatattccttaaaaataaatctcaatataaccccattagacctctttataaaataaaaagaaaggcaggtctcaatatgaggattctcagtatgtcttccggctggattagcagcttccgaaaactgaatttggaagatgtagaaataatggacctaatagacaaacaaaatgatgtaatacaagactttgaccatattaacaaccaaacagccaacctcatttctatgtatattgcactatctgaccagaaagccaatcaggtaatgaagctgctcgcgatatactctgtttattttcttcctattacctttatagcaggagtatacggaatgaattttgagataatgccagagcttcatacccgatatggttattttatcactctgggaggtatgctgctaattgttttagcaacatttatctatattagacgaaaaaaattttgatattctaagttctcttttatagcttgtttaaaaattaaattctaataatttgtataatataagattttattaaaaactgattaccagtttttcaatattgatttttcatagccacatataaatcaataaaccaaactgtagcaacaacaaaaaaatacccaataaatattactaagatatggtagtatttatataataatatactttgaattttaacaatagaaaataaaaaaacatctggaatatcattatacatatcgtaaaaacagccttggcggatactcctaaatgatttttcaaattgaaaactcgtttattactacaagtaaatgtaaaaaagtttgatttattcaaaattaaaaaaaagattacaaagcgtattttttaatgatttgataaagacagaatactatccagtaattacgagcttatgataaaaaattcagaaaataaagataaattatcttgaactcaaaatttaaacaggctcttagtttttttgaaatcatataaaaataaagactttatcaataagataaagcccttctattttcaatatttatatcaaatcaagtattaatatctatacacaatggcattgatattcattcctgctcctacagaagcaaatacgatattatctcctttcttgaaactatgcccttccattttccctcttttgataaggtcaaacattgtaggaatagttgctactgaagaatttccaaactcctgaaccgtcataggagatatattctggtcgtaagatttaattccatagagcctgtgcaggcggttgataatcgcgtgatccatttttgcatttgcctgatggataaggattttgctaatatcgctgatggtaagtcccgctttgtctatcgtatttttgatggcattgggaacatatttgagtgcaaattcatatatcttgcgtcccctcattctaacaaattggcgttccacacaatggttcaagttaagagaaggtcctgtctctaggtatgaaagttcctctccattgaaacagattgtactctcggaaataatgccgttgtcactatcctcagaagccgtaactactaccgcacccgctccgtctgcaaaaatcattctgtcccgatcataaggatccaccgttctggaaagtacctcccctcctactaccaaaatggtttttgctttacaggctttgattaaagtatcggctaagctcattccctctacccagcccgggcatccaaaaatcatatcataggtgatacaatttaggtttttgatacctaatttatttttaagtcttgccgcagtattaggcataaagctcggtattccatttgaggtaacctctccaaaattagtcgcatagataatataatctatcttttctctgtctatgcccgcatccgaaatagcagcctccgaagcctttgctcccaaatcagaattagattcaaaatcttcggcatagcgtcgtttttttatttctgttatttctataaatttatttacaatttcatcattcggcttatctatacgctgatgattatcatcataaaaaacagcatccataaacgacgaagcatctatcacccgctgcggaacatagcttccggtacctattattacagtatttggcatattcattctaaattgatgtgcaaatttaatcattttaatattaatatataaaatcatctctactttcattttgcttacctcgtccttttcgtttacctttgcaaaaatttttgtatgaaaatgtcagcttcacaaaaaggtcttttcattgctattttagcttttataatggcttttgcaatctattttttattcctaaaaaagaaaaacgattacttagtggacaatcccacgccgaacacctattatttcaaaatcaataacggtggagaaatagtaatcgccggcggacagtctgtaaaagtgaacctaaaaaacggaaaaaataatatcgccgtatttaacgaacagaaaaaacgtctttatgattcttcctttgatgtaagctccgtgagagggctactcaatatagcacatcaagattactatgtaaatcgccagtactatggatacggtctcaacaaagactctctgataatgtctatgaacaaagtaataatagacggaaaaccctatcacagtgacgtgaaacattacaacaaactctatatagaagatttttactataatgtgaacgaagactatgatgccgttataaaaaatatacaaaaaatagagtcccgaactaaaatattcaggaaacaagacttcatagactactacaaagaaaatattaacctataaaataaaaaaacatttattttgaaacagcaaataactccctataatacagatgccggaaaaaaaagagaggtagaaaatatgtttgacaacatcgcacctaagtacgatatgctcaaccatcttttctctatgaaaatagacaccctatggcggaaaaacctcgtaaaatggatggaacaagaccacccgaaagaaatattagatgtggctaccggtacaggtgatctagctttagccctttgcaaaggactgaaaacaaaggtagtaggactggatttatccaaaaaaatgctggatataggagtagaaaaagtaaaaaaacaaaaactggaagacagcatcacgatgataaaaggcgatgccgaaaatctgagttttgaagataataggtttgatgcggtatcatcggctttcggcgtaagaaatttcgaagacctggaaaaaggtctgtccgagcttaggcgtgtggtaaagccaggcggtagcgtctatatcttagagttttcaaaggtagagggtatcctcagtccgttctatatgttttatttcaaaaacattcttcctgccataggaagagctgtatctaaggacagccgtgcctatacttatcttccggattctgtgaacgcattcccttacggcgaaggatttaaagaaatactactatccttaggtttcaaaaaagtagaatacaaaaaacaaagtttcggcattgctacaatctacaaggctacaaaataaaataaataaaacgtagttattagaatcaaaaagaagtgttatgaaaaaaatatttgttttaatatcattggcaggttctttctatgcctcggcacagctgttcaatataaaagaccgtatggacaatttagaaaattttgacaatcaaaaactaagctggggattttttctaaattttggacaaaatgattataaaatagtactcgaccctaaatatggaagccgaggtaataaaaacttagtttcttctaaacctacctatagctttggagccggactaatggggaaaatgagaatcaatgataattttgatttaagattggaacctggtctgcaattcatcgaaagagaactaaaatttgacactcaaagcaatgaccaatacgccgccaatgattctttcgaaacaagagttttatccaaagaggatatggaaaaacgcgtaaaagccactactatagatgtcccactattattagaatatcatatagacaggtggtacaactcccgcccatatatggccgcaggattgaactggatggtcaatctgcaatccaacgaaaaagatgaagacgacaaccaaacagcttctgtatttcgaagtactacacaaaactttgggtattctgcagagataggtgttcaattttattttgataaatttaagctcactcctgcatttagaggtacttttactatcaataacgaactggtgaaagacaaccctggtacgccgccttattgggcatcagccatcaatacagccaagggaagaagctttatgtttatcttaaaatttgaataaaaaaacagcagctttcgtatagtctatattttaatttcatcggatataaataatagaaaacaatacgctgaaggtgaggcttatacctgatagaaaaataaataggtatctctaaatatttcttgtctctatcgtttcgtaatattatttatctaccacagaaacaacgacttggaaacctcagaagaaatcgcaaaaaggaatattatctaaatatttccctgactattagccatcataattttctatttgtttaagctaaaaacaatttaacttttattttcattaataataaaattgtatatttgcatagataacataaaaattatatttaaccttattattaaaattatgaaatcaaaagttaaaatttttgccttaggcatttcattagcttccttgacgagctgtgctttaacaaattctgtaaaaacagattaattatcaaccaaatttaaaaattgacaacaaattatcccatagtaagattattgatgtccaagaaattaaagatgcaagaggctattcagatgaaaaagtaattttttacaaaaaaacctttataaccaaacaatgtccggcgcatatgtagctgaaaaaccagttgctgaaattttgacagaagctataaaaaaaggatttaaagaaaaaaacatttctgttggcaataataatgattatattttaaaatctgagttagaaaaactagactatgaagctatttctggattttctaccgttcagttaattccacaaattactgttaaatttcaacttgttgacaaagatggaaaagttgtttggactgatataataactggaaaagcaaatactaaaagtattaaatttgaaaaatttctacctccagcaattgataatcttatagaacaacttgtaaacaatcccgaatttttgaatgctataaaataattcacttaaaagacaattttatttaacctcagtttttgataagcgtattctatatatttttcaaggactgaggttatatattgaatctttatatcagtaaataagaacacttataacaaaatgattaaaatgggacgggctatctaaaccttaccatttgtattctgcatgcattgaaaacggctaacaaagctacgcctacatctgcaaacacagcctcccaaagtgtagcctctccaaatgttcccagcgtaaggattataatcttgacaccaaaagctagtcctatattctcccagattatatttcgggttgtttttcctattttcatagcggttgccagtttagaaggctcatcattctgtatcaccacatctgccgtttctactgccacatcactgcccaatgcccccatagaaatacctatgtctgccgaagctatcacaggagcatcatttatcccatcccccatataggctgtatttccggcagattgagcttttattgtttcaaattctttgagtttgtcctctggcaatagattacctatggctttctctatgtggagttctttagctattttatttgttacttgatgattatctccggacaacattacaaaatgcttaatccctatcctgcgaagctttgtgatactttcctttgcatccggttttattttatctgctatcgtgatataccctacatagcttccgtcataagcgataaatactattgtttctaccattttttcaaaaaaagatggcgtagccactccttgcttggagagcaagtccttatttcctatacaaagaagcttcccttctatcattcccaaaagcccgcttccgggaatttctttaacctcgtctgccatagggatattccactcttttgtttgtacgaaagctgttatagccttcgcaatcggatgagtagacttctcctctattccggctatcattcccatcatctttgctttatcatattctgatgagatttctattttgttaatcgcaaaaactcccttagtaagggttcccgtcttatccactaccaaagtgtctacatttacaattttctctaaatatgaagctcccttgaacaatatcccattctttgaagccgctcccaatcccccaaaataccccaatggaatagatataaccaaagcacaaggacaagatataaccaaaaaaatcaaagatctgtaaaaccattccgaaaactgataattgctaaccaaaaacaaaggaacaatactaatcattaccgccaaagcaaaaactataggagtatatattttagctaactttctcaccataagctccgtacctgcctttctatgagatgcgtcttctactatctttaatattctttgtacggaagaatcttcataagctgtcgtagcctccatctgaatgacattctccagattgattactccggaaaatattttttcgccctttcctacagagattggtttactttctcccgtaatggcagccgtattcagccttgccttatctgatactaatttgccatcgataggaattttttcccctacccttacctccaaaatatctcctatgttcacttctttgggcggaatactttgccaccctccatcacgccaaactcttgcctgagtaattttaacactcaataaatctttaatgctcttcctcgccctttttacagcaatactttgcaaatattctccacaagtataaaacagcattactcctaatgcttcggaatattctccgagagcaaaagcacctatacaggctacggacatcagcgtaaattcattaaagaaatttttatttttaatttcttctattgaggatttcataaccggataagcaaccggcagcgtagctataaaataaaataaaaacctcaatagtccatagaaaacagaaacactaatgtgttgactaacaaaaccttctacctcttcgtaataaggaagatttatagtataaaacttagaataataatcaatgaacactccaaaccctaaaaggacaaaagaaaatataatccaattattaaatgcgtgtgtgttattctgatgctgccctgttgaacagcaatgttcttcattttggcacatagaaacttattttatgataaaaatatcgtaaagcaaaacaactatcactaagacttccgcacaaattctgatttcagagccatagagccaaatccatctatcttacaatctatattatggtcgttatcaaaattgagtctgatatttttgactttggttcctgcttttataggtttaggagcaccttttacaggcaagtctttgattacaactacagaatctccattctgaagctcgttgccgttagcatctaaaattttctgtacatcatcttgctcttcttgcggattccattcgtagaaacactgtgtgcaaaccatcaatgctccgttttcgtaagtatattcggaatgacatttaggacaattcataatcttttattttttttgcaaaaataattatttatttacgaaacagcatcatccgtacctcaaaataaaatgcaatactcccttaaataaaaaagccccgaagaatagtcgaggcactaaatgttttcacaacggaataatccttattgtgaattgctttcaattgggacaaatgtacatatttttttctaaattgacaaaaatattttttgtatatttgtaaagtgttaatcaatttaaacctaaacacctattatgaaacccaaaagaatccttggattagatttaggcaccaactccattggttgggctttggtagaagaatctgcaagtatagaacaaccttctaaaatagtcaaattaggcgtccgggtaaatccgctcactacggacgaaaaaaataattttgaggcaggaaaaccgctttccacgaatgccgacagaacaacgaaaagaggggctagacgcaatttgcaacgctataaactcagaagagagaacctaatccaacttttgattgaacatcatctaattaacaaaaacacgcctctgaccgaaatcggcaagggctccacctatgaaaccctttctttaagagcgaaagccacgaaagagaaaatttcattggaagagtttgcccgtgttttactcgccatcaataaaaaaagaggatacaaaagcagccgaaaagtgaataatgaagaggaaggacaagccattgacggtatggcggtggcgaaaaaactctatgacgagcagcttacgcccgggcagtatgtctattcgcttttgagccaaaataaaaaatatgttcccgacttctaccgttccgacttaaaaacggaatttgataaagtatggcattttcagaaacaattttatcccgaaatattatcggacgagctatacaaagcattgcaagacaaaaacaagacgcagacttgggcgatctgcaaacatccctttcaaatagaaggcattaccctgaaagaaaaaggagcagaactgaaaaagaaaaaatatgaacttagaagtctggcgttatccgagcaatttgacttggaacgattagccattgttttgcaggaaattaacaacaatctcaatcagtccagcggctatctgggggctatttcggacagaagtaaggaattgtatttcaataaagaaaccgtgggggaatatttatggaaacaaattcaaaagaatccgcatacttcgctgaaaaaccaagtattttatcgtcaggattatttagatgaatttgagcaaatatgggcgacacaagcgaaattccattcacaacttaccgatgaattaaaggaacaggtccgcgatgtggtgattttttatcaaaggaaattaaagtcccaaaaaggattgctcagcttctgccaatttgaaagtcaaatacagaaatacacagaccccgaaaccggaaaagagaaaaaaagaaccatcggaagacgcgtggcacctaagtcttcgcccctattccaagagtttaaaatatggcaaaatttagccaacttaacttttgaaaaaactaaggcttctgatgagaaatcgcctttggcacaaaaagaaaaaaatatttatgtactgaatgaagaagaccgccaagcactctttgaagaattgaacttacgcggaaatctaagccaaaaagaagtgtttaaatttctggggctgagagaaaaagagtggcggacaaatttcccgcaaggcatacaaggcaatcgtaccaatgcagtgctgatgaatgcttataaaaatattttggaggcagaaggctatgcttttgattgggagaaaaaaacagctcctgagattaaagaagaaataaaatccattttttcatcggtgggaatcaatcccgaaatcatttattttaaagcttctttggaagatacggcgtttgaaatgcagccagcgtaccaactttggcatctgctctacgctaccgaagaggatgacaaaatcagcgaagaagacaaactcgtctatggaaacagtgccgtaaggcttaaaaaaaaattagtggaaaaattcggcttcacaccggagcaggctaaatgggtggcgaatgtccctttgcaagatgattacggaaatctttccaccaaagcgatgcgtaatattattccgtatttggaagccggacacgagtattccgatgcctgtgagttagcaggatacaatcattctaacagccttaccaaagaagaaaatgagaaccgcgagctaaaagaggcgttggagcttttaccgaagaacagccttagaaatccggtggtagagaaaattctcaatcagatggccaatgtcgtcaaccaaatcatcgcagcatacggaaagccggataaagtccgcatagaattagcccgagagcttaaaaaaagcgcccaagagcgtgaaaaaatgaccaagcaaatcaatgcggcgaccaaacaaaacgaagaataccgaaaaatattaaccaaagaattcggcattccgaacccgacacggaacgatgttatccgctaccgcctctggctggagcttgaaaacaatgctttcaaggatattttcagcaataagcaaatcaaaaaagaggatttgttctcttcaaagatcgacattgagcatatcattccaaaagccttgttgtacgacgactctttctcgaacaaaactttagcattcaaggacattaacctaaaaaaagccaaccgtacgggctatgatttcatttccgaagattaccatgaaaatctcgacgattatgtgcagcgtgtggaaatgctttacaatgggggagctatctcaagagccaagaaagaaaagctgctgaaacctcaaaaagatttgagtgaaggatttattgaaagggatttaagaaatacgcaatacatcgccaaaaaggcaaaaaatatgcttttagaagcgttcagagaggtggaggccacttcgggaagtgttaccgacaagctaagagaagactgggggcttatcaatgtaatgaaagaactgaatctgcccaaatacaaggctttgggcttaacccaaaaggaacagcgatttgacataggcagaggagaaaccaaagaggtagaagtcatcaccgattggaccaagagaaacgaccaccgacaccacgcaatggacgctctcacggttgcctttaccaagctaaaccacacccaataccttaaccgcgtaaataccgccaatgacgattccatagacaacgaaaaaatcatagaacgggtaaatggcaaaaaacagttcattccaccaatgcctcacttccgaagcgaagcgaagaagcatttagaagaggttttggtttctataaaaaataaaaacaaagtctttacaattaataaaaaccacaccaaaggcggcaagaacgaaccgcaaaaagtgaaaacccctcgcggacaattgcataaagaaactgtttacggcaaggcgaaagttccgatgtcaaaaccaactaaaatcagcaaaaagtttcctttggaacaagcaaaattgatcattaatccaaaagaaaaagaagccgtactaaagcatctggctttgtacgacaatgatcctcaaatcgcttttgacaccaaaacacttaagaaaaatcctttgctcttgagcgatgaacccttaaaagaggtgctttgttttgaagaaatatttaccatcagaaaagaaatctctccagatctgaagatagacaaggtgatggatgagaaaatccgacagattttaaaaaagcgtttatcggcttatgacaacgacgctaaaaaagctttttcggacttagacaaaaatccgatttggctcaacgaagaaaaaggcatctgcatcaagcgggttaccattaccggagtgagcaacgccgaagcactgcattatcaaaaagatcacttggggcaagaaattttagatgaaaaaggcaatagaaagcctattgattttgtcagcaccggaaacaaccaccacattgccatttacgaagataccgaaggtaaattacaagaaaaagtagtttcgttctttgaagccattgcaaaggccaatcaaggattgcctgtcattgataaggagttcaacaaagacttaggctggaagttcttattcacaatgaaacaaaacgaaatgtttgtcttccctaatgatgattttgacatcaacgaaatagatttactggacgacaaaaacgcttctttgattagtaagcatttatttagagtacagaagattggctctaaagactatacattcagacaccatttggaaacaacagtagatgctaaaagcgaattaaaagatattgcttataaaagaatcaatagtttagagccattacacaatatcaaaaaagttcgcatcaatcatatcggcaaaatagtacaagtaggagaatattaaaactatgcattatgctctaccgctctatctacattggcaatcctgcctatttgaagttaaaagacgagcagatgaaaatcatttgccccgaaacaaaagcagaaaaagggagcattccggtggaagatatcggtttggtgatgctggaccattttcaaatcactgtttcccatcagcttattcagaagttgatgggaaataatgtggtgctcatcagctgcgatgcattccacttgccgcacggcgtaatgcttcccctaagcggacattccgagtattccgaaagggtaaaataccaactcgaagccagcgagccactcaagaaaaatctttggaaacaagtggtagaggcaaaaattgaaaatcaaacagaggtactgaaacagcggaattgctttttcgaaccgatgcttcaatataaaaaagaggtcaaaagcggagatgctaccaacatggaaggcattgcggcacagcactattggaagtatttgatttcaacggacttccttcgcgaacgctttggcgaatcgcccaatcccttttttaatttcggctatgccatgctgaggagcatcgttgccagagctattgtggaaacgggattgatgcctgtattgggaattttccaccgaaataaatacaatgcctattgtctggcagatgatatgatggagccgtaccgtccttgggtggaccagctggttatgcagtggattgacgagcatccgcaagatgacgagttgagtaaggattttaaagcctttatgctgaatatagccacgaccgatgtccgaatcgaaaacaagaaccgcccgctcatcgtagcggtaaaaacaacgattgtttcgctttacaaatgctacaccggcgaaaaacgacaacttgctctgcctgaaatgttatgaactcagaccgatttaatgcctacagagttatgtggataatggtattatacgacttgcccaccgaaaccaagaccatgcggaaagccgcacagctgttcagaaaacgcttggaagacgatggtttcggactgtttcaattttccgcttacatccgccattgcccgagcagagagaatgcagaagtacatatcaaacgggtaaaatccattctgcccaaatacggaaaagttgccatcatgtgcattaccgataagcagtttggcaacattgaaattttcttttcgcagcaaaaagaagcaccgccacccacctatcagcagttggagctattttagactgagcttttacaagcagaaaatcattaggaataaggctaagctattcttgtttctgctaaaaattgtaattctaaagaacgcaaaacccgctgaaaaatagcgagttaaattttgaggttgcgaactatcgcaaagatagtaaaaattgaaagcaattcacaacatcggtcaagccctgcaatggttttctgcagttgcgaactatcgcaaagatagtaaaaattgaaagcaattcacaacacaaactaaaataatattatgtacagagtagttgcgaactatcgcaaagatagtaaaaattgaaagcaattcacaacatatatttgataatggttttaagcataccagttgcgaactatcgcaaagatagtaaaaattgaaagcaattcacaactatccgaccaaacaacgatataaaagcggtgttgcgaactatcgcaaagatagtaaaaattgaaagcaattcacaactaaagatgttttaatttttccataatgtttgttgcgaactatcgcaaagatagtaaaaattgaaagcaattcacaacaatctatattataccaaatatccccatctagttgcgaactatcgcaaagatagtaaaaattgaaagcaattcacaacatccaccttgataatattcattacagctctgttgcgaactatcgcaaagatagtaaaaattgaaagcaattcacaacagctctatgtatatgggttttttttacaatgttgcgaactatcgcaaagatagtaaaaattgaaagcaattcacaacaaatctttgcttgcaaatccgtgcatatttgttgcgaactatcgcaaagatagtaaaaattgaaagcaattcacaacaacttgcaatttcatcaatagataaggactgttgcgaactatcgcaaagatagtaaaaattgaaagcaattcacaactacctgaaggcgataaacaaaaagtttgtagttgcgaactatcgcaaagatagtaaaaattgaaagcaattcacaacagcttttgtatatcagatatcctcaatgaagttgcgaactatcgcaaagatagtaaaaattgaaagcaattcacaacctgccatggtagctcttcgtactgaataacgttgcgaactatcgcaaagatagtaaaaattgaaagcaattcacaacggtcttcttgattgggaacaccgtactccggttgcgaactatcgcaaagatagtaaaaattgaaagcaattcacaacatattcttttttcattccgtacactttgccgttgcgaactatcgcaaagatagtaaaaattgaaagcaattcacaacagcgaagtagctccgaagaaactccgctcggttgcgaactatcgcaaagatagtaaaaattgaaagcaattcacaacagcagtatgcttatttactatcgcttgtttgttgcgaactatcgcaaagatagtaaaaattgaaagcaattcacaacggcttccgtgcagtagtacgctccgtttttgttgcgaactatcgcaaagatagtaaaaattgaaagcaattcacaacggcttccgtgcagtagtacgctccgtttttgttgcgaactatcgcaaagatagtaaaaattgaaagcaattcacaacggcttccgtgcagtagtacgctccgtttttgttgcgaactatcgcaaagatagtaaaaattgaaagcaattcacaacgaatggtgccaacgccgtgaatatgccgtagttgcgaactatcgcaaagatagtaaaaattgaaagcaattcacaactgcattataaatagtgataaccttttctccgttgcgaactatcgcaaagatagtaaaaattgaaagcaattcacaacaacagcttctggattatcggatactaatttgttgcgaactatcgcaaagatagtaaaaattgaaagcaattcacaacagcttgatgtatatgggttttttttacaatgttgcgaactatcgcaaagatagtaaaaattgaaagcaattcacaacgctacctgcaccattaccaccaataaaatgttgcgaactatcgcaaagatagtaaaaattgaaagcaattcacaaccaggtttattcaagaatcttcccactgcctgttgcgaactatcgcaaagatagtaaaaattgaaagcaattcacaacaagacaatccgaaagactttccccacttgagttgcgaactatcgcaaagatagtaaaaattgaaagcaattcacaaccgtgccgttacaaaaaatgcaggcgtaaaggttgcgaactatcgcaaagatagtaaaaattgaaagcaattcacaactttagatgcccaaaaggaggggtacacagtgttgcgaactatcgcaaagatagtaaaaattgaaagcaattcacaacaataatataataaaacaacaatacaattatgttgcgaactatcgcaaagatagtaaaaattgaaagcaattcacaacgcgtggctttggacgatagaccccacgatgttgcgaactatcgcaaagatagtaaaaattgaaagcaattcacaacataataaaatttaccctatcaattccagccgttgcgaactatcgcaaagatagtaaaaattgaaagcaattcacaacggaatcttcattctcttgaccaaataagtagttgcgaactatcgcaaagatagtaaaaattgaaagcaattcacaacgtagcttttgttgctttttttgtcatataagttgcgaactatcgcaaagatagtaaaaattgaaagcaattcacaacctaatttctttaatttaaaaccctctaaatgttgcgaactatcgcaaagatagtaaaaattgaaagcaattcacaacaatggtgtagtaataccgttcggaagctgagttgcgaactatcgcaaagatagtaaaaattgaaagcaattcacaacatactggctattacatttagtattatatcagttgcgaactatcgcaaagatagtaaaaattgaaagcaattcacaacttatcttaaacaaaggtgcatctggagtgggttgcgaactatcgcaaagatagtaaaaattgaaagcaattcacaacagatatcagagctgttggaggtttctccgggttgcgaactatcgcaaagatagtaaaaattgaaagcaattcacaacctgaagcctcgtgttaagcctcataatctcgttgcgaactatcgcaaagatagtaaaaattgaaagcaattcacaacgggtgagatgtcttgaaataagtaggataagttgcgaactatcgcaaagatagtaaaaattgaaagcaattcacaacaataatataataaaacaacaatacaattatgttgcgaactatcgcaaagatagtaaaaattgaaagcaattcacaacgcgtggctttggacgatagaccccacgatgttgcgaactatcgcaaagatagtaaaaattgaaagcaattcacaacataataaaatttaccctatcaattccagccgttgcgaactatcgcaaagatagtaaaaattgaaagcaattcacaacctttggaggaaagccttaaatcggcagagagttgcgaactatcgcaaagatagtaaaaattgaaagcaattcacaatcgacatcgttgataaaaagtgggcgtggtttgaaaaagcattatatgctacacgttcggtctccgagccactaacagtgctattcaatggaaatatcattgcagactattgttgtatcaaaaaagccattgaaagagcggaccatgctgatattataaacattagagataaaaacgaaaagtctacctggccagccaaaaacagcgaggagcatataaatagggtactttctaaaatctccactcaagcaatacagggggaatattttaataatccggtcagtataggaaaagtctttaaatcactgaaatatgctaaattacaagacttaaaaaaata

SEQ ID NO: 2320 - DNA, 19179 bp, synthetic construct
  misc_feature 1..19179: note = Synthetic
  source 1..19179: mol_type = other DNA
  variation 6145..6163: note = n is a, c, g, or t
tttttgcaactgccaaatgcatccttgccaatttctgtcaccgagtcgggaagcacaattccagtcaggctgctacaatcagaaaatacagcgttgccaatttttgttagtgatttaccaagtgttgccgacttgagcttcttgcaacctgaaaatgcaaaatcaccgatatatgcaaccgaatcgggaacgacaaccgatgttagttcgttgcagtcgccaaatgcgttgcgagcgataccccttgtgccttccgctattgtcaaagagcctgaaagtgagttacccttgcatccgagacaccatccatcaagatacaggactccgtcgggctggctgttgtaccacgcggtgccgaagaatgtactattggctatgcttgtaagtgattcgggaattgtaatgcccgcaagtccgctacagcccgaaaaagcgtgtggcataatgcgagttaccgaacttgggactgtcagcattgtaagccctgtgcaacctaggaatgcactccatcctatgctagttacggaatcggggatttttaccgatttcaagcaagtcgcatacgaaaaggcaaaagcgtttatttccgttatggaatcgggaataaccaagtcggtgaccagctcgttattaatgtataggttatgtgctttattaagcggattcgagtgcaggtcaccaaaaaatattttgcaccagccggcaatatcaccgccaaaatgcacagcagtcaaactgtcacagtcccaaaaagcagaatcaggaataccttttacattgctaccaatatttatggtcgtaagcgatgtgcaaccatcgaatatgctataattacaaccctcctcgtcgtcaaatcctattgacatacaatcagttgcattgtagttgatggttttcagactgctacattggtcaaatgcacctgtaccgattgttgtaacagatttgccaattgtcacttctactagacctttgcaactatcaaaggcataactgtcaatttccattacagaatctggaattacaaccgatgtcaaattatcgcaggcgtaaaacgcttggttgtcaatctttttcacggaatcaggaattaccagttctccgctgaaatcacaatcgcactctacaagtacgccatcttcaatctttaatgctttttctaagtctttcatatacatttatttttaattaattttcaattcatcattcctcttgccccctaaccgcttcggtcaatccccaaaatagaccggaagcggaagggaaaacagcaaggcattttttcattttttcatggtactattttcggtgttcattcacgagacaaaggtaaagggcatttttacgcacctttggtttttgctagtagcagaacacttgttgctgattatcaacacataaaaaaaggacggcttgtgaccgtccaattgttttgttttaaagctagtgtaaaatattggctctagttcgatattgaactgattttttgtggtttttataacagatagattatcattatgttaagaaaagagaccgtcattccacaagtcagaacatacacgcgatacggaacggggagcgttgtaatgttcgactatgcggaatctcatttgtgtacttaatggggattccgtataagtgaactcacaagcaacgttccttatgctgttcgttcaactttacggaatgacggcaaagggttggcaaaaaaatcagaataatttcagttgtttgtaaaactagagccttgttttaaagttagtgtaaaatattatctggaaaaactttccgattctatttttctgtacaatctaagatacgactcgtttctcgcactgaacttgcctaaatctatgtattcctgggaaagaccgatgccatagcttgaattgccgtatgaatccttgcccttaatttccaaaagatatgatattttatactcttcttttagtgtctctacatcaaattcttctttgaaaaatttatttattgcggtaacagcaggcaaaaatgtgttcacccccttgtcccaccatgacataatatctgcttcactcttactgccggagccacttatatcccaataaattgacagcaaaacttccttgtaattctccagctcgacctgagaaacaaatcttggcgagttatatcccaaaagttctatctgctgcagataaaaaatgtataacactttggatacattgcctctaccgaacgacacctttttgttttctttttcggagattttaaggtaaatgttattgtccttgatgaaaatcggacatacctttctcaacttgccctttctctgtttctcgttcagatatgttgacataagttcttcaggagtaatgccgatattgtgtgcaattcgttccaatttttcatcaatctccgataatccctgttgcatagctctagttactctcctaggctctggcagattagtaacctgaaaacccatcatcagcccaaagccacttgacgacggacctggatactggtcaaacctatcatattctttttcgtgctgatattcagcatacgatttacccatcagccgtccgaaatccttctctgccacataacgggcaaacgattttgcttttccaaaagcattttccgcggaaattgagtcaaaatcctgatagtaacaaaccgcgtaatcgtcttccatcacattgccaatggtgaatttgggcacgcaacgggcggtaagacttccgcctttgtcggcgcaaagacattcgcgcatattttctacaacttcgtcaacttcttcggcatcgtatttgtcgcccaactgcgagcgcaaatagtcgccatcaagttccttctgcgacacatactgcaactttatcgcgaacggcaacatatccctatctctgaacagcggaccatcctgttgcaactggcgcattgtgtcattcagagcctcgttggcgagactttccacatagtaaattgtgtcgtagcgaagcggcactgggcttggaagcgaggtggttgtatagtcgaaaatcatcctgttatatttttgtttagttctatatttttctacaatgtctttaaaccataggcatcacaaaattacatattattgctgaaatatcaaaattaagaatgattatcaaaaactatctcattagaaagtccgtacgagaaaactatatttccatctgttccattgtccagtttatactttccacccagtagctcattctgaacatatcgtacttcctcccgccattgattacattgtcaatgctgtcaagcctattcctaattttatcaattgagtcgtatggcaaaaaaagtttcagcacacaagtcctgtcgatttttatgtagagcgacatcgacttgaggtttcgttttatgtggtattcgcacccaagcgacttcattttcttctttaccagtgccgtaacgcccaaatccccaacttccttcgacatttccagctttttattctctatgttccatccgtccaactcgtcattccaaacagggaacatcttgtccagttgcttcagttgctccacaccaatctccttatagtaaaatttcttcatacaattatcggatacacggattatgatacagttgtcttttgctattaccgagaagttttcaaatgatatgtttgcctcttccaaggttttgttaagcgaggcacctgttcctgtattttcgcggttttccagaagaaacgactctatcctgtattccagaatgcgagccacagaacatttccctttcaacacccaattgcgctgcctttcctttattttgtcgccgagcgtatctatcaggtcggcaaactccttttcccattcgggcatcctgcggtcaacctcctttatgtattcaataaagttaggaattttgtcaacatacagcggagaccaatggatattcttttttatttcaacgattttattcttgatatgcgcacttacatgaaaatccacatttttaagttttaccagcaaatcgtcatagtaatgtccgattttttttattgtcgcatccgggaaaaaactttctattgtctcgacattgcaacttgtgagcatttcctttatgtccggtgtctgtttctggttatgttgtgcaagtagcatttccagtttttcatcgtaaaatgccctctggatgtcctgtggatacaatgcaaattccttaatccttttctctatttccatatttccttactttgatttcaatgcaaaataatggaatatatggatgcggacgggagttttgctagtagcagagtttttgcagcggtaaaaaaatggaaactcagacgatttttggcgtataggaaatgcaatcggagcgaacccaatcgtcaatccaaaaatctaaaattctcaatcgtaattcgtaaatcgtaaatccctttaccacttcacttcttccctatttatcggcatggtcatgcaccttgcaccaccaccgccacggggaagttcgctgccggcaaaggttacgacaaacttttcgtagttgtgcatatcaaccgagcccttgcagacatcagcagccttcagtacggcaaaaccggccttgtcgagagcctcgatggtcttccagttgcgctcgtaacctatgaccttgccttcgcccaaagcaaagaagtttgctccgctgtgccactgttcgcgttgctgaacccaggcatcgtcgccaccgcagacgacaggattaaggtcgaagcccaaatcgcgtgcgccctgcaggaaattcggtttctggtgatatgtaattttcccgttatctatctcaatatgagtggtctgcaagtgcgaatacttggcattcttgcggatgattggttcaaacatcatgcaacggtccttgtcgaggaaggtgaacaccatatcgagatgaatgaacgactcgggcgtttcgggcaattcctgaacaagaatgttgaacttgggcttgcgagccttgaaatattcggcaagaaactcaattcctttcttgttggttctgatgccgttaccgatgaacaaagtatcgtcgcggactatcagcacatcgccgccctcggtacgggcagtcggctcccattcgccagcatttatcgactcgcaaccgaaatagttctcgaaaatagcacggtagatgatgttttcgcgcatacgcaccttgaacgacattgtgttcataagaagcatattgtacatcgacgatgcagcatcgcgggtaaagaacaaattgtacaacggcttgagaatgaagcgctcgtcctcgtattttgcagggtcaacccctctcctgtattcaaagccttcgacaagttcgcgagccaatgtcttctcatcgtgcgacaggagttcgtcacaaaggaaaccgcagtcgtcaagacggcaggaagtttccacgagatttttctttacattctcattcttaagcacttcggcaagcaaatcgactacctgataagtctttgtccaacgcgagagcacgccctcgaaattggcatattcgccatcgactaactttttgtttaaaatatcgctgtacaatgcttcgtgtgcattttcgggagtcatacgctcgatctcgattcccggacgatgcagcagaaccgcattgagttttcctatttcagaataaagtctaaccttgttatccataaattattttttaggtcacggagaacatcagccaaaacattctccgtcaagcagaaaagccgtttcacgacaacaattccactcgggtgcaaagataagacaattttcggaatttatgggttccgataaaatttatttggtgttatatagcacggctctttcatttgaccgccccctgagcctgtcgaagggtaaggttagtagcattatatcatttcgttaccttgacttcgacaagctcagccagcggatttattcaaacgctaactgtctgtatcacaagcaacaacactgtccaaatgaaagaaccgtggttataaagcagaaatcacaagaaaaacaaatagttatctcaaaaaaaaactatatacgtgttgacacaatgtgatttttcctatgccctctgagtcattactcgcaagcttcgtgcactaaagggtccgtaaaacagaacgaacagcataaggaacgttgcttgtgagttcgtnnnnnnnnnnnnnnnnnnncgtatcgcgttattgtttgcttagcagatgcttttgcgcctcagcatagtaaacaagtttcctctgcctttggctgttaaagcattctaacttgcggaatgacagaagagtgacataatttttagtcaacttgtatatagttcccataaaaaaaagcgactttcgtcgctttttttattacagcagatgaaaactagccgtcagtcccgccatcacaatgctgaccatactcatcagcttgataaggatgttcaacgacggtcccgacgtatccttgaacgggtcgccgactgtatccccgaccactgttgccttatgattttcagaacctttaccgccgaagttcccttcctcgacatacttcttggcattgtcccacgcgccacctgcattagccataaacacggcaagcacaaatccgcacgacaatccgcctacaagaagtccaatcacaccgggaacgccaaggaacagaccagtgagaatcggcactactatcgccagaatcgacggcaacagcatttccctctgggcaccgcgtgtcgaaatagccacgcaacgctcgtagtcgggttcggccttgccttccaatatgcccttgatggtggcaaactgtcggcgcacctcctcaaccatcttctgggcggcacgacctaccgcgttcattgtcataccgcagaaaacaaacgccatcatagcaccaatgaacacgccgacaagcactatcgggttcataaggttcacattgtaggcatccataaagtcaaccaaagtagcctttgccgcctcaacaccattaggcaggttctcgcccacacgcacaagcgcaatcttgatttcctcgatgtacgatgccagaagtgcaagtgccgtcagtgccgccgagccaattgcaaagcccttgcctgtagcggctgtggtatttccaagagcatcaagggcatcggtacgcttgcggacttcggggtcaagaccgctcatctcggcattgccaccggcattgtcggctataggtccgtaggcatcggtagcaagggtgattccaagcgtcgaaagcattcccacggctgcaattccgattccgtaaagccctgtctgcaagttcattgcagtaaattcaatattgaaaccatttgcacaaagatatgcaaggacaattgctacgccgaccgtcacaactggaattgccgtggaaagcataccgagtcccaagcccgaaattatcaccgtagcaggacctgtcttcgaactttcggcaaccttctgtgtaggcctgaaactttgtgaagtatagtattctgttgattttccaattattacaccagcaagcaaaccgactaccaccgaaagcgaagtctgccaccactggtttgtctcggtgccgaacagccaagcgaagattccaaatgtcgccactgcgataaggacagaagccacattagtaccgcgcgacaaagctccgagaagattcttcatattggcgttttccttagtgcggacaaggaatatacctataatagataatagcactccgaccgacgcaataagcataggcgcaagcacagccttaacctgcatatcggcgccggcagcactttcggaagcagctgtggcaaatgccgaagcaccgagagccatcgtcgcaaggatagaacctgcgtacgattcgtacaagtcagcccccatacctgccacatcacctacattgtcgccaacgttatcggcaattgtcgcaggattgcgtgggtcgtcctcgggaatgttgaactcggtcttgcctacaaggtcggcaccaacatcggcagccttggtgtagatacctccgccgacacgtgcaaacagagcctgagtagaagcgcccataccgaaagttagcattgtggtggttatcgttataaggtcgccctgagcaccgaccagttcgagcaacttggtgtatttcagcacgagaaaccacaccgaaacatcaaggagagcaagtcccacgacgaccaaacccatcaccgcaccagaacggaaagccactttcagaccgctgttcagcgagttgcgggcggcattggcggtacgggcagaagcgtaggttgcagtcttcataccgaagaaaccggcaagagccgagaagaaaccgccagtgaggaaagcaaaccacactatgccgttctgcaggtggaaataagccattacgccgaaaactacagccagcacagcgaacacaatgcccacgaccttatactgctgcttcaggtaagccattgcaccgttgcggacgtgtctggcaatctttttcatcaaatcggtaccttcatcctccttcatcatctgcttgaaaaagatgaaagcaaacaggagagccaaaaccgatgctcccaacgtcaaaaatataatccagtccatagcataaataattaacaattaacaatttataattaacaattgacaattacaaaatcatcaaattttcaaatcttcaacaatctcaacgttcagtcgtggcacaccgcgacgcaacaaatttacacccttttccgaagatagaattatttttttgaaaaattagcctaacggcatagatgcttgcaaataataattaaatttgcacccgaaaattaacaaacatcggctattgcagttgtctggataacaacgctgtgacagccacaaatttatctgtaatatgagaaataaatatagaacattaaacgcaaacgagttcgacagcgcaattgccgacagccataccacaattcttgatgcacgctcagcaaaagatttcgccgaggagcacatccgcaatgcaataaacattgacgtgagcagtcccgatttcatttacgaagccaatgcaagactgcatagggagaatcaaattgccgtttactgcaaaagcggtgtccgtagcaaaatggcagccaccctcctctccaaccaaggattcgacatcgtttacctaaacggtggaatatcggaatggaaaaaggctggcaaggcaacggaaaggtaaaatgtatgaaacgaaccgtaataatattaatcgtcatcgccatcgttgcggtgggcgtgaccgcaataatttacttcagcaacatgaacagcaagtttaccacgttgaatgccaacgactttgaaaaagcaatctccgacagcgcaaccatagtcctcgatgtgcgcagtgccgacgaatatgccggcggacacatccccaacgccataaacatcgacgtgaaccgcgctggtttcctctacgaagccgacgagcgactgcccaaggacaagaccattgccgtatattgccacggcggagtgcgtagcagaaaagccgcttccctcctctccgacaacggcttctgcatcctcaacctcgacggcggaatcaaggaatggatgagcgcaggaaaagaaacgacgggggattagatgactaacagtctaacggtctaacagactgacggacgaaaaggatgaaaggctgacggacgagaagccaaaagagaacaacagcaacagcaataatgtacggacgcaaaattttgcgtctcaatcccaaaacggcaaaaccattgaatctgtagtgtagttgcgcgcaacgacactacaacagaacccattgaacgttaaacattgaaccccttaaacatatccgaggcacaaaaaaaagcgacacccgaaagtgccacctttaatgttttcacaacggaataatccttattgtgatttgcttaaaatttgttcgacaaaaatatgcaaaacatatttatccacaaagaaaaatttcattaaatttgcggatgtaatttttaaaccaatttttaactagtaactaaacagatataatatatgaagaaaattctaggtttagacttgggaaccagtagcataggctgggctgtagtgaatgaagcagaaaacacaaacgaaaaatcatcaatagtaaaattaggtgtaagggtgaatccgcttacagttgatgagttgacaaatttcgaaaaaggaaaaagcattacgacaaatgcagacagaaccctaaaacgcagtatgcgtcgtaatctgcaacgctacaaacttcgtcgagaaaacctgattgaaattttgaaagcacacggttttatcaacgatgagaccattttgtcggagaatggcaacagaaccacattcgaaacttataggctgagagcaaaagccgctaccgatgaaatctcattgcaggaatttgcccgtgttctccttatgattaataagaaacgtggttacaagagcagccgtaaggcaaaatctacagaagaagggcaattgattgacggaatggaaattgcaagacaactttacgacaacaatctaactcccggacaattctccctaaacctgttgaagcaaggcaagaaatatttgcctgacttttatcgttccgacttacaggcagaatttgacaaggtatggaatttccaaaaacaatattatcctgacattctgactgatacattaaaagaagaattacgaggcaaaaacaaaacacaatcgtgggcaatttgtgcaaaaccctttaacattgttggttttaaacgtacaggaaaagccgccgagcaaaaaatagaaaactaccaatggagagccaatgccctatcggaaaaacttgggcttgaagaacttgcagttgttcttagcgaaataaacggccagagtaacagcgcaagcggatatttgggtgatataagtgaccgaagcaaagcattgtatttcaaccaccagacagttggtcaatatcaaatgtcggaattggcaaaagacccgaaccacagactaaaaaacgaagttttctatcgtcaggattatctcaacgaatttgaaaccatttgggaaacacaagcaaaataccacaaggaacttacgcccgaactcaaaaaggaaatccgcgatgttgtaatattctaccagcgtccactaaaatcgcaaaagggattaatctctttttgcgagtttgagagcaaacagattgaaatagaaatcgatggcaaaaaaataaagaaaattacaggtagccgtgtatgtccaaaatcatcgcccctattccaagaatttaagatttggcaaatactgaataacatacaagtatcaacaaaacaagaacatagcaaacgattcctaacccaagaagaaaaagaattgttatttgcagaactaaactacaaggaaaaactgacaaaatcagatgctcttgatttattatttggcaaaacaaaggattacgatttaaactataaagaacttgaagggaataagacacaagccgctctattcaaagtttatcagactattattgaaatgagcggtaatggtgaattcaattttgccaaactgtctgcagaaaaagcaatagccaaaacaacagaaatttttaacaaattaggcatttcctcacaaatactaatatttgattcaaacaaagatgaggaaacacagccgatgttcaaattatggcatctcttgtactctttcgaaggtgataattctgttacagggaacgataaactgattaataaactttctgaacattatggttttgccaaagaatatgcagaagttcttgctggtgtagttttccaacccgattatggaagtttaagcacaaaagcaattaaaaagatattgccacatctaaaagatggccttgattacagtgttgcttgcgaatatgcaggttatcgccactcgaaacgctcacttacgaaagaagaacttgagcaaaaagtacttaaggacaaactcgaactattaccaagaaatagcctacgcaatccagttgttgaaaagattctgaaccaaatgattaatgttgtgaatggagtcattgacgagtatggaaagccagacgaagtacgcattgaacttgcccgtgaactgaaaaaatctgccaaggaacgtgaagaacttacaacctctataaaccagacaactaaactgcacgaagagtatgtcaaaaaacttcaggctccaccattcaatcttgaacatgtcagcagaaatgatattataaggtacaaactatatcttgaactcgaaaagaatggcttcaagactctgtattcgaacacatacattcctaaggaaaaagtattctcaaaggaattcgacattgaacacataattccacaggcaaaacttttcgacgattcattctccaacaagacgctggaggcaagaaatgtaaacctaaaaaagagcaatgctactgcatacgattttgttttggctgaatatggaaaagaaaaggctgaagaatacaaaaacagaattgaagatttgtatgcagacaaagcaataagcaaaacaaaacgcgataaacttctaatgaaggaagctgatattcctagcggattcatcaaccgagatttgcgcgactcacaatacattgccaaacaagcacgtgaaatgctcgaaggtattgtaaaatttgttgtgccgacaacaggaagcattacagaccgtttacgcgacgactggcaattggtaaatgttatgcaggaactcaactgggacaaatacaataagttgggattgacttactatgaacaagaccgtgacggcagacaaattccaagaatcaaggattggaccaaacgaaacgaccatcgccatcacgctatggatgcactgacaattgcatttacaaaacatagctacattcagtatctcaacaacttgaatgctcgtgtacaaaaaggtgttgatgaatatttcgacctagatatggttgaactgagcgaccttagcaaagaacagcgttcttccgcaatttatggaatcgaacgaaaagaacttgaacgcgatgaacacggaaaacttcgcttcaaaccgccaatgccattggacgaattccgcgccgaggcaaaacgacagttggaaaatatcatcatatccaacaaagccaagaacaaggttgtaacacagaacatcaacacaagcaagaaaaaaattggcaaaaacaagaaagttcaacttacgccacgcggacaactgcatcttgaaactgtttacggaagcagcaaacgctatgtaaccaaggaagaaaaggttaacgcctcattcgatgtcgaaaaaataatgacagtcgcaagtcctcgttatcgtgaggcattgttagctcgactcaagatatttggaggagacccgaagaaagcctttacaggcaaaaacactcttgagaaacttccggaatggctaaacgagcagcatacggaaaaagttcccgagaaagtaacaacagtcgaatttgaaacaatctacactatccgcaaggaaatatcaccagacttaaagattgacaaagttgttgatgctcaaatccgtcgcatcttgcaagcacgtctggatgaatttggtggcgatgcaaagaaagccttctcaaaccttgatgaaaatcctatttggctcaacaaagcaaaaggcatttcaattaaacgagtaacaatcactggtattaacaatgccgaagcattacacgacaagcgtgacaaggaaggcaatctgattcttgacggaaatggcaatcctcaaccagttgattttgtaaatacaggcaacaaccatcacgttgcaatataccgcaagcctaagttggacaagaataacgagcctcttcgcgatgagaacggcaatattcaatacgaacttgacgagcaaattgtatcattctacgaagcgacttctcgagcaatgcagaatttgccaataatagacaaaacctataagcaggaagaaggctggcaattcctgtttacaatgaaacagaatgaatattttgttttccctcgctacgatgctgatggcaatataatttttaatcctaaggattacgatgaatcgtggttcttaaatccagaaaattatgcagaaataagtccaaatctgtatagagtacagaaaatgacaacaaaagattatttctttaggcatcatctggaaacaacagttcaagatatatcagttctaaaaggtactacgtggaaacgttttggtttgaatggaatagaaaacattgttaaagttcgtgttaaccatataggcaaaattgtttcggttggggaatattaaaaggacgttactatgaccaacatcaaactatttcaggacaagaaaatccgttccgcgtggaatgaagaggaagaacaatggtacttctcggtggttgatgtagtagaagcattgaccgactcgccaaatcctcgccagtactggcggaaaatgaaagaccgtgatttaaaggaatatgagtcgtacccatttggggtacaactgaaaatgccaagtgccgatggcaaaaaatatgctaccgactgcgctaatgtaaaaggcatttttcgtataattcagtcaatcccttctcccaaggcagaaccatttaaactatgataaagcgcaccctatatttcggcaatccagcctacctttcgcttagaaaccagcagcttgtggtgtctattccgccaaaggacggcgaggaagccacagaacgaaccatacctatagaagatttaggcttcgtgatgctcgacaatccgcagattacaataacacacggtgcattgggtgcgcttgtcgaaaacaacaccgccgtagttacctgcgacagccgacatatgccggcaggtctgcttctgccgaccgaaggtaataccacgcagagcgaacgctaccgcaaccagattgaagcctcgctcccactgcgcaagcaaatttggcagcagactgtgcaggcaaaaatccgcaatcaggcggcagcactcgagaaacggcgcggcaaaagtttcggcaatatgctcgcctgggccgacgatgtgcgcagtggcgacagcgacaacctcgaagcacgtgcagcagtattctactgggacaacctgtttgctgtagaaatagacaagttccgtcgcgaccccgacggcgatatgccaaacgccatcctcaactacggctacgcaatactgcgggcgataattgcacgagcactggtaggaagcggactcctccccaccctcggcgttttccaccgcaaccgctacaacgcctactgccttgccgacgacataatggaaccctaccgtccatacgtcgaccttatggtttgcgacattctcgacgagttcgggatgcccgaaaagatgaaccgcgacataaaggcgaaactcctcaccctgccaaccgttgatgtggtgattgacggcaagcgcagtccgctgatgattgccgcctcgcagacaagcgcatcgctggcacgatgttatgcaggcgaaatccgcaaggtaagctatcccgagatgtaatggaacgattcagcgaataccgaataatgtgggtgctagtattcttcgaccttcctaccgagacaaagaaagaacgcaaggttgccgcagcattccgcaagcagctcatcagcgacggattcactatgttccagttctcaatctacatcaggcactgccccagcagcgagaatgccgacgtacacatcaagcgcgtaaaactgcatctgcccgaacttggcaaggtcggaatcctatgcatcaccgacaagcagttcggcagtatggaaattttcttcggtcagaagcaggaaagcaacaatcctgtggttcagcaattggaattgttctaatggctggcgccgtttgaatgcctgacggcgtttgatgggcaaacacagactccagccataaattccccccccaacagcactgctttgtcgttggctcttgcctacgacaaaaatatcgatggctccagccatcaaaaatcaccacattacgaaacaaaaaatccttcataatcgtcaacagaaggaacaaaacgtcaaactacgacacaaaaatcaccgactccagccacaaaacctcccccccattacaaacaaaaaatcctcccttttggggaggatttcaactctaaacaacaaccttttttcaattctattgcgccctttaactctttgagtctcaatcgtttttcagtatcgtgttgtttaaagagcgtcaaagatacaaattttaaagcaaatcacaacggcttgtgaagtaaggtgtgattgtcccgagttgtttaaagagcgtcaaagatacaaattttaaagcaaatcacaacttgtcaaacttataccagtaccattattcagttgtttaaagagcgtcaaagatacaaattttaaagcaaatcacaacgctgatgtgtgcagggtattggagttacggttgtttaaagagcgtcaaagatacaaattttaaagcaaatcacaaccctgctggagttcaacggcaatgaccttgcgttgtttaaagagcgtcaaagatacaaattttaaagcaaatcacaacccgagaaaaccattccgaccattatcgtgagttgtttaaagagcgtcaaagatacaaattttaaagcaaatcacaacggcgttatgcgatttgataaggaaaatattgttgtttaaagagcgtcaaagatacaaattttaaagcaaatcacaaccctgatggagttgcagagatgcaaatgagtgttgtttaaagagcgtcaaagatacaaattttaaagcaaatcacaaccggaataggttttcgtcaaggatttgtagtgttgtttaaagagcgtcaaagatacaaattttaaagcaaatcacaacctgtaacttcttctttgaatataccaaagtgttgtttaaagagcgtcaaagatacaaattttaaagcaaatcacaactaaatcttggtgtctagataagataaactagttgtttaaagagcgtcaaagatacaaattttaaagcaaatcacaacggcaaaagttgataccatcttgcatcacctgttgtttaaagagcgtcaaagatacaaattttaaagcaaatcacaactttaactcggaattgaactttgcgacctcagttgtttaaagagcgtcaaagatacaaattttaaagcaaatcacaacgaaagtacattctgcaaaaccgtctgctcagttgtttaaagagcgtcaaagatacaaattttaaagcaaatcacaacgccagtcaaggtgtaatttacccaatggcggttgtttaaagagcgtcaaagatacaaattttaaagcaaatcacaactcaccttgacatccaacgtgttatgaatgggttgtttaaagagcgtcaaagatacaaattttaaagcaaatcacaacgctgatggttttgcgaataacttgtgttttgttgtttaaagagcgtcaaagatacaaattttaaagcaaatcacaactcgccacattgcttctgaattgggcgaaaagttgtttaaagagcgtcaaagatacaaattttaaagcaaatcacaacctgcgttcttcacgaattcaatcttgaaaggttgtttaaagagcgtcaaagatacaaattttaaagcaaatcacaactttcgttacgactgatttttatgttgtattgttgtttaaagagcgtcaaagatacaaattttaaagcaaatcacaactgcaaagattgaaaacgacagccttattgggttgtttaaagagcgtcaaagatacaaattttaaagcaaatcacaacgctcggaattttcagcataaacggaaaaaagttgtttaaagagcgtcaaagatacaaattttaaagcaaatcacaacccgcgacctgaacaacacactattgtcggtgttgtttaaagagcgtcaaagatacaaattttaaagcaaatcacaacattacggagaacaactcgtcaagactacggttgtttaaagagcgtcaaagatacaaattttaaagcaaatcacaaccagacacttacatcgttgatttaaccgaggttgtttaaagagcgtcaaagatacaaattttaaagcaaatcacaaccgaaacgatacgacaaagtgtatgttagcagttgtttaaagagcgtcaaagatacaaattttaaagcaaatcacaactaagacaaatatatggcgaaattcaatcgggttgtttaaagagcgtcaaagatacaaattttaaagcaaatcacaaccaatgtcgttgacggtggttgtgcggagcagttgtttaaagagcgtcaaagatacaaattttaaagcaaatcacaacaaaattgcaaaaattctttgcgcattcaaagttgtttaaagagcgtcaaagatacaaattttaaagcaaatcacaacaggtttcgcaggaaattgcaacggaacagggttgtttaaagagcgtcaaagatacaaattttaaagcaaatcacaacccgttgttatcaaagtattgctcacaaaccgttgtttaaagagcgtcaaagatacaaattttaaagcaaatcacaactaccgagccgttgtcgaaaatgacaccttgttgtttaaagagcgtcaaagatacaaattttaaagcaaatcacaaccattgcgcccgtagcggcaagcatagccgtgttgtttaaagagcgtcaaagatacaaattttaaagcaaatcacaactggctaccgctattgtgttcacactattcagttgtttaaagagcgtcaaagatacaaattttaaagcaaatcacaacgtgatcgcaattcataggattgacacaaatgttgtttaaagagcgtcaaagatacaaattttaaagcaaatcacaacaccccccctagcggggagagcggtaaaagtgttgtttaaagagcgtcaaagatacaaattttaaagcaaatcacaacttcgcaaatagtcggcatccttctcggacagttgtttaaagagcgtcaaagatacaaattttaaagcaaatcacaacgactgatttattgttacattttgggtaaaagttgtttaaagagcgtcaaagatacaaattttaaagcaaatcacaacacaaaagttcatcctttgcgctaatgcagattcaacaagcaagtgcaaaattaaataataagattaaagaacacctctttaggagttaaaaagtccaatttttttctaggcctcctgttg

SEQ ID NO: 2321 - DNA, 19166 bp, synthetic construct
  misc_feature 1..19166: note = Synthetic
  source 1..19166: mol_type = other DNA
ttatatattactaatggggccgtaaaaaattcgattggagcagggcttttaacaaaatttagttttggtgctgccaaacaactgtaagacgtcagtgtacgatgtttcatattgattcctcctttctaaatgatcaaaatagttagtatatctgcgcataaaacttatatatcgatttgtagctatcaagtgcatcgattgataatactaactaagcacattgctataatgcaaatatactaactatattgtaaataccaaatataatattagtattttatactatttaactaataactattagctaaaaagcagtatatgtaagcataatacgcaaataaaccaagaagagttgtaattatagcaagatatttactaacttaaaaactaacaataacaaattaaccgaagcgtgagaataagtttttaaagccccaacaagatattaaatgactgaagtagaaggagcttatatgtcaaaacaaatacacagggagaactcaagaaaaagttttttatggtttaatctctcatgctctcatctttttcatctaatatactataatacaagtctatataaaatgagagattcttatgagagatccatctcgggcggagatctctcatactttccgtacatgcttgatacagcgttcggataagctgtattctgcaaacaaagtattctatcttttcgtgaaaagtattgtagaatcatttgttattcagtaataattattgtatctttgagggtagataatattcattctactctagtgcatagaactcagcactaatgtgatgagaaccatgcactagagtgctgtattttatgcactacagtagaatgaatataatgtcagtaagaaaacgcttggataaaggctatataacgtgataatataagtaacataatctataactaccattaaattaaaacaaaagtggcaatacaatttgaattctataagaatcccaagcaggatgaagagggaagaatgggctatcatcccagagtcgtcaattttcagcacgtcactacgcagaggttagctgccgagattcattcggcaactactttcggcaaagcggaagtggaagctatgctgatggaacttagccgatgcatggggaatcacctttgtgaaggcgaaagagtgcatctggatggaattggttattttcaagtgacgttgcaagctgtcgaaccgatacattccatcactacaagagccgataaagtgagaatcaaaacagtcagtttccaaccggacaaaaagctaaaaagcacttttatgcatgcgcatgcgcgccgttcgaagctgaaagtgcattcggagtctctgtcggaagaagaaatagacaggaggttaactgaatatttcgctacacgtcctgtattgagacgcattgatatgcaatcgctttgtggcttcaccgaaagcatggcttcccgacaaatacggcggttgaaagcactcaagaaactggagaatataggaagacctactcaaccgatctacgtaccgggaaaaggatattatgagagataacatctgctgatggatctctcatggtggatctctcattgtatatagacttgtattatagtatattagatgaaaatgatgagagtatgagagatcaaatgcggaaataacttttttagaagacgaaaaatgaaaataacacaaataagagacgatggcaaagcaaacaccttgcgtacgttgaaaatagagcagctcgtagagcaaatgaaaacggaaaccaaggcaaaactcgtctcaaatatgagagaaattctgccgttcatacttcccggtgataaaaacgaatacgtgcagaaggtaccgaagatacttcctgccgcagttttcactcgtagagacggagtgatgatgatgaccgaatataccggaattgtcatgcttcaggtaaatagcctttccggtagggtagaggcggacgaggtaaaagagcgggtagtggaattgccgcagacgtatctggccttcatcggttcttccgggaaatcggttaagatatgggtacgttttacatatccgaatgacaaactgcccactactcgtgaacaagcggaactgtttcatgcatctgcctaccgattggcggtaaagttctatcaaccccaattacctttcaatatcgaactgaaagaaccttcgctcgaacaatattgccgtttaaccttcgatccggcgctgtatttcaatccggaagcaatgcccatttatctcaagcagcccattgccttaccgggagagactacttaccgtgaacgggtacagacagaaccttcgcctttgcaacgattggcaccgggatatgatcattataaggcactttctttacttttcgaggcagctttcgcccgagcgttggaggagcaggggaaatccggttcggatgacgatgtacaatctttactcatttgtcttgccggacactgttttcgtgccggcattcctttagaagatactgtgcggtggacacgtgcgcattatcgtttgcccgatgatgatacgctgatacgggagacggtaaagaatgtatatgatgttggtaaaggatttggcggcaagagcagcctgttgcccgaacagttgtttgtgatgcagatggatgaatttatgaagcgtcgttacgagttccgtttcaaccagttgaccaacgtggtggagtatcgggaaaggaacagttttaatttctatttccgtccgatagataagagggggatggcgagtattgccatgaatgggctgtatgaaggaatcaaactttgggacaaagatgtggttcgttatctgagttcggatcatgttccggtttatcagcctgtggaggaatatctttacgatcttccgcattgggatggcaaagatcatattcgggatttggcggaacgggttccttgtgacaatccgtattgggcacaattgttccgtcgttggttcttggggatggtagcgcattggcgtggattgaataaaagatatgctaatagcacttctcctttgttgatcggtccgcaggcttaccgtaaatctactttctgtcgcctgatacttccgccatgcctgcaagcgtattatacggatagtatcgatttcagtcggaagcgagatgccgaactgtatctcaatcgctttttgctgattaatatggatgagttcgaccaaataggaatgaatcagcaggctttcctgaaacatattttgcaaaagccggtggtcaatacgcgtcgtcccaatgcttcggcagtggagtcactgcggcgttatgcttcttttatcggtacgagcaaccataaagatttgctgacggatacatccggcagtcgccgttttatcggtgtggaagtgaccggagtgattgatgtggtccgccctatcgattatgaacagctttatgcgcaagcgatggctgcccttcgtagtaacgaacggtattggtttgacgaggaagaggaagctttattgaaggaggctaatcgtgaatttgagcagtcgcctgctattgaacagttgtttcttgtttactttcgcgcagcacaagacgatgaggaaggagagtggctgcttgccgcagatattctccaacgaattcagaaagagagccggatgaggttctcacccggaatggtggcgcatttcggacgtatcttgcaacggttgggggtggagtcgtatcggaaaacgcatggggtgtattatcatgtggtcggtattaagtgagataggaataaggtgtatagaacgaacatttcatattttgctttgttttgaaaaaaaatccgtttttgtatacgttgtatgaaaataatgtgcatctttgtagtgacttacaattctcatgacgtgtagtgataacgctgccgtttaaggccctacgagtgtgcattgccgcactcgtagatggacccttacataaaaacggttcctatccccgcgtggaacgttaatgcgtccactgatcgctactcgttaggattgtaagtcagcgggtcagtaggggccgttcatttttccccgctatataacgttgcgttagatggtcaaagtttatacaattgaaagtttttgcctccgtaaaatttccggcaaaccacaatgctataaattatacattagcttgcagcaaggcaaacgagtatttcagtatcttgtacggttgagggatgcactttgtgtagatgtacttcgctcatatattccagcagaacgaaacgatcaattagagctgattgtgcgagccatttttaaagaacatcatttaagttatcccatcattaaagtttcacatagctgtgcgtatctacataggataaagaagcaaaactgcatgatgaaacgtttcctgggtgcttatatcgctatatgaatgaagatgaatatatatcggattctcgatgatgagcagactttgcaaatctaattcactgttaagacaacaaaccgaattcattccccctctttcccgaccgttgcatttctcttcccccagagtgcagcggtctttttttggggggtaggtgtttttcccagacacaattttttatcttaataattatctctttgtcaaattccacaaaactgttcgtaaatcagataagttcctaattcctgagtgacgaaatctttttcaatcaatttcttagtaccgattaaacagaactagtagaagaaagtgctcgcttgactattgaatagaaaaggcgagacaaatgtcccgccttaaatgttttcacaacggaataatccttattgtgacttgcttcaaattagtgatgcaaagataggaaattattttattattatgcactattttatgagaaataattaatatatttgggaaattatataattaagatacgctaaatatgaaaagaatattgggactagatttagggactagcagtattggctgggcactagttgacgaagctgagaatggtaatgaaaagtcatcgattgttaaattaggtgtgagagttaatcctttgacggcagatgaattgaccaactttgagaaaggaaaaagcatcacaaccaatgcagacagaactcttaaaaggagtatgcgccgtaatttgcaacgttataaacttcgtcgtgaagttttaatacagattctgaaagagcacaaatttataacagatgaaactatactttcggaaaatggtaatagaacaacttttgagacatatcggttaagggctaaagctgcaacggaagagatttcgttggaagaatttgcacgcgtattactaatgataaataaaaaacgtgggtataaaagcagccggaaagcaaatggaacagaagaaggtacattgattgatggtatggatactgcccttaaactttataatgaagatcttactcccggcgaattatgcttgcagtatcttaatgagggtaagaaaaccctacctgatttttaccgttctgatttgcaaaatgaatgtgacaagatttggataaaacaaaaagagttttatcctgagattctgacagatacactgaaagaagaattgagaggaaagaaacgtgatgctgtttgggccatttgcgccaaatattttatctggaaggaaactcaaacggaatggaataatgaggaaggtaaaagcgaacaaatagagaaagaacataagttagaggggatttatagtaagcgaaaaagggaggaagccaaaaaagaaaatctgcaatggcgggtcaatggtttgaaaaaaaagctttcattggaacaattagttattattttgcaagaaataaatacccaaatcaatgcctcaagcggttatctcggcgcaatcagtgacagaagcaaggagttatacttcaataaacagactgttggccaatatcaaatggagattctgaatagaaactccaatgcgagtttgcgaaatatggtattttatcgccaggattatttggatgagtttaatacactttgggaaaaacaggctgagtttcataaggaattgacggaggaattaaaaaaagaaattcgtgacattgttattttctatcaacgtaggttgaaaagccaaaaaggactcattagtttttgtgagtttgagagccgacagatagaagtggaaattgatggtaagaaaaaggttaaaactgtaggtagtcgggtaataccccgttcctctcctttgtttcaggaatttaagatatggcagatattgaatgatatcaaagtgactgttggcgaaaaaaaaagtaaacgaagagaaaaatcagaacagaacgacagtcgatgtttgaatctggaagaaaaagaattgttagctaaagagctttttgttcgtgataagatgacaaagtcggaggtcttgaaactgttgtttgacaatccgcaggaattggatttgaattttaagacgattgacggcaataagacgggggctgcaatatttcgggcatatagcaagattattgagatgtctggtcatgaacctgtcgacttcaagaattctaaagagaaaatagtggaacatataagggctgtatttgcttcttttaattggaatacggatattttaaattttaatccggatgaagaattggacaaacaatcctattacaagctttggcatttattgtattcttttgaaggagacaatacgccaacaggaaacggttgtttgattcaaaaaattacagaactatatggctttgagaaagaatacgccactgtattggctaatgtcacttttcaggatgattatggcagtttgagtgcaaaggctattcataagattctgcctcacatgaaagaaggcaatcaatatgatgtggcttgtacgtatgcaggttacaaatattcaaaatcatcattatccaaagaagagattgccaataaaatattgaaagacaaacttgagcttctccccaagaacagtttacgcaatcctgtggtggaaaaaattttaaatcagatggtgaatgtgatcaatgccatcatagatatctatggcaagcctgatgagattcgggtagaactcgctcgcgaattaaagaagaatgccaaagagcgtgaagatctgactaagtctattgcagaaaccacaaaggctcatgaggaatacaagaaacttctacaaaacgagtttggcttgaaaaatgtaagccgcacggatattttgcgttataaactatataaagaattagaatcacgtggacataagaccctctattctaatacgtatatcccaagggaaaaattgtttagtaaagaatttgatatcgaacatatcattccgcaggcacgactttttgatgacagtttttcaaacaagacgcttgaagctcgaaatataaatattgagaaggggaataaaacagcctatgattttataaaagagaaatttggtgaaactggaaccgagaacagtctggattgttatttaaataacatcgaagagttgtttaagtcggggaaaatttcgaaaaccaaatataataagctgaaaatgactcagcaggatatacccgatgaatttatagaacgtgatcttcgaaatacgcaatatattgcgaaaaaggctctttcgatgttacatgagatatcttatcgtgtggtagccacaactggttccataacagataagttacgtcaggattggcaattggtggatgtgatgaaggaactgaattgggacaaatataaggcattgggattggtagagtattttcaagacagggatggacgtcagattggtagaataaaagattggacgaagcgtaacgatcatcgtcatcatgcaatggatgcgttgactgtagcattcaccaaagatgtattcattcagtactataacaacaaaaatgccagtctgaatcccaatacgaatgaatatgcgataaaaaacaagtatttccaggatggcaaagcaattgcgccaatacctttaaatgagtttcgtgcggaagccagaaaacatctggagaatactctaatttcgattaaagcgaaaaacaaggtagttacgagcaatatgaacgaaacaaagaaaaggggcggcacaaaaaagaaaatacaacaaacgcctcgtggtcaattacatttggagacaatttatggtagcaacaagcgatatttggtaagagaggaaaaagtgaatgcttcatttgatgtagataagattgaaactgtaagcaaattagtttatagaaatgcattgttgaagcgtttacaagagaatgataatgatccgaagaaagcgtttactggtaaaaatttattggacaaaaagcctatttggctggataaggagcaaacaaagaaagtaccagagaaggtaaaaaccgtagtatttgaaacaatctatagtgtccgaaaggaaatctctcctgatttgaaaattgataaagtaatagatgttggtatccggaaaatattggcagacagattgagtgagtatggtaataatgcaaagaaagcattttccaatcttgatgagaatccaatttggttgaataaagaaaaaggtatatctatcaagcgggttgccgttttgggaatcagcaatgctcagtcgttacatgtgaagaaggataaaaatggcaaggtctttttggatgagaatggcaaaaacattccggtagattttgtgaatacgggcaataatcatcatgtggcagtttatcgcaagcctgtcatagacaaaaaggggcaaatagtaattgacgaagatggtaatcctcaatatgaacttgaagaggttgtagttcctttctttgatgcagtgacaaaggctaatcttggccaacctgttattgacaaggactataagacaagcgaggggtggcagttccttttcagtatgaagcaaaatgagtattttgtatttccgaatgagaagacagggtttaatccgaaagaaatagatttgctggatgcagataattatggggtgataagtccgaatttatttagagttcagaagttctctcataaaaattatgtttttagacaccatttagaaactacaattaaggatacaagtgttttgttgaaaggcattacttggacagactttcgtagttcaaaaggattggattctattgtcaaagtacgcgtcaatcacattggacaaatagtgtcggttggagaatattaattgagacataaattaaataatatagtatatgtgtcgaaataatgataacacttctattttttctgatttcttcctttataaagatggaagaggagaagtgaaaatcgaaatctatatttttaacgagacagtttggctgacacaggataagatttcgcaattgtttggagtgcagcgttctgcaatcacaaagcatttgaagaatatcctcgagagcagagaattgcttgaagactcagttagttccattttggaactaactgccggtgatggtaataaatatcaaatgaaattatataatctcgatgctatcttatccgtaggttatcgtgtcaatagtattcaggctacacatttcagaatctgggcgaacaaggttctgaaagaatatctgattaaaggatttgctatgaatgacgagcgattaaagaatccacacaaaatctttggagaagattatttcgaagaacaattggctcgtatctgcgacattcgtagtagtgaacggtgtttttatcagaaaataactgatatttattcacaatgcagtgccgattatggagttggtagtaatatgacgaagattttttttgcaactgtccaaaataaattgcattgggcgattttcggtcagacggcagccgagattatagtttctcatgcaaatgccgagaaacctaatatgggattgaacatttggaaaaacgtacctaacaggataatacgtaaaccgggttattgctaaaaactatctcaatgaaactgaaatggacaatttaaaccgtattgtttcgatgtatctgtattatgcagaatgccaagcgaaaaaagaacaaatgaaggattgggtacagaaattagatgcatttttgcaattcaacgaggaagtcgtgttactgcatagtgggaaagtgagtcatgaggttacgaaagcattggcagaacaagaatatgatgaatttcatgctaaacaacttcaaagttacgaatcggactttgataaactcttaaaaggaatggggcatgattaaaaaaacactttattttggtaatccggtttatttatcgttgcgaaatgcacagttggttattaaactgcctgatgtggagaaagctacagatctgcctgagatattgaaaaagcaggtagaggtgacgaaacctatagaagacattgggattgtcgtgttggataacaaacaaatcactattacttctagtttgttggaggctttacttgaaaataactgttctgtaatcacttgcgatagtaagggtatgcctcttggactaatgcttcctcttcatgggaatactactcaaaatgaacgttttcgtgagcaattagctgcttcattgccattgaagaagcagctttggcaacaaaccattcaaacgaagattaataatcaagcatctgtactcaaagattgtatgaatgaagaggtaaagtgtatgcgtgtatgggctgctgatgtgcgtagtggcgaccctgataatttggaagcgcgtgctgccgcatattattggaaatctttatttgcaaatatttataattttactcgggcacgcgaaggaatttctcccaataatttattaaattatggatatgccattcttcgtgcggtggtggctcgtgggttgatgacaagtggattgcttccaactttgggaattcatcatcataatcgttacaacgcttactgtctggcagatgatattatggagccgtatcgtccgtatgtagatgaattagtgttcggcttggtacaagagtacgggaagaatgtggagttaacgaaagaggttaagacgcggttacttactattcctactttggaagtgcaaattggaggcaaacgcagtccgttaatggttgctgtgggacaaaccactgcttcgctttataaatgtttcagtggagaacttcgacgaattgcttatcctatacgctaatggatcgttttagtgaatatcgtgttatgtggatacttgttctttttgatttgccaactgagactaaaaaagaaaagaaggcttatgcagatttcagaaagaatctacaaaaggatggttttaccatgttccagttttccatttatgtgcgacactgtgccagtagcgagaatgctgctttacatataaaaagagttaaatgtttccttccagagcttggacatatcggaatcatgtgtattacggataaacaatttggaaatatagaactcttttatggaaagaaaactcaggatgttaatccgccaggacagcaattagagttgttctagaacacaaaatctcgcactagtgcgagattttgtgttagaaacagcctctttttttattattagatttgtttttcaattggttgtaaatcactgatttatgtaaaatcagttgtttccaacgatgtaaagatactaatttgaaagcaaatcacaacaattgttcggtcctcttgaaactcctcttgttgtttccaacgatgtaaagatactaatttgaaagcaaatcacaactatcttgctgggaacaacaactactacatggttgtttccaacgatgtaaagatactaatttgaaagcaaatcacaacactgtaatttcttgtgattgaggatatccagttgtttccaacgatgtaaagatactaatttgaaagcaaatcacaacactctcagcatattgatgaatacagatttgttgtttccaacgatgtaaagatactaatttgaaagcaaatcacaactccatgtgctttctttgattttcgtagtttgttgtttccaacgatgtaaagatactaatttgaaagcaaatcacaacttccgcccaatgaaaaacgtacacctttatgttgtttccaacgatgtaaagatactaatttgaaagcaaatcacaaccgtcaagccgaagcgcttcaaaaatggaaagttgtttccaacgatgtaaagatactaatttgaaagcaaatcacaacctatatacgattctttgttattatgcctttgttgtttccaacgatgtaaagatactaatttgaaagcaaatcacaacagtcaggcccaaagggatattcatgagcttgttgtttccaacgatgtaaagatactaatttgaaagcaaatcacaaccagattactgccggaacgattgacgcggcagttgtttccaacgatgtaaagatactaatttgaaagcaaatcacaacttctatatccttgcatattcccttcatcatgttgtttccaacgatgtaaagatactaatttgaaagcaaatcacaacgctgaaacgaacggtccggaaggtattttaaaggataggagcagtttgttgcttttgtgtacttaaatctcttctagcgcataatattgataatctctaagaacagtttgtaagaaacgctctccattggaatctaaaggagtgacagataaaagctcctgtactttctttgccaacatcgtgatacgacgttcacgatcttttttgtttgattccaatgtgcgagtaattacattgacctgttctaatgataagtcagcagattgtggataaacaggatgataatctttcgtcagataatcaaactcatctaggctgacatgtatttttcggtagtttttctccttaattatcatagttcctgcagcaagatctcctaaacgttgattgttcttggtcaatatgacagataagactcctaaacctccggtcaaaggaacatcgatgggaaacaacaaccaacgaagtaaataggaactaatgccgggagtagagccatctgtttttacgacgcggatattcattaacttttttccgaagctctgtccttgattgaatgtttcacaaagaaaagagtaaaaaagtactggtagaataatcagaaacgtatatataacagcgttgaaatctcgtggagcataaaaattgaataaaagagtaatggtagacatcaaatagattacaatcaaaatataatcgatgagaaatgctatgaaacgttcacctatactggcgggcgtctggctgatacgaacgaattgtccggtgataattgtagattctgccatttttgattaaacatttttatggttccgttgcaaatatataaaaattctcttacttttgctttcggtttcggacaaatcttatccgaacacttgtgaaaggcatgaaggaagtaacgtttatccgtcagaatattgataaatggaaagataccgagaaggtagtggaacaggctaaacgtttgtcccctgatcaacttgccgatgtttattcggatctgactgctgatctggcgtttgctcaaactcattttcctaactcccgtattacaatctatctgaataatcttgcttcttcgttgcataacgagatctatcgtaataagcgtgagaaatggacgcggattatcactttctggactcgtgaggttccacaaacaatgtatgatgctcgtcgtgaattattgatctccttttgtgttttcatggcaagtgtattcattggtgtattgtcatctgtgaatgattcggatttcgttagattgattttaggagatcagtatgtagatatgactttaaataatatagcgaatggagaaccgatggctgtatatgacggctcttccgaaattcctatgtttttgggtattacattaaataacataatggtatcttttcattgttttgcaatgggattattgactagttttggtacaggatatatccttttgaggaatgggattatggtaggtgcttttcaagcattcttttatcagcatgatttgctttgggaatcttctctggcaatctttttgcatggcacgcttgagctatgggcaattattgtagccggtgctgcaggaatagctttaggcaatggctggctatttccaggaacatattccagattagaatcgttccgtcggggagcaaaaaggggggtgaagattatagtgggtacgatacctgtattcattttggcgggatttatagaggggtttgttacccgtcatacagatattcctgattttttacgacttggattgatcttattatcgttggcttttattattttctactatatttatttacctaataggaaaaaaaatggaattacagaaacctaagatcgcactgtatgttaaacgcccttttggcgagaagttgaacgcagcttttgattttataaaagaaaattggaaaccgctgttgaagttaactacttatttgattttaccgttgtgccttatacaagcattaagtttaaacgggcttatgggcggggctatgacaatgactactcttgccaatagtgctgtggcaaattctgatttaggaatgctggccgggtttatgacatactatgcattgtatatgttgctatatttgataggaacagctatgctatcttcgctggtgtatacattaatacgtatttataatgaacgtgaaggagggttgcaaggtgttacgttgagagaattaaaacctttgctgctccgtaatattgggcgcatgttcctgttaatggtcgtaagtactgtgttagttgtgttagcgatgattccgataggtgtattaatgtatttgtcgatgtttacattgatccttactattccacttttgattgctttttctgtaccactcgcattatttgctcctatttatctgttcgaagacattacaataatggcagcattgggaaaaacttttcggctgggatttgcaacatggggaggcatttttttaatttctattataatgggaattattggtagtgtgttacaaggagtgactatggttccctggtatgtagctacggtagtaaagtacttttttgcaatgagtgatacaggaagtacggcaactgtatcagttggctatagttttttactttatttattgggtattattcaggcatttggtgcatatctttcaatgatatttactttgatcggattggcttatcaatatggccatgcatcggaagttgtagatagtgtgactgtggaaagtgatattgataattttgataaactttaaaaccggaatttgaactggatgacaacttcccctacagatacgttggtttgtgatacggcacagattgctgtctggcaatctgatcctgcctatgactataatcgtgagttgattactccggagattaatttctttgagtggattaaccagcggtttggggaattattacgtaagatatttggtggtcgcttttcggagcaatattcagagctggttttaatatgtattgctattgttattttgcttctgattatttggtttgtttaccggaaacgtcccgggctttttatgcgttcacctaaaagtgctttgccatatactgtagaagaggatacaatttacggagttgatttcccgggaggaattgctgatgcacttgcgcatagtgattatcgggaagctatacgtttactttatttacagacattaaagtacttgagtgatactaaacgtattgattggcaaccttataaaacagctactcaatataatggcgaagtacgaatgcctgcctttcgtgaactgacaaatcattttctgcgggttcgttatggaaactttgaagcaacggaacaacttttccgtatcatgcaagccttgcaggcggaaatccggaaaggaggtacttcgtgaaaggaagtcgttggtttattttgggtattatggcttttctgctgttgatgtttgcagtggaatatcatatgccaaagaaatttgtgtggactccaacttttagtcattatgacaaacaacctttcggatgcgcattgttcgatagtatattgtcatcttctttacctcttggttattctctctcgtccaaaacattttatcaactggaacaggaagacacattacataatcgggctatattgatagtggatcagtatctgaaatttagtgaactggatgtagagtctttgttgaaaatggctgaacgggggaataaaattatgttggtaagtacctcctttggtaaggaattggaagatacattgaagtttacttgttcctattcttattttagtccggtgatgatgaaaaagtatgcgtcttcattagcaaagaaggatagtatttattgggtaggggatactactgtttattcccgacaggtatttcgtttttatccaattctatgtagctcttattttcgtgactattattcattaccttttcagagtttggcagagaaagatttgacagagggtttggaggcatttatgcctgatatagatacaaccaatgtatctggaaattatcatccttcaatggcatttgtccgtccatgggggaaaggagaaatcattttagtgtctacgcctttgctttttacgaattatggtgtgttagatggagataatgcaacttatcttttccggttattgtcaagaatgaaaaacttgcctatagtgcgtacagcggcatatcagcaaggaatagaacaattgcaggaatcacctctcagttatttcctctctcagcgtcccttacgttgggctatatacttaactatgattgcaatattgcttttcatgttatttactgcaaaaaggaggcaaagagcgatacctgtgatttccgaaccggagaatagatcgctggaatttactaaactgataggtacactttattatcaaaagaatgatcatgccaacttggtacataagaagtttacttattttgcagaagagttaagaagagaagtacaggtagatattgaagaagtgaccgatgatgagcactcgtttcttaaaattgctcaaaaaacaggtatggatgtggaagtaattggggaatttattcgtgaaatcagaccggtgatttatggaggacgtactctgtcggcggaagagatgaaacgatttattgataaaatgaatgaaataatgaatcatatctaaagaaaaaatatatggaagagaatacagaacaacggatagatttaacgcttttttccgagaagatacaagagcttaaggataggattgcttccgttattgttggacaagaacaaacggttgatctggtactgactgctatccttgccaatggccatatcttgattgagggagtgccgggagttgccaagactttgttggcccgattgactgcccgcttgatagatgcagactttagccgtattcagttcactccggatttgatgccgagtgatgtattaggtactacagtattcaacatgaaaaacaatgattttgattttcatagaggacctattttcgctgatattgtattggtggacgagattaaccgtgcgcctgccaagacacaagctgctctttttgaggtcatggaagaacgtcagataaccattgacgggatgacgtatcggatgggagacctttataccattcttgctactcagaatcctgtagaacaagaaggtacctataagcttcctgaggcacagctcgatcgttttctaatgaaaataacgatgaattatccgtccttagacgaggaagtgaatatcttggaacgtcatcatacaaatacttcattggtaaaattggataatgtggtaccgactatcacccgtgaagagttattatcgcttcgggcattgatggggcaggttttcgtagatcgtacattgctccaatacattgcgatgattgtacaacagacccgtaccagtaaggctgtatatttgggagcttctccacgtgcatcagttgctatgttgcagtcttctaaagcatatgctttgctacaaggtcgtgattttgtgacaccggaagatattaagtttgtagctccttttgtgcttcaacatcgtttgattttgactgcggaagctgagatggagggatattctcctgttaaggttactcaacgattgattgatagggtggaagttccgaaataatattcttttagctattaaatcaatttgtataatttataatttaaggatttgtacctcactcgtcgtttttatattgcccttgttctggttatcctgttattgggtagcggatatgcatttgctccattgtttataatagggcaagtagctcttgtcatcttatttctgatggcgttgatagatggatatctcctttatagtattcatgggataagagcatatcgtcgatgtgccgaccgtttttcaaatggagataacaatgaagtgaatattcgtgtagagagtagttattcacgtccggtatctttggatgttattgatgagattccttttatctttcagaaacgtgatattgattttaagatagagttacaagcgaatgaaggaagaaatattacttattcactgcgaccaacgagacgaggtgtttacggctttggacatatcagggtatttgtaaccttgcagatcggtttactttcacgacgttacacttgtggggagcctctggaaatcaaggtatatccttcttatctgatgttgcatcagtatgagttgctggctattaatgataatcttactgaactgggaattaaacgtatacgtcggatagggcatcatacagagtttgagcagataaaggattatgtaaagggagatgattatcgaacgatcaactggaaagccagtgcccgcagacatcaattaatggtgaatgtttatcaggatgaacgttctcaacagatttttaatgtgattgataaggggaggatcatgcaacaagcttttcgtggaatgacattgtttgattatgcgattaatgcttctttagtgctatcttatgtggctttacaaaaagaagataaagcaggtttagtaacttttgacgaacattttgattcgtttgttccggcttctaaacagcccggacacatgcagactctccttgaaaatttatatagtcagcacactactttcggtgaaacagacttttcggctctttgtgttcacatgaataagcatgttagtaaacgaagccttctgattttatata

SEQ ID NO: 2322 - DNA, 19129 bp, synthetic construct
  misc_feature 1..19129: note = Synthetic
  source 1..19129: mol_type = other DNA
acaccgcatactctctagataatacaaaagcgtgaacaaaaccaaacagcatagctataattaaattacttggattacctatatacttcacatttgactttaaagatgacaacgacaatcccattaatacccctctaaacattatctcttcatctatacctggcaaggtcaactgaaatgccaatgtttctatattccactctcctccattacctgcataccaccacactaatacagccaataaggcaatacttaaagtagctatcctaactcccttttgactatcaggtacttgcctcagtgtaaagaaattgtgttgtttaaagtaagagcgaaaagcaaaataacaaactcccccacataatacaccgtatagtttcccattccaattccaattccctttaattatataaaagctatcaaacacatgagctaaccttaatgcaaaactataaagcacaaatacaaagcaaaatatgccaatacgcataaaatcttttttccccctgtctttcataaacaagatcataaggggaagtaatactcctacttgcattagtgcttcaagtataattatagccatagtcattagtttaacctttctaaagtaaccaattcttgtaaaagaaaaaaacctcaattacttgaggctttagtttatttcttcattaattcatttacagtttcttctatagaatattcaaaatactctcctagcttatttttattacgcataaagaacttattagaatacttagggcagtttagcttcaaaaaagagtaataataatcacttaaatgccacttaaactgttgtttaaaagtagtaccttctatctcttcagaaacatcaaataccttgagaatagtcactatctcagttatctcttgtctactaatatcctttaccactaaaggatcaggtaatgctattctaaagctaagtacttctgccccttctccttcccaatactcccataagtcatacctagacatatctttccctgtcaactgatgtaactcttcttctactcttttatactctataagatcatcatctccatactcatcacagaagtcagtatatcctaatacagcctttaatactatagggtaacgctcttctgctaccttcatttgaggagctatttcacttcttaaactcatatcattcattttatactgaaacgcaaaatattgacgtctctactgcgttggcgcagatttgtaatctgtgccgtatataccccatgccgaaagcaaacaatttttaattccccgaagggaaagcattcctaattaaaagagcgtagtgtcactgctattttcttagtagcgctcaccttactccactcctctattaaggcgataacagcaggattcgtcaccttagcattattagtatgaagcacctctacatactgctctaacaaagtcttcaatcccttaataggagtaggctctaactgttctaatatcccctcgattagcaattgcaacgcttggttgtgttgtacacttacattcatcataaacccctgtatagagtctgtcaaacgcttaatcgtcacatactccttagcctctgccttacctattatattacctaccttttgttgatctaaacgaagcgcctccttgatccaatactccgctacgaaagcacgacttaccttgtcatcacatatcaatgccagcccaaagaacaagtaaaattgctctgaaaacaccacattgttcatctgtaataagtacgtaaacattccttgcaacaatctcttctcagccacctcgaacgtcgcactaccaccataatgcagacacttctccactaccgccatatagatagcatcagcctgtcttggattaagagccaacagtgattcacttacatttacctttgtatcgataatttgatacttcatcaattccattaaattcactgatcccatgcgatcacctatcgctatctttggcatcgctttattgacacggctaaagattaaaaacgaattaatatcataaggtatctgttctaactttaacttcttatgcgtaaacaccttgtctatttgtttttttgtcttgtgatcccaatccttatacgtatgagattcctcgatcacttcccaattgcctagccaacccgcacagtattcttgttgttctttagtataacgatcattagtcaaactttctaaaggatgatgagggtactttaacgctgccgctcctctccatacgtcataataatctactgacgcttccttcacctcacccttgcctaagtaaaattcaatgatagaaagcaactctcctttcagatgtttctgagctaaagctaatcctgcttcttctgtatttttatctatacgtgctaatgcaatctgtaaatctaatgcatctactaattctccttgctcttgatacgctactaatcggtttaccaatacagtactatctatataaaaaggattgtgtgtaggcaaactcaagatacgcaagacacgtttttccattaccaattgtaagctatagtaatacagtgtcaaatatggacgtagagcagcatagtaataactaaagcgattactcgcctctaactttacctctcctaaggtaataccactattagtatatagttcagccttagcatatttgctatataatttttctaattccttagtttctatattttcctctgcaatcaacattctcgcccattccaacagccaaaaagccatagcgttctgtactgttgtcgttgaccacaaatctttaaaagtcttaaacaccttgtcaaaagcaggtagtaattgctcaatatgagctgcttgtagctctccttgaagtctgataatcgcgtctatcatttgctcaaaggcatagtgactctctgcattcttccaagctgacaaatagaatatcaaatcttctacggtatcaatagaagcaataggcataagctctacttcgccttcttctactgcctctcccaaagtgatattctccacagtaatatagtctgctaacaaagtctttgtctcactcatcagcatatcttggtacgctgacaactgtgctgtgagctcctcattcaatttcacatatttgataatctgctttcctaccttcgtttgcaatgcttgatcttgaatgtgaaaagcccctacgatagccattgcactggattccttatatgcaggatgtgccttatcaaatacagccacgatacgcaacaccttattaatagtcgcttttactgtactactcatcaatataggaagatgattgacaaaagtctctgcctggaaggccttatctttcgctatcttaaacaagatatccaaagctgtattcaccactttcgagatagggctattcagtagttgaaatagctcctcttgaaaacttaatagctcttgctccgtcaagggaagtttactcagtaagttagcatgccacccactcaatgcttgatttgtatgtgttaaggcactctgtactgcaatctgcacaatacgctgtttatctaatcgcccttgttctattaaggtaacgataacctcatcccaaggattgtaattaatactcacctcgtgatcaaatagataccaaaactgctgctctaacaacgcagggtattgatcgaatatctctacagtactaaagctcaccattatagtcgcccaagtagcctcagtcaatggagtcttaaaccctcctttttcatttaactcatagacaaagctaatctcgttaaaaggcgctcttatccatccttctctggctgtatcattaacataatcccctaaccattctggcacataccaatccaatacttgcttaaactccttttctcctattccccatattcccgtaaagtctttatacgtacaactcgtcagtaccgccaagttcactgctaatcgctgttcatcactccctctatatccatatacatttcggtgaccttcttctaatatgtactcttgataatactttcctaacttagagatcttcttcgtgtatttcactcgttcctctaatggtgtatttttaagtaatgcaagtactcctgccgaattcccagcttctactaactgttctaactcagtataaaatatgtctttactcatgatggctattgtgtggttttgtcgtttgttttaaaaccgaaagatacaattttacaacttatgacaaataatggaatcaagggattttaatgaaaaaaaaatgctgtggaaatcaataaaccacaaggtagttcgtcagatataacctatcgccgaagacacatattcctttttcttaattcctcgaagggtaccgtgaaacggctattatcactccaaagtcaccatcagtctgttcccacttcttagaagggagatatgctcttgacacgaaaccgtctaaatacagtgcgtctgtacaccctaattctttaaatagcttagcgaagtcgtagaaattaactttctctttagacatcgcgaagactacttctccgttctcttttacacctacgccattgcggatattgagattcacagagtctggtgtaaagactgtattaatctcaccatttaatagtaaaataggccctgactgtgtagcatacttaagcatggtattatgactatatgttgatgttgatactactttcgcttgattatctttagtaaggaaaaacacaccattaggttgcaggtagaagttacctttaccttcttttaaagtatctaaagattgaagtaattgatagttttcgatgtataagcctttaggagtataattcggttcaaacattccaccattcatcgcgaagactaactcttctcctctgttttctgatacttcttttagctttcctaaactgcgtattctctctccttgttcatccttccaatacatcttgatatgctctttagcgggatcacagtgataaataacatagtcatgctcatacttatcttgttggcaagagaacaaggataagaataacaaccctaaaattacaaggtataaccgcatagaaaacattggattaacaagtgataaatgtagtactatttttgttattctgtatttgactactgcattaatagactctgataatgtaaaatatcttgaactaagattgataaaatcaagagaaaataaattgaatagttacaattaaaaattccttaatctattgcaagaacagtcgtaatagtttaattttgattaaaatagaaattatgctgtacctttttattaataaacagccctcctattttatagacaaaccaatagattatgagcacacataaattacataatgacaaattagatctaattcattggataaatgaattggatgactatactgtaattgcaagacttaaatctatgatgaatacaattcagaaagaggacttatcctttgctcaaaaaaaagccattgatgaagcacttgtttctatagatacagaagttcttgagtcacatgatactgtaatggaacaaaccaaattaaagttccctcatctatttcagaagtaaaagatgaatagtattgtttggtcacaaactgctcaagatgattattgggataatattgatttcttattgcgaagatggacaaaaagagaaagtatttgctttatcaatgcagttgagaagactattgaactactaaaacagggtcaagtaacattcaagccaactggttataaaaacacttaccaaattactattgtaaagcaaattacactctactatatcttcattgaagataataaaattgttctacttcgtttttttaataatcaccaggatacaaataagctctctttataaagtaaaagaaatgtactgtgtagcaattgtatatcaataaaacgcaaggtagttcatcagatataaaccattgccgaaggcacaatccttacttcaaatcacaactcatcctttaactgttggatatacttctctctttcgggataatcaatagccgtaaggtaatctgttacttctgctaaccactcttcattagactttatcttcacgcgagccaccgtctttccttgaaagtacggtctatcgtcaaaagcagctaccaagtgttgattcatcgaatccgctgtcttaggactcacaggttgtccctcagcttttgctaatgagtgtaagattcccctctgaaaatctggattcataatggcttctttgtattctcctgaatatgccaacaccacaggtatctctttcttctctaagatagccgctcttagtctgtaatttccgtcgataatccagtaccctccaagtgagggaatataccaggcaaatacaggtggtagtgatccctctacggctttcttacgccaccattttagacgaccagaatactcatctactctgcgtgagtacaatagttctctatcccaatgtgcataagtaaaggcgtcaaaatcatcttcggctgctatcgtagtaccgtaattaggaggggatgcgaagtccttatacccctcgaataaccagatagaatcataaaagaagtgcttatcagcctgtaccatctcttctgcaaaatagcgagaccacgactttagtctttcttcactggataagcccttgcgtttctctacttcttgtgaattgatattcttaatcagcctactgtcttcctcaaaggttcttactaatcctatatcacagaagtctctactgatcaatccccacatcactggtttatcttcacagaccaacttcatcttccaattcgaaccacttaacagttgcatcgtcggaggtgttaatccttctaccgttaactctaatgctttccattgttgattatctgtcacaacatctttccagtagtatttcatggggtgtgttttattgagattgtaaagataaggtgtttttattaatcatgtaaaaatgggctatctaccattacaataggatagatacgaaatcaatcgacttctcacaacatataatctctattgtgtgatatgtcatcccaatagttgaatacaaaaactgttaactgttaaccgttaactataaattcaaatcttcttttgtcttccccatcgtaatccattatttctgtaaaaccgatgttttgcatcatcttaatagacttgtcattggcactgcgggcgattcctactatggtattaacattgggctcattagctttaatatactccattaatccttctgttccctcttgtccatagccatacttccagaagtctttaccgatagaaaaacctatctcgacaactgtaggcgattcgaaaaagtacatcgctgtaccgattagcacatcattttcttgttgtacaacagccaaccttactttcgttttgctctcccattcacgatgagcttgcttcaccatattctctgcatcttccagagtttctaatggtttactggctctgtgcttcatcgcctctttgtcagagtagatatacagcagttgttctttatcctctatgacaagaggtctaaaatatagtcttttcattattcagtttgtttaaaacaggatatagcacgcaaatcaaagcactcataatctatctattagcgtataaaaacacttaatgaacttaatcaaatcagttctgttttgttacctatccacttttcagcaaggtaaaaaaatattctcttcaattctaccactttatttgactgaactttcaaaaagaaaaaaaaagaaacttccctaaaaagaaaaaagcaatagtacttactattgctttctttatattattgttctacatcacaggacaagactgtctttgtagcacctttgcctttaactcgaatattactatcggggcttgacaatatataatctattttcgaaccgcgaacggacttaacttctccaggttcaataaaaacagaaacttcgttgtcttttggaacattattcccataataaacatattcaaaactcagtgtatttgaagtattattaaccacataactcttgtagccataagaagtatttacatcttctatttgcgtaggtaacaagattacctctacagtgtaattctcacaagattcaaccactaattttctcggagtatagaggtagacaaaaaacaccaccatcagcataatcaatgtaatccaactgccacttacacttttgcctttccagcgaaaatacaaataaatgccaatagctattaaaaccaatacacctacaatgatgtaaaaagtattctctgatacaatcatattattttgatttataagtaacaatacacaccttttgacgcttgatcgtataccacttctcagaagcctcgaagtccttcttcgtgtaaatgtgatcaatcactccatcgtaaaaatcgtcagtagactctttacttacaacaggggcaattgtcaaaattttctctcctctttgattgtaaaaatcaagacattgtttgactccttgatcatgtatcatcttgtctatctcactatacctcacagtataacttctgctgccaatctttacatacatcacatcattggaataggtaatcgatgccgaatcactataaagaggtttcattaaaaaaagaggaattgctcctaaaaaagcataaataacggccatatacatctggtcgttcacatatttgacaatgtcaataatactgaaaaaataagtaagtattccaatagctattacaacgtaactgattccaaacaaaactccttttgccttgtttctttgtttataggtaataccttttgtagacattttatttctattttttgacatttcgagagtaaatatattaaaattttaacacacctaagtacttctacaatgaaatatagttcactctaatttaccaaaagtcacttaatgcctttttgaataatccacaaaccaatgaacacatgccatgataggatttatcgccatatttcgacagttgagatagaattaaaataagcatagaagcaaaaggtcgaaacggcactatttacctcaacatagcctctctttttaaatttaaaggcattttctcgatggcatatcgcaacgtggttcgcgacaaaacagttttgtgctgaagaataaagtcaaacactttctcttgatgcaatcggcttgcttcctttagcatccaaccaacgcctttttgcactaaatcatctttatcttgcattagtaaacgtgcaattgtaaaaacttgtgctaaatacaatccctttttagcaggtacgacaagactaaccgctgcccctctgcgcatccacctattagttgatattgcccattgacttaatcgatctacctcttgaggaaattgtatgagaattggcccaacagtagaagtacacaaagtatcacaactcgcccaattactgacgtaattagctaaccaatgttcaaacagattgatatctttcgcagtataatgacggtgcaagcgtttggttattatacaagcaatataagcttcttcaaaatacaaggacttccatagctcctcgcacaaaaaatacacttcctcctttggtttcccctttacatcgttgaacaactctttacctatcttagctagtatttccttagaaactccatattctctgggttgctctccttctttaaagaaacgcgcagaagcagagactagagcaggctcagcaaagtcttgtaaggtctgacgtatatcgagtagtatatctttcatcacacattaatttacaggtagaaaggtattttattttccaatacaccctacaattagtttgcgaaatattagtgcaaaaaaaatgccccgaagatagtcgaggccctaaatgttttcacaacggaataatccttattgtgaattgctttcatattgtcctacaaatataaactctttttttacataacaaaacataaaaattcaaatattttgttgtaatattatgtagaattcatcttttttactgacaaaaaattacaataatgaaaaaaatacttggtttagacttaggaacaacttcgattggttgggcttatgttcatgaagctgaaaatgataatgaagtttcttcaatacaaaaattaggtgtacgtgttaaccccttaactgtggacgagcaaatcaactttgaaaaaggaaaaccaatcactactaatgctacaagaacgcaatcacgttctgcacgtcgtaatctacagcgatacaaactaagacgcgaacatttaataaatatacttacccagcacaattggataaataagtctactatattagcagaaacaggcaaccaatcaacttttgaaacttatcaattaagagataaagctgcttctcagaaaatatctctttcagagttatctcgtgttttacttatgataaataaaaaacgtggatataaaagcagtcgcaaagttaataacactgaagaagggcagctaatcgatgggatgtcgattgcgaaacgactttataatgaacaattaacccctggtcaattatcacttgaactattacaaaaaggaatcaagaaattaccagattattatcgctctgatctaaatcaagaacttgacttaatatggactttccaacaaaaatattatccagaaatacttacagagacctttaaagataaaattaaagacaagggaggaaaagctacatcaacactattctgggtaacttataattttaacacagcagacaacaaggggacaagagaagaaaaaaaactacaaagttatcaatggcgagttcaagccctaacacagcaattagataaagatgtagttgctttcgttattgctgatattaatggtcaaatatataattcttctggttatttaggagctataagtgatagaagtaaggagttatactttaacaaattgactgtaggccaatatttatatcaacaactaaaagaaaattcacatactcgtcttaaaaaccaagttttttatagacaagattacttagatgaatttgaaacaatatggaacactcaatctctatactattcagatgagctaactattgaactcaaggaggaaattagggacactattattttttatcaaagaaaattaaaatcacaaaaagggctgattagtttttgtgaatttgaacaatgccaaaaacttgtaaatggcaaaagtaagactattggcaatcgagtaattcccaaatcctctcctctattccaagaattcaaaatatggcaacaattacacaatgtgactttaaaaaataaagaaacaaatgaatatacttgtttagcagaagaacaaaaaacacatctatttgaagaattaaatataaaaggtaaattaacaagtgctcaagctctaaaactcatcgaaagtaagcccaaaatgtgggagttaaactatacagaactagaagggaataataccaataaagtattatataatgcttatctagacattattgatgctgctggttatgatatacgaaatgaattaaagattaagcttaataaagatgatatcgaattaactgatttagatgttgatgcttctcaaatcaaagaaatgatttatactattttcaaagatttaggtattgatactactattttagactttgacgctactttagaaggtaaagcatttgaacaacaagggtcttaccaactatggcatttattatactcctatgaagaagatgattctaagacagggttaaataccttatataaactactacagaccaaattcaacttttctcctgaccaaactaaatacttgggaaatattgtatttcaagatgattatggaaacctatcagctaaggctataagaagaatatttccatacattaaagacaataagtatagtgatgcatgtcttttagctggatataagcattcgaaacattcgcttactaaagaagaaaatgataacagagagctaaataataaattaactatactcccaaaaaacagtcttagaaacccagttgttgaaaaaatactaaaccaaatggttaatgttgttaatacattaattgatggagagaatctaaagttaaaagaacaaggaaaagctcctgattttcattttgatgaaatccgtattgagttagcacgtgaactaaaaaagaatgctaaagagcgtgaggaacttactaagtcaattaatcaaggaaagtcagaccatgaaaaaataatcaaaatcttacaaaaagaagatggtttaaaaaaccctacacgaaatgatatcgttcgttataaattataccaagaattaaaaaataacggctataaagatctatatacaaatgaatatatagaacgcaaaaatattttcacaaaagactatgacattgagcatattatccctcaatcaaaattatttgataatagtttttcaaacaagaccttagtacgcagaaatgtaaacctaaaaaagggaaatcaaacagcctatgattttatacttgctgaatatggtcaagaaaaagcaaacgaatttgaaataagaataactaatttgttcagtcttggacaagttgaaggcatttctagaagcaaattcaaaaaacttttaatgagagaaagcgacataggacatggctttatagaaagagatttaagagagactcaatacattgctaaaaaagcaaaagctatgttatttgatattactcgaaacgtagtttcaacttctggtagcattacagatcgtctaagggacgactggggactaataaatgttttgaaagaattaaatctacaaaagtatagggatgcaggattgacagaattaattgaaatgaaagatggcaatgaaaaagagataattatagactggacgaagcgaaacgaccatcgtcaccacgctatggatgctttaactgtagcatttaccaaacataatcacatacaatatttaaacaacctcaatgcaagaaagaataattctgataaactacacagtaatatcattgctatagaaactaaagaaacccagctaataacagatagtttaggcaatagaaaaagagtattcaaagaacctattccaaattttaggcaagtcgctaagcaatatttagagagcattttggtttcccataaagctaaaaacaaagttgtaaccaaaaatattaataaaattcaaggaaaaaagataggtcagctaaccctaactccaagagggcaattgcacaaagaaactgtgtatggtaagatacgtcaatatgtttctaaacaagaaaaagttgggcctaaatttaattctgaaatcattgagttagttagcaaccctacttataaaaaactgttactaaaaagattaaatgataataataatgatcccaaaaaagcatttggtggcaagaatgcccttagtaaatcacctatttatatcgatttagaaaaaaacatcactcttccagaggtagttaaattaatatggttagaagaagactacactatacgaaaagaaattacaccagatttgaaagtggacaaagtaattgatcaaggtgttaaacgtattttagaaaatagattaaaacaatatgacaataatcccaaattagctttctctgatttagatcaaaatcctatttggttaaacaaagaaaaaggaatagcaatcaaacgagtgactatatctggtgttaaaaacgcagaagccttacatattaaaaaggatcacttaggtcaaccaattctggattctaaaggtcaagaaattcctgtcgattttataaatacaggaaataatcatcatgtcgctatatatgaagatgagaatggaaaattacaagataatgttatttcactttttgaagtagttgaacgtgtaaatcaacaactaccaataatagacaaaacctataaccaacatttaggatggaaattcttattcacgatgaaacaaaatgagcttttcttatttccttctgatgattttaaccctaatgaaattgatcttttcgatgaggaaaattataagttaattagtaaacatctttttagagtacaaaagttttcgaaagttgaatatggaaatagtgctgtaagggattatgttttccgtcatcatttagaaaccaatgttacagatacaaaagaattaagaaataagtcacatattatattaaaaagtactaatgccttagagagtattgtaaaaattagaacaaatcatcttggcgaaattatacatataggcgagtattaacaaattgtattattatgctcaaacgaactatctatattggcaatccctcctatttaaaattatcgcatcgtcaactcaagattgacgatgcgataacaggagaagtcaaaggcagtgtaccggttgaagatttaggcttcgtggtattagatcatcctcaaattactatttctcatcctgtcatacaatatctacaactccacaatgtagctattattagttgtgatgaatctcatctacccttaggattgatatgttacctattagcggacatgttgagcattcagaacgcttaaaaaaacaaataagtatatcagagcctttaagaaagcagttgtggaaacagactgtagaagctaagatatatcaacaaaaggaagttcttagtaagcaaaaccttgcgtatgaccctatgcttaagtatctcaatgaagtaaaatcaggagatagtacaaatatggaaggtattgctgctcaatactattggggaaagctttttgatgacttcacaagagatcgagagggagcatcaccaaataactttctcaattttggctatgctatactgagaagtatggtagctcgagctattgtatgcagtggactccaccctaccattggaatctttcaccaaaataaatataacgcctactgtttagcagatgatttaatggaaccttatcgtccttacatagatgaaatagttatagaatggatcagcaatcccctaaacccatctgcgcttacaaaagaagcgaaagcacacttgttacaaatcgctacaaaagacgtttacattaatgggttaaaccgtcctttaatgactgcactaagcatcactacaagttctttgtacaaatgctttacaggagaaagtagagtaatacactatcctatgatgaaatgagttttagtcgttataatgcttatcgaattatgtgggtattagtattttttgatttaccaacagaaactaaacgccagcgaagtgtagcttctaagtttagaaaaacattaattgatgatggctttaatatgtttcaatttagtatctacctaagacattgtcccagtagagaaaatgcagaagtacatatcaaacgcgtaaaaaagcaactccctgcagaaggaaaaataggtattctctgtatcaccgataaacaatttggacaaatggaactcttctttgcaaaaaaagaaacagatttaccacttatgccgcaacaattagaactcttttaatagaaacaaaaaaatgctataatcttttgtagattacagcattttttttctttttatttactatccaatcgctcttatcatccctatttataaggctttagaagaggttgtgtgattacacagtaaacttacaataatttgaaagcaattcacaacactgcgttacctattttaaccctacccctcgttgtgtgattacacagtaaacttacaataatttgaaagcaattcacaacatgatttatgattatctttgtatcaaaattgttgtgtgattacacagtaaacttacaataatttgaaagcaattcacaactagccttgtggtaattcttttctgtcaactgttgtgtgattacacagtaaacttacaataatttgaaagcaattcacaactattacgttatgaactggtgcaactactgtgttgtgtgattacacagtaaacttacaataatttgaaagcaattcacaactttacttattaatttacttaaatcctctttgttgtgtgattacacagtaaacttacaataatttgaaagcaattcacaactgtaacgtctaacactctaccaccttcaaggttgtgtgattacacagtaaacttacaataatttgaaagcaattcacaaccgtatgtatagacatgatgttattagatttgttgtgtgattacacagtaaacttacaataatttgaaagcaattcacaaccctttcatctgcagtaacatctgaatcatagttgtgtgattacacagtaaacttacaataatttgaaagcaattcacaacacaaatttacgtcttgaacaaacgaaatcagttgtgtgattacacagtaaacttacaataatttgaaagcaattcacaaccggcgcttatagggttgctcctcagcattggttgtgtgattacacagtaaacttacaataatttgaaagcaattcacaactttggcatcagcttggaagatatacgtcgagttgtgtgattacacagtaaacttacaataatttgaaagcaattcacaactctttgtttggtctatcttctaaaaatgcagttgtgtgattacacagtaaacttacaataatttgaaagcaattcacaacattgcgttacttattttaatcctacccctcgttgtgtgattacacagtaaacttacaataatttgaaagcaattcacaactaatttagttattaaataaacacgattattgttgtgtgattacacagtaaacttacaataatttgaaagcaattcacaactcaaggctgtatgaacatttattgtcatctgttgtgtgattacacagtaaacttacaataatttgaaagcaattcacaactaactttttcccaaatgttaacgatttcgagttgtgtgattacacagtaaacttacaataatttgaaagcaattcacaactataaagctggtagtattgataccattcatgttgtgtgattacacagtaaacttacaataatttgaaagcaattcacaacatatcattgtgatgagtgtattgatgagtcgttgtgtgattacacagtaaacttacaataatttgaaagcaattcacaacactcattgtaaactaatactccagatccaagttgtgtgattacacagtaaacttacaataatttgaaagcaattcacaactttaaagtacaccctatttggtatatctctgttgtgtgattacacagtaaacttacaataatttgaaagcaattcacaactaaaattatgggctataacaccctgtttaagttgtgtgattacacagtaaacttacaataatttgaaagcaattcacaacatagcaatgcgtatgaacgcagaacaattcgttgtgtgattacacagtaaacttacaataatttgaaagcaattcacaactatgaatcattttctgttgttattattagagttgtgtgattacacagtaaacttacaataatttgaaagcaattcacaactctgttcgttaaattaaaagcttttaagtagttgtgtgattacacagtaaacttacaataatttgaaagcaattcacaacttatgcaggtgtttttatttcggggggtgcgttgtgtgattacacagtaaacttacaataatttgaaagcaattcacaactagcccttctttatacttacctccccaactgttgtgtgattacacagtaaacttacaataatttgaaagcaattcacaacatgagcgaagcagaacttgaagcctttaaagttgtgtgattacacagtaaacttacaataatttgaaagcaattcacaaccgcagtgtatggcacatgcttccctgttcggttgtgtgattacacagtaaacttacaataatttgaaagcaattcacaacatcttctcatgcgttggctctttaatagctgttgtgtgattacacagtaaacttacaataatttgaaagcaattcacaactggaaatagaaatgtaaatgtaaaaaactcgttgtgtgattacacagtaaacttacaataatttgaaagcaattcacaactttatagacgttctaatagatttcaatgtagttgtgtgattacacagtaaacttacaataatttgaaagcaattcacaactatttaacagttgattataatcctaactgggttgtgtgattacacagtaaacttacaataatttgaaagcaattcacaacggattctgtataaaggcatttactctctcagttgtgtgattacacagtaaacttacaataatttgaaagcaattcacaacccttttctatttgcttatttgactttcttcgttgtgtgattacacagtaaacttacaataatttgaaagcaattcacaactctggagttatcactcaatctgtctggtgcgttgtgtgattacacagtaaacttacaataatttgaaagcaattcacaactccccagttgcacatagatttcttgctcttgttgtgtgattacacagtaaacttacaataatttgaaagcaattcacaacacgctatccttaaagttttctacaccgtcagttgtgtgattacacagtaaacttacaataatttgaaagcaattcacaactatgtaaatagttacattgagttttttgtagttgtgtgattacacagtaaacttacaataatttgaaagcaattcacaacagtaaagaagtcagttggagaaattaatacgttgtgtgattacacagtaaacttacaataatttgaaagcaattcacaactgtttagtgaagttcgttaattgctggatattccggtctaaactgaacaggtgattccggtctaaactgaacaggtaattccggtctaaactgaacaggtaattccggtttaaactgaacaggtgattccggtgcaaactgaacaggtgattccggtctaaactgaacagatgattccggtctaaactgaacaagtgattccagtgcaaactgaacagttctgagcttagttttttagtgtaaattgtgattaaaaatcacaaagttatggctaacaaacctatctcaacgaccatgataaaaagtatcattaagatgaaaatcaaagaaatttctaattctagaatcgcatctagtttaggaatttcaagaactaca

SEQ ID NO: 2323 - DNA, 19089 bp, synthetic construct
  misc_feature 1..19089: note = Synthetic
  source 1..19089: mol_type = other DNA
tgttgttgggaggtgatgttgagttgattccttatcgtggtttctattcctatgtggtatccggcagtggttacgaggattatggcattccttccgatttgtattattcggcactggatggcaattggaatactgataatgatgacagatggggagaaccagatgaagatgacctgctacccgagattgccgttgcccgttttccgttcagcaatgcaaccgaactggccagtatgattcataaaagtgaattttatcagaatcatccgctattgggagaactgacaagccccttgttggcaggagagtttttatacgatactcctgaaacatggggtagcgattacctcgagttattgattggttcacgcgatgataatggttattcaaccattggtatacctgaagataacaatattcagaaaatgtacgaagaagaagcttcttggtctggccaggatttaatcaatgccatcaatcagggaaaacagtttgttcatcatgtcggacatgcaaaccaaacctatgttgcctatttgactaactcagatattacaaacgctaatttttcgggtgccaatggtgtggaccacaactacaccatcatgcaaacacatggttgtgattgcggtgcgttcgaatacaacgattgtattcttgagaaaatggttacgatcgataattttgctgtagcggtattgggtaattcaagatcaggttggtttaacgaaggacagacagaaggacctgccgcccatttgcaccgcgagatggtggatgccttgtacacagataaaatcaattttcttggaaaagcgatggttgaaagtaaaatacagactgctccctgggttgaagcagccgggcaatgggaagaaggtgcactacgatggaatttttatgatttgaatattttgggtgatcctgcattaagtgtctggactgccgaacccatcgaactggatgtagtttatgaaaatgaagtgatgattggtgcgcaaacaacagcggttcatgttggtagcaatggtgggccgttggttaatttcaattgcagtattctgttgaataataacctcatcgcacaaggattgacagatgaaaatggcgatgtagtattacagtttgatccgttggttgttgatgtttgtaccgccaccctgcaggtagttggttacaatagtctaccggttaattatgacatttcatttattcctgatgcaggtccttatgttgtgtataattcttatttgttgaatgatgcaggcggcaatggcgatggggtagccgattatggtgaattaatcgccttagcgatgtcagtaaagaatgttggttctgacaatgctactggtgtaaccgcagttttgtcgagtgcggattcggaagtgaacataaccgataattcagcctattatgaaacaatctcagcaggtgaaacgatatctattgcagatgccttctggttcggcgtttcaggttcagttcccgatcagcatgaaattctgtttgtattgacttgttcggatggggtgaatacatgggaaagtaatttttccattgttgtaaacgctcctcatttaactgtgggacaaatgattataaacgattctgacggtggtaacggtaatggtatgctcgatccgggtgaaactgctgttttgcagattccatgttccaatacaggtgccagtttatgcttaaatacattggcaacgctcatcgaacaggacgtgaacataagtcttgtgtcaaatgaggtggtgcttgatttgcttgctccgggagaaaccaaaactgcaagttatgaggttttggtagatgccaacgcaccaatcggaacggttattgaaatgaatatgcaacttgcctgtaccggttatactgttcaacaatctttgtatgctacgatcggattgatgatcgaagactttgaaacaggtgatttcagtgcttttgaatggcatcattcaggtacagcaaactggacagtctcgaatgaattaccttttgaaggagcctattgcaccaaatcaggtgtgataacagatggtcaggaaacaaatctttgggttagtctaatcgttgttagtaacgatgtagttactttccaacgtaaggtttcatctgaagatacctacgattacctgagattttatattgatgatgtgatgattgacgaatggagtggcgacaaagcatgggaacaggtctcttatcctgttgcggaaggaaatcacatattgcgttggtcctatcaaaaagattacagtgtctcaaccggaagcgattgtgcctggattgatgagattatcttcccgaccaccactactgtgattggtgttggtgagagtgtatcatctgctgatccaatcatttatccaaatcctaatcagggccggtttaccgtcaatatcggaaaccagtcgaaaatcaatgagatttcaattttgaattcgttaggaatgcagatttatacaagcctgacctctgatcaaattattcaacttgatttgactggcttatcaggcggaatgtatcttttggtgaatactgctgacggtaagaaatcctatagtaagtttgtggtgagataagtctttttatttcaatacattatagattatcataattgattaattgtaaaatttaaaatttgaaccatggaaatgccatttttaactttcggtttaattattttggcaatcctcgcttccggaataaggattgcgcaagagtatcaacgctcgattgtgtttcgtctcggacgatttacaaaggtgaaaggtccaggaattttctggatcatacccttaattgagcgacagcagttggtcgatatcagaacaagtacagtcgatctcgagcaacaggaaactattaccaaggacagtgttacaatcaaagtaaatgctgtgctctggtatcggattaccgatcctgagaaggccatcattaaggtggctgattattacaaggctgtgtatcagttttcagtgacggcactcagaaatattattggccagcattcgcttgatgaggttttgcgcgagcgcgaacagatcaacggaactttacaaaaaattgtagatgaaacaaccgaaccttggggtgttaaaattgaaatggtagagatgaaagatgtggaaatacccgaagcgatgcaacgtgccatggcacgggaagctgaggcaattcgtgaaaagagagcacggattgtgaaagcagaagcagaattggaagcatctatcaaactcacacagggtgccaagcaaatggaaggcagtccgattgcccttgaactgaggcgtatgcagatgttgtctgaaattggaattgacaataatacaacaactattttgttgatgccttctgagtttacaaatgctgcaaaatcattcaccgatttcgtcaacgcaaagaacaaagagtagaaatttgggcaagttgtttgccggttgcgcttgaaatgtaagataagtaaatctgaaggattaagtaattgaatatcaattatccttccagttccagctttaaatagtgtgccgtatagcttgtcgggtgtttggcaacctgttcaggtgttccttcgcacagaatatatccaccttttgtgcctccttccggtccaagatcaatcacatgatcagccactttcaccacctccagattatgttcgataatcagtaccgtatttcctttgtttacgagtttgttcagcacatcaatcagcactctcacatcttcaaaatgcaggccggtggtgggttcatcaaggatatagaaagttttaccggtatcttttttcgaaagttctgccgccagtttcacgcgttgggcttctccacccgaaatggtggttgatgcttgtcccagactgagatatccaaggccaacatctttcaatgttttgatcttgtggacgattgaaggaatgttttcgaaaaaatcgacagcttgttcaatcgtaaggtttagaatatcattaattgatttacccctgtaacgtacttcaagggtttcacggttataccttttcccctgacattcctcgcaaacaaccgaaacatctggtaaaaagttcatttcaatgatacgaactccggcaccaccgcatgtttcgcatcgtccaccttttacattaaacgaaaatctaccgggcaaatatccccttattttagattcaggtaaatcgccgtacagtttgcgaatatcatcaaatatcttggtataagtggcaggattcgatcgtggtgtgcgcccgataggtgattggtcgatctcaatcaccttgtcaatatgaaccaatccgtcaatcttactataaggcaagggtaatttaacagaattatagaaaaatgcactcagaatcggatagagggtttcgttgatcaaactcgattttcccgaacctgaaacaccggttacacaaatcattttacctaatggaaggctgagtgtgatgttttttagattgtgccctatcgctcctgtcagcacaagatttttgccgggatgcccttcacgacgttttttaggaatttcaatgttgcgtttaccactcaggtattcacaggtaatactctgacaatcgcccatctcactggcttttccctgcgcaaccacccaaccgccatgaatacctgcgccaggaccaatatcaaccacatgatcagctgccaggatggtgtctttgtcgtgttcaacaacaataaccgagtttccaatgtcacggagttgtttcagcgattcaatcagtcggtggttgtcgcgctggtgcaggccaatgctgggttcatccaatatgtataacacactggtcaattgggaaccaatctgtgtggctaatcgtatgcgttgcgattcaccgcctgacaggctgtttgcaggtcgattcagattaagataatcgatgcccacatcgagcagaaaacgaatgcgtttttcgatctcacgtagtatttctttcccgatttgcaattgtctgtcattcaaatattgtggtaagtcagtaatccattctgaaagctgattgacatccatttttgccagttcggcaatgtttttgtggttaatcaaaaaataacgggcatctttttttaaacgggtgccctcgcaaaccggacaaacaatatgattcatgaatcctgatgcccagcgttttacacttggtgatgccgattcattgttttgattgtttatgaagttgataatgccttcaaaattcagggaataggacgaggtgattccaagatattccttttttatttcgatggtttctgtcgatccataaagaatcacatcaatggcttcttcagaaatatcgttcaggggtgtagaaagatcaaaatcatattttaaaccaattgcctcaagctggctgaaaatccagttatttttgaattcgccaagtggcgagaaaccacctttttttatactcaggttgcggtcaggcataattttattcaggtcaatctccgaaatttcacccagtccattgcatttatggcaggcaccatagggagaattgaacgaaaaactattgggctccggttcgtcataactcagtccggtttccggacacatgagcattttactgaaatagcgaagttcatctttttcaacatccagtacctgtaacaatcctttgccgtgtttcatggctgtctggatggtttgtgagattcggtttttgtctgcatcatgcaccaatagcctgtcgataacaatctcaatatcatgcactttgtatcggtcgagttgcatgccgaacgtaatctcgagcagtatgccatcaacacggactttcagaaaaccggcctgacgaatttgctcgaataattcgcggtaatgaccttttcgtccccgcacaataggagcgagaattataatttgtttattctgaaattgttcgagtatcaaattggtaatctggtcctctgaataacgaaccatctttaatccggaagtgtaggaatatgcttcagcgattcgggcaaaaagcaaacgaaggaaatcataaatctcggtgatggtgccaacggttgaacgtggatttcggttgactgacttttgttcgatcgaaataacagggctcagtccggtgattttatccacatcggggcgttccatattaccgataaactgacgggcataggccgaaaaagattccatatacctgcgctgaccctcggcataaatggtatcaaatgccagcgatgatttaccgctgccactcagtcctgtaatcacaaccagtttattacgtgggattttgagatcaatgtttttcaggttgtgcaccctcgcaccaaatatttccagaaatttatcttccgcaatctgttcgtccatcctaaatctttcttttatttcttgcagttaaaaaatgccgaaaaagtgtttcaaatctgattatatgttttgttgtaaggtgccgaagggatcttgattttatatgtttttccggttggatttttcagtttttcagtccgtagccaaggattgaaatatttcaataacttataggtaattccttgctgacgggcatattctgtccagttggtcacatttccggaaatgcttatttcagttccaacaaaaggtgcataataatcaccttcatcaagtttgaacccatactttttggggtcttccacaataagtttgatagcaagtatgcgaaagagatagcgttctgtttcctcaggcatcaataaatcatggtaagaggtgacatgctgggcagccatcaaatctgaaattttcttttggccggcattgtacgatgcggctaccaatgaccagctcccatatttttgatatgatttcaggaggtatttgcaggcggcttcagtcgaaaactccacatcatagcgttgatcaatatcctcagttacttccaatccaagttctttggcagttccttccataatctgccaaaaacccacagcacctgctggagacttggcttgcatcaaattactttcgatgaggcagagatatttgaaatcatcaggaacaccattttttttcaaaataggctctatcacaggaaaccagcgggtggttcgttttagtaataaaatggtcgaactgtgccaataggtatttacaatcagttcacgttcaaggctttcgcgggtgtaaaaaatatccaacggaatcttttcatcagcaaaagtgagatcatccggatatccgggaacctctacaaaatcttcaacggtaatgctagtaacctgggtttgttgctgtgaatttgctgtaaaatttgaaatcagaaaccccagtaccaatcctgttgtgaagaatacgacagggacaaaccacctcttttttaacatgagataaatagttttattaagtaaattaatcgaatattctgatttattgataattaagtaaaaaatacgtggaacacttctggttgaattattaaaatggactcacgaaatctttgaaaagtggagaaatttgatctttttctgacagaagaggacttgcattaccccagtcgatattgagatcaggatcgttccatcggatgcttccttctgagtttttattataaacattcgtgcatttataaaagaaaacggtattgtcttccagggtaacaaaaccatgggcaagacccggtggaacccaatacatccatttatttgattcggtcagttcaatggaagcccattgaccataagtgggtgatcctttacggatatcaacagccacgtccagcacggcacctttcatcacgcgtaccaatttgccctgcgcaaaaggaggcgcctgaaagtgcataccacgcaacacccctttcatcgattttgactcgttgtcctgcacaaagttgtggtcgattcctttttgaaggaatttttctttgttgtatgattcaaaaaaatagcccctgttgtcttcaaaaacaaccggtttgataatgagcagatcacgaatttttgtttcaattatttccattgcagtttattttgattgacaaagattaaaaaaaatgcatcatgtatcggatcctgcctacgttgtgaatgattgactactaccattcagtagtgctaaaattcaaaatcaacaatcatttcacgtcgattaggttttacaaatgaattacctcaccataagcatcggctgtggcttccattatcgcttccgacatggtagggtgcgggtgcatggcgttcattatctcacggcctgtggtttcaagtttgcgcgccacgactgcctctgcaatcatttcggtaacattatcgccaatcatgtgacagccaagccattcaccatattttgcatcgaaaattacttttacgaaaccgtctttattaccggccgcactggctttgccggatgctgagaatgggaatttgccaactttgatctcataaccagcttctaaggcttgtttttcagttaaaccaaccgaagctacttctggatttgtataggtgcatgatggaacattcttataatcaaccggttcaggatgatgacctgcaatggcttccacacaggtgatcccttcatgcgaagccacgtgtgcaagtgccggtccgtgtacaatatcgccaatggcataaatgccttcgatattggttcggtaaaaatcatccaccaataccttgcctttgtcggttttaacgccaacatcttccaaaccaaggccttctagattggttgccacacctacagcagacagaactatttctgcgtcaacaatttcttctccttttttggttttgatagtaaccttacaaatatctccgcttacatcaacattttcgacggttgaactggtcatcactttcatttttgcttttttgaatgaacgttccagttgttttgagacatcttcatcttcaataggcaatacatttggcatgaattcgaccagtgttacatcaacacccatcgagttatagaaataggcaaattcggaacctattgcacccgaaccaaccaccaccattgatttgggcattgttggcaacaccatcgcgtgacggtaaccaatgatttttttaccatcaattttcaggttgggtaactcgcgtgcacgtgttccggtggccaatattatatgatcagcatcgaaaagagtggctttgccttccgcatcagtaacttccacttttttaccggctttaagtttaccaaaaccggatatcaaatcaattttgttctttttaaacaggaattgtacacctttgctcatgccttcggccacgccacgactccgtttcacaatggcttctaaatcaggtgtggcttcggcacccaacttaattccatactcttcggcatgtttcatatagttaaaaacctgcgcgcttttcaataaagccttggttggaatgcagccccagtttaaacaaatacctccgatttcggctttttcgacaacagcaacttttttgccaagttgtgatgccctgatggcggcaacataaccgcctggtccgctgccaattacaatgagatcgtatttcataaataaatctgttttcggttaaggaatgatgaatggcaaaagtatgaaattatcaggtagaaaaggttggggaagtagaaaaatgggtagtttgtatggctccgagattattaatattacagaaaatgcgaaaaggaggctggttagaatgaaatttgttcttagggaagttttatgtaatttattctgatttaattaaatataattttactttacatgcaatatctataaaatagttttgtaaatttgaacttgaaacaacatttcatttttatgtttttattagatgatcgttgtgaaacgaaaatcgtatcataaaacatcagaatcttaaaagaaacaaccaacaatgatagaatttatagtcatacgctaaaaagaaaaaggcgagtttccccgccttagatgttttcacaacggaataatccttattgtgaattgctttagattgtgacgcaaatataatacataaaacaccaaaatttattttttatgaaaaagattttaggacttgatttagggactacatcaattggctgggctttagtcaatgaaagtgagaatgaaaatgaaaaatcctcaattgtaaagattggagttagagtaaatcccctaacagtagatgaactaacaaatttcgaaaaagggaaaagtattacaacaaatgcagttagaactttgaaacgaagcatgagaagaaatctacaacgctataaacttcgaaaaaacgccttgattgagatattgaaagaaaaaggattgattttaaacgaaaccattcttactgagaatggtaatagaacaacttttgaaacatatcgtttacgtgcgttatcagtcgtggaaaaagttagtttagagcaacttgcacgagtattcttaatgattaatggcaagcgtggatataaaagcagtcgaaaagaaaaatcaactgatgaaggacaattaattgatggaatggaaattgccaaaaagctatataatgaaaacttaactcccggtcaatttgtttttcagctcttgactgaaggaaaaaaatacattcctgatttctatcgctctgatttacaagctgaatatgacaaaatctggaattttcaaaaacaattcctacctgaaatattgacggatgagtttaaaaaacaaattgttgggaagggtaaaatgattacaacaaaaatcttcctagcaaaatacggtgttttcacagcggataataaaaatactgataaaagactacaagcttatcgatggcgggttgaagcacttgcgaatcaattgtcaaaacaggaggttgcgtttgtaattagtgatttaaacggaataatcagtaattcaagtggttatcttggttccataagtgatagaagtaaagtgttatattttaacaaacaaacggtcggacagtatttaatggctcaattagaacgaaacccgcatgcacgattgaaaaaccaggtgttctatcgacaagattatttggatgaatttaatgctatttgggaaacacaagccaactttcataaagtgcttaccgaagatctaaaaggtgaaatacgtgatgttataattttctatcagcgcagacttaagagccaaaaaggactcattaattattgtgaatttgaaaacaggaaagttgaggtggatattgaagggaacaagaaaatattaacagtcggtttaaaagtttgtccaaaggcttcacctgcgtttcaggaatttaaaatctggcagattctcaataacatacaactaagtgatagagatgggtccaaaagattcttaaatcaagaagagaaagaaatcctgtttaatgaattgaattttaaagaaaaaatttcgaagaatgatgctttaaaactgctttatgaaaattacaaggacctggattttaattttaaagaaatagaaggaaataggacccaatcggctctttataaggcatatcaaagaataattgagttaagtgggcatggcgaatatgatttttccaaaatgtgttcaaatgatatttttgcgaatgtcaaacaaattttcgctggattgggatacaatactgacattttattgtttaattcaggtttagaaggaaaggaatttgagaatcaatcgatgtacaaattgtggcatttaatttattcttttgagggtgatgattctaataccggagatgaaaagctaattaacaaaatttcacagctttatgggtttgaaaaggagtatgcgaccataatagcaaatatcaattttcaaccagattatggaagcttatgtacaaaagcaatccgaaaaatattaccttttttgaaggaaggtaacgaatatagtgttgcctgcacattcgcgggttatagacactctaaaagttcgttaactaaagaagaaatcgatagtaaagttctaaaagattgtttagatattttaccaaaaaacagtttgcgtaatcctgttgttgaaaaaatattgaatcaaatgatcaatgttataaatgctgttattcaggagtatagcgttaaagataaagagggtaaaattgtagaatatttcaaacctgatgaaatcagaattgagttggcccgtgaattgaagaaaagtgctgaggaaagagaaaacgcgaccaatgcaatcaataaatcaacgacagaacatgaagcatataggattattcttcaaaatgaatttggtctggctcacgtaagccgcaatgatattatccggtataaactttatcttgaattagaaaatcgggggttccaaaccttgtattcaaatacttacattgcaccaaataaattattcagcaaggaatttgatattgaacacataattcctcaggcgagactttttgatgattcattttcgaacaaaacaattgaaagcagaagcattaatattgaaaaagccaacgatactgcttatgattttgtgttaagaaaaagtggtgaagaaggtttagatgattatttaatccggattgaagaactatttaaggctgaaagaattacaaaatcaaaatataacaaattgaaaatgaaaggagctgatataccaagcgatttcattaaccgtgatttaagagacacccagtacattgcaaaaaaagcaaagaatattatagaagaacttgttagagatgtggtttctacaaccggttctataactgacagactaagagaggattggcaactaattgatataatgcaggaattaaattgggataaatatgacaagttgggattgactgaaataattgaaaaccgagaaggacataaaatcagacgtatcaaagattggacgaaacgcaatgaccatcggcatcatgctatggatgctttaactattgcttttacaaaaagaagtcatattcaatatcttaacaatttaaacgcgcgaagtgacaaatcgggaagcatatatggcattgaagcaaaggagctttatagagacgagaaaggcaaattgaaatttataccaccgatgccactgaatgattttagatcagaagctaagaaacacctggagaacactctcatatcaataaaagctaaaaataaagtgactaccattaatatcaatgtgaccaaaaagtcaaatggagtgaataaaaagaaacagttaacgccacgtggtcaattacatctggaaactgtttatggtagtatcaatcaatatgttacgaaggtcgaaaaagtgggagctgcatttagcgaagatcaaatccagaaagttgcaaacaaaggttttcgcgaagcattaatgaaacgattgatggaatttgaaaacaaccctaaaaaggcttttacggggaagaacagtctggataaaaatccaatttttattgatagtttgcatacccaaaaagttcctgaaaaagttaaatctgtttcagctgagactatttataccattcggaaagatgtttcacctgatttgaaaattgataaggtaattgattttaaggttaagtccatccttatggatcgcttagatgattacaagggtgacagtaagaaagcattttcaaatttagaggagaatcctatttggctgaataaagaaaagggcattgctatcaaacgagtaacaattttaggaatcagtaattcggttgcattgcatgacaaacgggataaaacaggaaatttgatgttggataaagagggtaatgcagtaccagttgattttgttaatactggtaataatcaccatgtagcaatttataaggatgtaaacggtaacttacaagagaaagtagtttcattttttgaggcaacagaacgcgttagtcagggcttgttcattattgacaaaagtttcaatagtacacttgggtgggagtttctgttcagtatgaagcaaaatgagtatttcgtttttccaaatgaaaaaaccggtttcaatccatcggatattgatttattgaacctggaaaattatcatttggttagcccaaatttgtttagagtacagaagttatcaaagaaaaattatgtttttaatcatcatttagaaacaacggctgtagatggtgaaactttaaagaacaaaaagctgcttctaaatattacacatcgttttatccagagcgtacctccattgaaggatttagttaaagtgcgtattaatcatattggtaaaattgtttcggttggagaatattgagatgacaatgacagctctcaaacccgataccagttatcacattttcaaccatgcaaatggctttgagaatatttttctgcatgaagcaaattattactattttcttgagaagtatctactgtatatcaatcctattgctgaaacatatgcttactgcctgatgccgaaccattttcatatcattgtcaggattcgaaaacgcaacatcatcgaagaaataattcgaaaaaaagaaaataatttcgaaaataccttttccaaagttccaaactttggaaaaggtgttgttaatatcagcgacagcgaaattttaaaatatatttcaaaacagtttgccaacctgtttagctgctatacgcaatcattcaataaagtgtatcaccgcaaaggttcactttttattaaaaactttaaacggcaaacaattactgacaaggaatatttccttcattcagtaatctatgtccatagaaaccctgtgcaccatggtttttgtaatgattttaatgcttggacgtatagttcttatcgtgatgtttttgcgggagagcatggatttactgaaaacataaaactattaaaactttttgatggtttggagatatacttgtcacaacatcaaacgtcacttgaaaagcttgcacaaatcgatgattttaattcgatataatcatgattaaaaggacattatattttgggaacccttgctatctgaaaaagaaagatatacaaatgggtattgagtttccggaaagggaaaacaaagcaatgataagcgttccgatcgaagatataggaattttgttgttagacagtccgcatatcacgcttactaatgctttaattgccgaattgaatcaaaacaatgttgccattatcagttgtaatgcccaacatttgccgtttggcttgatgcttcccatgttttcgcaccatgcttttacagaaaaaatgtaccagcaattggaaagttccctgccgttgaaaaagaatttgtggcagcaaacgatagtcgctaaaatcagtaatcaggcttccttgcttcgccaaaacaatattgatgataaaaaaatgcaatattatttgggcatggttcgcagtggcgatcctcaaaatgtggaaggcagagcagcagcatattattgggaaaatctttttggtgcaaatgcgaaatttacacgtgatcggaatggcgaaagtccgaatgcgctccttaattatggatacgcaattttattggctattgttgctcgtgcattggtagccagcggattattaccggcagtgggaattcatcatcacaacaagtataacccctggtgcctggcttctgatattatggaaccatatcggccttatgtagataggatagtgttgaatattctttctgaaaatacagatattgaagagcttactcctgagattaaaaggaagctacttcaaataccggtttttgatattttgattgatggcaacagtagtccgttaatggtgggagctcaacgtacaaccgcatctttgtcatcttgttttgaaggattatccaggcgattactttatccggaatttatttaaaatgtgtgaaagaagattttacagaacgttttaatcaatatcgcattttgtgggtatttgtttttttcgatttgccgactgaaaccaagacagaccggaaaaactacgccttatttcgaaagaaactacaaaaggatggatttaccatgatgcaatattccatttatgtgcgccattgcaacagccgtgaaaatgctgatgtacatatcaaaagggtgaaatcttttctggctccgaaaggtgaaatcatcattttttcgctgaccgataaacaatttgggatgatggagtttttcaggggcgcaactgaaaaaccaagaccgccaacaccccagcagcttgagcttttttaaatgataggaataaaaaaatccttccctttgaaagagagaaggattttactgaacattttttacatttttgttttattgcttaataaactgagctttaattgattaaaccagggtacaatgtgctcagtatttcaaagatacaatctaaaagcaattcacaacagggtatcagacatttgagtagccttcatcaatgtgctcagtatttcaaagatacaatctaaaagcaattcacaactggacaaatgatggtgatttagtttacgataatgtgctcagtatttcaaagatacaatctaaaagcaattcacaacaatctcttccttttcaccatcttcaagtataatgtgctcagtatttcaaagatacaatctaaaagcaattcacaacatagccaaatcgtcttcgctcagtccaaaaaatgtgctcagtatttcaaagatacaatctaaaagcaattcacaacaaggttgatgttgtctctttgaagttgaagaatgtgctcagtatttcaaagatacaatctaaaagcaattcacaacagtgatgaagtggcagacctaatgtttagaaatgtgctcagtatttcaaagatacaatctaaaagcaattcacaactttgtcataaaatgataagtaccaccaacaaatgtgctcagtatttcaaagatacaatctaaaagcaattcacaacccttgtattgactcgccttcggcgaattctaatgtgctcagtatttcaaagatacaatctaaaagcaattcacaacaaacaatcattggcgaaaaaagagcaacaaaatgtgctcagtatttcaaagatacaatctaaaagcaattcacaacatacggcagatagtattgttgaggcacttaatgtgctcagtatttcaaagatacaatctaaaagcaattcacaacggaacaggcgaaatcaaatgtaaaatcaggaatgtgctcagtatttcaaagatacaatctaaaagcaattcacaactgacatcctcttggcataacttatgagtggaatgtgctcagtatttcaaagatacaatctaaaagcaattcacaacattggggtgttttgactccgaaactgaagcaatgtgctcagtatttcaaagatacaatctaaaagcaattcacaacataaactacatgatgctgattatgttgaaaaatgtgctcagtatttcaaagatacaatctaaaagcaattcacaaccaatagtcagacaggtaatcacttcggctgaatgtgctcagtatttcaaagatacaatctaaaagcaattcacaactgctgatgttgtgtcaggctatatgagaataatgtgctcagtatttcaaagatacaatctaaaagcaattcacaacggttcaggtattcaatcactaaaagtaaagaatgtgctcagtatttcaaagatacaatctaaaagcaattcacaacttaccggctcctgttagctgggcagtgccgaatgtgctcagtatttcaaagatacaatctaaaagcaattcacaacaaccggatcgttgcaatatttaagcgcaaaaatgtgctcagtatttcaaagatacaatctaaaagcaattcacaacagagtattgatatgatcgatctgaaattcaatgtgctcagtatttcaaagatacaatctaaaagcaattcacaacatcactcacataaatgatgtagcgaacagcaatgtgctcagtatttcaaagatacaatctaaaagcaattcacaacctgctgctgtagttgccaacaagctcaccgaatgtgctcagtatttcaaagatacaatctaaaagcaattcacaacttaatttttcaagtgattaattctcattgcaatgtgctcagtatttcaaagatacaatctaaaagcaattcacaacacctggcgtgaagcccttatggaatatcctaatgtgctcagtatttcaaagatacaatctaaaagcaattcacaacgtggtcgatattcggaagtggcagcttcgaaatgtgctcagtatttcaaagatacaatctaaaagcaattcacaacgccggagccatcacataagtagcgaacacgaatgtgctcagtatttcaaagatacaatctaaaagcaattcacaacatgcaggtaccaggtaccgcaaagatttacaatgtgctcagtatttcaaagatacaatctaaaagcaattcacaacgttcatcaccatcgtcaatgcttcgatggaatgtgctcagtatttcaaagatacaatctaaaagcaattcacaactaaataatggaggtgcgcccaatacaacagaatgtgctcagtatttcaaagatacaatctaaaagcaattcacaacatttggtttggtgtaaacttgtcgaacaacaatgtgctcagtatttcaaagatacaatctaaaagcaattcacaacctcaagtgcatcataagcccatgccttcgcaatgtgctcagtatttcaaagatacaatctaaaagcaattcacaactctcgccttcggcgaattcttgcaatcgttaatgtgctcagtatttcaaagatacaatctaaaagcaattcacaactaggtattattagcataaccccaagattggaatgtgctcagtatttcaaagatacaatctaaaagcaattcacaacccggccatggaagtgaagattcattgttttaatgtgctcagtatttcaaagatacaatctaaaagcaattcacaacgtggttgtgccagtaaaactcatagttagtaatgtgctcagtatttcaaagatacaatctaaaagcaattcacaactatggacacgttctttgatgacagaatgagaatgtgctcagtatttcaaagatacaatctaaaagcaattcacaacctcaagtgcatcataagcccatgccttcgcaatgtgctcagtatttcaaagatacaatctaaaagcaattcacaactctcgccttcggcgaat

SEQ ID NO: 2324 - DNA, 18975 bp, synthetic construct
  source 1..18975: mol_type = other DNA
  misc_feature 1..18975: note = Synthetic
cctccgcattctacttcggaggttatggataattgtggattctggaagcggcggaagaaattgaaattctccttccgctcccaagtttctatatctatgatctgtttcatttcttttctactttcttccggttatagaagaacatgaaatagacgcctattatgataaacggaacgcttaaccattgtcccatattgaacatcatgctgttttcaaaatcttcctgattttcttttaggaattcgatgaaaaagcggaaggtgaagatataagtcagacaaaggccgaagaagaagccgcggggatagggcaacgaggcatcgagctgcatggacgacgacttgcgttgcgtggtgctgaagtcggtctccagtttgtcttcctgctttttctgtcctctcttatagaggtagaacatgcccagcgcaaagatgaagtaggcgatggcttcgtaaagctgagccggatggcgcgctacgacgtcgccgttgtgggcgaagacgaagccccagggtacgtcagtcggccggccgacgatttcggagttcatgaggttgcccagccggataaagcacgccgtgatgggagtggcgatggcaatgttgtccagtacacgcatgatattcagtttcgttttcctgacgtaaagccaaagggcaagcatcaagcctatcgtaccgccgtggctggccagtccctcgtagccggtgaacttccacgagccgtcggccatgaaatgtatcggcaggaacatctccaccacgtggcgccatgacgacaggaagtagtcgggctcgtagaacaggcagtggcccaggcgcgagcctatcagtatgccgatgaagcagtagatgaagagcgggtcgaacagctcgggctttatcttctgctccttgtacaggcgcttgacgatgaggtatgccgccagcaggcccagcagccagcacagcgagtaccagcggaacgagaagctccctatgctgaacgccacgaggtcggggttccagaggatggatagtaattggttcatatttattcagtagttaaagtagttaatgtagttaaagtagttaaagtcattacttttgcttgtaatgtgaaataaatggctaatagtcaaggcatttgactttaactacttagcgaccaacgggagcggtaactcctttaactactctaactacttgatatttacacattaaacctgaagtgcatgatatctccgtcctgcactacgtagtccttgccttctatgcctaatttgccggcctcgcgcacggcggcctcagagccgtacttgatgtagtcgtcgtacttgattacctcagcgcgtataaagcccttctcgaagtcggagtggataacgccggcgcactgcggagccttccagcccctcttgtatgtccaggccttcacctccatctcgccggcggtgatgaacgtctgtaggtcgagcagcgagtaggcctttttgataaggcggttaactccgctctcctcaaggcccagttcgtcgaggaacatccgcttgtcctcgtagctctcgaagccagcgatgtcctcctctgtcttggcggcgattaccagcacctcggcgccttcctccttggctatctcctctacgcggcggctgtagtcgttgccgtcctttgccgacgcctcgtcgacgttgcaaacgtacaatacgggcttggccgtgagcaggaagaggttgcgcgcggcctgctgctcctccttcgactcgaactctactatgcgggcgttcttgccctgttcgagcgcctccttgtacgcttccagtaccgttacctccacctttgcgtccttgttgcccgcggcggccaccttctgctgcttagacagacggccctcgatggtctccaggtccttcagttgcagctcggtgtcgataatctccttgtcgcgtatcgggtctatggtgccgtcaacgtgggttatgttttcgtcgtcaaagcagcgcagcacgtgaatgatggcgtcggtctcgcgtatgtttccgaggaacttgttgcccagtccctcgcccttcgaggcgcccttcaccagtccggctatgtcgacaatctcgcacgtagcgggcacaatgcgtcccggatgtacaatctcggccagcttagtcagccgctcgtcgggcacggtaatcatgcccacgttaggctctatggtgcagaaagggaagttggcggcctgcgccttcgcgctcgacacgcagttgaaaagcgtggacttgcccacgttaggcaatcccacaataccacattttaatgacatatctttgtataaacgtttatatcttcgggtgcaaaggtacaaaataattcataataagcaaataaattattataacatacccaccctcaacctccccgagggaaagagcttagtttgccttgccggttttagtcaatggcgcatacggcttattgggcttattagccttattcggccaattagtcccacaaccaaatacccaaccccccacaaccataaaatgccgcaaatcacgatatggtttgcggcattccggcgtgtcgtccgcggcctttcgtcatgccatttgcggccttccgctgtggcgccttttctgcctgaatgcatgacaatggttatctatgaaatagcgatagtataaaatctattgtcttaactcctgaaataaagcatttggctttaactacttagcgaacgacagtgagcgataactcctttaacttctttaactaccaaataaaaatatgttaaaccgacattactttttcgcactttgtccgtcatatatgcaaataacgtaatctttttaacaataacgcatatttttatggacaagaaaacattggcgattgcggctctggccatgggactggggacgcagtcagttatggcgcagtatcctcagctgacgcctgagggcaaggccaagattgactcgctcaccaaggtctggacggcacattctgactcggcgtgggcagtagcattacccatagttaagaaagaggccatggagaacggccgcccctacgtgccatgggcgttccgtccgtatgacctcaagcaggcaaagatacccgcattccccggtgctgagggcggcggcatgtacacacagggcggacgcggcggcaaggtgctcgtcgttaccaaccttaacgactcgggccccggctcgttccgctgggcttgcgagcagggcggtgcccgcataatcgtgttcaacgtttcaggaataatcaagctcgagacgcctatcatcctgcgcgctccctacgtcacgatagcgggacagacagccccgggcgacggtatctgtatagcaggacagtcgttccaggtcaacacgcacgacgtaatcgtgcgccacatgcgcttccgccgcggcgccaccaacgtatggtaccgtgaggactccttcggcggcaaccccgtgggcaacatcatgattgaccactgctcgtgcgagtggggactcgacgagaacatctccttctaccgccacatgtacagcatgaacgacggcaagccctcaagaaaagacccgacggtcaacgttaccatccagaacaccatctcggcaaaaggtcttgacacatacaaccacgccttcggctcaaccatcggcggcgagaacaccaccttcatgcgcaacctctgggccgacaacaccggacgtaacccgtcgataggctggggcggagtgttcaacttcgtgaacaacgtaatctacaactgggttcaccgcacggccgacggcggtgagtactctacgatgagcaacttcatcaacaactactacaagcccggaccgctcacaccgaaagactcgcccgtgggctaccgtatcatcaaggccgaaagccgcagcaaaaagctcttcccgtggccgcaatacggccgcgtgttcgccatcggcaacatcgttgaaggcaacgagcgcgtgaccaaggacaactgggacggcggaatacaggtatccgacatcggcgacggcacacagatacccgaagacgtaaaggcactcatgaaatccgacgagccattcgaaatggcacacatgaccatcctgccgtctgacaagacattcgactatgtgctcgagaacgtgggcgcgacactgcctacacgtgacatcgtcgaccagcgtatcatcgaggaggtacgcaccggcaaggcatactacgtagacaagctgcccaaggacaacccctacggcgaccactggggcatgagcgagaagacagccaacgaggagggcctcttccgctaccgtcgtctgcccaaggactcttacaagctcggtatcatcaccgacccgcgccagatgggcggatatcccgaatacaagggagaaccgcgcgttgacaccgacggcgacggcatgcccgacgactgggagattgccgctggcctgaaccccaacgacccctctgacgccaacggtgactgcaccggcgacggatacaccaacatcgagaagtacatcaacggcataagcaccaaggtgaaggttgactggaccgacctgaagaataactacgacaccctggcaggcaagacgtcgctgtactgataaaacgacaattatttgcttaaagccgtgcccggcggaggttacatcctccaccgggcacggcctttttcatagtagtccatcacgtgcggcggtgcgaaataaccacatgaaacgacaccgattgtcgtttttatttactatatttgcgaaatctaatattgctaacaccaacaccatgaaaagaatattgggactcgacctcggacctaacagtataggttgggcattggtcaacgaaagagagaatgaagcagaacattcatctattgtgaaacttggttcacgtattataaatttcgacggttttgtcagcactaaaactggtaaggaaagcaagactcctttggatgattttaaacaaggcaaagggatttcatcttgcgccggacgtacactgaagcgcaccatgcgtcgtaatctgcaacgctacaagctgcgccgtgacagtcttgtcggtattctgaaatccaacggacttatttccaacgatgctgtactggccgagtgcggcaaccgtaccactttcgagacttaccggcttagggcgagtgcggccacggaggagataacattagaggaactggcgcgcgtgctactcatgataaataagaagcgtggctataagagcagccgaaaggctaagcagaaagacgaggacggccacctgatagatggcatggaggtggcacgcaggttgtatgacgacggccttacgcctggacaatacaccttgtcgctaatggagaaaggcaacagacatatacccgacttctatcgttccgaccttcaggcggagcttaacaaagtgtgggattgtcagcggagattctatcccgacattcttactgatgagttaaaagacgccatacagggtaagaacaagagccagacgagggccgtatgctcgacaccgttcggcataaagggcatgaagcgcaatacaaaaggcgaacagatgaggaaagagaactacagatggcgcgtggaggcgctgacagacaagctcgaccttgaacgactggcagtggtgctacaggaaatcaacggccagctgaaaaactcgagcggatatctcggcgcgataagtgaccgcagtaaggagctgtacttcaaccaccagaccgtaggccagcaccttatggccgaacttgatcgcaatcctaattacagcttgaagaacaaggtgtattaccggcaggattatcttgacgagtttgaacggatatgggagacgcaggccaagtaccataaggagctgacgcctgaactgaagcacgaaatacgcgacgttgtgatattctaccaacgaccgctaaagtcgcaaaaaggactgataagccactgtgagtttgagagtcgtgagatagagattgaagtggatggccataagaaaaagattaccgctggtctgcgcgtgtgtcccaaatcgtcaccgctgtaccaggaattcaggatatggcagatgataaacaatgttcaggtatcaggtccgatagaaccagaaaaccagcccgacttgttcggcgccacggctaagtacaggaagggtaaacgtttcctgacacaggaggagaaagagacgcttgcatctgagcttaccttcagggacaagatgacgaagaaagagatattaaagctgttgtttgataatccgaaggagcttgatcttaactataaggagataaagggcaatactacgatggcagccttgatgaaggtatgcctcggaatagtagacatgagcgggcacggagagtatgacgtatcgaagatttctgtttctgatgccataggcgtgatagtatcggtgttcaatgcattgggattcagctcggcctttctcgactttgactcgtcacttgacggtaaggattttgctgcccagtcggcttacagattgtggcatctgttgtattcatttgagggtgacaagtcgaagactggcaatgaacggttggtggctaagatacaagagttgtacggcttcgataaggacagcgccgccatgatagccggtatcacgtttgagcctgactatggcaacctgagtgccaaagcgatgcgcaagatactgccttatatgaaagatggagtggagtatagcgaggcgtgccgcatggccggataccgccattcaaaacgttcgctgacaaaggaagagatagagaccaagcagctgaaagaccatcttgacctgttgccgcgtaacagcttgcgtaatcctgtcgttgagaaaatcctcaaccagatgattaacgttgtcaacgccgctatctgtgaatacggacgccctgacgagatacgcatagaaatggcgcgtgagctaaagaagagcacatccgagcgcgaagagatggttaaggccataagccgcgccacggccgacaacgagaaatatcgcaagatgttgcaggaagaattcggtatggccaatgtaagccgcaacgacataatacgttatcgcttgtacatggaactaaaggagaatggtttcagaacgctttattcaggcacttacataccacgtgagaaacttttcagcaaggaattcgacatcgagcacatcatacctcaggcaaaactgtttgacgactcgtttgccaacaagactcttgaggcgcgaaatgtaaatctggagaaaagcaatatgaccgcttacgactatgtaaagggtaaatatgacgctgccggacttgagcaatacgaacagcgagtggaggcgctttacgccaagggagctatcagcaagacaaaacgcaatcgtctgctaacagtcgaggccgacatacccgatggcttcatcaatcgtgacctgaacgatactcagtacatagcccgtaaagcgcgggagatacttgaagaagtggtaagaacggtaacacccactacgggttcggtaaccgaccgcctgcgcgacgactggcaacttgttgacgtcatgaaggagcttaactgggataagtacgacaggctcgggctgactgagatagtcgaggacaaagatggccggcgtatacgccgcataaaagactggacgaaacgtaacgatcaccgccaccacgctatggacgcgctgactatagcatttaccaagccggcctacatccaatacctaaacaatcttaacgctcgcagcgaccgtagcggcagcatatatgcaatagaaagaaaagagctttatcgcgaccgtggcggcaaactgaggtttatgcctcctatgccgctcgacgaattacgccgtgaggccaggcggcagcttgaggctgtgctcgtgtcaatcaaggctaaaaacaaggtagtgacgcgcaatattaacgtcacgaatgcaaaaggtggcggtcacaggaaggtgcagcttacgccgcgtgggcagctgcacaacgaaaccatctacggcagtataaggcgctatgccacaaaggaggaaaaggttaatgcttcgttcactgaggataagataatgaccgtggccgacaagcgttatcgtgaggccctgttagaaaggctgaggctgtgctacggagacccaaagaaggcgtttacaggcaggaacagtcttgataagaatccattgtttgttggccgtatgcacacggaaaaggtacctacgaaggtaaaaacagtgacacttgaaacaatattcacccaacgcaaagaggtgaacaaggatttgaaggtggacaaggtgatagacacgagggtgcgcaagatacttgaggagcggttgcgtcagtatggaggtgacgcccaggcagcattctccaatcttgacgaaaacccgatatggcttaacaaggaaaagggcattagtataaagcgcgtaacgataactggcgtgaacaatgccgtggcactgcacgacaaacgcgacaatcttggtcgtttgatacttgacggaaatggcaacaaacaaccttccgactatgtaagcacgagcaataaccaccatgtagccatcttccgcgatgctgaaggcaacctgcaggaacatgtcgtgtcgttttatgaggccacggcgcgcgcaatacaacatctgcctgtaatagaccgtgattataacaaggctgtcggttggcagtttctgttcacgatgaagcagaatgagtattttgtttttccaaacgccgagacaggttttgacccaaaggaaatcgacctgcttgacccgaaaaactatgctgcgataagcccgaatctgtttagggtgcagaaagtatcaaaaaagaattatatgtttaggcaccatttggaaacaacagttgaggagaaaaaagaactacaaggttttacttggaaaaatatacgttctttgggtgggatagataaacttgttaaagtccgtgtaaaccatcttggacaaattgtttcggtaggagaatattaattgtaaataatctaagaccatgataaaacgaacactgtgtttcaccaacccggcctatctttcgttgaaagacagacagctggttatacgcctgccggaggtggagaaaagcgacatgccggaagagttgaagaaagaagcggtgaggactgttcctgtcgaggacataggcgttgtggtgcttgacaataagcagataactttgacggaagggttgctcgaggcgcttctcgaaaataactgttcggtaataacgtgcgacagccgcagtatgcccgtaggccttatgctcccgctttgcggtaacactttacagagcgagcgtttccgtgaccagcttgacgcgtcgctgccgctgaaaaagcagctctggcagcagacagtcaaggcgaaaatagataaccaggcagcggttcttgcacaatgcgcaggggcggagacggggtgtatgcgccgttggtcggccgatgtgcgcagcggcgatacagacaatcttgaaggccgtgcggcggcgtattactggaaaaatctttttgacggcatacctggccttgacggcttcacccgtgaccgccagggcattccgcccaacaatctccttaactatggttatgccatcttgcgtgccgtaatagcccgctcgctcgtgtcgagcggactgttgcccacgcttggcattcaccaccataaccgttataatgcttactgcctggcagacgacataatggaaccataccgtccgtatgtggacgagctcgtgtatggaatagccgctgagtacggcatagacatacctgaagatattacgaaagacctgaaaatgcggctgctcggcatacccgtcattgatgttaggataggtggcaagcgcagtccgttgatggtggcggcaacacagactacggcgtcgctctataaatgctttaacggagaggcccgccgaatagcctacccagagatgtgaaataaacaaaattgaatatgtcagaccgtttcagcgaatacaggattatgtggatacttgttttcttcgaccttcctaccgagacaaagagggacaagcaggcctatgccttgttccgcaagaacctgcaacgcgacggtttcacgatgttccagttctctatttatgtccgtcattgtgccagcatggagaatgcccaagtgcacatcaagcgtgttaagtcgttccttcccaagtacggacatgtaggtgtactttgtatcaccgacaagcagttcggcgccatagagctgttttatggcaagaaaccggtagagcctaatgctcctggtcaacaacttgaattattctgacatttatgtttatttaacaatgttcttctgtttgtcgcgctcagttcatggtctttggtggtattctaaatagtttcgacatattctcttgaaacgtcaaatccggctcaatagccggatttgacgtttagacaaccatctttttatattttctaatttatcttatatctcactgattataagtgttttaccgtaatcgtgatgtttgtcttagcgcaaagataagaattttaaagcaaatcacaacgatacggcttaccgtaacatctacgtgagagatgtttgtcttagcgcaaagataagaattttaaagcaaatcacaactaatgctttttgtaagatttttttgtttacgatgtttgtcttagcgcaaagataagaattttaaagcaaatcacaacttccaaatgcgcctgaccttgtatcttgcggatgtttgtcttagcgcaaagataagaattttaaagcaaatcacaactactaagaggtccgcatactgcagaagcttgatgtttgtcttagcgcaaagataagaattttaaagcaaatcacaactgcccattcagaacaagttgagacgtttcggatgtttgtcttagcgcaaagataagaattttaaagcaaatcacaacaagatgtcatatgatgtaacttctaccggtgatgtttgtcttagcgcaaagataagaattttaaagcaaatcacaactttcaagttgttctatttgtttcttgagtggatgtttgtcttagcgcaaagataagaattttaaagcaaatcacaacagtggctaaatgatgcagaaacaaaatggagatgtttgtcttagcgcaaagataagaattttaaagcaaatcacaacgcgtgctactgtccgcccttgtcacttgaagatgtttgtcttagcgcaaagataagaattttaaagcaaatcacaacaacttaagtctataatcgaccttagtaacgatgtttgtcttagcgcaaagataagaattttaaagcaaatcacaactaactacttgcatatgtcataaatttaacgatgtttgtcttagcgcaaagataagaattttaaagcaaatcacaacatctgctcaacggtcatgcctggggcgattgatgtttgtcttagcgcaaagataagaattttaaagcaaatcacaacacgtgactttatgtactattttgaccgtcggatgtttgtcttagcgcaaagataagaattttaaagcaaatcacaaccaccgtatttaggtgataaacgcccgaaggatgtttgtcttagcgcaaagataagaattttaaagcaaatcacaacaaggcttaaaagtacgttctttttgtcctgatgtttgtcttagcgcaaagataagaattttaaagcaaatcacaactaaatcgtaagcatatcctaacatagcatcgatgtttgtcttagcgcaaagataagaattttaaagcaaatcacaacctgatgcaaagttaaagtaatattttatcataaacaaataaatgattaaattttactttaatcttaacagtatttaataaagtaatattttatttttattcttattaaataaaatattcgtatatttgcagcgaaattaaataaagcaatattatatgaatgttagaattaaagagataatgcaagaaaagggtgtgtcatctgttaagatggctgatatgatacatgtatctaaggtgacgataagcaaccttattaataataagacgatgccttctattgacacgcttgaaaagatagccacagcccttgacgtgcccatctggcaactgttcgtttcgccgtccgatgttacaggaggtggaagaacatttaagtgccccaactgtggtcgggaatttgaagttgaacttaaagcaaaagaataattatgaaaaaagttttattggcgattgcgtgcttattctgcttaaatgtggaagcacaaatttattacggagagcaaaaacttactaaatcacgaattacaggtacaaaagtaggcaatgtcttcggcgcagtcctaacttatggacttagccctgccaattcaagcaagacaatagagggcgcaacatctgaaacacagataaaagataaaatgcctgcatttaagttccattttggagaaagcaaagactctttactaatgaaccctgaacgaatgagtggtatctatatggtgaaattacggaaaaagaagaaaaaagcaaaaacaagacaattacgttccggctcatacggccttatcgcaggtgtgcaaaccggcgttgatgaagatgatattattccaataaacgtcgaaaatgaaaatgctaatacttttataattaagcccaaaatcgaacttgaagagggtgagtattgtttttattatgttggaaaagatataacaattacctcgatatatgattttactattataaaatgaaatataaaagggcgcaaagtacgcccttttatattgcttctccagatgtttgtcttagcgcaaagataagaattttaaagcaaatcacaacaggttattcgtaaatgattacttcatttcgagatgtttgtcttagtacaaagataagaaatttaaaacaaattactgctcctcaacaatggaaacttaaacaatagatatttattttataaaagtgttgtaattaattgatattcaattaattgtaaacggcgttctttcgcagtgcgaagggacgccgtttggtgtgcgatatgcgtcatattgcgtcgcaatatgacgcatgttgggttatggcggggtaggggatgtcgggataagcccgataagcctgatgggcttaatacggatttgtgaggacaatgggtaccggatttctcactttttccttttagtttttcacttatattgtaatgtattcttcattcttcatttttaattttttatttgaaatcagtgtgcttcgagccagttttggccccatccgcagtcggccacgaggggtacggcgaggggataggcggcctgcatctcttcgaggacaatgcgctcgacggtttccttctcgtcggggtagacgctgaagttaagttcgtcgtgcacctggagaatcattttcgagcgcaggtgctcgtcgcggaagcggcggtggatacgcaccatggcgattttaattatgtcggcggcggtgccttgtatgggtgcgttgatggcgttgcgctcggcaaatccgcgcacggtggcgttgtgcgacgtgatgtcgggcaggtagcggcggcggtggagcagggtctcggcgtagcccagtttgcgtgccgtctcctttgcctgttccatgtattccgcaacctttgggaaggtggcgaaatagccgtctatcagctgcgttgcctccgtgcggctgatgtcaaggcgctcggccagtccgaacacggtaataccgtaaatgatgccgaagttggcccgcttggccttcgttcgctggtcgcgcgtgacgctgtccatcgtctcgtggtagattttggcggccgtagcggcgtggatgtcgtagccctcgcggaaggcctcctgcatgttttcgtcgccgctcaggtgcgccatcacgcgcagttctatttgggagtagtcggccgagaagaacaggcagccctcctcgggcacgaacgccttgcgtatctctttgccgtcctcgccccgcacgggtatattctgcaggttggggtcgctcgacgagagtcgccccgtggccgttacggtctggttgaacgacgtgtgtatgtggcccgtgcgtgggttaatcagcttcggcagggcatcgacgtaagtgccgagcagctttttcaaccctctgtgttccagtatcttgcctactatttcgttctttcctttaagttgctggagcacttcttccgacgtgacatactgccccgtcttggtcttcttcggtttctctacgattttcatcttgccgaagagaatctcgcccacctgtttcggcgaggcgatgttaaactcctcgcccgccagctggtatatttccttctcgatggcgttcatgcgttcggtgagcatagccgacgtttctttcagcgcaccggtgtcgatgcgcacgccgcccacctccatgtcggccagcacctgcaccaacggcatttccacttctgtaaagagttgccacacgccggcctccttcagtttcggttcgagtatgtttttcagcttcagggtgacgtcggcgtcctcggcggcatactcatatacctccttagggtcaaggtcgcgcatcgacttctgacccttgcccttggggccgataagctcgtcgatgtgtatggttttgtatccgaggtacacctcggccatgtagtccatgttgtggcgcagctcgggctggagcaggtaatgcgctatcatcgtgtcgaacatctcgccgccgagcgtgacgccgtagttcatcagcacctccatgtcgtacttgatgttctgcccgattttgaggattgaggggctttcgtagactggtttgaaaatattaacaatgttttgcgcttgttgacggtcggcaggaacgggcacgtaaaatgcctcgttttcctcgaccgagaagctcaaaccaacgagttcggcgtcgattgtgttggttgaagtcgtctccgtgtccagacttaaaaaactttttgtcatgaaaaagtcacaaagtcggcgcatatcttcctctgtgtcaacgagtttatacgtatgaggcgtgtcagttaacgctctcagattcgatttttcggcgtcaacctgcccgtcggtcgggttttccgcaaataaatcgagttgctgatttgcgttatttttgatgttttcacgattgttaagaaacttgtccgagagcgtcttaaactccagttcggtgaagattcggcgcagttcgtcacggtcggggtcggtcacgcgcagcgcctcgaggtcgaggctgacgggcacgtcggtgcggatggtggcgaggaacttggagaacttgatttgctcggcgttctcctcaaccttcttcttcagcgcgcccttcagttcggaggtgcgctccagcagcgagtctatcgacccgaactgctgtagaagttttacggcggtcttctcgcctacgcccggacagcccggtatgttgtccgccgcgtcgcccataaggccgagcaggtcgattacctgtgccgtcgactcgatgccgtacttctggcataccccgtcggcgtcgagcgtctcgtaaccgccgccgtggcgcgggcggtacatcaccacgttgccgccgacgagctggccgtagtccttgtcgggcgtcagcatgtacgtcttgattccctcggcgcctgcttttgtggccagggtgccgattacgtcgtcggcctcgaagccctcggcctcgagcacgggtatgcgcatggccttcagcacctctttaattatgggcaccgaggcgcgtatgtcctctggcgtctcctcccgctgggccttgtattggtcgtaagcctcgctgcggaaggtggggccgtgggggtcgaaagccacgccgaggtatgtcggcttctccttcgagagcacctcgtgcagggtgttgcagaagcccagcacggccgacgtgttcatgcccttggagtttattctcgggttctttatgaatgcgtaatacgccctgtatatcagggcgtaagcgtccaaaaggaaaagtttatccatgtttttgcttgtttttacgtgtaaagttactatttttttgtcattaatcggataaattcactacttttgtatcaaatttcgtagcatgactgactatttatcgataataaagaaacccattgagagcgagcttgggcagtttatcagtctgttcaactcgtcgctaacccatgaggacaagcttcaggaggaaatcttcgcacgtatccgcaaccgcgcgggcaagcgcatgcggcctatgctgataatgctgatggccaggaactacggcgccgtgaccgatgccacgctgcacgccgcggtgggtctggagctgctgcatacggcctcgctcgtgcatgacgacgtggtggacgagagccgcgagcgccgcgggcaggcgtcggtcaacgccctgtatgacaacaaggtggcggtgctcgtgggcgactatatcctctctacggcgctgctgcacgtgtcgataacgcacaacgaattgatagtcaggtatctggccgagctcggccgcacgctttccgacggtgagatactccagcttacgagtatcggagagagcgaaatttccgaagagacatactacaaaatcatcagtcgcaagaccgccgcgctgttcgaggcgtgctgcgcgataggcgccatatcggccggcatgcccgaagagagggtgggcgaggccaagcgcttcggccagacgctgggcattatcttccagattcgcgacgacatcttcgactattacgactcgcccgagataggcaagcccaccggcaacgacatggccgagggcaaactcaccctgcccgtaatctacgcccttaactcggcgggttacgacagcatgttcaagctggcgcggaaggtgaaggacggcacggtaaaccaagatgagatagcctgtcttgtagacttcaccaaggctcacggcggcatagaatacgccgagcggcgtatggaggagctgcacgacgaggcccagcgcttcatccgtgatgaggtgagtgacgaggaactgaagcgcagtctgacggcttatctcgacttcgtgataaagaggaatatctgacggcgtaatgccgcggccgtgcggtgtcgtgaagttacggaatatttttcataagatattggttttcaatgatttaataaatgccgtcttttgcaaggcaaaagacggcatttcgtgttataatagacggccttttgtggggctaatggggctgatgagcctaattagccaaatgggatgataggcccaataagcctgattggcctaataagctatggctcattgggcttataggctcattgggctaatttcctatcaggccaattaggcctattctaaggcctatcagtctaatttatcgttgtcagctgaatccttcttactgcctcctgccgtttcttttcagccattccactcttgcgcggtacatctcttcgcgcagtccgccgccctccacgaagtcctgtttcagtcggtcgatgaatttcctgagcattacgtcggtctggtgaataagagtaattgcgatgttggcgatggtctcgtcacttcttgtcgttatggcgttgcggtaatatgcgctgtcgttgtgctttgagcataccgcccttgtctttgctgccttatcgcagttgatgtcccatatagtgaggttgcgcacacgtaggtagtcctcatagtcggccagaagctcctgcatgctcgcccgtgccacgttggtcagcttcagttcggtttccttcgacgtggtgcttgccgcgcttccctcggctatattctgcttgcacgagcgtgccgcctgaatcatctggtcgattgtgcggtcacctttttcgaggaatttgtgggcaaaataataagtaatatcataaatgcattccgccttttggtagacaatgaggttgcggtagttgccgcgctgcggcatgaaaggccggttgtcgttagtcatggtataattgttttttgaattagtagattgtattggataaggctaatgggccggataggcccaataagcctgatgagagagtggggcagacaggcctggttagccaaataggcctgatgggatgataagccagatgagcctgattagccaaataggcctgataggatgataagccagacaggcctgattagccaaataggcctgatgggatgataagccggatgggccaattagccaaataagccacggcacattgggcttatctggctcatttggctaatttcccatcaggctaattaggcctatcctccccagcctttttcagaagaatttagtctcttcgccgagtatttcgctcagcagcatgttggccagtcggctggtgccgaggcgcagccacttgtttgtcagccatttttcgcctaagacctcttttactatcgtgtagtagataagtgcgtccatcaccgagttaaggccgccagcgggcttaaaacctatctgaatgcccgtttcgtcgtagtattccttgatggcctggcacatcacatatgctgcctcaggcgtggcggcaggctcgagcttgcccgtagatgtcttgatatagtcggcgccggcgtacatcgccaggattgacgccttcttgatattgctggccgtcttgaggcaacccgtctccaggattaccttcatcggggcgtcgccacacgcctgtttcagctcgttgatgtcgtcgcacacgccctcgtagtcgccgctgaggaacttgcccacgggcattacgatatctatctctgtggcgccgtctttcacggcgagggccgtctctgccaccttaacctcgataagcgcctgagacgaagggaaactgcctgaaacgcaggctatctctacgccgtcaacctcaagcgactcgctcaccgtcttggcaaaacacgggtacacgcagatggtcgccacgtggggcaggtcagggtaggtagcgtcaaactggtttaccctctccgtgaaggcgagtatcg

SEQ ID NO: 2325 - DNA, 18908 bp, synthetic construct
  misc_feature 1..18908: note = Synthetic
  source 1..18908: mol_type = other DNA
cggatatagttcactcccatttccgagaaatgtttgaagaaaccgtcgatatattcctttgctccttcatgtgatgccaccgcccaaccgaaccaaagatcgttcttgccgggatgagccactttgtccccattcttgtatcgcaaatcaccgaaagtgacatttgttcctttcaccacggtattatcgggtccgtgcaaccaaagaggattgtcgtagataccgagtttcaatcctttggccttgcattttgcaacgagcttctttaaatccatactgccataccgggtcatatatccggaggcatcgtcggctatcatagggataaatccatcggtacaaatcatatcatagccataaggtttcaaatcccttgccacccaatcgatgattttgtcccactccgcttcggtgatatccatattttcattggatactccttgcttttcctgtgtccagcaatattcgtacacactccagtatagcggtgccttatatatatgtatgttttcacccggcttttctatatccggttcttccgcatcattcgtatcacccttttgacatcctcccaagagaaatgccaaaactatcaccagaatattcatgcattgattttttttatttatattcatattctctttttttctcagatcagaaagttttccttcacattcaaccggaacttgattcacacggattgaagactgcggcatcaatcattatattcaataatacctacttatttctatttatttttctagaataccgcagtctttccatccgctttaaggcgaatgatcttacaactatgaggctttagcaaaaccgaatattccccattcataccacctaaatctttatgttcccacaaatcacgcacatttactacgcatccagtctcaataccaagctctttcttgaaatcaatactataatcaagaaatgattcctcacggttaaaaagccccactacccaatctccatcaggcagccgaccaatccatcgtgagctgtttctatcattaatatccattgacaatggcttagcacagaatcccaaattatttaattcaatcagttccttattttgataaatctgtatgcagtcgcctatagtatcatattgatcggaaatagcaagtgcagaaccagtcattaccatcaatgagaaaaggaagcgacgctcatcctgatttcccattgtattcatacgcataaaatcaccgtccataatgagctgtccgggtgatgcaatgtccgagaaaccgataaagccgtcaaaagcattgtcatattgcggccattgttcctgacgtttaccccgtttccgggcactggcaaagtcccatccgccactaaaacaatcgttgcttatgcgaatcatatcgccatagatccgttcgtttttcccgtgactaaaacagttgggcatcactaaacttataaagatttcatcaccggcctcttccataatccatttaagtgcctgggcatatttatcggaaccgtaattacgttcataattctcaagaaaatcaatacgcaaataagtggcaccgagatttataaagtggcgtacatagccttttatccattgttcggcacccggacgtgcggcatccacccaatggagatctccattaaacccgttttccccaacaatctgttttgtcgtgacatttgttcccttaaccggacagttcttctcccaggcagtgcgagtcaaccacatcggattgtaataaacgccaaacttcattcctttttggcgaatataattactccaatagttaaagccatgagtccactcattgttgtatttggtaatatatccgtttcggtcaatcgtttgcgcctgttcaatccatccgtcggtacatatcatattgtaaccgtactccttaagattttcatcaacccaatcgatattctttttataacgctcttcgggtagcggcttgtcgtgggtatagcaatattcatatgccatccaatacatcgggccggttgccttacgagtaaattggctgtcacgagccgttaccggcaagaaacttgccagtaacagacccaagactgctatttttctaaactccataaataaactcttattcaaaaacacaaattattcactgatgtaagtagcggaaacaacccagttacgaagatcaaaagtcagtttataagtacctgcatcttcaactctccatttattgtcgggctgaccggtaggcatcaggctgatagtgctttcttcaattcctgatttggatatcttgcacccgttatttaccggcatcacaaacacgcctccccaatttccggtttttaacgggcatttcagttcgcccgtattcagatgtccttcataagagaatatcaaagcatcttctgtcgaaggagtaaatgcagtgggcgcatcaatattccatccagtgggagtggcatcccctaccatatatagggtttcggtctttataggaaggtttccttcaataacaaccaagtctttttccccatcacaactgatcaagatcatggcaacaaatagcactgccatgctcaaaaacttatatattggtttcataccgttctttatttaaaaattaaaaaatcaaaatgaattatttgccatagccgggattttgtaccagattgtgattagcattcaatacctcgcgtgtaattgcgaagatttcggtatgattgtcagcatcagcagacttatcccaccaactaccggtattgaatttaccaaagcgaaccaagtctatacgacggcgactctctgcaaaaaattcacgtccccattcgtcgagtaactccttttcggtaagttgaacctgtccctcgggagcataaagattacgcgaccaactttcttgcggataattacgcttgcggacactattcagcaactcggcagcctcatcaacctgacctttacggaatttgcattcggctagtgagtaaataacttcggcaagacggatttcaacgtagtccgattccatttgcccctcatcttcatcactgtagaaaggatacttgcagaagtgccatcccgagttatgatcgcctgtggtaaggtcacttttcttattttccggatactgtccttcaggcaatcctttaaactgtcccacagcatcacggatgtaaaggtcgtaatcattattcggtgatttcactttaagtgttttcccattatcatctttatattcaagagaaccataaaggaacaaaccttcacgcttgctattacccagatttttataaagtttcaggcggacatcttcagaataattgcggaatttctgtataggcatacccaaggtataatcataaagattgccgttgagatcataactgggagatgcggcatatttgcaattgtgatcaccggctttagcttttgcatcaccgaaataataacgggcacgtgcgggaaccgtccaccaatatgtatcgccctgatagtgccagaatgaataaccttgggatgcagggaatccgaaaataacttcatcgcaagtttcattgttccagtcgaagggggcatcccatgtcgcagccaattgataaggaccatataccccattaacaattttctgagcatactcttcacaatcggcatagtgatcttctcccacatatttctcggcattgaggtaaaggcgcactaaaagggcagcggctccggccttagtccattgaccctgatttcctccattaccgccaagtgattctttagcactcaacaattcaatgctctctttcagttccgattcaataaagtcaaagacctttttaggttcaacttggcctacagagttctgggaaacgtcattataactgactgccaacggaacattgcggaaggcatcgagcaagcggatgtagaaccacgcacgcaatgcgcgacactgcgccttcaagttattgaactcttcttcggtgaacccgaatttatccggtgaaagcgtattcagatcttctattacatagttggcctgcataattccttggaaacagccgttccattctgtctgggcatctccgtcttcaaccgtccaggtgtgataatgcaaacgacgccaacgtccaccgtcgtcccaccaaccgtcacgggtaggggtaattaactggtcagccgaaagttcattcagaacgtgtcgggactgaatgctccaaaaagcatgttcaaagggtcggaatgttgcacgtacaacatccatcttagtattgtaatagttttgggtacccacctggtcatagagtgtttcatccaaatttgtgcaaccggttaaaacggtagttgccaaaaccatacctaatatatattttgaaaatttcatattgttttcctccgatttaatgttcgacaattaaaaatccaattgaacgccgagaataaactgacggcttgacggataataagtacgagatcctgtagcaccgggagtcaaaccgttaacttggtaagtcgacggatcaacaccactgaatttggtaatggtaaatatattcttggctgtcccatagagacgaaccttattcaaatatttgcattttgtgttcaatgtgtaaccgagggtcagcatgtcaagcttgaggtaatcgccccgttcgaggaaataatcggtaaccgccggattggccgtaattttgtcattcttgccataagctttttcaagtacattgccaataaagctcttggttccataatagaaatcatggatattgaagatatcaaaaccaaaagcaccacggaagaacaatgtcatgtcaaaattcttatagcggaagttgtgcgtcattgaaccggtgaatttaggaagaccgttacctacaacctggcgatcttgatcggtggcctgatcggccttaatcatatcaccgtccttatcgtatacaatccagttaccatcagtgtcaataccggcgtacttcaacaggtagaaatttccaaggcgtttgcccttttcaatacgttgcaagttatggaatggatagggatcttctgttccacaaacatcataataatcttgaccgacatattgagaattactgaactcaacaaatttattgttcatcgttgaccctaccacacttaccgaataatcgaaatcacgggtcttcacggcattccaattgatatcaagctcaaaaccggagttctccattgtacccacattgacaaaagtattatcaaacaaataaggaggtacagacactttataatcaccaagaaggtcttgctgacggcgattaaaatagttcaacgaacccataacacgattattaaataaagagaagtcaagaccgatattccagttcttacccttttcccatttcaagtcgggattcacattcttagaaggtccccaaacttgaaaatatttaccattataaaaatagtaaccgaatccggtcattgtgttcaatgaaatataactgccgaaatcctgattaccggtaacaccataatccccacggattttcaagtcattgacccatttcaagtctttcataaacgactcttcggaaatccgccatccgaccgataccgcaggaaaattaccccacttattattaatgccgaattttgaagaaccctcatgccgcaatgaagcggtgaacaaatatttacccttataatcataactcagacgaccaaagaatgcaatcaatttagcatcattcttataggttcccatacctacttccccctcttccttggcatattcaccggtacccagattgtccgctcccaatccatcattcggaaaatctttattagaagcattcaaacccgaatattgggagtattgataagaatagccaagcatagccttgatattatgtcccttgaaacccgcttggtaattagcaagccattccaggatagactgacgttccttagagtagctgcgagaagcttcaccatcacgaccggcattaatagccaatgtactggtagaaggacggaaccaactgttaaaattatcatattggtgatcagcaaacataatttgagtagtcaatgattgattgttttccttgtttttcaacaacaaaggaaagagattcaattttgcagtagcatcccaatcaagaagcttggtttcgcctttatccttttcaaggttaatcatttcaaccggattataacctgccgactgcccttgaaaattataatatttcgacggctcgttcggatccataagaggagttgtggggttagcttctatagcattacgaaatacatcccaggccgcctgatcacgataggcaatacgaggagcaatattagctataaaagtgaccaagccacttgcagttgtatgatttatcgtagcacgtgcaccatactcttcacgccctgaacgcctgtcgagacctgttgcatcacgataatcaaagctggcgcgataattgctacggtcatttcccccgcttacggtaagagaatgctgcatggtgaagccggtacggctcactgcgtcgagccaatcttcgtctccgcctaaatcatagcctacgcttgagtcggaacgaagatcgcgatattgctgggcattaagcatatctagttccttcttcatcacatcaaaagcaaatgcaccgctataagatgtgtgcgttgtaccgtctttttgagctttcttcgtggtaatcaaaacaacaccgttagaaccgcgggtaccatagatggccgaagcggcaccatccttcaatatgtcgaagctcgcaatgtcattggggttgaggttagtcagatttccaccgggaacaccgtcaataacaatcaacggaccaagaccggcagaccgcgacgagactccacgaatctgaatacttgcctgattattaggatcaccggcccctgtatttgtaattgaaacgccaggcaccttaccctgaatcatcattgaaggatcaatactgctgacactaagaaaatccttatctgaaatatgggaaatagccgaagtcaactctttcttatccattgtaccatatcctatgaccaccacttcatccaacattttggtgtcttcagacaaaaccacctgaacttgaatctgcccgttgaccgacacgtctttacttttgtatccgatataagatactgtcaaaacagcattagaaggcacgttcaatgaatacttaccgtcgagatcggtaatcgttccattagaagttcctttttgtaacacgctggctcctataacagcttcgccagcctgatccttcaccacaccttgtactttaatttgttgtgcgaacatgcatgccgggagtaatactcctaacaaaagaaatagcatacgcaacttgattactcttttgtacttttgcataatattagagttaaaattagtaattagaattccaattcgcatattcctaattcttaagcgaaacagaaacgatgcaaatgtatcggataagaatgctctaaataaaatagaagagtgaaaaagtagtgaattaagtcctttacaaagaaataaaaagcttattatcaacaatataaaaacaatcaagtagaaagaataagtagtaataatgtaacagaataaaatacattattaagcattaattcactctaactaaaataaatcgcactttctttcttacgtttataagcagattttatccattaacataaaagagaaaagctgtattttacatacttatcggggtaatgaaaaacagagcattttttcacagaacattcatcattttattataataacgactctatgtgaaagaagcttttaaaaataacttttctgaataaaatagccagtcggtacaagagcctaattcagtcgttacttgaatggcattcactcgttacttgaatcctattcagtcgttacctgattctcccccgttcagagactattctgaatgggcgggggagttatactaaaatatcaaacatccggtcccgaatatatctttggatggagtaaaaaagggacaacgcaataaagtcataagtgcggagatttacacatcactattggttctttagtttaccaattctcaaaacttcatcttccaataattcccgatcacctttagctttattccttattttagtccgataattataaatagtagttacagaataacgaagaaattgagctattttcacactatctgtgatgcccaatcttattaaggcaaaaatacgcagttcggtattcattcgttcgtttcccttgaggtggatatgttcattctcacctaataatgagttgaaatcttctacaaatgaaggaaataactgcaagaaagtattgtcaaaatcctcataaaaatctctaagctcttcttccataaattgagtagacttgatacgctgatataattcttccaccttacccgcagaagcaagtttacctaatgaacggcgataattatccattttttccaaataaaccgagcattgatccatataacgtcctatatattcctctttcagataggaattttcagcaatgctgtgattagcttctttcaattgtgcattgaaatgcttcaattcatcatttaattctttcaaacgcttattagcgtctaacacttcacgacgcgcaacagcgacccgtttcatttgcttatatacataaaagatggcaataatcaagaatatagaaagtatactaattgaaatcagagcaacttccatattattctgttgcttctctattttcttctgataagtatcattaataatggggaatatctgcaaaatttcaagtatacgtagccgtgcattacaaaataccgcgtcattcatacaaagcttcagataggaataggctcggtcgatatccccctcataatagagtaatactgccaatttacgcaaagagacatattcacgaacagccgacttcatatcacctattgcagaaataattaagaattttttctcattcaattgatctcctttcaacctgtaagattcagataaagtataagcgaagattgctagattatgctcatcattcaattttccttccatataattggatagcagagctattgcttttccatattccttctttacattatacttatcagactgtatcattgtatgaatcaggaggttgttcttattaaccaacaataatgagtccctataaagatctgttcttttagcatatagttctttttcttgattagtaatagaatagtcagccatcaatccatatagtatcctatatatatggtaataataaggatgcagataatccggtaagtgcgacacttttatcgtattcatcaagtcaatagcttctttatacattccggccattcccattatttctgccatattcatacgggcattatctatatgttcttgtcccctcatgctcactgcaagctggtatcttgtcttagcgatgaaaagagaagaatctgcattataagaatgatattcatcaaagagttttcctaaaatagcaaatcgtttctcattagacgaactctgcctcaactgattctttagttcattgatattatgttccttttgtattatatacataggacgtttttttataacttgatctaattgcaataataaagaatctatctcatttgtagttgtcgcataagacgtaccaacatagaaaaagaagcataataataggatttttctcatttcgcttcggaattaaaatagtattagatgtacaaagataaaaatttaatctataacttgctatgacacgatgtctagaaagatcaccatgagataaaaacaagattaagaaatagaaacggaacagcacacagaatcagaacaaaaggcgaggctaacgccccgccttgaatgttttcacaacggaataatccttattgtgatttgcttcattttagtgagacaaatataagaataaaaatcaaatgcgcaatatttttttaaaatagaaaatattacttttgggaattctttataacaaatagaatgaaaacaatattaggattggatttaggcacaaacagcatcggttgggcgctggtaaatgaagctgaaaatgatgaggaaaaatcatctataattaaacttggtgtaagggtaaatccattaaccgtggatgaattacagaactttgaaagagggaaaagcatcactactaatgcagacagaacacttaaaagaagtatgcgtcgaaatctgcaacgctataaattacgccgcaacacgctcattgaagtgctaaaagagcacagtctcattacagatgggactttacgttcagagcagggaaataagactacttttgaaacgtatcgtttaagagcaaaagcagcagtagaagaaatatctttagaggaatttgcacgcgtattgctgatgataaataaaaaacgcggatataaaagcagtcgcaaaaccaagggagaggaagacggagttctgatagatggaatggatatagctaaaagactttatgacgaacaactgacgcctgggcaactatgcttgcaattgcttgaaagcgggaaaaaagcactgcctgatttctatcgttccgacttacaggatgagtttgacagaatatggaaccaccaaaaggtgtttaatatagaatcatattgtgatgctgccaaagaagaaatcaaaggaaaaaacaaaagtcaaacttgggccattctgcaaaagtattttatttgggaagagaaagaaaccatctggaatgaagaagaagcaaagactaaagaactgaagaaagaacgtagacttgcaggcatcaaacgtaacaccaaaggaaatgaacaaaaattggaaaactatcgttggcgcgtgcaagctctctcagaacaactaaatcccgaaatggcagccattgtattacaagaaatcaacgggcagataagtgcttcaagcggatacttaggtgcaatcagcgatcgtagtaaggaactgtatttcaatcgacaaacggtaggacagtaccaaatggcaatactgactaaaaaccctaatgcaagtttgcgcaatatggtattctaccgacaagactatttagacgaatttaataggatatgggaaaagcaagcggaatttcacagggaacttaccgtggaattgaaaaaagagattagggacattattatcttttatcaacgccgcctcaagagccaaaagggattgattaatttctgcgagtttgagagacacgaggtgacaatagaaaaagagggaaagaaacgagccaaagtagtgggatgcaaagtaatcccccgctcgcatccactgtttcaggagttcaaaatctggcaaacgctaaatgacattgaagtatttgccggagacaaaaagaatatacgcaagaatccgagtaaaaagtccaacctatttaatgatatggaagacgccctatccataaaaggaagccgttatttgtatcaggaagaaaaagagattttggcaaaagaactttcagtcagagagaacatgaaaaaagtagaagtgctaaaactattattttcaaacccacaggaattggatatgaacttcaagcagattgacggtaatcatacaggtttttcgcttttctcctcctttagcaggatgatcgaaagatatggatatgaaccgatagactttaagaagagcgcggatgagattaagaaacagctggaagcaatattttctgatttaggttggagtacagggcttctttccatagatttaggacaagacaataaagaattggaaaaacaaccttatttcagactttggcacttgctatattcgttcgaaggagacaacacacctacgggaaatggtaaattaattgaaaggcttatggaactgtgcggtacggagaaagaatatgccaccgtactcgcaaatgtttcgtttcaggatgattatggaagcctgagtgcaaaagccatcaaaaagattttgccttacctgaaggaaggtaaccagtatgacgtagcttgcgaatatgcaggttaccgccattccaaatcttcgttaaccaaagaggaaatagataacaagaagttgaaagacaaattggatattttgtcaaagaatagcttgcgcaatccggtagttgaaaagatattgaaccagatggtcaatgtaatcaatgcaatcattgatgattatggtaaaccagacgaaatacgtgtggaactagctcgcgagttgaagaaaaatgctaaagaaagggaagagctaactaaatccatagcccaaaacacccgtgaacacgaagaaatccgcaagttattacagagcgaattcggcatgattaatgttagtcgtaatgacattatccgctacaaactttacgaggaattgaaagataatggatataggactttgtattctaatcagtacattccgaaagaaaagatattcagtaaagagattgacatagaacatattattccgcaatcccgcctctttgatgattcgctatccaacaaaacattagagtataaggccgtcaatatagagaagggaaataaaacagcctacgactttgtgaaagagaagtatggtgatgacggtttgctgcaatatctcaatcgctgcgaagccctgttcaaagagaaaaggaccaaactcaataaactaaagatagaggaaaaagatatcccagaaggctttattgaccgggatttacggaatacgcaatatatcgcaaagaaggctctttccatgctgaacgaaatctgtcgtcgggtagtggctacaacgggttccattacggacgaattgcgtgaagactggcaactggtagatttgatgaaagagatgaatcttcctaaatacgaaacgctgggtttagtagaaacgtttgaggataaagatgggagaagaattaaaaggattaaggattggaccaaaagaaatgaccaccgccaccatgccatggatgcactgactgtagcatttaccaaagatgtgtttattcaatattttaacaataaaaatgcttcgatgcctggggccaaggaacagactaacataacaggcataaaaagcaaatatttcgagagtggtaaggccatatcccctattcctttggctcagttccgcgcagaggctaaacgccatttggaaggcgtattggtatccattaaagcaaagaataaaatcatcactacaaatgtgaactataccaagaaagtcaatggagaaaacaaaaagctgcaacaaacaccgcgaggacaattgcatttggagactgtttacggtagccatcggaaatatgccacgaaaatggaaaaagtgaatgcctctttcgacattgccaagatatccactgtaagtaagcttgcttaccggaatgctttgctcaaacgtataaagatctttgataatgatccggaaaaggcatttgcaggtaaaaacacattggagaagaatcccgtttatctcaatgagaaccacactaaaatggttccggaaaaagtacagattgtggactttgaaacaatatataccatacgcaaacccattgagcctaatctaagtatagataaggtaatagatgcgaaaatccgtagaattttggaagaaaggctgaagaagtatggtggagatgcaaaaaaggcatttgtcaatttggatgagaatccaatatggatgaatgaagctaaaggaatatccattaagcgagtcagtatccgtggaatcagcaatgctcaatctttacatgagaagaaggacaaagacggtaatttagctttggacacagacgggaaaaaggttcctgtagatttcgtgaataccggcaataatcatcatgtagctatctatagaaagcctgttttatctaaaacaggacaaacggtatttgacgaagaaggtaatccgaagtatgaacttgatgaagtggtggtctctttctttgatgcagtgacacgggctaatctcggtcagcctattatagacaaggattataaaaggagcgaagggtggaaattcctattcagcatgaagcagaacgagtatttcgtattccccaatgaaaaggcaggatttaacccaaaagaagaagatttattgaaccctgagaattatgcaatgataagccctaatctgtttagggtacagaagttttcttataaaaactatgtctttagacatcatctagaaacctccattaaagatacaagtgctgctttgaaaggcataacatggactgattttcgcagttcaaaggaattagataaaatagtgaaagttagagtcaatcatattgggcaaatagtatcggtaggtgagtattaaaaataggtcaatgactaatattaaattatttcaagagaaaaagatccgttctgtatggaacgaagaagaacagcaatggtatttctctgttgttgatgtaatcggtgcattaacagatagcgtaaaccctacagattatctgaagaaaatgcgaaaacgggatgatgcattagcaacttacctagggacaaattgtccccaaatagaaatgataacagaaagtggcagaaaaagaagaaccacctcaattgtcttttgatacgaacagtgaatagccataactttaagtcggaatactatgattagaaagacactttatttcggaaatccggtttatttatctttgaaaaatgcacaattgataatcaaattaccggatattgtgaagaatgaaactttgcccagtagttttaaacaacaggcagaagtgactaaacccatagaagatattggcgtgatagtactggacaataagcagataactattacttcaggagcattagaagcgttgcttgaaaataattgcgctatcataacttgtgacagcaaaagtatgcctgtggggttaatgcttcctttatatggaaatactacacaaaatgaacgattccgtcaacagttggatgcttctcttcccctaacaaagcagttatggcaacagactgtgagaataaagatcgagaatcaggcagctgtattgaagaaatatgcagatgaagaagtaaaatgcatgactatatgggccgcagatgtaaaaagcggtgacctagataatatggaagctcgtgcagccgcctattattggaggaacctatttaagattgaaggattcacaagagacagagaaggaatgccacccaataatctactgaactatggatatgctatcctcagagccgttgttgcacgtggtttagtcacaagtggacttttaccgacattaggcatacatcatcataatagatacaatgcttactgcttggctgacgatatcatggaaccatatcgcccctatattgatgagttagtatgcaagatattgcaggaaggtttaaattgcaatgaattgacaaaagatttaaaagctcgattgcttagcattcctacactggaagttaacatatccgggaaacgcagccctttgatggttgctgtgggacaaacgacagcatctttgtataaatgcttttgtggtgaactgcgtaaaatatcatatccgcaaatgtaaaatggatcgatttagtgaatatcgtattatgtgggtacttgtattgtttgatttgcctaccgatacaaaaaaggataagaaggcatatacagatttcagaaagaatttacagaaggatgggttcactatgtttcagttttctatctatgtccgtcattgtgctagtagcgagaatgcagacgtacatataaaaagagttaaatcttttttgccagagtttgggcaagtaggaatattatgcattacggataaacaattcggaaacatcgaacttttctatggcaggaagtctttggaggtaaatactccgggacaacaattagaattattttaaagagtaaatccggcttctaaaccggatttactctttaaaaacagtttctttttcaattctaaaacagcacataaaacattgattatcaacaaatagcagcgaatcagctgtttccaatggttcaaagatactaaaatgaaagctaatcacaaccttcccgtcatccttaacgaatttggtatcgctgtttccaatggttcaaagatactaaaatgaaagctaatcacaaccgcaatggctattccaaagtcataagtaaagctgtttccaatggttcaaagatactaaaatgaaagctaatcacaacacaggggttgattctttgacttcgcaagaagctgtttccaatggttcaaagatactaaaatgaaagctaatcacaacccagctattagaggatggaatgaaaagaaagctgtttccaatggttcaaagatactaaaatgaaagctaatcacaacaccaaatagtagaacttatccatatacatgctgtttccaatggttcaaagatactaaaatgaaagctaatcacaacaagagtaccacattacacaaacgaaataatgctgtttccaatggttcaaagatactaaaatgaaagctaatcacaacatccccgaaatactccatcatggtgagcgtgctgtttccaatggttcaaagatactaaaatgaaagctaatcacaactgtagggcaatatcaaagttctcaaagatgctgtttccaatggttcaaagatactaaaatgaaagctaatcacaacgggtttcttgaaaacaaaatgattaaacagctgtttccaatggttcaaagatactaaaatgaaagctaatcacaacgatatataatcctcttcagtatgtctaactgctgtttccaatggttcaaagatactaaaatgaaagctaatcacaacgcgaaacaggcgacccgcttagcttccgcagctgtttccaatggttcaaagatactaaaatgaaagctaatcacaacttacttgctcttccataaaatatcctttttgctgtttccaatggttcaaagatactaaaatgaaagctaatcacaactcttttttgtacaatatatcttctctgactgctgtttccaatggttcaaagatactaaaatgaaagctaatcacaacatagtattgttgccgttgtatttattaatgctgtttccaatggttcaaagatactaaaatgaaagctaatcacaactaacgtctgcacattaacctgcacaaaaggctgtttccaatggttcaaagatactaaaatgaaagctaatcacaacacaccagaaaaacaagcggttgaattgaaagctgtttccaatggttcaaagatactaaaatgaaagctaatcacaactgacgctgtttgatttaatggaagtaggatgctgtttccaatggttcaaagatactaaaatgaaagctaatcacaacaactatgctttggcactatccaatatcttgctgtttccaatggttcaaagatactaaaatgaaagctaatcacaacagatgcggtaaggtcgcctaaagctataccgctgtttccaatggttcaaagatactaaaatgaaagctaatcacaacaacttcttcggttgatgtattttgtagcgctgtttccaatggttcaaagatactaaaatgaaagctaatcacaactgctttattgatattccagcaaaaccagtagctgtttccaatggttcaaagatactaaaatgaaagctaatcacaaccgctttggcatttcaacccggcgaatttccgctgtttccaatggttcaaagatactaaaatgaaagctaatcacaacagattttcggagccaaagaatacgaaaccagctgtttccaatggttcaaagatactaaaatgaaagctaatcacaacgcatatttttgtgtaaatcataaatagattgctgtttccaatggttcaaagatactaaaatgaaagctaatcacaactgaaattacttcaataaagaaatgacgtaggctgtttccaatggttcaaagatactaaaatgaaagctaatcacaacgctagcttatagtcaatgaattccaaaactgctgtttccaatggttcaaagatactaaaatgaaagctaatcacaacttatcttacggttgctgcgtccctctacgagctgtttccaatggttcaaagatactaaaatgaaagctaatcacaacatacgtacagcatttatcgccaagcctggagctgtttccaatggttcaaagatactaaaatgaaagctaatcacaacttataataggtgataagaacgtcagcatcgctgtttccaatggttcaaagatactaaaatgaaagctaatcacaacttcggcttctttcttaagctcaagtattttgctgtttccaatggttcaaagatactaaaatgaaagctaatcacaacgccggacgttgccgaacctccgccaaaatagctgtttccaatggttcaaagatactaaaatgaaagctaatcacaacttattacttaattattagaatttaaacaccgctgtttccaatggttcaaagatactaaaatgaaagctaatcacaactggaacaaatacaactcaacctttccggttgctgtttccaatggttcaaagatactaaaatgaaagctaatcacaaccaacggtcaaggcatgcgattctgcaacgggctgtttccaatggttcaaagatactaaaatgaaagctaatcacaacaaatcccacatggttaatattaaagcttctgctgtttccaatggttcaaagatactaaaatgaaagctaatcacaacaatgaggaagtagttcctggtgataagtggctgtttccaatggttcaaagatactaaaatgaaagctaatcacaactgtaagcctgacttaaactcgttaaatagagctgtttccaatggttcaaagatactggataaatcggagtattcccacccataaaaccgattttaaatatccctaaaaacggattaaaacgggcctaaaaaa

SEQ ID NO: 2326 - DNA, 18829 bp, synthetic construct
  misc_feature 1..18829: note = Synthetic
  source 1..18829: mol_type = other DNA
taaaccttgagcagcttgtccttgacttcttgcggttcgttcatgccaaggattgccttttcggagctaaactcggacttgagaatcaagcggtccggatgaccttcgagctgggtaaagcaaatcggagcaagacggtcggcgtcagcgcccaagaattcgcgcaactggtcaatgccgtaattcgggcggcgcaggtattccagcgtttcgcgcataaagccagcggcagcgagcttgtcgtaagtgagcggcacgcacgggttaaaataacccagaatgcccgtgacttcttgctgcggaatcgaccagatgcggaagaagcccagcacatggtcaatacggtaagcatggtagaacttgcttgcctgagccaagcggcggcgccaccattcaaagttgtctttttcgatcacgtcccagcggtacgtaggaaatccccaattctggccgctgtagctgaacatatcaggaggagcacccgcacggtcgtccagcgagaagtacttgcggtcagcccaaacgtcggcgctgtcttcgttaatgagaatcggaatgtcgcccttgatgcggacacccattttagaaacttcggctacggcagcgctaaactgcttttcggcctcgaactgcatccaggcctggaacaggttgtctttcgcgaactttttccaaagggcctcgatatccttcgctgtcgggtcacggtagtttttccagtccttccagcttctttcgtcgttctgagccttgagcgtgcaatagacacagtagggcttggcccaagcgttattgtctatccagcgcaaaagaatcttgtcttttttcaggtcgtcgtagcggttgtcaaaaatcttgcgaagaacgaaacgcttccaggtcgaaatattgtagtagtcgatttttccgtacttctggaattccaacttaccctgctggatttcatcttcgtattccgaagaaccttccaccgactgcacattgataaacaccgggttcaaggcaaaggcactgcgtgcactgtaagggctagattcagcccccgtgtcgttcaccggcaaaagctgaataatattgaaattgcaaaaagcggcccagcggccaaagggaatcaggtccaggtattcaccgataccgatgctctgcttgctataaaggctaaaaaggggaacggccacgccgctctggaaatatgaaatgtcaccgtaacgcatatcaataatttagaaaaagtcggaagttgtcggtagacagtagccagtggttaagaaataaaaagccttttccgcagttcttgcgaaaaaggcgataaattgtgttttttttcgtttaaatcaggcggaggatttcctgcgcggtctgttcggcaaaggtgttgtcctgcacaaagcgacgaacttcggtcgggttgattcgggcgtattccgaaagggcgcgaccgataccgttacgaatgtagtagtcgtcatccttggcgcaggtcaggcagaactgtctgagcagcggccagtcggtacgatccttgtactgaatctggaaaatgatcgcgctacggcgcacccacacgttcgggtcgcgaatccaggaagcgatcttggagcgcagcgccggcaagcggagcgccaagtcacccaggacgcaagcggcgagcgtatcgacggtatcgcgccaggcacgggtcttgattaactttttaaggaaggcaaggtgctgtccaccgagcaggaccctgtggcggaacaggtagtcgcaagccgcatactggatttcacgatacggctgtgcccacatgtcctcgaccctagccaccaattcgtcaccatctttcggaggatacttgtcgaatatggggtaggtcacctcacggcggggaacaaggcgaattccaaggaaatcgaactgttctcgggccttcttagacatttcatgtgcttcttcttcattagagatagcacggagagcaagtaatatttcttgagtaaaccgaagcatgtataacaaaaatagtccaaaaaaaattttttttctaggtcttgacaagcatttttttcaattttttttaaatttgggtcgcattttttacaataaattgactttttccactcttgacaagcctacaaagggcgaaaaatggggttttatggatcagaatttgtctaatattgcgcttcaaatcatcgaagttccgccggaactccgcggcctcaccgacgaagaaatcatccagaattccgaaaaagtcaagaaagattttagcgggaaacgcaagaacggggccgcgaggccctccaagaaagaccgcctcgcccagaagcagcaaagggaataccaagaagcccagaacatcgcaaacgagatcttcggctccattcccaggcagggcgacctgtacttcaagcccaagacccagattccgggaatcccgtccatgagcgaacttcccttggaaaagcagatgatgctgaagaccgcctttaccgaagaaagcaagggctacagcgcctacgacctgaaaagcagttccgaatctatcaagccgaaggccacggtttcggaatctccgaaacctgcatcaggcagagtcctcaaggcatcgttcggttttaagggcggcgacaagcccaaggcggtgattgtatcggcctcagacctcgccaagcaaaaagccgaagaacgcgccaagaagattcaagatttctttaaagcaaggcacccggaagcaaccaccatgcccgacggaactcccgtaaagcgcggccgcggaagaccgaggaaaaatccggtggtttagtagacagtaggaagtagactgtaggcggtaggctggtggtttggtataaaatcagacggactttgtccgtctttttttgatattcccttgcaagccaaaaaaaactccttcccggggtgagaaggagttttgagaggcaacgatcagactcgaactgatgaataaggcttttgcagagccgccccttaccaacttgggtacgtcgccaaagtgaaacgcaatataggtaaatttattccctttttcaagggcaaaccgggcattttttgcatttttttatcttttaggcatgactaaaccgccgttcaaggtcaggttcaaggcatttcttgtaaccctctggattaaaagcctgcgcgtaaggctaaaaacgcccgaatcatttgcgccgggaatccttggggtatggcatcaagatctactcgcgagtgccgccgcctttaaaaactggggcgtgcacacgctcgtttcggaatcaagcgacggcgaccttttcgcgaccatcgtccaaaatctcggctacagtgtcacacgcggctctagcacccacggcgccaccaacgtgcgccacttgcttataccgctccgcgaaggccgctttgtaggcatggcactagacggccctcgcggaccggcaggcgtagtcaaaaaaggctcgctctggctttccaaatcaagcaacactcccctatggcaaatcagcgccaagtacggcgcgcacatcatactaaaaacatgggataaattcgtcttgcccctgccgctgacacgtattgacatcgaaattaaattatctttgtgactgcaaatcataccaaggtgataacttattaactaaggaataaatcgtgattttaatgccccctaaatttgtcgccttcgaccttgaaactacaggtcttaacaaccagaaagatgaaatcattgaaatcggtgccgtcaagttcaccgtcgaaaccaagaacggcaaagtcgtgcccaagctgctcggcgagctcgaaaccttcgtgaagccgaacatgatgattccggccgaagcctctgccgtgaaccacatttacgacagcgacgtgcaagacgcccccgccgtgggtgacgccatcaagaagttcaccgaattctgcggccagagttccattctgctcgcccacaacgcaaacttcgacgcaagctttttgcgtgtcgcctaccagaacaacccacagctcgtgcccggcaaccccgtgatcgactccctcgctatttccaaggcaatcatgcccgaagcaagttcccacaagctcggtattttggctaacatgttccaacgccgcgacgaaatcagcatgaagattgaatccgacaaaatgcaccgcgccgtttacgactgcctgatgctcatggaagtgttcgtggccctgctccgccgccgctttaaggaaaaggactgggaaatggcctgcatcatgaagaacatggaaaagtacaagggcattccgcagttcatcaacaaataagcgtttttcaaatcgaactttaaatgcggacattcatttgtccgcatttttgttataaacgcaagtccataaaaaaagaaccgcccccgaaggagcggcttttaagatttctagtgatttagaaaaagcttaggctttctctgcaaccacccaaaccttgacctgagcttcaacgtcgctgaagaccttgatcgtcacggtgtaaacaccgagctgcttgatcggttcttcgagagcaacctgagcacgggtaaccttaacgccctgcttggtgatggcgtcagcgatgtcagaagcggtcacagaaccgtacagacgttcgccttccacaacgcggcgttcgaggttaacagaaatctgagaaagcttagcagccacatcgccagcggcagcgagttccttctggaactgagcttcgacggcagcgcggttgttttcgatttcgagcttggcttccttggtagcgcgaacagcgagcttgcgcgggaagaggtagttacgggcatagccgtccttaaccttcacgacgtcaagcatcttgcccaagtggggaacgttggccttaagaataatttccatagtctagttcctccttagcgcagactgtccgaaacgaacgggagaatagccatctgacgggcacgcttgatagcttcgttcagcatacgctgatacttggcggaggtgccagaaatgcggcgaggaatgatcttaccacgttcagagataaagcgacgaagagtcttttcgtccttatagtcaatgaacttgatgttgttttccgtgaaccagcaagtcttcttgcggcggatacgggttgcctgcttcttatcttcaaaagccattattcagcctccccttcttctgcgtcaaccgggatgatatcttcggtggactgggtctgagtttggtcataaacaatttcgctcatcggataatcagcgagagtcatccagcggagaacgttttcgttcagcttgagagcggcttccacagaggcgaccgtagcggcttcggccttgtagtagaagatcacgtaaaagccatgctggcgcttcttgatggagtatgcgagcttgcgcttgccccaatcgtcgcggcggaggatttcgccgttgcctttggtgatgttggcggcgatagtctcgatttcggccttgatagcgtcgtcagagatcatagcgtcgatgatcaccatcgtttcgtattgtctcatataatgagtccctttggtctatcgcccgggaaaccgacattggccccgggagggttccgataaaaatcggtgcaccaaatatagaaaatcgggatttaggtgtcaaacctcggaggcaggtctaccctacgccccgaactgaattcccaggaaaaaggtgttcgaccacccgtcaatatccttgttgaaggccttttgagcccccacttcgaacgaaatccaggtcgaacggagcgtccgcttggcccaaggccacacttcgcgcaggttaaaggcaacccccggaaccacgttcaacaggaattccttggtaaagttgtattccacatgaacttcgccggtcaggccgaacaaatccgacaggttatacccgccacccagcgcaagcccgatagaaaaaccgtccagcgtaaaaagcttttggcagtcgttgttttcgacttcgacagaatccgcttcgtcttcttcgtcgccgggatcgtcgtcccaccagtaatgctgttgccgttccgaagtcgccttctttccgcgcacctgctttctaaacgccgagatactcgtattttcaaaacccagaagcggcgaagcatacaagtcgaactcttcggacgccatgtggaacctgacattcaggcggtaccgctggtaaacgatcatcgcgtcgcggtcgaggtcgcccccgaaaaagagcgcactgactcccccgcttatccaatctttataaaagtactcaagctgtgcctgccaggcgcccatgcagtcgcattcgtccagcgggtcgtacacgccaaagccaagcccgaacgaaagaccctgttccatgtaggcggtctgccccggcaagggaaccgtgctgatttcagacaacttattctctgatccaagcgagtctacgccgtctgccgcaaacgagacagacaacccaaatacaagtacaatcagcaagaataagtagcgcacaggtataagctagtaaaaaaaacaaagggggaagaatccccctcgttgcaatcgcagccctgctgcgttttccactcccccttctcctagggctccgccctaaaacccggatagtttatcgccgcatttgactcatgattagtcgtggcccttgatttttcaaatcaagggcgcgactcgtcggctcaccaatacgaaagtgcgagcactttcatgctggattcgcctcctagtcattcatcatatgattatagaacttggtgtagttgtcgcggtcttcggtcttgcggacggcgatggcgtcttgcgggtggcggttcagcatacccgtaatcatctgcggaatgatgtagccccattcgtacttttccttgagcggcaagaacagttcctggtaggcgtcgagcaccgggcgaaggtcgtacttcgggttcttgaggaatccgagcaagagttcggtggtgcagttgccggcgccgcggcccatgcccgacacggaaccgtcgaggtagtccacgtggtcgatgatagcctgaatcgtgttggagaaggccagctgctggttgttgtggccatggaagccgaacttcttgcccttcacgataccgcggtaacgggtaatttccttatcgatgtcttcctggtagaaggcgccgaagctgtccaccaagtaaagcacgtcggccttgcattcttcgttcacctggtgcagggcttcgtcgagttccgggccacggtcacggctcacagccatgatgttcagggtggtttcgtaacccatgtcgtggaaggcgttcaccatctcgatacccttgtcgatgtttttcacatagcttgccacgcggaacatctggtacgggctttcgctcgcgggcttcacggcatccatgttcacgcggcccacgtcagccatcacggccatcttgatcttggaatcgataccgtctttcaccttccagagcaggtcgtcgtcgcagaacttccacgggccgtattccttggggtcaaaaagttccggagagttcttgtaacccatttccatatagtccacaccggcggcagacaggagggtgtaaaggcgacgcacaaattcgagggagaagtcgtgcttgttcaccaggccgccatcgcggatggtgcagtccaaaaccttgatagattcatagtacatgattagattcctatttgttttggcgcaaagataggttctgcgaaggagccggtcaagagcagcaaagcaaatcgttcaaaaaagtttatttttaacgcaatttttgcgtcatttaaattaaattcactataaatcgttcaaaatcaacaggttagtatgtaaagaaactgaacacaatggccatctaggggaacattcccaatcagaaaagcatgatttcctacccaaacaggaaaactttcatctccaaccaatcatcattcaacgcattgattgcgtagataaacaagaccaccccaaggacacattatcaatgcatttgggggcatgtcgaaaaagaacgcggcaattacgactgggctggttgcgacctcgcctacaattgggcaaaagcaaacaacgcccatttcactttccgaacactcttgtggggttcccaaaatccacagtggttgagcacgctcgatgtcagcgaaatcaaaaaaacatggaccgattggattgacgccgttcaagaacattaccccgacctcaaaatgatcgaagtcgtaaacgaggctgtaaaatcagccaacaaccatcactccgatttcgcccgttccaaacttgtcgaagcccttggcggcgatagcggcaactataattcgtggtgacggcattcaaaatggcgcgcgaacgctggccaaaggcaatcaagaacatgtggacccagggcatttcgacacacccgctggactcgttggattcaattgccttggaaaattcgacagcagtcaacagaaaaacacaaggtaaatttactcgcccagcgatttccctcaatacgcgaaataatcgcgccttccaaatcgctttcatcaaaggcggggctttacgttcgtcatcgcgagcctcaaagaggcgcggcgatccattttaaattttcgctcttttgaacaatgcgaattgcagaaattaagtttcgagctgactgcgcaacactacaacgtcttccagagaaagtcccgtggctgcgactattttttcgtcagaaacgccaagctttatcagattcttcgcgatttcacgcgtattttcggaaacaccttctgcaactttcgcgttgacgtcttccgcgaactccttgaagaagccctttcttaaggcattgtgatcccagaccttgtggtacatattccgataagcctcaaattcctttttattgaagttagatacttttgcactttccgtcaagtccttaaacttcacttcgtccagttcttcgggaagttccttgagttggttcaggtagcggaagaaaaacagccatttgcttaggtcactggaggtcttctcgataaagaaaggaacctttgaaagttcgattacagtccagttgtaggcatccacaagctgcaccccgctttccaaatcgattaccgtcgcacgatggacggcgcgctcatcaaggaaaacagggaaccgcgtcaaggcgattacatatgtcggctgaacattaaaattccaatcatctccgggcgctgcctgattcgccaccatttcgctcgcataaaacgcaaggcgcttcatgaagttatccacttcacgaatttgcacttcaatttcaatcaaatctcccgcatcatccttacaatgcaagtcaaaaattgccgtacgcgacgccttactcccactgaggttcttcgccacattacgagtccacacgtttttgacaggccgtttaagttgcggtcccaacaggtcattcaacaaattgatgagattctggcgactagtaggcttatccgggtcaaaggccttcttgaaggccaaatctaccagcaggtttgcgtacgggctcgtttcacccggcttcacgatacagtccttgaaggacttgcgttctttcatcatacactcctctccgcctacaagcataaaaaggcgggactttacggttatccacccaaagtatacaaatgcacttttgagcaccacaaaatataaattagcggatggtgattgtcaagagattttagttttttttcagatcaaattttatcaagacaaaaaagagaacgacgcctcggatgaagcgccgctctaaatgttttcacaacggaataatccttattgtgaattgctttcagatttgacaataatatacataaagaaatacagaaagtcaataaatttttcacattttgcagaaaaatcaaaaaaatttcaaaatgacattatatgtcacaaaaataatctatatttatgggtttgtagttttgcgttttcgcttcaaaaatgacgaattttatcaaaaaaaggcatttttccattccttttttcgacaaaaaagtttattttaaatgagaatagaaaaaggaaatcaaatgaaaaagattcttggacttgatttgggaaccaattcgattggttgggcagtggtgaatgaagcggaaaaggaaggcgaaaagtcttctattgtgaaattaggcgtaagaaccatcagcttcgacaattttgtaaatacagcatcaaaaaaagcctgcatggatgctgtagcagattttaacggtggaaaaagcatttcctgcaatgcagggcgaacacaaagccgttctatgcgacgtaatttacagcgttataaattacgtagagatcatctaagaaaactactcaaggaacatggctttattgacgattcgacgattcttgccgaaaaaggaaacggcacaacatttgaaacctatcgattaagagccaaagcagcctctgaagagatttctttaacagaatttgcacgcgttttgttgatgatcaacaaaaaaagaggttataagagcaatcgaaaagcaaagtcttctgacgagggttccctgattgacggtatggctattgctgaaaaactctataatgaaaatttaactcctggtcaactagtcctttccttgttcaatcaagataaacgctacgaaccagaattctatccatctgatttgcaaacggaatttgataaaatttggagttttcaaaaaacattctatccagatgtcttgaccgaatccttaaagcataatgtagaagggaaaaataaatctgctacatgggctatttgcaagactccgttcaacattgttggcattaaacgatcaacaaagggattcgaccaaaaaaaagaagactacgaatggcgagtgaatgctctttctgaaaagattgggctagaggaattagcaattgttcttcaaaatatcaatggtcaaaaaagtggaacaagtagttatctcggaaatattggtgatcgcagtaaggagttacgaattaatcatttgactgttggacagttccaaatgaatgaattggccaagaatcctaactacagtcttaaaaatcaggtcttctatcgtcaagactatttagatgaatttgagacgatttgggaaacgcaagtaaaatttcatccggaattgactcccaaactaaagcacgaaattcgcgatatcactatattctatcagaggcctcttaaatcacaaaaaaatttaatcagcatttgtgaactggaaggtcgcaaagttaatagaactattgatgggcaaacaaaaactgttttatcaggccctaaagttattcccgcatcgtctccaatttttcaagaatttcgcatatggcaagttctaaacaatttgatgctaacaagcaaggaaactggcgagtattgcgcattaaagcaagacgaaaaagagaaattatttgctgaactgaatgtaaaggagcaattaagcaaatcagatgcgttaaaagttctatttaacaaggaataccgtgaatacgatttaaacttcgataaactagaaggaaaccggactcaatcaaaattatttgatgcttatcgtcgtattatcgaaatgagtggttacggagaattcaacttccaaaagatgcctgcaaaagaaatctttaataccgttcagaactcattcgaaaaattgaacatcagaacagacttcttgagttacaattcctcattgacaactccagaactcgaaaatcagcctttattcaaactttggcacctattatattcattccaagatgacaagtctattactggcaacagaaatctcattgcaaagattggaaatctttgtaacatggaagaagactatgcagccattttagcaagcgttacctttgaagacgcttatggaagtctttcggcaaaggcaattaaaaagattttgcctttcatgaaacaaggtcaaatgtatagcgacgcttgtacatccgcaggatacaaacactcaaaacgttctctcactcgcgatgaattggcaaataaggtctataaagatcatttagacgcacttccaatgaactcgttaaggaatcctgttgttgaaaaaattttgaaccaaatggtaaatgtggtcaatttaattattgacacttacgggaagccggatgaagttcgaattgaattagcaagagaattgaagaagagcgccaaagaacgggaggaaatgacaaacgccattaaaaagagtgccgcagattatgacgattatagaaaaattctcataaacgaatttggtttggaatgtcccagcaaaaatgatttacttcgttatagattgtataaggaactagaatctaacggattcaaaactctttattcagacacgtatattcctcaagaaaaattgttcagtaaggaatttgatattgaacatataattccccaggcaaagcgtttcgacgattctttcgccaacaaaactcttgaaaaaagacaaatcaacatagagaaaagcaactctaccgcttacgattttgtccttactaaatatggagaaaatggcgcagaacaatacaagtctcgtatagacaaaatgtataacgaaggaatgattagcaaggcgaaatacaaaaatttgctgatgcatgaagccgatattccttctggattcatagaacgtgatttacgcgattctcaatacattgcgaagaaagctcgcgagatgcttgaagatgttgtaaaatttgtgattcctacaacaggagcaatcacagaccgtctccgtgaagattggcaactcgttgatgttatgcaagaattgaattgggataagtataacaaacaaggacttacagaaacctataaagacaaagatggcagaacgattcttaagataattgactggacaaaacgaaatgaccatcgccatcatgcgatggacgctttaacgattgcatttaccaaacgcagctatattcaatatttgaacaatttaaatgctcgtgtacctaaatcagaacaggaatacatagatttggcggattatgatttaagcaatataaaccctgcggatgtgaaaaggattgaagctactatagaacaaaaagaactttaccggaacgaaaaggggaaactttgtttcattcctccgattccgttggatgaattccgcgcacaggcaaaagagcaattggaaaatacccttatctcaattaaggcgcgaaataaggttgtaacacgaaatacaaatatcagtaagggtaaaaatggaaagttaaatcagcaacaaactttaacacctcgtggacagttgcacaacgagtctatttacggaagctatcaggctgaaaatgtaaaatctgaaaagattgatgcaaaatttactgctgaaaaaatagcaacagtatgcaatgccaaatatcgagacgctttgctcgaaaggctaaatgcatttaatggtgatgctaagaaagcgtttacggggaaaaatgcacttacaaaatcgcctatttatttggacgaaatgcacacaacaaagattccggaaattgtaacaacgaaatcatacgaaacgacctatactattcgcaaagcagtttcatcacaaaatttcaaagatgctaaatctattgaaaaagtgattgatggaaaaataaagcaaatattacttgatcgtttagctgagtacgataacgatgcaaagaaagcttttgacaatttaatggataaccctatttggctgaataaagaaaaaggaatttctattaagagtgttactattcgtgctgtaaacaatgctgtagccctgcgaaaaggacatgatttcgtgaatactggtaacaatcaccatgttgcgattttccaggatgcagacggcaatttgcaagaacatatcgtttcgttctacgaagcgacgcaacgagccacaaagggattaccaatcattgacaaagaatacaacaaagagcaaggatggcaattcctgttcacaatgaagcaaaatgaattctttgtattcccgaatcaagaaaccggttttgacccgcaaaaaatcgatttactagattcaaagaataatgcattgattagtccaaacttgtatagggtacaaaaatttacaaccagagactatttctttagacatcatcaagaaacgatgctaaacgacaacaaaaagcttttgggaaaaacgtggaaacgtggtggtttaagtttattaaacggcattgtaaaggttcgtgtaaatcatattggtcaaattgtgtctgtaggtgaatactaaatgggtatagcctatgattaaacggacattatattttgggaatcaggcgtatttaagcctaaaggacaaccagcttgtcattaagaaacgcgatgacgaaatcgttactgcggctattgaagacattgcatacataatccttgattcaccccaaattacagtgaccaacgctttgctcggagccctgctagagaataattgtgcaatcatcaactgcgataagacgcatttaccctcaggcttactacttcccctttcaggaaacaccctgcaaagcgaaaggttccaagcacagatagaagcatctcttccattaaaaaagcaactatggcaacaaacggtccaacagaaaattttgaatcaagcagccatcttgaaggccacaagaaacgccgaaataggcaatatgacagcttgggcaaactccgtacgaagtggagacgttgataatcgagaagccgttgctgcagcatactactggaaagagatgtttcccgacatttctgattttgtccgtgatagaaatggagtttcaccaaacaacatgttgaattatggatacgccattttgagaggagtcgttgcaagagctttagtttccagcgggctattaccgacattgggcatccatcatcacaatcgttacaatgcgtattgccttgcagatgatataatggagccctaccgaccgattgtagacaaactagccatagatatcctgactgaaattaaagaatatccaaaggatttgtctaccgatatcaaagcaaaaatcctgcaaattcctgttcttgattgttttatcaatggagagcgaagtcctttaatgaacgccgttgcaacaacaacggcatcgctcgccaaatgctatatgggagtcacaaagaaactaatctatcctgaggtgtaggatggatcgatttagcgagtatcgaattatgtggatactatgtttctttgatctacctacagaaacaaaaatcgaacggcaacgccattcgctgtttcgaaaaaatctcttgaaagacggcttttcaagatttcaattatccatttatgttcggcattgcgcctcggtcgaaaacgcagaggtccacatcgctcgtataaagagttttatgcctcccaaagggtctgtcagcattctatgcatcaccgacaaacaatttgggaagattcaggttttctacggcaaaaaagaaaagcccttacccaaaccagcacttcaactagaacttttctaatcacaaaaatgccctaaaaacgaaaaaatcggcttcgaaaagtcgattttttcttttacacaattctgcaactaacccattgacacttattcagttacaacaaatcagttgtcattgcactagtaaaactagaaaatctgaaagcaattcacaactttatgttatttgttaatcctttttttaaagttgtcattgcactagtaaaactagaaaatctgaaagcaattcacaactttggtgtgcctggagggttcgaaattccagttgtcattgcactagtaaaactagaaaatctgaaagcaattcacaaccattgtcgattactccgaacataagcaagagttgtcattgcactagtaaaactagaaaatctgaaagcaattcacaacttcctttgtttgtattcaataaaactaaagttgtcattgcactagtaaaactagaaaatctgaaagcaattcacaactttggttgatgataattgtatttggttatggttgtcattgcactagtaaaactagaaaatctgaaagcaattcacaacacgtttatcctagtatttatacggaaaaaagttgtcattgcactagtaaaactagaaaatctgaaagcaattcacaactgtcaaggtaagagttccgttcttgaatggttgtcattgcactagtaaaactagaaaatctgaaagcaattcacaacaattgaacttctcacctgtagtgacaagaggttgtcattgcactagtaaaactagaaaatctgaaagcaattcacaacgcggaattaagcttaacattgacggattttgttgtcattgcactagtaaaactagaaaatctgaaagcaattcacaacttctgtttcggcatataaatctcctaaaaagttgtcattgcactagtaaaactagaaaatctgaaagcaattcacaacttacacgtttcatgcgttcgcttctcttgcgttgtcattgcactagtaaaactagaaaatctgaaagcaattcacaaccttcgtccgcatcgtagtatgagaaacctcgttgtcattgcactagtaaaactagaaaatctgaaagcaattcacaacttcaacaatggcggcaaggtggttcagttcgttgtcattgcactagtaaaactagaaaatctgaaagcaattcacaacacgacggcatccttatcaagccgaaggaagttgtcattgcactagtaaaactagaaaatctgaaagcaattcacaaccgttcatcttcatcattcctcgtatcaaatgttgtcattgcactagtaaaactagaaaatctgaaagcaattcacaactttttctcgctgctgacgcacctcgtcttcgttgtcattgcactagtaaaactagaaaatctgaaagcaattcacaactccttcaggtactaatggtgagaaatctcgttgtcattgcactagtaaaactagaaaatctgaaagcaattcacaacattctaaggtcattttatggattttttcagttgtcattgcactagtaaaactagaaaatctgaaagcaattcacaacgtaggaaggttgattttctgcttgaagtaagttgtcattgcactagtaaaactagaaaatctgaaagcaattcacaacttgcgggtatgatggctcaggagcccgtaagttgtcattgcactagtaaaactagaaaatctgaaagcaattcacaactaagcatcagcgataatgccaataaaagctgttgtcattgcactagtaaaactagaaaatctgaaagcaattcacaaccgaggtgtgccccgatatttgcgacttcgggttgtcattgcactagtaaaactagaaaatctgaaagcaattcacaacaaacatcgatgtactgttgtacgctatccagttgtcattgcactagtaaaactagaaaatctgaaagcaattcacaactttcctggcaaacttccacgctgccgccttgttgtcattgcactagtaaaactagaaaatctgaaagcaattcacaactgggcaaggaaatgcgtgttgctggtattggttgtcattgcactagtaaaactagaaaatctgaaagcaattcacaactagaaaggttggcgggtgcggttatgacaagttgtcattgcactagtaaaactagaaaatctgaaagcaattcacaaccgctgcattacacgcaagatgaagatggctgttgtcattgcactagtaaaactagaaaatctgaaagcaattcacaactacagtcttggacgtcttctccgcctcgcgttgtcattgcactagtaaaactagaaaatctgaaagcaattcacaactaacgtaatattcgagcaaagaacacgaacgttgtcattgcactagtaaaactagaaaatctgaaagcaattcacaacttttcccgtttgcaagtgcctcgaacatttgttgtcattgcactagtaaaactagaaaatctgaaagcaattcacaaccgctcggtctgtcttacgaagtcgttttgcgttgtcattgcactagtaaaactagaaaatctgaaagcaattcacaaccttaaaacagatttagctggtcttacgaaggttgtcattgcactagtaaaactagaaaatctgaaagcaattcacaactgacgactttctgtattgtacccacaacaggttgtcattgcactagtaaaactagaaaatctgaaagcaattcacaacccaagacgattgcattgttagtggttgcctgttgtcattgcactagtaaaactagaaaatctgaaagcaattcacaaccgctcaaacggggctgtggtggcctgtaatgttgtcattgcactagtaaaactagaaaatctgaaagcaattcacaacagtgaacagcggtgtagtagtcaatgtatggttgtcattgcactagtaaaactagaaaatctgaaagcaattcacaacgctcggattgaagggagagcgaaacggcatgttgtcattgcactagtaaaactagaaaatctgaaagcaattcacaactcaatagtctagtgaacgagggcggcgttggttgtcattgcactagtaaaactagaaaatctgaaagcaattcacaacttcggacctcgcgctcgacgatgccgccatgttgtcattgcactagtaaaactagaaaatctgaaagcaattcacaactcttcttcagcttcaagttccatgggccaagttgtcattgcactagtaaaactagaaaatctgaaagcaattcacaactgccaggtactggtgtcagctacccatttttgtaagcttccccataattaggactgttcataactagacaaatggcaattctgcctgcgtcaaaatgctacctttggtagcaaaggaacagccat

SEQ ID NO: 2327 - DNA, 18828 bp, synthetic construct
  source 1..18828: mol_type = other DNA
  misc_feature 1..18828: note = Synthetic
tgcagttccgtaccccagcagggtatcccggggtgaagccgccctggggcaccttgaatgcggtcgacctgaatacgggcgaatacctctggaaggttcctctcggcgaatttcccgcgctcacagcaaaaggtataccccccacaggtaccgaaaaccatggtggacctatcgtgacggccggcgggctgctgttcatcggtgccacgcaagacgagctgttcagggcgtttgacaagaaaaccggtgcgatcctgtggacgtatcagcttcccgcgggggcgttcgccacgccggcgacctattccgtcaatggaaagcaatacgtcgtcgtagcggcaggaggcaccaagtatgggctcaagccaggcggatcatatatcgcatttgcgcttgagtaaaaacgatagttataaacttacaaaacatgaaagccaacagaagagcgtttatcaaaaacaccgccgcgctggcagccatgacggtaggagggagcggggcgagcggcgggtagccctggccaagcaaggtgtggtcaaatccgcagcacaaggaggttaggcaatctccttaattttatttattattgaacattattataaactacgttgttttgatgaagacattagccacattgttaatcatattgcccgccatgatttttgcccagcaccaaccgattgatttattcatcggtacgtacacaaacaatggaaagagcaaaggcatctacgtctacgcctttgatcccgccaccggtagcgctacgctgagaagtacggcggccgccaacaatccgtcatttctcgctatcagtgccgataggaaatatatctatgcggccaatgaaaatggagacggcgaaggggcggtcagcgcctatgcatatgacgaggctacagggaggctgagcctgttgagccagcagcttacacaaggagatgcaccgtgccatgtcgccgtcgaccggggaggtacgcacgttgttgtatccaattacggtgggggcagcatcagtgtattccccatcgagcccgacggaagccttggcgcaatcagccagcttatccagcataccggcagtggccccgaccaaagcaggcagcaagccccgcatgtgcattccgctttttttacgcccgatgaaagacgcatctatgtgcaggacttggggacagataatgtacacatttacgacttccggcccgccagcgcagacgggccgcttatccctgcggcgcaacccgttgccaagagctcaccgggcggtggtcccaggcatttgacccaatccgccgacggaaaatttgtctacctcattgaggaaatgattgccaacgtgctggtctaccggcagcaaaacggccggttggaagccatccaagaagtggagataaacgaagcgggcttcgccggcaaaaacggtgcggcagacatcaagctgtcgcccgacggccaattcctgtacgcatcaaaccggggcgatgccaacaccttggccatctaccgggtgaacgcaacggacggcacgctcaccaaggtcggcaatcagtccgtgctgggccgtggtccccgcaatttcaacatctcgccggacggcaagtacctcctggtggccaaccagaataccgatgaggtggtggtcttcagcagggatgcagctacggggttactgcaagataccaggcaccgcatcgctgtgggatcgccggtgtgtttggttttttaatcccccagttttactttcttctggaatccgggtccggaagatgtaaccttatttattgctttttttgcctattaaatacgtatttatcgagtatgtacggcgttaccggctttagccttttattggtatccaatggataaaagccgggagctgtataaaactcgatgctgtccaccgtaacctttacataccaaacttttccgagggcgtctttggtcaatgtatctggctgcatgattttgcggaagtttttggccagttgcttattcagggggataattttcgcgtcttcgatttttgtatggcaagcgatcggtacatagcggtcggtgcgccaatacatacattcccgatcaaagctgtcggcgagtcggtacgcaccgattgtcgccaaaaatgcaaccattccatacaatgccggttttttgattgtcgaccaaactccggatttggcctgtcctttacccgagccttccttgcccgcattttccgatgccgaagtcgatacctcatttttttgccccttgggcacatcttcgttctcttttatggccatatccgcctggcattcttccgcctgatcagcgggcggatccgcggctgtttcttcttggtcttccttttggttttcctttgagtcgctacgttgtgcttcccgccatttatcaaaggggcggggctggaagtcgattaatatcgccagcagcttcacgatattttcacgaggcttgcttgtcttgccgattataaaattttttagtggtttaaatccatccgttccaaactttcgaatagcggtctccagatcggcatgcttattatcagcgttaaaaatttttaatagggtgggaatatcttgctttatgtcgcccctacgtaaaagtaccaggcaatacctcatgagctgcgccggagaagggcgttccagttcactgggcagggcatgcttttctttcttttcccgataggtgtttatcacctcttccttaaatttatcaaattctgacattgcaacaaaattagctcaaccgaccaatcggaatttacggaatcccgtaatcttttaacggaatcccgtattcttttataagtaaaaacaccatcgcccaacaccggaatttcaagacgtccatccggaaaatcaggaataagatgttgaataacggaatcatcagaatttgctgatggttaggtatttgcgctccatatttttgcttcagaaatcagttcaagcattgattcacaatggaggtaaatgtacgaaacaggtttcaaaatgagaagaaatcgcggtggcttatagccggtttgggaagcagttattagctcccgcgatagacgctcgcacttcccaacaaattcagaaggccttctgaaaaccaacgtagcaacccccgcgaacaggtcgcggggacctaccaagttttcatgttaaaatttttgaattatgttgtattacatttttgcaatactaatgggtttggtgtgtccttcaggcagtaattccggtcagggccagcccaccgtacagactacgaacggcggtggtggagacggtggcggttcaagtaacggaaacggtggagaaaccggacaggtgcctcccaggccgccccaaagtacgtaaatacatatccaatcgtaaaaggcagcaaagcgctgcctttttttatttgtataaaattttattctgttttttagttttgctaatttcgaataaaatttgaatcctattgaaacacctaagcattccgttgtcattccttatttttctttcgtgttcgcgggaggaaactcacgagccccagcccattgacaatccgtactacgatcaggcatttacatacttggacagcggcccggtagacagtgcttttttctatctcaacctggctaaagacgtttttctggaagccaatgacagcctcaatgcggcgtactgtctcacgcagatggctatcattttgaccaatcaaggtgatcatttcggcggtcaggagacctcgctccaagctgttgcatacttaaaccagcagaaccgggcacaccaccattacctgggctccaattacaacaacctcggaatagcctcacgtaacctaaaagattataagcggtcgttggatttctacgacttggcaattaaattttcggacgattcgctggatacccgtatttaccttaataacaaagctgtcacctacaaagagatggaaaactacagcgaagcctacaacatataccagcaagttgtagaagaaaccagtaaggaccctcgagaatatgcccgggtcctttcaaatatgaccatcctgaaatggcttcaagatcccacatacaacgcaataccggaatttttacgtgcactccgtatccggaaggaagaaaatgacctttggggcctaaacgccagctatgcacatcttaccgattattatcaaaaaaagcggctggattcggcctggtattacgcccgtaagaggtatgaagtggccaagcaaatcgaaagtgccgacgaccaaattctggccctgcgacgaatgattaggttggggccgtccgattcgaccaaattgtactttgcgacgtatcaacggcttagcgacagcgtccaatcagcccgcaatgctgccaaaaaccaatttgccgttatccggtacgaggcggagaagaacaaagcagacaacctaaggctacagaaagaaaatgccgaaaacgcctaccagatcagccggcagcgaatattgactacggtcattgccatcatcgctatcctgttgttagccggcagtgtgtattggcaccggaagcgaaaacagcggctggagctcgaagcccaaaaccggataaaagcgcatcagctcaaaacgtccaaaaaagtgcacgatgtggtggccaacggactttatcgcgtgatgaccgaaatcgaaaacaaacccgatatcgatagggaagggatcttggaccggctggaagtcatgtatgagaagtcgcgcgatatatcctacgataccgaggtcgatgtgccgtcggccgatccgccggacttcaacgataagctggcgggcctgctcacctcattcgcttcagacgaaacgaaagtagtcatcgtgggaaacgacttcgacctatgggaaaccgtatcgttggcagtgaagcatgagatcgagcacatcctgcaagaactcatggtcaacatgaagaagcacagctgggcgagccacgttgccgtgcgttttgaacgaatcggccatgagctccatatccactacagcgataacggtgtcggcctgcctaaaacgtttacttatcgcaatggccttaccaatacgggaaaccgtataaaaaatcttcgcggcctcattacctttgacaccgaggtcgaaaagggattaaaaatacacctctcttttcccgtcttttaaactgttagcggatgttcaaaaaagtattgattgccgaagaccacgagatagcgaatatttctgtacaaaagacattggacgaacttggcatagctgacgccaggtatgtctattattgtgatgatgcgtttgcctggatacggaatgcgttgaaggccggcgagccctatgacttactcattacggacctatattttgaagaagaccattgcaagcaaacgctcgtggacgggaaagcgcttatccgggcagcgcgggaagcacagccagacctgaaggtgatcgtcttctcggcagaaaacagggcacccatcgtggacaatctgtttaaatcgctctcgattgacggctatgtccgtaaagcgcggcgtgatgcccaaaatctcaagcaagccatccacgccgtttaccagcacagcacctatctatcgccggatttgaagcaaaccatccaaggggaaaattcctatgagtttaccacttttgatgtgaccatcatcaagctcctctcgcaaggcgtactgcaaaaggatatcccgtattacctgcagaaacaacatatcaagccttccgggctaagcagcgtggagaaacggcttagcctgatgaaggaagtgttggggttttccaacaacgcgcagcttatcgcttactgtaaggatattgaaattatttagtgccatgtcgtaatcttcgttaattttggcacgatgcacgattgctttaagcaaattcaatcctatttgattaagaaagctcccatcttcgtagccttgctcctcgttgtctgcgctgcgtttgaaatcgctgaaccggcaggccaaaaacaaatatcggcgccgaaagaaaagtatgtctatgtgaccaaggtgatagacggggataccttttgggtgagggacggggcggacgaggttaaagttcgcttcatcgggatagatgcgcccgaaacgcgcaacgcaggccggaagaagaaagggcacttcggcgaagaggccaaggcgtacgtgacaaaattgacgctgcacaaacgagtccggctggaactggacgtgcaggaaaaagatcggtatcaacggctattggcctatgtctacctcgaagacggcacatttctaaacgcccatctggtcgcccaaggctacgcggtgatggctacttaccctcccaatatcaaatatgtagacttatttgctgacttacagcagcaggcccggcaggcggagcgggggctatgggctgaaattttttgaagtaattgcggctttacggtttcccgtaaggagcggacacctatgccttgtatttttgacatcgtaagcaaatggcagcatacatgaataagatttgcaacacgatgaaagcctccgtcacgatcttgtttcttttttcagcgttgacggcaatgctgttgcgtgggtgggaagattaattcaaaactaaaaacctaaagatgaacaccatggatttcaaagaagaaattcgccaattcggcaaacgtgtagaccggctgttgccgcagataaacacagaggaggctaccaagacatcccttatcatgccattcctgaaaatcttgggctacgatgtgtttgatcccttcgaagtacatcctgagtttattgcagatatcggcattaagaaaggagagaaggtggattatgccattctgcgtgaagaaaaacctgtcatccttatcgaatgcaagcactatgccgatgggttggatccgcacaattcgcaactcttccggtacttccataccacatcggccaaattcagtttattgaccaacgggctggaatatcggttttataccgatttggttacgcccaataagatggacgaaaagcctttttttgaattcaagattaccgatatcaaggataatgaaattgccgagttgcggaaattccataaatcagtcttcgacttagacaatatatcttcaacggcaagcgagttgaagtatttcaatgaactgaagatattggtcactagtgaaatccagaatccctctgaagagtttgtccgttatttcgcaaagcaggcctatccgagtttggttaccgtcaaggtcctggagcagtttacgcccttagttaagcgggttttcagccagattataaacgaccaaatcagtgagcggctaaagagcgcgttgaagaaggaaaccgaagaaagcgaatccccagcaccggcgcaagagccagaatcattggtagtgacaacacaggatgaaattgacggatatttgatcgtcaaatccatactccgtaaggagattgaagtcggccgtgttttcatgcgtgacaatcaatcctattgtggtatcctgcttgatgataataaccgcaaaccgatatgccgcttctatttcacgcccaatagaatgcggattgggctgttcgacaaggaaaagaaagaaaccaagcacgatatcgaacggctggatgatatctatagctattcagaggcgattttgcagacggtgaataactatttgtcctgaaccaattaaagtggcaaagaatcccatactgcagctgcttgatcaggagaaccatggagcctacagagcagcgttatttgatgaacgatggaagaaaaaacggcaagagattttggcgagggatcaccaccgttgtgttaactgcaaatcccaggaaaatttgcaggtgcatcatcgccaatatcattttcagataaagctcagaaaattcaaagagccttgggattaccccaatacgttgatgattacattatgtgaaaaatgccatcagcgtggccaccagttgtataaagtgccttcaattgttgtttaatggaccgaaatatggcaagtatatttaaaagtattttcagtaaaaacggaagcgcaaactccactttggcagttaagcataccgaagaggttgatagaaaagacgtaaccgaagaattattcgtcgaaaaaaaacctgtaatggaggacggcttcatgtccagcaacaaggggatactcgctatctatcattacttggaaggtgactttgaaagtaagggtttcaacgatgctatgatcagtccggatgagagttataagcaagagaacatccgcttaatcaggtatgatctcgaaataattattcaaaaagtccgcatttatcatgattccctgctaaaggagatggatttccatatagcgtccagatcgcgtgcgggcttagtagatttagttgaagagttgaaaagccggaaaaccgatctgatggagcatattcagaaagtcaacgcgatagaaagttcgttaatgtcgaatagtggctattgcgagagagccatgttgtcttatcaacgcgggtttatgaaaggcatggcttccatcacccaagcaagcctattgtctaaagcactttgaccatggacaaaaagagcgcatatctcaggttttgttgttttctgacagggttaagctatcccctaatcaggaattccagcgaacaaagtgttaagaatgccaagaagtatacaggagctttgttaatcatcatgctggtgtggttttttattggctattgttttgcgacaagatacctgcatatggggattgggggaggggtaataggaggtgtgctcatgtcttttgtcatcctgcaaatcgagcggattatcatcctttcgcatcacatcagttggggaggtaagctattccgagtcatattgggtttggtgatggctatccttggggctttgattatggatcaatttacttttcaggatgatatcgagcttaggaaagttcaggtgttggacattcgggttaaggaagcgattaagaccagtgagaatgacatacgcatgcaagtagaagaacttgattctgttcttgaaatttcaaacacccgtttatttgcattaagcgaagaattgcagaagcgcccggttattataaccaactacaccacaagcagcgtaactaaagacagctcaggtaataacgtcaattcgaccacacagcgaaacactgctatcgtagataacccgctgaaggttgagtttgattttttgcaagcgcagataaccgagctaaatggcaaaaaatttgagcttttaaattccttgacagatttaaaacggaaaaaagaggaggagttaaagtcggcgaccggcttcctggacgaactgacccttttaaaggaagttatcgcatcaaactgggtgggcatgtttgtgtatgcattgttccttttcttctttcttgcattagaattatttatcctaattatgaaactaagcgacaaggagtccgattatgacaagctagtagaccatcaaatggatatccgtatcgaaatgcttcaacggttgaaagcctaagacaaaacgatgttaggctggaaggcgttggtttccaattgaaggctctgtgcgattgtttcaggaggtcctttgttttttttgacgcgatgttgtatattgcatatcctaatacaatcgaaacacatgcattaatgaactgaccgtcaaccaaactactaattttattatggaaagagctgccacgttaaaattccatgtcgaaatccttccgtttattaactatcctccacgccaaacgcagatagaagtgtccattagcaagaacttactatacaagtatataagcgtatcaggggatgaagtggttgggaagaaaaaaagccccgaagatagtcgaggcgctaaatgttttcacaacggaataatccttattgtgatttgctttcagaaacaaagatatagcatattttgaattgagcaatacgggaaaccgtaaaacataatttttcttgcagattacctttaattgctaaaataaactgatatgaagaaaaggatattaggacttgatttgggtaccacttccataggctttgcacaagtcatcgaaggcgacaccccagaacaatcttttatcaaaagaataggtgtgcgcgtaaatccactgacgacggatgaacaaaccaattttgaaaagggtaagccggtgtctgtaaatgcagaccggacactgaaacgggggatgagacgcaatctcgatcgctttcaggacagaagaagaaatctgatagaagtattgatacaatcaggtttgattacaaccgaaagcgtattagctgaggacggcaaacatactacgcacgaaacatggcggttgcgtgcaaaagcggttacagaaaaaattgacaaagagcaattcgcaagagtgctgctggccatcaacaaaaagcgtggctacaaaagcagtcgaaagacaaaaaatgaagaagagggacaggcaatagacggcatggccactgcgaaaaggctgtatgaggaaaacatcacccctggccaacttgcttaccaactattaaaagagggaaagaagactcttcctgatttttaccgttcggatttgaatgctgagctggataaagtatggaagcagcaacagcaacattatcctgatatttttaccgatgagtttaagaaatatctggaaggtaaagggcaaagggccacatcgacaagcttctggggcagataccaaatcaacacctcagaaaataagggttcgagggatgaaaagaaactacaagcctataaatggcgggccgaagcggtgtcgcaacgactggaaaaagaagaggctgcttatgtaattaccgaaatcaataatgacctgaataagtcttccggttatcttggtgccatatccgaccggagtaaggaattgtacttcaataaggaaacagttggccaatatctatacaagcaacttctacacaatccacatacccttcttaaaaatcaggtgttttaccggcaagattatatggatgagtttgaggccatatggagcgaacaatctaaacaccatgcagaactgacggaggagctgaaaatagaaattcgggatatcgtcattttttatcaaaggaaactgaagtcccagaaaggattggtgagcttttgtgagtttgagagcaaagaaatcgaaatagagagaaatgggcaaatagtcaagagaaccattggattaaaagttgcccccaaatcttcgcccttgtttcaagagttcaagatttggcaggtgctcaacaatttgctaattcgcaaaaaagggagcagaaagcgcactgtaaaaaagtcagataattcagggggagaagaacaagaaatctttgctttcgacatgaacgccaagcaacttttgtttgatgagctgaacatcaagggtaatctaagtgcttcaaaagcattgggtttgttggggtataagccgcaagattatgaactcaattacaccacaatagaaggtaacaggaccaacaaagccctctatgatacctacctgaaaatattggaaatagaaggttatgacgtgaaagacttactgaaagtcaagagcaacaaggacgaagtagccctggatgatatagatgtgcccgctgttgaaatccaaaaaatggttcgggatatttttgaaacattaggtatcaatacgcagattttggaatttaatgccgaactggatggaaaagcctttgagcaacaagcctcgtgtcagttatggcatttgttgtattcggcggaagacgatacccgaaaatatagcgaagaggatattttggtttttggtaatgaaaatatcggtttgaagaaaaagctttgctcaaaattcggcttcaagcccgaacacagcaagatattggtcaatgtcaccttatcagatgattatggcaatttgagttccaaagcgatgcgtaggatttatccgtatatcaaagaacatcattattcagatgcctgcgaacatgccggttatcgccactccaaatcttcgctcacaaaggatgaaatcgccaatcggccgttgaaggggaggttggaactgttaaagaaaaacagtttacggaacccggtagtagagaaaatcctcaaccagatggtaaatgtcgtcaacactttgatagatgccgaaaatgccgaacgaaaggcccaaggattacccgaagattttcactttgacgaaatacggattgaattggcccgtgagctgaagaagaatgctaaggaaagagctgagatgaccgccaatatcaacgccgctaagctcaagcatgaaagaattgtgagactgttgcagacggagtttggcataaagaacccaagccgtaatgatattatccgttataaattgtatgaagagttgaaaaacaacggttataaagacctgtatacaaatacatatataccgcgggagattctgttcagcaagctgattgatatcgaccatattattccacaggctaagcagtttgacgatagtttttccaataagacggttgtgtttaggcaagacaatttagacaagggcaataaaacggcatatgactacattgaaagcaaatatggagaggtagcagcggtggattttgttttacgtgcccaacatctttttgaattgggacaaaaaaattccgaagaaggcatctcaaaggctaagttccaaaaactgcaaaaacgggaaagtgacatcggtgacggctttatagaaagagacttgcgcgacagccaatatattgccaagaaagcaaagaatatgctatatgacatcacccgttctgtggtcagtacatcaggaagtattacggatcggctgcgtgaagattgggatttggtaaatatcatgcaggagttgaatctcgaaaaattcaggaagttaggcttgaccgagatggtagaaaagaaagacgggacgtttaaagaacgtattgttgattggaccaagcgcaacgatcaccgacaccatgcgatggacgctttgacggtagcttttaccaagcataatcatattcaatatcttaactacttgaacgccagaaaaaatgaacgccatcgattgcatagcaatatcatcgcaattgaggcaaaagaaacagagttggtgatggacagcgatggaaacaaaaaacgggtactcaagtcccccatccccaacttccgccaagtggccaaagcgcatttggaaaacgtattggtttcgcataaagcaaagaacaaagtcgtcaccaaaaacaaaaatagaacgaagaccaagtatggcgaaagggtgagaactgaattaacaccacgcggtcagttgcataaggaaaccgtgtacagaaagtaccgttattatcaaagcaaggaagaaaaggtcggagctaaatttgataaggaaaccatccaaaaggtttctagcccattataccgaaaattgcttttagagagactggctgaaaacaacaatgaccctaaaaaggcttttacaggaaggaacgcgctgaataaaaacccgatttacctagacaatgcgaagcagaaagttttacccgaaaaactgaaattggtctggctcgaagaagactattccattcgtaaggatgtaacacccgaaaatctgaaagacgttaaaactatagagaaagtactggatggcaaagccagaaacatccttttggaacggttgaacgaatatggaggcgatcccaaaagagcgttttccgatttggacaaaaatcccatttggctgaaccgggaaaaaggcatcagcatcaaacgggtaacgataagtggcgtgaagaatgcagaacctttgcattacaaaaaagaccatatgggcaatgatatcctagatgacgaaggcaaaaaaattcccgtagattttgtcagtacgggtaacaatcatcacgtggcgatatatcgggatgagaacggcaatttacaagaccatgttgtttcatttttcgaagctgtcgaaagagtgaatcagggactcactgtcattgataaatcatacaacgctcatttggggtggcaatttttgtttacaatgaagcagaatgagtattttgtcttttccaatgatcaaatggcatttgatccacgcgaaattgatttattagaccctaaaaataaaaaactgataagcccaaatttgtatagggtacagaagttatctaaggtcatttacggaaattccgctgtaagagattttgtttttcgaaatcatttggaaacaacagtagaagaaaaaaaggaattgaatggcatcgcttataagcaattaaagagcttaccgtttatggaaaacatcatcaaagttcgcatcaatcatattggtgatattgtaggcattggagagtattaataagcgcagtatgaaccgcaccgatttcctcaaatccattggccttggcgcaggcgggttaatcctgcccgctaagggtttgattagcacgaaatccgtaaagatatacgacaactatattcgtgggctgatgcattatgactttaatgaaatcgaggacaatatccaagctggcgatgaagtgcatctggtgcgcgagcccacgaatatctatgacagttttgccatacaagtgaatagaggtgacaaacgattggggtatatcgccgcctatgagaatattgtgctggccaatatgatggatgctggcgtaggtcttagcgcctacatcagtcataaagatctaaaacgccctgcgcaggaatggttggcaattgaggtctttgcagagttggttatccccagtcagcaactggtggatagcgtacttgcccagcatcgcgcggatgatgttccggatgtgtatcggctaggggaggtttaaaagcgggcagaacatgatcaagcgcacccttatgttttccaatccggcttatctgagccacaggaatagtcaattggtaatttcctttcctgacaaagagaaagatgaccggacggtaccgatcgaagatattggcgtggtagtactggaaaatcagcagataaccatttcccacggatgcatcgccgctctcgtacagaacaacgttgccctcatttcctgtgacgccagccacatgcccaccggactgattttgcctttggatggcgggaatacccaagccgaacgattccgataccagatagaagcgtcgctgcccttgaaaaaacagctttggcaacaaaccatccagcagaaaatctacaatcaggcgcgtgtgctggaaaagttagggatagcatcgggcaacatgtaccgctggtcgaagtctgtcaaatccggtgatcctgataactatgaaggccgtgcggctgcgtattattggcaaaatatctttagcgaatacctcgaattcagccggaataggggtggagagccacccaataatttactgaactacggttatgccattttacgggctattgtcgcgcgcagcctggtgtcttccgggttactgccgacattggggatattccacaggaataagtataatgcctattgcctggcagatgatattatggagccttatcgtccgtttgtagacttaatcgtctatgatatcgtcgccaatggaggtgattttcaggggttggatactgtgctgaaaaccaagctactgcaactgccacaggtggatgtgcgttttgacgatatgaccagcccgttgctggtaggtgcatcgcggacgactgcttcattggccaggtgtttcgaaggcatatcccgtaaaatcaattatccgtctgtatagagtaaagtggaccgtttaaatcagtatcgtgttttgtggatattagtcttttttgatttgcctacggaaacaaaaaaagaacgggcggcccatgctcggttccgcaaagacattatgcaggatggcttcacgatgtttcagttttccatttacctgaggcattgcaatagtcgtgaaaacgcggatgtacatattaaacgggtgaaacgcttattgcctgaaaaaggtcatgtcggcatattgacaatcacagacaagcagtttggtgatatcgaattgtttgtgggtaaggaaatgggaaaacgaccggatacgccgcaacaacttgagctattctgagaaaacctttttaaagttctctttttgtgaacttgtttgctatctttgtatattattacatgcgtgtacatttaataaaacgacagactattgagcaattcgctatcatgcatgccagaagtagtgtttcattaagggattggttgggaaagatcaaatacgcggattgggagtcgccgatggatataaaacatacgttcaatagtgcagacctgttaggtaacggtagtaatagggtggtatttgatgttggtggtaataattatagattaatttgtaagtatgtttttggtgcaacacaaatacacctatttatatgctggataggcacacacgccgaatatgataagctatgtgcatcaggtacacagtatatagtaaacgattattaagattatggcaacattaaaatatagcgtcatcaaagacaaagcacaatacgacacctattgtaaagaattggagacgttgcttgagggtgatcctgtcaattacgaggaagtggagttgcttactttattgattgaacattacgataccacaaataatagtttcaaggaaatggatcctatcgaactattgaaatcgctcatgaaagatcacgacatgcgacccaaggatttggtcaattatttgggtattagcaaaggatatatttcagatatcttgaattataaaaaagggctttctaaagaagttatccgtaagttggccagccgatttaatctgtcccaagaggcattcaacaggccctacaaactccacgttccagagaatcggcattttagaaatgctagtatgatgaattttccaaaagaaatccatccgtcgttggtataatagaaaaagttttccacatattcgttttgtaacagagcagcagccaagggttagaaataggataaggaaaaataacaaatcaataaaaaatccaagctattttggcttggattttttatttctaatttttgagttaatccactgattcacattgaaatacttgatggtacgctgtgcctaatatcagtaaatcaaagaatgaaagcaaatcacaaccgaaatgtacaatgaaaaaaacattgtctcgctgtgcctaatatcagtaaatcaaagaatgaaagcaaatcacaacaggaagctacggtgcttggcgctcggtctggctgtgcctaatatcagtaaatcaaagaatgaaagcaaatcacaactaccgatgcgcttggttgcgccagtcgtcgctgtgcctaatatcagtaaatcaaagaatgaaagcaaatcacaacgacctacataattatcaccactgaaattaagctgtgcctaatatcagtaaatcaaagaatgaaagcaaatcacaaccgaaatggactactacaaaaacattgataagctgtgcctaatatcagtaaatcaaagaatgaaagcaaatcacaaccaagtccgtgcgcttcaaggcacttcgggggctgtgcctaattgaatattccggggaaagtacaccacccgttccggatgaaagtacaccagtgaagaggccaataatctgcgcagctgcgccactgggttttcaaagttagtgattttttttcttcctcatagacttgccctgaaggggtagcctatgtgccgatgctgtcaatctgtccattatcgcgtcggccagtgtaggttcatcgataaagttgtaccacgcctccaccggtaactgcgaagtgataatcaccgaactgttgccatatcggtcttccagtatatccaatagtgccagcctggcgtctgcatcgatcgccttcagtccgaagtcatcgagtataagtaatctgtggttggatatggctttgatccacttaaggtatgtaccgtcgagcctggtctgggagaccgtatccatgaaacggttcatgctgaaatacaatgtgcggtatcccagcaggcatgccgatcgtcccagggcacaggccaggaagcttttgccggatccggtagccccggtgatcagtacattgtcaccccgcccgataaaggccccatccgataagcggagcacctgttcgcgcgtgatccctctttccgggttgcagacaatctcttcgggcagggcgttgtagcgcagccggcttgccttcaggtatttctgcgtcctggtgtggtcgcggtattccacctcggcctgcaccatggatgccaatagttcatgtacgttctgtacttcgtgcacgggtagtgcactcaccgcttcgtaacgtctggccatcccggccagacggagcgttcttagctgttcgattgtctgatctgtattcatttctgtccaatggttttatattatttgtattctccggcaccgcggatattatcatgcaggggtatggtgtattgtttgggtgcttcctttttttcgagcaggtccatattgttgtccagtatgtttttgatggccgtataattgaaccgctgtcctttgagcgctctcttgcaggcaccttcaatgcgctcgggatagccggttgccaggcgcatgagtccccggcaggcctggtaggactggtcgatgataagcttactgtccatgacccgctggaagtactcccgagtagcagggccatatgtttccgctttgctcaggtaataatcagggttccatgccaggcgctcgcgcatgtgccggtggttttccgggagatgttccctgtcggtcgtataaccgtgcttcttatagctgcgtctgtgcagggcaatacg

SEQ ID NO: 2328 - DNA, 18762 bp, synthetic construct
  misc_feature 1..18762: note = Synthetic
  source 1..18762: mol_type = other DNA
ctgttttaggagtagggttttcataccaggtactactgctgtaaccgacaactttaaagatcaaacgctttggataaggtttcccggttagcggataactttcctttatcaaaatagaaatcatttcctttttagctttgctgccaattcgttctttttttttgtgagttcaagttccatctgcaattgcccgatcttgcgctcggcagcattgagctttgaatcatcaggtttacgcttaaacccgtcagtaccactctcgataaattgatcccgccaaagattaatatcggccagagtaactccgtattcacggctaatcagctcaggatcctctccacgtaacaaggataaaactatttcaaccttgatttttgatgtaatattctttctcttttccatagcagttgtaaaaataacttttatttttcactgctcggtttatttgagggctaatataaatttagttttgattgcctttaggctcccaccatgatccaatggctctatattggaaagtttcggcaaattgctgtttgaaatatctttccaacatgatacctgaataagttggatagtcggatttgatgattgcttgcagaccgacaaagttctttatctctattagtgaccgatggcggtcgaaatagttgaaccaaaatcgaataaaattatcttgtatttcataccgtacagattggcttccttcttttgctaatatgggccgttggcgaacaataatattgtaatcttcaatcaatcgttttatttgaccacctatacttttatttcctaaagcagtttctatttcaggttgagtattgataccacccgaaatggcactaggatggaaaaataggttgcataatttttaccgaactcttctatcaacaagtttttcccttcatcagtaaagggagagttatctcgaaccattaacgaaatcatttcatcaatgctcaatgtgatattgtcacagaataattcaacatacttgggaactccacccgtaaaagtataaagggctagcaaatcgtcattggtataattgggattattgtcacgcataatttctttcagcgtagtcaaatcaaatgccgataacttgatgatattatctgctctgccaaatagaggttctttattattctggaatattttctgcattaacgaataaacagaacccgacacaatcaaattcattttagatttcttgcggtaagtatcccagatgttttgcatatcgctatacaccgattcattgatgttatagaactcctgaaattcatcaataaccaaattgaacggttttagcaaagccaactccattaaatattgaaacaacgatctaaaagtgcgtatttccgcaggaacaaaggtatcgagtgattgacttataataggaatatattcagaacaaagtgttgcttcgctcttgcgaccaacaaacaaataaaccgtcggtaaatcctcaaccgatttcataataagacttgttttaccaattctccttcttccggttactactgtaattcattagacagatttaaaggaaagttaaaatattttttactagcatttttagtttttcaagccgcatttgcataagtagcaagagtattacgaaaatttcggtacaactgactataatttcttctactatatcaattttgctaactcccatgcctgaacattttaattccctgattagaagaatgttttatatcatcaaagggacacgactattttttcgtaattatcctgaattgattctaaaggagcgtattctaggcgggtggtatgctcatctataaggatatatgctacttgtaaatatatcagtcttataccttttttagcaacaaaatcaacttctttatctctcatcgctctgacataaatatcataacctgtcgtgcgaagttcgagatagacaagattctctaatttgtattgtaaacatacagtgaaccgcattccaacaagaattttacattcttagcggttcgtagtttttcaatcttcatatctctcaaagattgtgttaatagtatttgtcaatgccaccaaaacctgaaataagtttgttgtctctggtttttttaataaagttattcagtcgtttggtaaattcttctggtcgttttcttgcttcttcaatgtatgcaattcgtattcgtttgtaagagtctgaaaaatctttataattattccaaactgttttgtctttttttatttcatctaatatgtccaaaggaaaaacatacttttttgaaataatttcttgagctgttttaagaaatgattgatgaattagattgttttcgactaaccatttcagtcgttctttattaggttgtgaatatctgcttttggcttgtcggggagtaaatcgctgaattgtgtgatctttgtcaagagttttatttgtgctgtctatccagccgaaacataatgcttcttcaactgcatcattgtattgaattcgttcttccccagtcgactttttagcatataccagccaaacttcgttctcaatattataattctgctgaagccaatttctccattcagttcttgtttttatgttaagtatcttgtcagttatcaatttatctcatttataaagtaattcatataaatcaatctttatgattgttgtggaaatttagtcatatccatatagaaaatctcccaagtatgtccgtcaagatcttcaatggttctctgttgcataaagccataatctttgaattcgcttgcttctattccacctgcatttagtcctttagtcattatattattcacttcgtcaacgctgtcaaccgataatgaaaaaagtcctgctaaatttgatttggtgtcagctattggttttgttgcaaacgagctaaatttttcgtgtgttaatatcattacaaaaatattttcactccaaaccatacattttccagtgtcatctgaaaattgtggattatttgtaaatcctaaagcagtgtaaaagtccattgatttttgaaggtcttttactgctaaattgataaatatttgttttgccattttattattttttagtgattatttattcgtccgggatattaggttctaccaaacgtattaatttgtctaatgaatcttgccaacctaaatagcacatttcaacaggtattatatcgggtattccttcctgtgtaatgaatagttctgtaccacatgtaacctttttaaattcaactgttgttatcatttgtcccggcatatttgggtcgtcaaattggtcgttatattttagtagtacattaggaataatttccaaatattcgccaccaaacgagtttccattacctgtagtaaaattagtaaacgtcattttgtatgttccaccaacttttacattcatactatgaactttacatacaaatccataaggtggcaaccaagaagccattgaatcgggatctgtgaatgctttaaatactttttccacaggtgctgctaaaacccggtgcagatttactttgttatttgccatattgctacttttatgttataaatgaataaactaaattctacattaatgtaacaaatatgacaatcaagagttcaactttttaatattccaccttttggagtatttctggaacatttctgttttccctgctataatttactttttttgagatgttgtatgcatgtatataagattttgaaagttatcacaaaaatcagataattcggaaacacgaaaatttgttgattcttgtcggtctatacaaatatttagaatatctttaatttttatttgaaatataatttagatcaaaatgaagcacaaatttttaattctttcattattatccttactatgtattcaaaaattatcatcaagtgatgatgtgaatgctatgcaattaatacctgccccaaaaaaggttgtttggaataatgaaagatttaatctaaataaatgtaaggaaatatacttatcagattcaacacttcttactgaattgaaggtatcactcaacgataatattgaaggaaaaaagataaaagtcaaatcctcatcacttccaaaaaagaactatatactgataatgattgacgctgtatctgcaccattttattttgatgaagcatacgagctaaaagtgaaaaataataaaatcgttctgaaagccaatacaaaaaacggaatatttaatggactacaaacactttcgcagcttatagataaggaccaagttacgggttgcgaaatccttgattaccctgcatttaagtggagaggatttatggcagatgtaggcagaaattatcaatcagttgagcaaattaaagaacagattgatgtgatggcgaaatataaaatgaatattttccattttcatgccactgaaaacgaagcatggagatttgaaatagaacaataccctcagcttacatctgcggaaagtatgaccagaaacagaggaaaattctattcgactgaagaaattaaagatttaataaaatattgtgccgatagatatatatcctttgttcctgagcttgatatgcccgggcatagtgctgcttttacacgtgcaatgggatttgatatgcagtctgaggaaggactgaaagctataactaatctcttaactgaggtttgtttaacttatccggaattaaaatattttcatattggtgctgacgaagtgaaagttaccaatgagtattttatccctacggttgaaaagacactgaaaaatttcgggaaaaaagttatttcatggaatccaagtgtaagtaaaagtaaagacaatatccaacaattatggaaattagtggatcttaaacctcagtcgcaatacatcgattcacgttatttatacattagtgaccttgaatctcaaagttccgtagcaggtgtatttaacagggaatttatggatagtaaacatggagataaccaaaaacttggagctgaaatgtgcatgtggaacgaccgtattgttggggatcagaaagagttggtatcgattaattctgtatatcctcttatgctgacctttgcggaaagaagctgggcaggcggtgatggtacagaaggatataattatttcataggaaatgaaggttctacgcaggctgataatttcgttgaattcgaaaaacgactgttaacacataaagaaagatattttaaagataaacctttttcttacgttaaacagactcatattaaatggaaattattcggtccctaccccaacaatggcgagctgacccgatcattacttcctgaaaatgaaggtattgagtcagcaaacttaagtggagacataaaagccacaggaggaactctttggttgtggcacacctggttcgcggaggataatgtaaaggcatggctgcccaatccagaggaaaacacaacctggtatgcttgcaccagattttggagtgataaagatatggtgatgagtttttggatcgactttaaaaatcagtcaagatcgggtgcagatgccactcctccagcaggagaatgggattataataagagcaaaatttggttaaacggtagattgattgatccaccgacatggaaatttccgggaagaccgtcgggtttattaaatgaaccacttgttgatgaatcctatttatttagggagcctcatagattgcaggtaaaaaaaggatggaataaggtgttggttaaattgccggtaggtttatgggacccaaataaagactggcaagtccctcctaaatatatgttcacatttataccaattgaaaaagattatgaaggtgtcaattataaatcattagatttggaatttaatccataagtgcaattgaacagcttaataaaaaagaatgcacaaaaaactgaattaacatttcaatattgcaccttttggagtatttctggaacatttctgctttcccggctaaaatttgctttatttgagatggtgtatgcatccatgaaattttggttgtatggttccattagctgttcgatattttctttttttagtgagggatcattccattgttcaatatctttctcagatataatcaagggcattctatgtttattttgtccagaattatgaatctcggtcatcattgggtttgacggaactgtgataatagaaaatgtatttatgatttctcctgtttcatgattattccacttatcatacagacatccaaaatagaataacggtgattcttttggaaaaatgaaatgtggaatcttttccttgtttacttctttccactcaaaaaaaccattaacgggaaggatacatctctgtgttttaattgctgatcggtacgatggtttttcgaatatggtttcggaacgagcatttagtgtcatggaacggatattattggcatcttcgtctgtttttgtccaaaacggtatcaatccccaatgatacatatctacttcattttctttcaatatggctaatccgggatactgaaatcctgacacaaagaaattatcctgcatctgatccaactggatcttgatctgataatcgccatttaacagattggcatcttttataaaaattaccaatcccttcttttgttgtgaaactgtaaagcacatatttttacatatttactttgtgatgcaaatatatattaggatggagataattctttgtttatttggaaaattaactattgaggtgtgattgagaaatgttgtggcatgaagtaaaaaagcaaaatttctaattacttgtatatcgagttttctgtattagtttacaaatcgtaaaatatataaataaaaatgccccctgattgtggacaagaggctacccaaatgttttcacaacggaataatccttattgtgattagcttcaaaagtccgtaaatatattaatttatttttattaaaacaaatgtttttttatttattattatttttttaactttacggtattaatattaaatactgagaaatgaagaaaatacttggcctggatctgggcacaaacagcattggttgggcatatgttaatgaagcagaagaccttgacgaaaaatcctctattattaaactgggagttagaaccattagttttgataattttgttagtactgattctggaaaagaatcaagaattccggaaaatgatttcagaagtgggaaaggaatttcacctaatgccggtagaacatttaaacgaagtgcaagaagaaatcttcaacgttataaattacgtcgtgaaaatctcatagatgttctaaaagaatataaattcattaatgaagaaacaattctttcagaaaatggtaatagaactacttttgaaacatataaattaagagctaatgctgtaacaaaagaaatctctttagaagaattgtcaagagttctattaatgataaataaaaaacgaggttataaaagtagcagaaaagcagattcaaaagatgaaggtcaaattattgatggaatggatattgctaaatatatgtatgagtacaatcttacaccaggacaatattcttatcaattattacaaaacggcaaaaacagaattcctgatttttatagatctgatttacagtctgaatttgataaagtatggaataatcaaaaacaacattacgctgaaattctttcagatcaactaaaagaagaacttaagggaaaaaacaaaactcaaacatgggctatttgttcaaaaccttttgggattgttggaattaaaagaacaactaaaggatctgaacttagaaaagaaaattttgaatggcgcgttaaagcactttctgaacaattaaatttagaacaattagccatagttttacaagaaataaacgctcaattaagtaattcaagtggttatttaggagctattggagatagaagtaaagaactgtattttaacaaattgacagttggtcaatatttaatggatctaattgaaaacaatccaaatgaaagtttaaaaaacaaggtattttatcgtcaagattatttagatgaatttaatacaatatgggaaacacagtcaaaattccataaagaattaacacctgaactgaaacaaacaattagagatatcataattttctatcagcgtccacttaaatcacaaaagggattaatttctttttgtgaatttgagagtaaacaaattgagaaaataattgatggtaaaaacaaaactatcacaattggtcatagagtttgtcctaagtcctctcccctattccaggaatttaaagtttggcaaatattaaataatctggaagttagtaataaaaagaccagagagaaaagatttcttgagcaagaagagaaagatactttattttttgaattatcaatcaaagataagattactaagccaaaagcattaaaacttttatttgagaactataaagatttagatttaaattacaaagaaatagaaggaaacaagacacaagctgctttatttaaagcatatcagtcaattattgagcaaacaggaaatggagaatataactttgacgaattgaattcatctaaaattctcgatatagtaactaatattttcagtggtcttaattataatacagatattttgaattttaattcaaatcttgaaggggcagattttcaaaaacagccaatatataaattgtggcatctgctttattcttatgaaggtgataattcgaaaactggtgatgaaaaactaataattaaaatatcagagctttttggatttgaaaaagaatattccactattttagcaaacgtgaattttcaacctgattatggaagtttaagcacaaaagcaataagaaaaattcttccatatctcaaagaagggaataagtatagtttagcatgtgaatatgctggttatcgacattccaaaaattcattgacaaaagaagaaattgaaagtaaagtcttaaaagacagacttgaaattttacctaaaaacagtctgcgaaatcctgtagttgaaaaaatactcaaccagatgatcaacgttgtaaatacagcaattgattcttttggcaagcctgatgaaattagaatcgagttagcaagagagctaaagaaaagcgctaaagaacgtgctcaaatgactgaagcaattggtaaaacgactgctgaacacgaaaaatacagagatattttaaaaaaagaatttggattgaccaatgtcagcagaaatgatatcactcgttataaactatatttagagctaaaagataatgggtttaaaacactttactcagatacttatattccacaagaaaaactttttagcaaagaatttgatatagaacatattattcctcaagcaaaactatttgacgactctttttccaacaaaactctggaatccagaaatattaacatagaaaaggataaatcaactgcttttgatttcgtttcaataaaatatggagaaacaggtttaagctattatttaaatcgaattgaattattgtttaagaacggagttattagcagagctaagtacaataaattaaaaatgaaagaagaagacattccttcagatttcataaacagagatttaagcgagacgcaatatattgctaagaaagctaaggatttattaaatgaaattgtccgcaatattgtttccacaactggttctgttactgatcgtttacgagaagactggcagttaattgatgtaatgcaggaattaaactggaataaatataacgagctcggattaactgaaatatttgaagataaagatggtagaagaataagaagaattattgattggacaaaaagaaatgatcatcgccaccatgcaatggatgctttgacaatcgcttttacaaaaccctcattcattcaataccttaacaacttgaatgcaagaagcgataaatcaggcagtatatatggaatagaaaaaaatgaactttatagaaatcaagacggtaatctaaaatttaaaccaccaatgccattggatgaattcagatcaaatgctaaagaacaattacaaaatattttgatttctactaaggcaaggaataaagtagtcacaaataatgtgaattgtattaagaaaaaaattggaacaaataaagtaattcagtcaactccgcgtgggcaattgcataatgaaacaatctatggttcaattaaacaatatgaaacaaaagaaataaaggttggtagtatttttacttctgacttgatttctacagttgcaaataaaaaatatagagaagcattagaaaaaagactaattgagaatgataatgatgcaaaaaaagcatttaccggaaagaacagtttagaaaaaaatcctatttatttggatgatcttcatactcttcaagttccttcaaaagtgaaagttgtttcattaaatactatttatactgttagaaaggaagtcaatagcgatttaaatattgataaggttattgatgttaaaataaaaaagattctgaaagaaagattagaagaatttggtaatgatcctaagaaagcattttcaaacttaactgaaaatccaatatggctaaataaagaaaaaggtatttcaattaaaagagtaacaatttcagccataagtaatgctgtatcattgcatgataagactaataaagatggcattcttattttgaatgaccataatgcaaaaattcctgttgattttgttagtacaagtaacaatcatcatgctgctatctttagagataaaaatggaaatttacaagataacgtcatttcattctacgaagcagttgaacgtgttaatcaagatcttccaattattgataagacctacaatcaagaagaaggatggatatttctttataccattaaacaaaatgaattctttgtttttccaaataatcaaacaggttttaatcctaatgaattagacttattgaatcctgataattatgcgttaataagccctaatttatttagagtgcaaaaattttcaaaagtcacttatggaacttcttctgtaagagattatgtattcagaaatcatctagaaacgaccatcactgataaaaaagaattaagagatgtcacatatatccaattgaaaagtttagttggattagaaaatgttgttaaagtaagaataaaccatattggtgagatagtttcaattggagaatattaattacagattatgataaaacgaactctctattttggcaatccgacatatctgtctttgaaaaaggaacagttagtcattcaattcccagaggtagaaaaaaatgatcaattatctgaaagatttaaagaagaagttattaaaactattcctatagaagacatcggtgtaatagtattagatcataaacagataactttaactcagggattaatagaaaaaatacttgaaaacaattgcgctttaataacatgcgacagcaatcgtatgcccttaggattaatgctcccattaagtggaaacacgactcaaactgaacgatttagtgaacaaataaatgcatctttaccacttaaaaaacaattatggcaacaaacagttgaagcaaaaattaaaaaccaggcatatctacttgaaaaaacgacaggttgtattgtaaaaaacatgatggtttgggcaggagatgtaaaaagtggagatgctgataattacgaagcaagagctgctgtttattattgggcaaatatttttcctgatataaaagattttaatcgaaatagagaaggcattccaccaaacaacttattaaattatggttatgcaatactgagagcgattgttgcacgttcattggttattagcggtttattacctacatttggaattcaccatcgcaacaaatacaatgcctattgtttagccgatgatataatggaaccttaccgcccatttgttgataaaaaggtaattgaaactatgaggatgtataatgatatatcaattttgaacagagcaatcaaagcagaacttttgaacattccagttttggatgtaatgattaataatcaaagaagtccattaatggttgctattagtcaaacaacagcatcactgtatcaatgctttagtgggaaaactagaagaattaaatatccatcattcgattaatgaatatgctgcaaattaaatgcaacgttttagtgaatatagagttatgtgggtttttgtattatttgacttacccactgaaacaaaaaaggaccgtaaaatttatacaacttttcgtgacaaattaataaaagacggttttacaatgtttcagttttcaatttatttgcgacattgtgccagtcgcgaaaatgctgaaattcatatacagcgtgttaaaaaaaacttaccaaaaaaaggaaatgttggcatcctctgcattactgacaaacaattcggaaatatggaattgtttattggcagcaaagaggaagtaataaaaacaccttatcaacaattagaattattttagcaaaaagaatcctgccgaatgagcaggattcttttataaaacaacctcattttttattttctaatttagcttgtaaatcattgataatctagcaagatacgcatatccagttgtttctaataccaaagataagaacttttgaaagctaatcacaacactaaggctattacaacttgttcgtaatctgttgtttctaataccaaagataagaacttttgaaagctaatcacaacaacgccgtctgcactgcagttgaaatagggttgtttctaataccaaagataagaacttttgaaagctaatcacaactatactggtagcgtaaagattttatttatgttgtttctaataccaaagataagaacttttgaaagctaatcacaacttgcaaaacaccacatttcagcaggaaacagttgtttctaataccaaagataagaacttttgaaagctaatcacaactaatgctatggagaacaaaaacagaacaatgttgtttctaataccaaagataagaacttttgaaagctaatcacaaccagcttcatatctgaaatatcacctacattgttgtttctaataccaaagataagaacttttgaaagctaatcacaacagtaacaaatgagcctaatgatgatacagtgttgtttctaataccaaagataagaacttttgaaagctaatcacaactgctggatggcattacttcaacgcttataagttgtttctaataccaaagataagaacttttgaaagctaatcacaacaatataccctcattgatagcctgaacatctgttgtttctaataccaaagataagaacttttgaaagctaatcacaacacaatacccattatataacacggttcatccgttgtttctaataccaaagataagaacttttgaaagctaatcacaaccctatccgataaggactattagctcccccagttgtttctaataccaaagataagaacttttgaaagctaatcacaacttgttccattaaggtgtcaccaccattgggttgtttctaataccaaagataagaacttttgaaagctaatcacaaccgcaagatattgaaaagttgcaaaaacagcgttgtttctaataccaaagataagaacttttgaaagctaatcacaaccatgagtttacgataaacatcagccggcagttgtttctaataccaaagataagaacttttgaaagctaatcacaactacaaaagtaacgaactttaaaaaatatgagttgtttctaataccaaagataagaacttttgaaagctaatcacaactttgaataacggattgtcgattaatgataagttgtttctaataccaaagataagaacttttgaaagctaatcacaacggtaaaactattttttcctcgaatacctgagttgtttctaataccaaagataagaacttttgaaagctaatcacaactcaagcttggaactttaccataacgcatttgttgtttctaataccaaagataagaacttttgaaagctaatcacaacgccacgcttccaaatcacgtatggagcagtgttgtttctaataccaaagataagaacttttgaaagctaatcacaactttaacgctatatgtatcggagcttgttaagttgtttctaataccaaagataagaacttttgaaagctaatcacaacttgatggagattattacgacgctgatataagttgtttctaataccaaagataagaacttttgaaagctaatcacaacaagcacattcccacaatactatactgaaaagttgtttctaataccaaagataagaacttttgaaagctaatcacaacaatcggtgccttgcacaggtcgactgtcgagttgtttctaataccaaagataagaacttttgaaagctaatcacaactttccatacatcgtaaatctcctcgaatgagttgtttctaataccaaagataagaacttttgaaagctaatcacaacatcctttaatgacaacaccaagtttgcttagttgtttctaataccaaagataagaacttttgaaagctaatcacaacaataagtctatatttgacgatttatttgagttgtttctaataccaaagataagaacttttgaaagctaatcacaacccgaaaacgagcgcaaaataaaaggttttggttgtttctaataccaaagataagaacttttgaaagctaatcacaactaatttttttatagaggatgaagagaaagagttgtttctaataccaaagataagaacttttgaaagctaatcacaacagttgatgcccaatttgtagaaccatcaccgttgtttctaataccaaagataagaacttttgaaagctaatcacaactttcagtgcaaggtgcaaagctccgcaatcgttgtttctaataccaaagataagaacttttgaaagctaatcacaacccgatgttcgcagagatctctatctgtctcgttgtttctaataccaaagataagaacttttgaaagctaatcacaactgtatcattgctatttgcaataattttttgttgtttctaataccaaagataagaacttttgaaagctaatcacaacccaatgtgcttttacctgttccggcttgtcgttgtttctaataccaaagataagaacttttgaaagctaatcacaactaattgtagtgtatgtgaaagaatattacagttgtttctaataccaaagataagaacttttgaaagctaatcacaacgcagataaaagacatatttctttgaactatgttgtttctaataccaaagataagaacttttgaaagctaatcacaacttcccaacatttcttatcctacctgtcgtgttgtttctaataccaaagataagaacttttgaaagctaatcacaactgataggatctataatacaaggagttacaggttgtttctaataccaaagataagaacttttgaaagctaatcacaacttatatatttagcgttatttggtgtggaaagttgtttctaataccaaagataagaacttttgaaagctaatcacaacttgaacctattactaccctgctattcatgagttgtttctaataccaaagataagaacttttgaaagctaatcacaacagttacaatgaactggttgagataatggaggttgtttctaataccaaagataagaacttttgaaagctaatcacaactcctatgatctgatatttgaacatccgcaagttgtttctaataccaaagataagaacttttgaaagctaatcacaacatgctgttgcatgggctgctgatgaagacagttgtttctaataccaaagataagaacttttgaaagctaatcacaacaaaacagcgctcacactgtcaaacatacaagttgtttctaataccaaagataagaacttttgaaagctaatcacaacatctttctgcgatgggtaagcaatatgccagttgtttctaataccaaagataagaacttttgaaagctaatcacaacacaccttgcgttgtaatgaaatttccctttgttgtttctaataccaaagataagaacttttgaaagctaatcacaacataacaggtggagaagatggtttacaggaggttgtttctaataccaaagataagaacttttgaaagctaatcacaacaccgagcacccatttacctgggaacaccctgttgtttctaataccaaagataagaacttttgaaagctaatcacaacgactggagatgcaccctcattgacccaaatgttgtttctaataccaaagataagaacttttaaaagctaatcacaactattttggatacaaatgccgagcatgggaagttgtttcgaataccaaagtagcgactgcattcttttaattgaaccattaagaatttcattttaaccctatcataacttttcttattatttatgttgtattataaacgctgcgctcaattctgttcaacagatagttgcgttccaattttcacaaatgttgcaactcagaatcgcacgatataaattctgtcgtcagatttaaaactatcaattctaagctggaaagtttgggctttctgatttgacgatttaaggtaatatttaactgatatgaattaaatattttttcctcattttaactgttttgttttctcttttaataattatttcataactttagagcagttttgtgtgaaacaggtgaatagatctaaattcaagaaaaatcgacataatgtgttatatataaattaactaagtctatatagattaaattcatgaatttaatgagcaatttacaatttaaactattacaattggaaggcggttggagcacaatatgaagtttatgttacttacgagagtccttttatatcttttcatctaacaagactgaatcaaaaagaatttgaccacttatcaataagcagttgaaggcgatacaaagcgtcagattatcataaaagtttaacttataattttttaataaaatgaaacattttcaatttttcttagtatttatttttacgttaccgtttttaaaagcacaagacggcaatatttgtgaatcaaaaggtttgtatggtgtatggaaaatgacagaaattcatactcctcaaggtgtacgcaaagtttcggggacatacaaaataataaaccctgacaatacgtattttacgttcctggctcccggaaacatgattgtggttgaaaatggagaatccaaagtgatttcattgaaatcgataataagtggatacggttcgttaactacaacttccgattcaacttatattgaacatgtgaaatctaacagttctcccggctatgccggaaacgatgtgccgataaggtataaaatgccggatgagaatacgttgattagtgaatattttgtggggaatatatggcatcccgaagttttcgaacgtgttttaccgataactgcccccagctccaatttattacaaaataaatgattgaacaacccaatatatttgtttatctaatttattttcactatcttgtaatgttttaaaaagtaagaaacccgtttttaaggttgcctaacaactttaaaacgagaatactttaatttgataccattatattagatatatgtttgtaaagcaatcttttagcgcataattacagatattttcatataaatggtcatcgatttaaaacaagtgatctttgacatattgaaaattgaaatattaatttaaaaacatcaaattaaaaggaaactaacggcatgttattgtataactcaagaagaatttaaacttaaaaaagtacttttgtaaaattataggaataaatacaatgttatattatgaatagttttgcagccattgattttgaaactgccaacgaataccgtacaagtgtttgcagcgtaggcattgtggttgttagagatagagaaattgttgatactttttacagtttaattcgtcccgaaccggaatattattcctactggaacactcgggtacatggaatcacgcaagccgatacagctaaagcttcgatttttccaaatgtgtggcaccagatagagccacttatacaggacttgccgttagtagctcacaataaaagcttcgacgaaagttgtttgaaagcttgtttcaggacttatcaaatggattatcccgattatgagtttttgtccaccttgaaaaatgcaagaaaattgctgaaaggactaccaaattatcaactacaaactgtttcggcttattgtggttttaatttgaataatcatcaccatgctcttgctgatgctgaggcatgtgctcaaatagcattacatatttttgaataaactttatattaaaaaatcagagggaattttcttcaaattccctctgattctctttattattaaattttgatacctagaatttatttcaattaatctccaatttaaataattacgagctaagcaaataataattacttagctaatcctacttgtttcataaatgattgattatcccaaaacagatattcttcgatcattttaccttctttccaatgtccaattgtagccatagaaagtttgaactttttgtttgtcggttgaatagttttaccatttccaattggcattggtttggtaaatgttccttccatatctccaataacacaagtccagtcaccacttccaaactttacaggatgacttgtaatttttggtaagcattcggtctactccgtcctaaattaacttttgatcctttatatatttg

SEQ ID NO: 2329 - DNA, 18513 bp, synthetic construct
  source 1..18513: mol_type = other DNA
  misc_feature 1..18513: note = Synthetic
gatttgccagggagtattggctctttgggccagctgggaacagtacaaccacatgaagccttggcatcggaaattatcagtggcttgtcaccggtgtttttgatttgtacagtggcaattgcttttccaccattctcaatggttcccaagtccacaatggattcgctgatttcaatttcctgagctgacatcagtacaactccgcctatcaaaaaagcggctgtaagtattaatttcttcattggattgtgtttttattaaacaaatttataaattaaaatttaatatagtgatttcaaaccttaaatttgcaaagattaaacaaaaataataccaaagaacaaagtaaaatggaagtagcgacaaagtacaagcccgggagtgttgaacaaaaatggtatgattactggttagacaaaggctattttttttctgtacccgaccacagaaaaccatacaccatcgtcatcccgccgcccaatgtaactggtgtgcttcatatgggacatatgctgaataacaccattcaggatgtgctgattcgccgggcaaggatgaagggcttcaatgcctgctgggtgccgggaaccgaccatgcttccattgctaccgaagccaaagttgtggccaaactcaaggacgaaggagtttctaaattcgaaattggaagggagaagttcctcgagcacgcctgggagtggacgcacaaacacggcggtgtcatccttgaacaactcaaaaaacttggctgttcatgtgattggaatcgtacaaaatttaccatggacgatgatttgtctgagtcggtgaccaaggtgtttgtggatttgtacaacaaaggtttgatctatagaggtcacagaatgatcaactgggatccagaagccaaaaccaatatttctgacgaagaagtcatctacaaagaacaacaaagcaaattgttctttcttaaatatttcatagaaaattcggatgattatatagtagtggcaaccacccgaccagaaacgatttttggagatacagcggtttgcatcaacccaaatgacgaaagatatgcacatttgaaaggaaaaaatgtgattgtacctatcgccaatcgggtggttcccgtgattgaggatgattatgtggatgctgaattcggaacgggttgcctgaaaattacgcctgctcatgacccaaatgactacgaaatagggcagcggcattcgcttgaaattatcaactccatcaatgaagatgcaacgatgaacgattttggattgcattacaaaggcatggacagattccaagtcagaaaactcattgaaaaagaactgaaagaaaaaggattgctcgaaaaaattgaaaattataacaacaaagtaggaacttccgaaagaacaggtgctgtaatcgagccaagactgtcggtgcagtggttcttgaaaatgaaagagattgcaaaacctgcacttgaaaatgtaatgaacgacaccattcagttccatcccgccaaattcaaaaacacatacaaacactggatggaaaatgtacacgattggaacatttcgcgtcaattgtggtggggacacagaattccagcctattattatggtgaaggagaatcggattttgtggtggctctcaacaaacaagaggcattgagaatcatagaaacagaaaaaaggattcatctgtcagaagaagatttgcgtcaggatgatgatgcgctggatacctggttctcttcttggctctggccgatttcggttttcaacggtatcaatgaaccagataacaaagaaatcaattattattatcctacacaggatttggtgacggcacccgaaatcatgtttttctgggtggcgaggatgatcattgcaggttatgaataccgcaatcaatatccgttcaaaaatgtatattttactggaattgtccgcgacaaacagggaagaaaaatgtccaaatcactggggaattctcccgatccaatccaactgatggaacaatatggcgcagacggcgttcgggtgggcatgcttctctcttcaccggcaggcaacgatttgccgtttgatgaagatttgtgtgtccaaggcagaaattttgccaacaaaatatggaacgcattccgactgatcaaaggttgggaagtggttgatgacttaaaaacccctgacgaaaataattttgcaatcaattggttcagcgtgaaattcaatgctgtattggaggaaaccgaacacaactattctaaatacagaatctctgatgtgttgatgtcggtttataaactgatttgggacgatttctgttcctggtacctcgaagcagtgaagcccggattcgggcagccggtggacaaaaatacataccaatctaccattgcccttctggaaaactgtctgaaaatccttcatccgttcatgcctttcctgaccgaagaaatctggcaaaacatccgtcagagaaatgacacagaagccttgattgtgaccaaatatcctgaattgaatgtgtacgcttccgatatactcgataaatttgatttttctgcaaatatcatatccggagttcgagccattcgcaacgaaaaaggaatttcacccaaggaaaagttggagctttatgcgacagatcctacaacagaaagtttcaacccaaaactcatagaaaaactcgccaatgttgttatccaaaattctgctgaacttcccgaaaaagcatttactttcagggtcggtacttcggaatttatgattcctgtcaatgaaagtgtagatttagaagccgaaaaacaaaaattagaaaaagaaaaagtatatctgaccggattcctgaattcggttcgcaagaaactatccaatcaaaaatttgtcagcggcgcacccgaggcggttgtcaatgcagaaagaaagaaagaatccgatgctttggaaaaaattgctttgattgatgaacagttgagaggactttgattctccaatgagtatcgcctataggaatattcatctatcgctgcacagttttataagttttttttgtgattcagccttgtgcaaaatcatggcataagcgcaaatccgcacacccgcaaacccgtacactactgcccaacaagacaattcatctaatacatgaaaagtagtttgcaggtatcaaaaactattatatctttgcattgacaaaaaagtaaaacatatttgtttaataaaaaagttaagccatcatgacaaatccaaacgatgacctcaaaacagaggagttgattaaaaggacggccaagaaactgttttttgagcaaggcaaatttaatgcaacaacacaagagattgcagatgcagccggcgtgaatcgtacgctaattaattattacttcagatccagagacaatcttttcaatctgatttttgaagatgctgtacgaagcgaagaaaaactgagagaatcggttttgttttctgaactgccattcaggcaaaagctggaagcctacttggacgaatccatccgtcaggcgattgaatacccatacctgaaaacctatatcgtttccaaaatcaatgaaggcatcttttatcatgaaaaaaagaacctgaatcatttttttgaaagattttatacagaattcacagaggaagtcaaaaagggaaatattgaagagatggaaccgattcagtttgtgttgaatgtggtttctttggtgtctttcccattggccatgcgaccgcttctccaatcgagtattcagatctcagatgaagaatatgaccgaatcatcagcgaaagaaaaaaaatcatcatcaaactactgtttaaaaactaaacaatgaaaatccaattcagcacattcctaattatttttttgactgcaaatctcaatgcccagtctatcacagaaattacactcaaagacgcaattgcatatgcactcgaaaataaatccgatgccaaaaaagcacaattacaaatcgaaaacagtgaataccaaatacaggaggcaagggcaggagcttttccggccatcaatgcctacggtggactaacttacaatccaatcctacagcaaaccgccatccctacaagtagcttcccgggtggagaagacatgaccgacccttttattctgctggccatgggacaaaaatggaattcagtcatgggcataaccctcaaccagaatttgtttgaccaaacggttttcaccggtttgaaggcagccaaaaccacacgcgaattctaccgaatcaatgcacaactcaccgaagaacaaatcatagaaagagtggcaaccgcttattacaatgtttttgtgcaaaaggaacaactcatcaccattgaacaaagcattgacaatgtcagccgcacaagagacatcatcaaaagtcttttcgaaaacggactggcacgagaaattgatttggacagaatcaatgtacaacttaccaacctgaattcatcacgacagcaactcatcaatgcagtctcgctgacagaaaatgcactcaaattctatatgggcatgcccatcagccaaacgataaaattgcaggaaaacgatgttcaggtagaacagctcctcatacccgattctaccaatgcggaagacagaacagaattcaaagtactcaaaaaacaagaacaactgctggaattacaaaaagaagcttataaatccaatttttaccccaaactgactttgtctgcttcctacaattatatggggcaaggggaaagatttccgataggtgcaaatctcagcaaaggcgtgtattggtctgatttttcatccattgggttgaatttgtccatcccggttttcaatggtttctccatcaaagcaaaagtgagtcaggctgacattcaactcagaacgatacagtctgaattagaagaaacaaaactcgcactggacctggagtacaacaacgccaaatccagaattgaaaattcatacatcgcaattgaaaaccaacaagaaaatgttgaacttgcccaaaaagttgtggacaataccgaaaataattacaaactcggactggcaggtctgaccgatttgattgaatcacaaaatgctctggtgagcgcaaaaaacaactattccaatgcagtcttggaattcaaactggctgaaatacaattactaaaatcaaaaggagaattagcttcattaaaataatctgaaaaaatgaaaacaataaaatcaattgcaatcgcaatcctcgtcatcggtctgattgtactggctggattcaaacttgtgagcaacaaaaagaaatccgaggaagaaacccgaaccgtggccaaatccaatgacagcatttcggtcaatgtgtccaaagtcgaatttcggaatatcaatacaacatacatggtcaacggaacctttgagcccgcacaggaaatcgatttcccttcagaaacttcaggaaaagttctcagtgtaatggtggacgaaggcagttttgtcggtgtcggacaaacactggcaatcatcagagcagaccaacaatccattgacctaacagccgcagaggcagcttatcagaatgcgctgaccgacaatgaaagatatgaaaatgcattcaaaaccggtggagtaacacagcaacaggtggacatgtccagattgcaactcaaaaatgcaaaagcacaactcgatcaagccaaaatcagggtcggagatacccgcgtcaaagccactataagtggcatcgtgaaccaacgaatggtcgaacccggttcctatgtttctccgggaacagtcatgtttgaaatcgtagatgtctccagcctgaaactaagagtggaagtggacgaaaatcatgtggtcaattacaaagtaggtgacatcatcaaagtcagagcaagtgtttatccagacaaggaattcgccggaaaaatcaccttcattgcgcccaaagctggcccatcactcaattttccgatggacattaccgttacaaacaacactgccaacaatctgaaagccggaatgtacggtaccgcagttttctcctcagaggaagatgaaacccaaaaccaacaaatactgacgctgagccgcaatgccttcgtcggtggactgagtgccggagaagtttttctcatcaaagacggtaaagcgcaattgaccaaaatagtcagcggaagaaattttggtgattgggtagaagttctcgaaggcttgaaagaaggagataccgtagtcacagccggacaaatcaacctgagcgaaggcgctgtggtcaaaataattgaccgcaattgaaccggatgatgaacaattcctcaaaaattaaaaaacaatgaatttacccgaaatatcaattaaaagaccgaccctaatcgccgtactttttataattcttacccttggcggattgttttcatacacccagttaggctatgaacttattccaaaatttgaagtgaatgtggtcacgattacaacggtttatccaggtgcttcgccttctgaaattgaaaacacagtcaccaaaaaagtagaggacgcggtttcatcgctcgaaaatataaaaaaaatagaatccaaatcctacgagagcctttcgctggtcatggtacaactcaattcaggtacagacaccgatctggcactcaatgacgcacaacggaaagtgaatgcgattctgaaagacctacccgaagatgcagacccgccttcactggtcaaattttcgcttgacgatctgccggtggtcaccattgcagccactgccaacatgaacgaaacagattttttcgatttgttggatgacaaaattcaacccgtgctttcaagagtccccggtgtggcacaggtgaaccttatcggcggaagggaaaaagaaattcaggtcaatctccaccaagacaaactggaagcttatggactctcggcactgcaaattgtccaaatcgtcaaatcttctaacctcgattttccaaccggtagcctgaaaacccgtgacaatgctacactgattcgactttcaggaaaatacagtacagtggaagaactcagaaacctggtagtaagcgatcaaaacagtgcgcaaatcagattgggcgatgtggccgatgttcaggacacacaaaaggacgccgacaaactcgcaagactcaatcaacaagaggcaattttgattcaggtcatgaaacaatccgatgccaatgcggtggcagtgagcgagggaattgcggcttcggtacaaaaaattactgaagattataaaaattatgaactcaagctcaacattgctaacgacacttctgaattcaccttggtcgcagccgagcatgtgatgtttgaccttttcttggcaatatttctggtggccttggtgatgctactatttttacacagtctcagggatgcattcatcgtaatggtatccatacctgcctcgttgattgcaactttcattggaatatacttcatgggttataccctcaacctaatgagtctcgtggcgctttctctggtggtaggtattctggtggacgatgccatcgtggtcattgaaaacatacaccgtcacctggaaatgggcaaaaacaaattcagggcggcctatgacggtgcaaccgaaattggatttacggtctttgcgattactctggtcatcattgtggtatttctgcccatttcaatgagcaatgatttggtgtctaacatcatcaaagaattttgtgtcaccgtgatgatagcaaccggattctcgttgctcgcctcttttacaattgttccttggttggcttccagatatggaaaattacacaaactgaccggaaaaacagtcacagaaagattcatactcggattcgaaaaacaactcgaccactttacccattggatttctaggctgctcaaatggtgtctgaaaaaccgaaggacaaaactgacttctcttgccattgccgtgttgttgttctttggctcattttcacttgttggcatgggattcatcggcttcgaattctttccaaaactcgacaaaaacgaatttatggtacaggtagaactgccaaaggatgcttcactcgaacagaccaattttgcaattcaaaaagccgaaaaattcttgagagaaaaacctgaagtggtagatttgattaccaccgttggtcaagtcagctctggatttggtgccagccaatccacctcttatcaaggagagatagacgtaatactcattgacaaaaccgaaaggaaagacaatacatttgtgtacgctgccaaagtaaaaagagaactcgaatcctttttggtcaatgcaaaagtgagtacaacacccgtgggaatgatgggtgcggagcgtgcaccactgcagctggatgttgtggggcctgacttggaaagtatcatgaaattcgccaaacaaacagaagaaattctcaagcagattccaggtgctaccgaaattgaactctcggtcgaagaaggaaatccagaaattgaggtcaaagtggaccgagacaaaatgtcggcactgggattggatttgtccaccgtcggattgagcatgcaaaccgcatacagcggaaataccgacgccaaattcagacaaggcgaaagcgaatacgacatcaacatccgttacgacgagttcgaccgctcagatgctgaaaatatcagaaacctgatattggtgaacaaacgaggagagaaaatcaaactgtcacaatttgcggaagttaccgaatcctccggtccaagcgtgttggaaagaagagacaagtcaccatcggtcagcgtattggcccaggtggtcggtcgccctgtgggtacagtggccaatgaatgggaagaccgttttggtcagttggagagacccactggcgtcaattatgtctggggcggagacatggaaatgcagggagacggattcaataccttgggcatcgccctgattgcggccattattttggtgtatctggtcatggtggctttgtacaacaactttgtgtacccttttgtgattctgttttcgattccccttgcactcattggggtattgattatactggcactcaccaacaactccatcaatatttttaccattttgggtatgatcatgctcattggactggtggccaagaatgcgattttactcgttgatttcgccaaccacagcaaggagcgaggagcttctacatttgatgcacttatcgatgccaaccatgcccgactccgaccgatattgatgaccaccattgcaatggttttcgggatgctcccgattgctacggcaaccggagctgcggccgaaatgaacaacggcttggcactggtaatcatcggcggattgctttcctctttgttcttgacgctcatcattgttcctgtggtttattcgatttttgacagcctgatagcccgcttcggaaagtccaaaaaaattgacatagaagccgaaatgaaagcagactttcagccttctgacaatgcttattaaaaattgaacctaaacatataaaaccgggtacttatctaaactgcccggttttttatttcagtttgatgcctatgatgttcgaacacccaagtgtcttggttcatttgatttttaatcgaaaccgtggaatcgaagattcggcaaagctaaacatttgggtataaaaaaacctcctgattatggacaagaggtaacccaaatgttttagctcgtggaaggttgatttttttaaggaactcgtgaaacatttacaaataaaaacgaggcaaactttcgagtgccccgtagtaaagttttagctcatcaataatgcttttaaaaagtattcgctgaaacatttgggtataaaaaaacctcctgattatggacaagaggtaacccaaatgttttcacaacggaataatccttattgtgaattgctttcaaaatttgtaagacaaaaatagaatattttttctaaattacccaaaatttaagaaacaaaggcaaaatcaggtatttcgtcgtccattgtttcctcttttactaattattaaaactttggaattatgagcaaaaataatcaaattaacattcttggtctcgatctcggcgtaacatccatcggctttgcacacgtcatcgaaagtgaagaccacaataattcagaaataaaacaaattggtgtccgggtaaattcattgacagtggatgaacaaaccaattttgaaaaagggaagcctttctctatcaatgcggaacgaaccttaaaacgtggtgcaagaagaaatctcgatcgttaccaagacagaagaaataatctaattgaggttttgacaaagtcaggatttataacttctgaaaccaagctcgcagaagacgggaaaaacaccacgcatcaaacttgggcgttgcgtgcaaaagcggtttctgaggaggttggaaaagaagattttgctctaatattattggctatcaataaaaaacgtgggtataaaagttcgcgtaaagctaaaaatgaagacgaaggacaagcgatcgacgggatggctgtcgccaagcgattgtacgaggaaaaccttacgcccgggcaattggcatatcaacttttaaacgaaggtaaaaagtcgattccggacttttatcgttcggatttacaagctgaatttgataaagtttgggagtcccaaaaacaattttactcagaaattcttactgacgaattttataaggaacttgaaggaaaagggcaacgcgcaacttctgcattgttttggtcgaaatacggatttaatactgcggaaaataaaggaaatcgtgaagagaagaaacttcaggcgtataaatggagaagtgaagccacttctaagcaattagaaaaagaggaagttgcttacgcattgactgaaatcaacaacaacctaaacaattcaagtggctatttgggagcaatttctgaccgaagtaaagagttatatttcaacaagcaaacggttgggcagtatctgtatcagcaattgcaagaaaatccccacacacgtttaaaaaatcaggttttctatcgacaagattatttggatgaatttgaaatgatttgggaaacgcaagccaaatttcattcggaattaaccaacgaacttaaagaagaaattcgggatatcatcatattttaccaacgcaaactgaaatctcagaaagggttgattagcttttgtgaattggaaagtaaggaagctgtcattgatggcgcaaagaaaataattggatccagagtggcaccaaaatcatcgcctttgtttcaggagtttaagatttggcagaacttgaataatgtttcggtacgcaaaaaaggaagcaaaaaaagagttgcgaaagcgcaaaaccaacattctttatttgaggaagaaaaagaaatttttacacttgatttagaagcaaaagaaaaactgtttgaagagctgaatttaaagggaaatttatctgctaaaaaatgtttagaatttttgggattaaattccgctgaatgggagttgaatttcactcaattggaaggaaatcgaaccaataaatcactttacgaagcttatctcaaaattttggaaatcgagggttatgatgttaaagatttgctgaaagtcaagtcgaataaagatgaagtggagttggatgatttaaaagtctcggcttccgaaattaaaaatatggttcgggacattttcaaaacaaatgaaattgataccgaaatccttgattttgatgcagaggcagacggcaaagcgtttgaaaaacagcaatcgtatcaattatggcatttgttgtattcgtacgaaggggacgactcgcaaagtggcaatgaaaaattgtatgaattattagcgaagaaatttggatttaagcgtgagcacgcacaaatattggccaatgtcggtcttgtggacgattatggaaatctgtccagcaaagcgatgcgtaagattattgttcatttaaaacaaggttttgcttatgctggaagaaaagatcgccccaatgagcctagtgcttgtgagtatgctggttatagacactccaaacattctttagacaaggaagagttagacaatagagtgttggaagataaattggaactactgaaaaagaacagtttgcgccagccagtggtagagaaaatcctcaaccagatgattaatgttgtcaatgctttaatcgaaaaaaatagcgaacgggacgaaaacggcaatatcacgaagtacttcaaatttgatgaaattcgaattgaattggcacgtgagctcaagaaaaatgccgaagaacgccgggatatggatagtcaagtgcgggaaggaaaattgcgcaatgaacgcgtgtttaatattctccaaaaagaatttggcattaaaaatccaacccgaaacgatattattcgcttccgtttgtatgaagagttaaaaaataatgggtacaaggatttgtataccaatacttacattccaagagaaatactgtttagtaatcagattgatgtcgatcatattcttccacagtctagattgtttgatgatagtttttcaaataaaaccgtggtatttaaaaaggataatttggataagggaaatatgaccgcctttgattatatcaaaagtaaatatggtgaggaaaagttgaatgattttgtggaacgaattgaaaacttatttgagcttggaagaaaaaatatagaagaaggtatatcaaaggccaagtatcagaaactattgaaacaagaagccgaaatcggcgatggatttatcgagcgggatttacgcgagagccaatacattgctaagaaagcgaaagaactgttgttcaagatagcaccttcagtagtatctacttcaggaagagttacggatcgattgcgtgaagattggggtttgatcaatataatgaaagaactcaatttgccgaaatacagagcattgaatatgacggaagtacaagaacgaagaaatggacataaagtcgaggtgattaaagattggactaagcggaacgaccatcgtcatcacgcaatggatgccttaacagttgcctttaccaaacataatcatattcaatacttgaattatttgaatgcccgtaaaaacgaaagccacaagctacacggtaatattattgctattgaaacccttgaaacagagcttaagatagatgacaatggaaaaaagaagcgagttttcaaagaacctattcccaacttccgccaagtagccaaagaacatttggagaatgtgttgatttcgcacaaagccaagaacaaagtggttacgaaaaataagaatataatttcaggaaaagaaaaggcacaaatcactttaacgccacgtggtcagcttcacaaagaaacggtttacgggaaatatcgtttttaccaatcaaaagaggagaaagtgagcgcgaaatttgatttggaaacgattgaaaaagtaaccaatccagtttataaaaaggctttgcttcaacgattggcagagaatgggaatgaccccaagaaagctttcgctggaaagaacgctttgaacaaaacggctatttacatcgatctggaaaacgacatcaaagtacctgagagtgtgaaattggtttggttggaagaagattattctatccgaaaagatgtgacaccagagaactttaaggacgaaaaatccatcgaaaagattttggatgaaggagtaaaacgcattttaaaaaatcgtttgaaggaatttagcggtgacgctaaaaaagcattctcggatttggataaaaacccaatctatctcaacaaagaaaaaggaatttccataaagcgtgttcggatttcaggagtgaaaaatgcagagcctttgcattataaaaaggaccattttggaaatgatattttagatgaaaatgaaaataaaattccagtcgattttgtaagtactggaaacaatcatcacgtagcaatttatagagagccagctcttgataagaaaggtcaacccatcttggatgaattcggaaatcaaaaatacaatttacaagaaaaagttgtttcattttttgaggcagtagagcgagtaaatcaaggtttgccaataatcgataaaacccacaatcagcatttaggttggcagtttctttttacaatgaagcaaaatgaaatgtttgttttcccaaatgaaaatacgggctttattccgactgaaatagatttgttggatcccaaaaacaagaagttgattagccctaatttatttagagtgcagaaaattgcaactaaaaattacttttttagacatcatttagaaacaacagtcgaaactcctaaagatttggctggggttacatataaacctcaattgggattaaatggaataacaggaataataaaagtccgcatcaatcatttaggtgatattgtaagtgttggggaatattaaatagagactttatcaaagagaaattcatgtaaaaatataaatcatgtcccacaaactaaaaatagaattaaaaaacaccgacccaaaaattactagaacggtcattgttccggaaaatttcaatttcgacgaattgcatattgtgattcaatgtgtgatgaattgggaaaatatacacttgtatcagttcaatttggggtcttttttcgcaagtgactacatcggtttagacgatgaagatgatttttcgagttacagaagatataggaaatataaagcagacgagacatatctgtctgatttttttaatggacaacttaaaaagatgaactacatttatgattttggggacagttgggaacacaccataaccgttttaaagaagcctgacgaagaagtgctgtatccaaaatgtatcaaaggagaaaatgctgcacccatagaagattgcggggggctttgggatttttatgagttgttggaaatttctgaaaaaaaacgaaaaaatgctgaggaaaaagaattgctcgagtgggctggaattcccaaaggaaaatcctataatgatgtttatggttttgatattgatgaggtaaataagctgttgatagaagctttttcctaaaaacttttccaaagtctagactattaaaactcaaaaccatgctcaaacgaaccatttacatcggaaatcctgcctatttaaagttaaaagacaatcaattacaaatcatagacccggaaaccaaggaaacaaaaggctccgttccggtagaggatttgggttttctggttttggacaattatcaaatcaccctgagccatcagttggtggtagctttgcagggcaacaatgtagccatcatcagctgcgatgcacatcacttgccctttggcttgatgctgccgatggccggccatgtagagcattccgaaagactaaaaacacagatcagcgtctcggagccacttcgaaaacaattgtggaaacaaaccgtggaagccaaaatcagtcaacaaatgttgttgctcaaaaaattggggaagccacacgaaacgatgaccgactatttgaattccgtcaaatccggtgacagcacgaacatggaaggaatcgccgcccagtattattggaaacaaatgtttgatgaattcattcgggaaagagaaggagaggcacccaacaattttttgaattacggctattccattgtccgaagcgtggttgcccgggccttggtcagttcaggattgaacccaacacttgggatttttcatcgcaacaaatacaatccttattgtctggcagacgatattatggaaccgtatcggccttatgtggacgaattggtctatcgcttgtattcctcaccttcccgaccggaagaattgaccaaagaaatcaaagcggaattactgaaagtgatgagctgcgatgtggtgatgatgcaaaaactgcgtccattgatggtggcggtcagtagcacaacatcttcactttacaaatgttttactggagaattgagagtgattcgctacccgatgatgacttaaattttcatagatgacgcctcaaaaccgtttaaatgcataccgaatcatgtgggtactcgtattctttgatctgccgaccgaaaccaaatcacaaagagctgcggcttcaaaatttagaaaaagactgttggacgatggattttccatgttccaattttcaatttatctgcggcattgtccaagccgtgaaaacgccgaagttcacatcaagcgcacaaaatctcatttgcccaaactcggaaaagtagggatactgtcgattacggacaaacaatttggacaaatggaaatattttttgcacaaaaaacagccgatgtgccggctccgcctcaacaattggaactgttttaaggctactatttgcgacatcaggaacgaaaaaacaccaataaaaaacagtccgatggtttttcggactgtttttttgattggattgattcgttccaaagccttgtgaacagtgggattgaattgaggttggaatcaaaccctgtaaaattacaaatttttgaaagcaattcacaacagagaattcatccggctgtttgagctgctcgttggaatcaaaccctgtaaaattacaaatttttgaaagcaattcacaacgggttcatcaatgatccccgactgcatcaggttggaatcaaaccctgtaaaattacaaatttttgaaagcaattcacaactacctgcaggcagtgtgatgctgtcagctggttggaatcaaaccctgtaaaattacaaatttttgaaagcaattcacaacatgtagttgagatgtatgaaagtgcgtattgttggaatcaaaccctgtaaaattacaaatttttgaaagcaattcacaaccgccacgcggcccacccgcaacgccacctggttggaatcaaaccctgtaaaattacaaatttttgaaagcaattcacaacgaagcgcaaagggcgctacgagaagcacaagttggaatcaaaccctgtaaaattacaaatttttgaaagcaattcacaactgattgcgagtttctgaattatctgatcaagttggaatcaaaccctgtaaaattacaaatttttgaaagcaattcacaacaatttttgctcaaatctatcaaatgaaaaagttggaatcaaaccctgtaaaattacaaatttttgaaagcaattcacaactatgggcaaatgagaccttattttgtgacggttggaatcaaaccctgtaaaattacaaatttttgaaagcaattcacaacgggcgttatcaaatctctttttaatgacctgttggaatcaaaccctgtaaaattacaaatttttgaaagcaattcacaaccattcttattatcacttgttatttatactcgttggaatcaaaccctgtaaaattacaaatttttgaaagcaattcacaacaatatccgataacaaaataaggtgctgaaagttggaatcaaaccctgtaaaattacaaatttttgaaagcaattcacaacctactactaacgctgatgtttctgtgcctagttggaatcaaaccctgtaaaattacaaatttttgaaagcaattcacaacaagacttaagtcaattgccaaccaatactcgttggaatcaaaccctgtaaaattacaaatttttgaaagcaattcacaacaataaaacaattcattatgtacacaaacgagttggaatcaaaccctgtaaaattacaaatttttgaaagcaattcacaactgaaaacagatttaaaagctttaaaaggatgttggaatcaaaccctgtaaaattacaaatttttgaaagcaattcacaacacaaagctaaccattttttcaaaagaattagttggaatcaaaccctgtaaaattacaaatttttgaaagcaattcacaactatcagcttcaatgagttccgctccatcctgttggaatcaaaccctgtaaaattacaaatttttgaaagcaattcacaactgataagaaactgttaactatgtatgagaagttggaatcaaaccctgtaaaattacaaatttttgaaagcaattcacaactcctttttcatcgtcatattcccattcggtgttggaatcaaaccctgtaaaattacaaatttttgaaagcaattcacaacaagaacgctgacaaagtcattgcaatgcttgttggaatcaaaccctgtaaaattacaaatttttgaaagcaattcacaacagcttttcagttgactcacgctctaaattagttggaatcaaaccctgtaaaattacaaatttttgaaagcaattcacaactatcagcttcaatgagttccgctccatcctgttggaatcaaaccctgtaaaattacaaatttttgaaagcaattcacaactgaagtgttgattgtgttgccgaagaacatgttggaatcaaaccctgtaaaattacaaatttttgaaatcgaagattcggcgaattccactaaaaaataatcaaacacatgagccaaagcaattcacaacatatttggatttgcagaaccaacgcttcttgttggaatcaaaccctgtaaaattacaaatttttgaaatcgaagattcggcgaat

SEQ ID NO: 2330 - DNA, 18406 bp, synthetic construct
  misc_feature 1..18406: note = Synthetic
  source 1..18406: mol_type = other DNA
cccgcccacggccacctttggggcgacgcggcggtggcgtggctgaaggcactgcccaagccggtggccatattagcgtgtgacgatgcgcagggcgcgcatctgctggaggcgtgtgggcaggcgggagtgagggtgccggaagaggttgcggttatgggagtgggaaacgatgaggaggcgtgcgcgttgtgtgaaccgcaactgtcgtcggtcgagctggattgggagcgagcgggaacggaactggccgagttgctggaacataccattgccgacgagcacagcgggttcgaggatgtgattgtgctgccgtcgcgggtggtcacgaggccatcgaccgatgtgcacgcctcggaagactactacatatcgctggtgttgaggtatatacacagaaatctcgaccagaggctgaaagtggaggacttggtgaagctggtgccactgtcgaggcgactgctggagatgcgcttcaggcaggtgacgggggtgtcggtgtatacgtatgtgctgaacctgaggctggacagatttgcgagaaggctggccgaaacggatgacacggtggtcgacatagcgctgtcgctgggctacgcggaccagaaaaacgtatcgagaattttcaaaaacgcaacgggactaaccccgtccgagtacagagaaaaacataacacgcattacgaaaacttatgacacacttcaacttagcactcattacgggtctcgcggcgggactgttggacgtcgtaccgatgctggcgcggcgaatctcgggacgctcgtgcatatcggcatttctactctactttttcgcagcgatgatcgtgttttacagcgacctgccatatctaccgtggtgggccgacgggatgggagtgacggtgatgatgtcggtgccggtggtgctgacgctggtgggaaaagatcgaaaatcaaccccggtgatctttttgaacgccttgatactgggcttcctgatcacggtcgcagaaaggtttatagcgtagggagagcggggcggctttgctggcttaggcggcgttacagggcgggttcgcaaccgctacaggtctcgtcgggcagctcgaactcgaaggtggagtgggagataccaaggggggagagggcagagtgcagttcgcgtttgagcggagcgagctcggccatcgagtgggcccggtccgtgacgatgtgggcggtgaggatggtgtaactttcgtccagagaccagacgtgcaggtcgtgaaccccgccgacgccatccacatttgtcaacgcggagacgatctgttcgggaacgaaaccggcaggtgtgccctgcagcaggatcggcaacacggagcgaatgttacggtagacgccaaccaacacgaagcaagcaacagccagagacaggatcgggtcgatgaccgtccaaccggtgaagtgcatcacaacagaaccaattaacaccgcaccccaacccaaaacgtcctccagaaggtggagcgacacgacccgctcattgatcgaagcggccctgcgagtgcgaagaacagcgaaaccgttgaccaaaatccccagaacagccaatgcaaacataccacgggcgctggtggcctcgggagaccaaaggcggggaatcgcctcggagatgatgtagacgctaccaacgaccaaaaccacagaattgatgatcgcgccgagaagcgaaaaacgcttataaccataagtataacgcgaggtgcggccgcgtttggatagcttctgaaagtaccacgcgagtgccaacgagaggctgtcgccaaggtcgtgaacggcgtcggaaaggattgcaacgctattggtcaacacgcctccgacgagctcgatagcagtgaaagcaaggttcaggaaaaacgccagaccgatgttgctctgggagttggagtggttgtggtgtgaatgatcctgtgccactttgagggtcgaaggtttagcgcggagagagggggattcgaacccccggtacagtaatcccgtacgacagtttagcaaactgttggtttaagccactcacccatctctccaaaccggactgcaaagctaataattatttcacatatattagctatctttgcagatatgaaagcactttttttagttgcaacaatactggcggcagtcgcaggacaagtcagagcgcaagtcggcgcgcaagaaccgaaactaaatccgaacaacatcgaccaggtggtcgaagcgatgacgctccaagaaaaggcgcgattgctggtgggccgaaacgatcccgtcttcggaggatatgccgaaacggaggaaccgttcacgaggatcattccgacaaatgttgcgggttacacgcaggctattcctcgattggggatacctgctacggcgctggccgatggacctgtgggccttgtgatagtctcctatccagagagcccgaggcagtatacggcaacgggttttccgtccgggacacttatggcgtgcagttgggatgtgacgttgaaccgtcgggttggcgaggctatgggtaacgaggcgttggagcacggggtggatgtgattctggctccggggatgaatattcaccgctcgccgttgggtgggcgcaactatgaatactactcggaggatccgttgttgacgggtaagatggcggcggcgttggtgcgtggggtgcagagtaacggggtggggacgagtctgaaacactttgcggcgaacagtcaggagaccaaccggacgggcgtggacgagatagtgagccagcgtgcactgcgcgagatctatctgaaaggattcgagattgcggtcaaggagtcgcacccgtggacggtgatgtcgtcatacaaccggctcaatgggccgtacacgcaggagaacagggagttgctgacgaccgttctgcgcgacgagtgggggttcgacgggattgtgatgaccgactggattcagattcgcaacactgctgctcagattcaggccgggaacgacctgatggagccggggtatcaggttcagatcgacgatattgtggctcgggtgaggagcggcgaactatccgtcgaggatgtggacgtgtgcgttcggcgagtgttggagtatatagtcaagacgccccacttccggggccattcgttcagccatactcacgatcaggagggtcacgcgcggctggctcgcgaggcagcaacccaggggatggtgctgttgaagaacgatggcggggcgctgccgctgggtggcgaggttaagagagtggcactgttcgggcgctcgtcgtatgactttctggccggaggaaccgggtcgggtaatgtggtcaaaccctacgtggtgaaccttgcccaagggctttcgaatgccggtctggagccgtcgcaggagatggaggaggtttatgaaaaatacatagagtatgtggggctgcggaatcgcttcgagggtgtttcgctggggaggtcgaccatccccgagatgacggttgcgcgtggagcgatcgagcggcaagcggccgagaacgatgtggccattcttacgatcgggcgtcaggcgggcgagggaggtgaccgaacgatcaaagaggggtacaacctgacggcaggcgagagggaactgatggaggacgtgtgcgatgctttccacgccgcggggaagagggtcgttgtggtgttgaacgtgggtggcgccgtggagacctcctcgtggaagggcctgccggacgctattttgatggcctggcagcctgggcaacagggaggtaacgcggtggcggatatactaacgggcgctgtaaacccttccggtaaactatctatgacgctttccgtttcggcaatggatcatccctcgtcggccaacttcccgctcgggccagccgctccgagaaggggcaaccagccgcgcgagaacgtcgattacactctacacagggaagggatctgggtcggctatcgctatttcaacacagcaggcaaggaggtgtcgtatccgttcggccacgggctgagttatactgatttctcgtacagtcggcctacggtacgtgctacgggagacggttttcgggccacggtgacagttactaacactggtaaggttgcgggtcgcgagagcgtgcaactgtatgtgtctgctccggccggagagctcgataaacctttacgtgagttgcgcgctttcgctaagacgggtcttttgcaaccgggccagagtgaggtgcttacgtttgaggtcgcggactacgatctggcttcgttcgacgagcggatctcagcctgggtcgctccccggggccgttacacggtcgggttcggcgcctcggtggaggatattcacgcaacgggagcctacaccctcggccgcgagttcatccttaaagtgaatgacgtactaaggccgacgatggagctaaagtaatcggaatcataaataacctgtcactttcttcggggttttatgcccaacgccgagcgattaagatagccctaactatcaaaatactcacaaaaagaacgaggcaggcatcttgcaatgctgccccgctctgaatgttttcacaacggaataatccttactgtgatttgcttcaaaattgttccgcaaaattaagtatttttgtggtaaatatcaaatttgtttatgaaaaagattataggactcgacctgggtacaagtagcatcggttgggcattggtaaatgaagcggaaaatgacggagaaaaatcttcgataatcaggctgggcgttcgtgtaaacccactgactgtcgatgaacaacaaaattttgaaaagggcagaagcattacaaccaacgcagacaggacacttaaacgcagtatgcgccgaaacctgcaacggtataaacttcgccgcgaaaatctcatcgaactattgaagtctaatggtttcatcgtcaatgaaaccattttatcggagaacggaaatcgcaccactttcgaaacataccgtctgcgagcaaaagcggcttccgagcgaatttcactcgaagagtttgctcgcgtgttgctgatgatcaataaaaagcgtggctacaagagttcacgcaaggcgaaaggttcggaagagggtgcgctgatcgacggaatagaggttgcgaagaggctttatgatgaggatttaacgccagggcagatgagtttcacgcttctacagaccggtcagaagtatttgcctgacttttatcgttctgatttgcaagcggagtttgacaaaatatggacgaaacagcgtgagttctatccggatattttgaccgatgagttgaaagaaaatctgcgagggaaaaatggaaaggcgtcttgggccatctgcgaaaagccgtttgggattgtcggcatcaagcgcgaagggaaaagtgatgcgaagagaaaagagaactttgcatggcgagtcgatgccctatccgtgaaaacagacctcgagcgtttggccatagttttacaggatataaattctcaaatttataattcgagtggttatctcggagcgatttcagaccgaagcaaagagctatacttcaacaaacaaaccgtcgggcaatatcaaatggcggtattggatgcaaatccgaatgcgagcttgaggaatatggtgttctatcgtcaggattatttggatgaatttaacacactgtgggagacccaagcgaaatttcatccagagctgaccgaagatttgaaacgccagatccgcgatgttgttattttttatcaaaggcgtctgaaaagtcaaaaagggctgataagattttgcgagtttgagagccggaagatcgaagttgagattgacggaaagaagaagatcaagaccgtcggcagtcgtgtaatacctcgttcttcgccgttgtttcaggaatttaggatttggcaaacccttaataaccttgaaatctcgacatcggaaggcaagagagagctagagcaagaggaaaaggagtttttggcaaaggagttggctaccaaagagaaactgtccaaagcggaaatcctgaaactcttgctgggcaatgccagaggttacgacttgaatttcaaagatgttcaggggaaccatacacggacgaaattatttcaggcgtgtcccgaaactgccgatttgccggaagatgaattgtatgctctttggcatctgctatactctttcgagggtgacaattccaacatgggcaatgaaaagttagtaaagaaactggcggcgtgtttcggacaggagtgtgcggtgaaattggcgaatattgcttttcaggacgattatggaagcctgtcggccaaggcgataggcaggattttgccgcacctgaaagatggcaataaatacgatgtcgcctgtgaatacgccggttacagacactccgcctcgtcattgaccaaagaagagatcgagaacaaaacgtacaaggatcgccttgaggttttgcccaaaaactcgctacgcaaccccgtggtagagaagatacttaatcagatggtgaatgtcataaatggtgttattgacgcctatggtaaaccctacgaaattaggatagaactggcgcgtgaactgaaaaagaatgccaaggagcgtgaggaattgacgaaatccatagccgaaacaacacgcgcgcacgatgaaataaaaaagaggctgcgagaggaattcgggcttaactatgtgagtcgcaacgacatcattcgttataaactatgggaggaactcgcgaaaaataactattgtactctatactcaaacacaaaaatcacaaaggcggctctgtttagtggcgacttcgatatagagcacattattccacaggcgcgattgttcgatgacagtttctcgaacaaaacgttggaattgagaagcataaatctcgaaaaaggcagtctgacggcttacgattttgtaaagggaaaatatggtgaggaggggctggtcgagtatctgcaccgtgtcgaaacactgcataaagggggagcgatcggacgaaccaagtgtaataaattgaagatgcaggagaaagatattcccgaaggtttcctaaatcgcgacctgggcaacacccaatacattaccaaatatgctaaagctatgcttggcgatttggttaaacgggttgtcgctacgacaggcgcgattacggatgtgttgcgtgaagactggcaactggtcgatgtgatgaaagaactgaactgggacaaatacgatcgactggggctgacctattatgaggagaatcgtgcaggaaagcggtttggcaggatcagagattggacaaaacgcaacgaccaccgccatcacgcgatggatgctctcacggtggcgttcacaaaggacgcgctgattcaattgttcaacaacctaaatgcgagtcttacacccaattccaatgcctatgccctgaaaacttcgtatatggagaacggcatagtgaagcctcccattccgctcaatgagtttcgtgccgaagctaaaaaacatctggcaaacacactgatctcgatcaaggccaagaacaaagtcgtcacaaagaatatcaatacgacgaaaaaaccggtagggatgaataaaaagacacagctcaccccacgcgggcagctacacaacgagaccatttacggcagcctgcaacgttataaaaaagataaaaaaggtgtatcatttgaaacggtttacacgattcgtaaggaggtttcacccgatttgaaacttgacaaggttatcgacgtaggaatcaagcgtattttacagatacgactggacgaatatggcggcgatgcgaaaaaagcattctccaacctcgaagaaaatccgatttggctcaatgaagaaaagggcatcgcgatcaaacgggtgaccatttcaggcattaacaatgccgaagccctgcatcataaacgcgacaaggatggtgtgccgattttggatgagaacggcaaccgacagcccgtcgattttgtcaatactggaaataatcaccatgttgctatttatagcgatgcatatggtggtttacaggagcgcgttgtctcgttctacgaggccgttgcccgtcgaaattctggcttaccaataatagataaagactatcgagcggacgaaggttgggagttccttttcacgatgaagcaaaacgaatatttcgtcttccccaatgccgaaacaggtttcaatccgcacgagatcgatctgctcgactccgacaactatgcgcggattagccctaatttatttcgggtgcagaaattggcctcaaaagattattggtttaggcaccatttagaaacaattgtggaaacgaaaaatgaattgaaaggtatagcctggattaggacgagtgtaaaaggcatagacaaaatcgtcaaagtccgcataaaccatataggtcaaatcgtaaccgtcggtgaatattaaaaagtttcattatggtaaagcgaaccctgtatttcggcaacccgacctacctaaatttgaaagacaggcaactcgtcatcaaactgcctgaagtcgagaaaaacgatgttttcagcgaggcattcaaagcggagagcacacggactattcccattgaggatataggggtggtagtgttggacaacaggcagataaccattacccagggagcgctggaggctctgctcgaaaacaactccgccgtcataacctgcgacagtagccggatgcctgtgggattaatgctgccgctttgtggaaacacaacccagaacgagcgtttccgctatcagttggatgcgtcgctgccgctcaaaaaacagctttggcaacagaccgtgcaggcgaagatagctaatcaggccgccgtgctgaaagagtgccgatgtgcagaggttcgtaatatgttgaaatgggtgggcgatgtcaaaagcggtgatgccgacaacctcgaagcccgtgccgccgcctattattgggcgaatcttttcaccgattttcgtcgccaccgcgagggtgagccgcccaataatctgcttaattacggttatgcaattcttcgcgccatcgtcgcccgtgggcttgtcggaagcggactgttgccaacgctcggcattcatcatcacaaccgctacaacgcctactgcctcgcggacgacattatggagccgtatcgcccctatgtcgataaattggtggttgcgatgttcgatagtggcattgaggagttggataaagatgctaaggcacagttgctcgtattacccgtaatggaggtaatgattagcggtcagcgaagcccgctgatgattgccgttggtcagaccaccgcgtcgctatgtaagtgtttcagtggtgaaagtcgcaaaatcgcttacccggagatgtagtggatcgtttttcggaatatcggattatgtgggtgcttgtgcttttcgatctaccgaccgagacgaaaaaggagcggaaacaggccgccgaatttcgcaaaaaccttgtgcgcgacggcttcacgatgttccagttctcgatctaccttcgccattgcccatcgcgcgagaacgccgaggtgcatattagacgagtaaagacttcattaccgcctgccggtcaggttgggattatctgcatcacagacaagcaattcggtcagatggagattttttcgggtaaaaaacgagtttttgagcgagacacaccacaacagttagagctattttgattatatttgtactatgatagtgcttatctggataatacgagcgttgttgtggcttcttatggcgcttgctgtcgtggttttttttaactggatagcaaaatctgtcgttggggtcgacgattggagcgagctatccaaacgcaagcgcaaggaggagcagtctgtcgacggagagtgttcgtttacagtgcatattacgatttcgcgttgtaccgattccgacaaatgaatttcgaaataaaaacccacctgaaaaggtgggttttgttatcggaacagcctcgttttttaatccttcagcagtctgtaagttgttgaatttgactaactttgacacattggggtgtttccgatatgtcaaagatacaattttgaaagcaaatcacaactcgacggccgcgagcatttcagccaactggggtgtttccgatatgtcaaagatacaattttgaaagcaaatcacaacggaaccgaaggcacatatcccgccaccaggggtgtttccgatatgtcaaagatacaattttgaaagcaaatcacaaccattcagatcgagaacgtagaggagtttatggtgtttccgatatgtcaaagatacaattttgaaagcaaatcacaacctttgacggggtcgagttgctggatgcgtgggtgtttccgatatgtcaaagatacaattttgaaagcaaatcacaacatatcccaagaattggtgtcgcatagtttggtgtttccgatatgtcaaagatacaattttgaaagcaaatcacaactcggatccatcgttatatctcccttatagaggtgtttccgatatgtcaaagatacaattttgaaagcaaatcacaacaccgcgcgtcttgacccatttctcttcgtaggtgtttccgatatgtcaaagatacaattttgaaagcaaatcacaacaggtttgccaagtggtttttcagcatctttggtgtttccgatatgtcaaagatacaattttgaaagcaaatcacaacggggagtgcgcatcattaccgtctcatcggggtgtttccgatatgtcaaagatacaattttgaaagcaaatcacaacccattttgcgccgagcgcgttccaaaaattggtgtttccgatatgtcaaagatacaattttgaaagcaaatcacaacagccagcgcggacgtcgcagtcgctgtcctggtgtttccgatatgtcaaagatacaattttgaaagcaaatcacaacaattcgggcgtggtgccgattacattaccaggtgtttccgatatgtcaaagatacaattttgaaagcaaatcacaacagtacaaaattcatcctatttctgtgcttaggtgtttccgatatgtcaaagatacaattttgaaagcaaatcacaactgatggcacctatatcaatcttggcaaaaggtgtttccgatatgtcaaagatacaattttgaaagcaaatcacaactgcccaagggcaatctcgatccgagaacgggtgtttccgatatgtcaaagatacaattttgaaagcaaatcacaactagcatcgataactccaagaatagactacggtgtttccgatatgtcaaagatacaattttgaaagcaaatcacaactaataagataaataactcacggcgatttataccgacaacactcgagcctttgttaattagctaatactctgccttttaccctgtatgaggagtgaaggttactcgtattagcttctattaattaataccaactattattgattggcattaaggctattagcctaatcaacccttaaaaattttacccaaaatttgtcaaaaccttcaagccctcgaatgttataacacattattttgtgctgattcatatgtagggcgtttggggtaggtgtttaagattagtgtcagttgttactttaggtttattttatcaatccggatttctctaaaagctcctgatacagcttggatttccctgatcctccagggatgtagttatcatttgtgaaactgtcatctggaatgtctatcggatttataattcctgcaaaatcttctttcgttggcacctggtcgatttttccgatatgatgataaacattcttgagaaaatccatgaaagccatgaacccagtcgatttatttaggatgttgttctttttgacttcattccacgctattggccacttactctgaatgacggagaagtaattgtatatcaactgggcaatattagtgtcgctgtcatcatcaatgaacatattcctcaaaaagagccgttcttgctccttgccagatacaaaaggcagcttgtagtgcgccttattcttgttctctttataatcgttcctatctttttgagggtcagaggatatgtactttataatggattttacaaacgtatcctgtgtgatggtttctttgtccttgtcaatagcagtcccaagtatttttatcttgcctttgaaagggcttttttgcaaattgtcaagagctcgggctatgttatgtcccgttttctgaggactgcgacttttcgcaaactcaaacaagtcggcagccaaagacttacttacgcttttttgctctttgttaatagtggcaaaaacaatggcttggtcttccagctccatatccacatagatcgtaacaatgcactggaattgattacctggcttactacatgcgtttaaccccgcaatacgatgctggccatcaaggaccttagcaacatcctgttggtagtcaatggttaaagtctgggtcttttcatcatattttgcatgttctgatgaaatagctaagatgatgctattagggaatgtggcatcaaccaaattgacatatttgccaatttccttttctcgatttttgttcaattctcgttgtattcccgaataagactcaatctcccgctcatctacaccttgctccagtctcctaacgtcagtaaatgagatatactcaagaacatcataatccattaccgcgatgaacatcggtccgataggctgatttgcaaccagacattttacctcagcagtctgtttcgttataagatcttccattgctgtcattctttaatgctgttttcaatagcagattgttcgttatgtctaatttcgcctacatctgtgttcgtgtgggtatattgcaaatattgcccgacgataaaagcaaaaatggcagcaagcatccccgcaaaagagaaccagaagagtaaaggtatattcaaatcgtttgccaaaggatctgaagttccatttagggcagaaaagacaataacatagaaaattgaaataataaccaagggtacgacgcaccaaatccttttcttagtgttatagaactctaaaagcattagagaggaactcaatatggccacggcatataaaagaaattctcctcgatagtagaaattcaccagatctaagtcatttctaaccacggcatcccataatagctttatccatgttggaagcaacgtgaagagtagcaataatagtagatcttggaggatctttacccatatcttcttacctcttttcatattccaaaatatcataaattatccatccgtatttttaaggcgtacaaatacaatcttgttagctcaaatcattcgagacctttttggtaataagccactcatgaagttccagcaagaagttgtattcctcctctttcacgctgtacgaatgaaaactgttattcctgattttttcaagtttttgcatccattctgttttaatttctttattgccactcttttcttctccgggtttggtgtaggccttctcaaacaagtctcgccagttactgccgtaaattgcgatttttctataatcgatcagggttaaacaatcccaaggggtgtacttatcggttttttcctcataatttttttcagcggacagcgcatgggtcttatcatacactgcttttgggactcctaaacggaaccattgatcgccatatgagttttctaaccgacgtttgaagtcatctttcatcatcgtctcaatatctcgtataaacttgaaagactcgtcgttgaatcgtttatcctcatccttccagtatttttccaagccttctggagaaaaatctggtctttgcttgaagatctccctttggagtgtacgccaaacttttgtcctgccgccgaccccataactcttttttatctccaatttttcttctaaagatagcccccggtagaaatcaaccaaaggatcgagataataggtcacctcattgaggatagcctccgtagaatctgccttggggttgatcccctttatctttagcaaatgatctattatgtcgctgaatattctcaagaggctttcgatgttcccattaatcgttaaaaagccatctccagcgtcgccttttgcccactcctcggtcaaatgcgttttgatatgattaaagcacgccatcaagaaaggcaatgctttgtcgaaagtcgaatcattatcccctttgtaaaaactgccgtcgcttctaatggcgttcttttcaaaggtaccaaagaaattgctccgatccagtcctatacgaatggtgtctatcgtaatacatctggtcgcagtctttgcattctctccgatgataattcgatcatacagaggggaactcagatcttcgccaaggcttaaagcgagttgaagttttaatgctctgatctgttcgttcttattgtcagaatcccacaacagatcggagttaagagtgttgcgaagattcttcggcacagacttctgattttcatttatttgcatgaacaaccgtacctgttccgtccgctcgaggtttacaaaagcaacaaccgggatacaattcttggatttataatcagtgttagcgtatccgtaaagacgatgctgtccgtcaattacataagccgatcgatatttctttggcagatgtaatataccgatcctggatattgcattgtcaagttgattgcctgcctgttcaaacttcagatttttattgtcggcgttgatgttgattattatagagttagggaagaaaccaccttcctcgacaaaatcctgaatagccttcaaacgagacttcttaatcagcctctgataggtaggcataagttttttattcgccttgttgcgatgaagaacatatcctattttgagcaatttttcgggttcaatcgaaaaggaataataagtgtgtccacccatttttcctctgatggccgggattttattatcaagctccggtatggtctgtccctcaaatagacttcccaatagctgatattttgcagagacacccagatgcttagcgagatccgtgtaatatttaacaacctcctcgtcgaagtgagtaatgccataattagttaagcgctgttcatcctgagtcgacaggtaatagttttttgtggccaaaatgaatttgaccttgtgtctgaagtctgggaacagttgtcgtattgtcgcaagcaggccttcctttttaccgccaatggcttcaatcgtttctttgaagttgctttgttttgggtcgcctccggttgacttgcattcaacgatcagcaccgtttcatcgtcggcaacgaaaacatcgatctgctgtgttaggttgggattgtcagagtacggcaaacgaagattacgatcccgattcaaataagtgaatcccatttttgcaaacattgaccacacttcatcctcaaacgcgacatctatcggtttgggccgggacattctcgttgtcgttttgtattccttatggacgctccacccttcggactgatacttattcactaattcatgcgggacactctcgaaaataacatctttcgatcgcgctgaaactgccgggggaataaatgaccccgaaaggagagagtcaagaatcttctgtttagtttcctccttcatagtgatctatctggctatattagtaaatacatactccgttgtttgtcctcgctttgcattggtgccaccgatgaggttggcgcgactcagttccaatcgtgtgtcgccgttgtcaaaaatctcctctatcttgctgtgcgctgcgttcgtcaaaatataatatgccccgacttcttttatgtggacaatcaattcgctcaggcgatgttgatcctccaaagagaagattttttgattgtattttataaacccattatcattatgcgataccgtgtacggtgggtccaagaacaccaaatctccagggccgagattatctcgaataatatcaaaatcaccatatcgtatagtagtcccatgcagggccttgcttacggccaaaagagcctccctatctaaaaaattcttattacgatagccatatggcacattatattcgcccttgagattaacccgataaatcccattgtacgatgtctgattgaggtatatgaatctggccgctttttcggtttccgtctgcggatttagatctcgtatgtaataataggtttccttgtcgttaatataacccgaaagcactttaataatttccttgggggtatctcttaatgcgatataggcatctatcaactctctgtttaggtcagataaaaaggatctattcttaggctcaaggtataagaaaatagaggcccctcccaaaaatggctcatggtaattattgaacccctgatctggcaatagcgcgtcaagatgcttgaccagccagctttttccaccagcccatcgcaaacaaggtttaacagttgagaattcggacataattcacaaatatacgaaacatctgacatagattggataaagaaggtagataaaatttgttagaccggtaaaaaatgtatctccgaattgttcgttcctcttcaattttcccgccaaagacgttattttcccctgtttaaccactaacaggacaaagcatgtattcagtttacttacggggagagcgtgccctgatggatgccgattcggtcaagatcacgctcataatctatcggacggggtatatccgctcggagaagttggtgctgataaccgggccttacgcggaatgggacaaaaagaagcgatgcttcacgccgacatctcccgacaacatcgccaagaacaagctcctccagcatgaacgtactaaatacctgaagattgccgagcggtgggagtactcgggcaagaattgggagccgacagaacttgcccattactacgacacctcccctgacacccggaagcgaagcgtgttcgtcgtcgatgtcttcgaccgaatgatcgaggaagcaaagacgtcccgacgaatacgcaatggcaaggagttctccggcgcgggcctggccagacacatccattgcacccggcaggcactggaacggttcgtccacgcgaaatatggccgcaagttctcccggtatcgtttccgtgacatcgacggacagttcctaacagattttcatctatacgaaaggaaacgcggcgcaaagggtaacacctcgggcggcgccgaccgaaagatcaagatactctactcgatctgccgtaaagcgaaatctctcgggatatatggcgttgacctcgtggaattcaaagccgtcaagcagagcctgcgccagttgcagcacttctccaaagccgtttcgcacgagacgatactcgcaatagagaacgttgatcggagcacgctggacaaacggaaaagggaggaactctggctcgacctgttccttttcagctattataccgccgggatgtccgggatcgacatctgtcatatggagcggagttggatcaaaggcgacaccatagagtacgagagaacaaaatacccgaacaaggcccgggtgatccttacggataaagccgccggcctaatcgagaaataccgtgacgaggcatatatgaactacgtcttcccgatcttcaagaaacgcgatatgtctccacctagtaggatgaacagtgtcggctatgccaacaagaaagtgaacgccaccttgaacaagatttgcgagcaagtcggcatcacacaaaagataacctggagtactgctcgcagcagttccatctcgaagatggtagatgagggatgtcctgtcctccagatctgcgaacagaccggtaactccccggcgacgatacacaagtattactataccataacaaatacgacagctatgaaaaacaaaatgaacgaaatcttcaattaaccgactatgatctggtcgaaggagcggtatgtgaagaggctacgaaaatgccccgatttagtcgatttcggggcctatttgtaggctgatttgcctaccgcttttcgggcgattttcacatcatcgccacacacctcgcaaaagtctgaaaacatggacacttacaagaatgggcgacataacctttttaagaacgaaaaacggcgaaaaacgcgattttgtgtggattgtctacacggaatttcggatttcttcgaataaaggcagttgattatcagagagttatactgtacaataccttgagttagagaatctacaggttcaatggtgtttccgatatgtcaaagatacaattttgaaagcaaatcacaactggacctattcctatcccaaagacatctatggtgtttccgatatgtcaaagatacaattttgaaagcaaatcacaaccatacatccgagctgtaatctcggagcccggtgtttccgatatgtcaaagatacaattttgaaagcaaatcacaactgtaggcgagcggattattctctgcggtaaggtgttt

SEQ ID NO: 2331 - DNA, 18096 bp, synthetic construct
  source 1..18096: mol_type = other DNA
  misc_feature 1..18096: note = Synthetic
ggagaacttgagcttacccccggatatgccgccggatctctcagaagtaaagacggagtccgggatgtcacaccgttcctgaaggagatgaagagggccgggctggagccggcctccctcagtccggagggatggaaatctcttttcagcggtaaaggaatagcgcttcccgacggcaggatgcttatgaccgtaaaggaaccggccggatatggactgaagataaccgctccggctctccggagtatcaaaacggcagaaatggaaatataagatttagattatgaatatggataagaatgattctttcgacgggcctctgcaggagggcagacatacgaccctgcgttccttttcctggggaaacagggagtttaccatttcctcagacaaaatcagcctgtatgtggggggcataccctatgacacgaagccgatgctggatattctccgcgaatccggagtagatcccgggaaactctctcccgccaggtggatctctttgctccgggggcaacctacacgcctgccgggttgtgaaaagccgttcatgctgttcaaagccccatccggatatactctcaggtgcctggaaataaccaggggcaggaacagggctttccagacggaaatgtagtatgacacatataaatacttaaagagtaaatcgtatatcaatcaaattaaagtaatcagattattgaagtaaatcattaaagtaaattgttatggagaatcttattccttatatcaagcttattattctggcactggcctgcctggtgacgggagtttgcaccctgagccggaaatggtatgtcaacctgcctgtctttcttatatgcatagcgggcgagaccttcatggcatacctgttctttcccgcatacgcattatggccggcctgcggttcggtggccatattcgctttctccaccgcatgggaacatctcaagccttcaggacggaaagagaacaagtctccgatcaggttgcccgtcatttccggggttccataccgccatctggaattctattactattattccaatttcctggtctatggaggggccggttcgggaaagacaaagagtatcggcaaatggctgctggaggaatatatcaggctgggcttcgcagggttcatctacgattttaaggacgtggactacacgcagacggcctataacctgacaaagaagtacggttacccgcacaagttttactacgtgagtttcgacaagccggaacgttcataccggttcaacccgctcaaggtggtaaaggaccgtaccgagctgatgcagctcatggaagatgtcctgctcgcactgcttcccaagggggaaaagcagaatgaatgggtagccggggggctgggtatcctgcgcggggtagccttccgcttttgggatgaatttcccgagtattgcacgctgccccatatcatggcctttatcatgaccgcctctaccaagcagctatccatattcctgcagcagaacctcgttgcggaaatgatggccggcgcgtatctcaaggccgaaggttccgagaagacccaggcatcctacctttccaccctgtgtaacaacctgtcgaccatttctcagaacgaagagatagcctatatcctttcaggggatgattttgacttcaacctgatcgatccggaagatccgaaactgtttgccatcagcaacaatttttccaagaattcggtctatgccccggtgataggcatgcttatgagcatatccacccgccagttcaccatgcagaacaaagtgcctttcgtctatttcctggatgaaatgacaacggtcaacattaaaaatttcgagtcgctgccttcggtcctgcgcgaatacaaggtcgcctttgtactgcttacacagtccggttcaaagctggagaatctgtacggcaagctcgaccgttcatccgtggaagccaatttcggaatccagttcttcgggcgtaccaaggatgtggaagccctgaaatattatccgcagatgttcggtaaggaggaaaaggaaagaaaatcccggagcacgggaaaaagcggcagcagttcgaaccggagcgttaccatctcttcccagaaagaggatatctaccagggaagggattttgcggacctggaaccgggagagttcatcggatccgccacccgtgccaatgtcagatacttcaaggtgatgctcggggagtttaaagaaaaggatgaaaaaccgctgcccgacgtccgggttctggaaccgggagaaatatccgggaattttgccaggatccttgaggaggtacgctcccttttcccatgtgaatagtaaggacaggccggggctacaggtcccttccggaaagaagatccgtccccagccttttaagttcctgaataattgccttcctgggatttaccacaaaccggtaaatccggaaggtgttggcatacagacgtctttcttccttcagctcccctttgagaacttcctgtttgagctttgataccgcctcgttcttcagttcgtttttggcctgccagttctcggaatacttcctcaggctttcatccctggaatagtaattagggaaatagtcatatgactgattgaagcgtgaagcgcaccgggaggaccattgggaacggtcaaaacctaccacgacttccctgccttcaagtacctgccggtttcccctgctttttgacagcggggagagtgatacggtctgcgtcctgtccatgcgggaaacgatcacatgtacatgaagctggagcccgggcttcttatctcccgcctttgccctgccggccttaacctccggatcatcattcttatagtggcgttccgtttccacacggccgtaccagaccaggtcatcccctgattttattttctcacggtagaagttacgggcatattcatccatacattcgcgggtgaatttcttcatctgtgccagcacactctcctgctccccgggagtcagttccgagaactccccgaccttccgtccggtcaccctttctatcagatgtctctgttcgtcaccgctgggattgatggaaagcatatagaatttgtcatccttgcttttcagggtcctgtggttgttgtctatatgattcttgacagtcaggggtataacataatctttttgctgtgagaaaaaattatcataatagggacgctcgacctgggactccttactcaggtagtctaccagccgggtgcattttcccttgttatccggtacctgcggagtgtttcccggcctatgcggtttacagtacatattcctcgttgatcttcttgataagcaactgcagggtgttgacggggactcttacatcatcgctgtattttatccttggaaacttctccggatcaagctggtatttcagcaggtcgcccaggcgtttgagcttgtcctggtatacggcggcgtcttgggtatggagatcatccgcctgcagcctttccttcaatttccggttttcatctttcagatcccggaactcgttcatcaaccgggcataatcgggtgactcctgcggggtgttgtttatggcggagagtttctcaagtacgggcttgagtatatcccgttcctgggacttgatgattctgacaacgtcctcaattctcttttccaccagtgccgtcggattccgggatgcgtagcggggattgaaccctgtgatttcaaaaaaagtaatcattctatcgatacagacactgaccgtgtcgcttcctttaaaggtgtccagacgggctttcactgtgggggttagcctgaccgcctttattgaatgttctttcatattgtatgcgttttagttatatatgtaaatagctgtcacaaagatatttgtttctatttttccttgcaagtgtcacctgtcggagagaggtgaaatatatataacttattgaaaattggcaaaatagccgacatgcatacaaggttgccaacaacttaagttgttggtattcagtggaaaaggagaaaaggcgcatacaaatgtatgcgccatgtgtaacatcgcatacatttaaattattgtttatcagcgctttgcgttgattcaagttcccggatgcgggaactcctcttgctcttccttatcaggaatttactaagggacctccggcccttagcccgggacgcttccgagaggcccggaacatcaggcaggggcatggctgccggtgaacttcctcccctgaaaagacatgacatcgcaaaagggtgggaaggctgcaagggagagcgacgggccccccaaaaaaatcctccccatgaaagaaaaaacaccctgtttccggtgggacggatacaacttttagcagaagcgaaagtaagctaatatgctgataaagagcatgcttgaatttgcaagaacggagaaaaatcattacctttgttatataataataaaggagataacaagttatgaatgaaacaattagacgcattttagccgagagtggaacaaaaacctcaaaaatccgtaagcttcttctgatcggactttcacaccgtgaaattgccgacctccttacccgtggaaaccgtggcttcgtgtggaacgtctataagagaatgagggacgagggtctgcttcccgcttcacagacagcgactgtcttaagaccagaacccgactatacttttaatcgttgcttcggggttgagatcgaagcctacaactgcccaagacagaccttgacggatgcgcttcgggaggctggcatccctgtggaaattggaagccgtaatgccgagaccaacagcaactggaaactgaccacggacggaagtttggagggaagccatacttttgagctggtcagcccgatcctctgcggtgagcagggtttggaggtactggagagggtatgctgggtgctggacgcatacaatgtaaagataaatagcagctgtggagtccatgtacattttaatgcaggtgactttaatcttacaacttggcagaacttaatcctttcctacaaacatgccgaaactgaaatagacaagttcatgcctgcctcacgcaggggaaacagaaatacctattgccgttctctcagagggttctccgatgaagatatcagatcggcggaaagtatcgagtcactacaaagactcttcggcagcaggtacatgaaagtaaaccttgaagcttattcacgccacaggacagtggagttcagacagcactcgggaacgatcaattttacaaaaatagagaattgggtgagattcttgggaagaatgattatctttgcatccacagcttcacttccggcaggaatcagactggaagattttcctttcttgggggaaaaacaaaaattatattataaattaagaacaaaaaaattaatggtatgaataatatgaataaaaagatatatatgttgccgggggacgagcgtataaccgcctccgatgctaaagagtttgtacatgaacttcggacgggcagttggatggattccaactgtaccgacgaacagtacatgtgcaattttgccgaacgttacgtgattcaggccggtgtgaggattgccactgatacaccggagaatttccttgccgatttgattcggacaggatacgccaaagagatgtaacgcaggctatttcctttattattacacctccccgtttttcctttcaagggaagacggggtttttcttttttgtctgagcagactttatataatccttaaaacacctgtttatgtttttatttcaacagcataaatacttataaagtaaaagcaaacttccagtaaattctattctctatatgcaaatagctattatttgcatgtttctattacaaaatatagatatatattgattatttgcatatatttgcggaataaataacggataaaatggtttacgtatatcttgtctttgagaagaaagactatttcttcggcagcatcaccgccatttatgaccacttgagcgcggaacaggtcggagccggctaccatacgctccggaacgtccgatggaaagagacgtcggtgcataccatgtccagggctatcataaaagtcggaaggcttctgcgtgccggtagtggcaggaagtgaccttatattgtggattctctaatttgcaggaatggtgactgcttgagggaggataggtataattttctggtaatattcagcagtaaatttacgtgttccattgtgggtacatgtgtaaggtatgtaaggctgtgcaagttgtcttttcctattacaatattgccttcgaattatataccggattccatctcacgtttcacaagaagccacagatctcttccgggttttgcaaaatggtatctgaaacgggggatatgccatcaggcaaaacggaaactaatcttcagatgggtttctttgccggatgtttccgcttcttacatgcagataaatgaagttatcagggtggtaacggaatgttcggaatataagaagtgaattagaaacataccttattcagggcgggtgggatttcaggtatcattttaccgggcggttttccgcttaatggagagagctcaggaagaggatgtcaaaagccaaaaaggaactgattataaaaaatagcctatacatggaagatagactattttttatattcgggcttaccacaaagcaacttttcctaaattgccaatttcaagttttgcgcttattcccatagccttgaaaactctggaaatagtagaaaaagtcaggtttttcccgttctcaatccgggaaatctgtgccctttgcaccccaatcaggttgcctaattcctcttgggtcaggttctttgattgccgggcttgtttgattgcttcaccaatcagaaacgaatgcaggtccgcttcatatttatcccgcttaggagtacctttttctcctatatacttatcctctatttcttcaagggtgtaaaacttcatatctttcatatcatttttttttagagttaaaatatgcttttcttatttcttcggcttttgctatctcttttgatggagttttttgggttttcttgataaacccatgtgtagcgattactaaagtatccatatcgctcgttttgtcccaaaatgccagcaggcgatattgagtattactgtgtcttgttctaaattcccaaatatccgtatcatccaattttttaaaaagtttaggatctatgatatatgtcgatttacgaatgttataaacaatcttatctctgattttagaacctaatccattcaggaaatcacttgcttccggtgacaataccacatcaaatttagcttttgcttccattactttcattttgatgcaaatataagtaaatagttccatataaggaaacgtttttaaaaaaaatgaaatgaatcaatataaaaaacagcttcttggaacggggctttttatgtagcatgtaaattgtaactttgcccgtggaaaaacggaaagtcgtatgtcccacttttacaggggtatggtttttctgccctgcgggaatgtctatctttgccggctcaacaaagagacagacaccggaatggaaacaaagagccaaaatttaaaagacaaactgtatatgtggtacaaggtaagagaacttcagtcgaaaggactgaacaagacacagatcggaaaatatctgggcgtggaccggagcactgtgcggagatatctgcggacaagccgggaagagtttttcagaaagcagaactcccaccgggagtatgaactcaagttgggaaagtacgaggagtatgtacggggtacactggaagaatacccgtacatatcggctgcccgtatgcatgactggctcagggagtgttaccccgattttccgcgggtatgtgacaagaccgtattcaattttgtagacaggatacgcaggaagtacggtattgggaaaaaatccgaggcccggatacggcgtgattatgagaagttgcctgagaccccctacggggaatatgcccaggcggatttcggggagaagtggatacctgtgaagaatggcggaagcacgaaggtttacttcttcgccatcgtactgacgcgttcccgctataagtttatccatttcagccgtcgtccttttgatacggagcttgcgatttatgcccatgaactggcctttcagtatttcgggggcaggcctgaaaagattatctatgaccaggacagggtgcttatagcacgcgagaacctgggagatttgatactgaccgggaaatttcagtcattcataaaagagcagcatttccagccggtattttgtcgcaggtcagaccctgagtcgaaggggaaagtggagaatgtggtgaagtatgtgaaagagaattttctggtggcccgtgttttacaggatatccccgggctgaatgaggaagcccggaaatggcttgaaaggacgggtaatggaaaagtgcacgggaccacccgcctggtcccctctgaggagttcgctgtggagaaaggatacctgaaaccttattatggtctaccgcagccaccacaggagcagatgaaggagtatcacgtgcgtaaggacaacacggtccagtatagggggaattattacagcctgccatgcggcacttaccggagcgggcagacgagggtctggttgcaggaaactgaggggtatgtggaactgtacagcaaggagacgggaaaaatcgtcgccagacatcccctctgtacccgaaaaggaaaaacgatttatgacgaaagacacagaaggcccaagagtattggggcacagaagctggccgaacgtatccttgtttatgtatccggaaaccgggaggtcgccttgtggatggagaacctcaagagaaagaaagaacgctattacaaggataatctggaagtggttctgcacatgatgccgggctatgacaaggatatcttgatagaggcagtgcacatatgtcttgataagggcatctacaatggcgattccgttaaaagcctgtgtgaacacgtgcacaggagacggaataaagaaactgaaacagacaggacggacagttgcccgccgcgacaaaccgggctgatacagtcttacaatgaaatcttccatggctatgataaaacataaaaaggagctggttgaatatgcacggcacctgaaactaccgaacttggcagaacatgtgggtgtgatacttcatgaagcacaggagaagcaactgacctattcggagttcctggcgaattgtcttgccagggaaatccagggcagagaaaggaaaagctacctgacacggttgaaactctccggactccccgccaaatacgatctggacctgtacgactatgacagggcggaaggaatggataacaggaggctgcgcgaactgcgtgagctggtatgggtgaaccaggcatacaatcttctcctggtaggcccttccggaaccggcaagacctttatagccgccggactcgtgtatgaagccgtaaaagcgggatacgaagcatatctgatgacactggaggagctgctcacatgcctgaaaacgaaagaggtctccgcacatgcgatgaaaacatacaagcggatcatgaaggcccggctgctggccatagacgatgccacactgttccctttgaaaagagaagaagccgtgttgctgttcaaactggtcaatgacttccaggaaaggacatcactcatcatcacggcaaacaaggcactcacccgttggctggaaacattggaggatgaagcggtcacagccgccttgcttgacaggctgctctactgctgcgagattatcaggctcggaggaacaagctatcgcatgcaaaacaggaaaacaatttttagcaaccaaaacacggatataggcacgtaaaaagagttaaggaaagtgaagcatcttcgatgctggagtgggatatactaaattacctaaaaaagtggcgcacaaatttgcgcgccacaagaacataagttggaaggtatttatagtaaacggaaaagggatgaagcgaaaagagagaatctgcaatggcgggtaaatggtttgaaggaaaagttgtcgttggaacaattggttattgttttccaagaaatgaatacccaaatcaataactcaagcggttatctcggcgcaatcagtgataggagtaaggagttgtacttcaataaacagactgtcgggcagtatcaaatggaaatgctggataagaatcccaatgcgagcttgcgaaatatggtattctatcgccaagattatttggatgagtttaatatgctttgggaaaagcaagctgtatatcataaagaactgacagaggaactgaaaaaagaaatccgtgatattatcattttctatcaacgcagactgaagagtcagaaaggattaatcggtttttgcgagtttgaaagtcggcagatagaggtagatatagatggtaagaaaaagattaaaactgtaggtaatagggtgatatcccgttcttctcccttgtttcaagaatttaaaatatggcagatattaaacaatatagaagtaactgttgtcggaaagaaaaggaaacgaagaaaactgaaggagaattattctgctctttttgaggaacttaacgatgcggaacaattagaactgaatggtagccgtcgtttatgtcaagaagaaaaagaattgcttgcccaagaactttttattcgtgataagatgacgaagtctgaagttttaaaattgttgtttgataatccacaagaattggatttaaattttaaaacgattgatggtaataaaacgggatatgcgttgtttcaggcctacagtaaaatgattgagatgtctgggcatgaaccagttgacttcaagaaaccggttgagaaggttgttgagtatataaaagcagtctttgatcttcttaattggaatacggacattctaggtttcaactcgaatgaagagttagacaatcagccttattacaaactctggcatttattgtattcttttgagggggacaatacaccaacaggaaacggtcgtttgattcaaaagatgacagaactatatggctttgaaaaagaatatgctactatactagcaaatgtttcttttcaagatgattatggcagtctgagcgcgaaggctattcataagattctacctcatttgaaagaaggtaatcggtatgatgtggcttgtgtatatgccggatacaggcattcagaatcgtcattaaccagggaagagatagcaaataaggtgttgaaagacagacttatgcttcttcccaagaatagtttgcacaatcctgtggtggaaaagattctgaatcagatggtaaacgttattaatgtcattatagacatttacggtaaaccggatgaaatacgtgtagaacttgctcgtgagttgaagaagaatgccaaagagcgtgaagaactgactaaatctattgcacaaactaccaaagcgcatgaggaatataagacacttttacagactgagtttggtttaaccaatgtaagccgtactgatattttgcgttacaaactttacaaagagttagagtcgtgtgggtataaaacactttattctaatacgtatatttcacgagaaaaactgtttagtaaagaatttgatattgaacatatcattccgcaagcacggcttttcgatgatagtttttctaataaaacacttgaagctcgtagtgtaaatattgaaaaagggaataaaacagcgtatgattttgtgaaagaaaaatttggtgaaagcggagctgacaatagtttagaacactatttaaataatatcgaagacttgtttaagtcggggaaaatatcgaaaacaaaatacaataaactgaaaatggctgagcaggatattcctgacggctttattgaacgtgacctacgtaatacgcagtatattgccaaaaaggctttgtccatgttgaatgaaatttcgcatcgtgtggttgctacaagtggatcagtaactgacaagttgcgtgaagattggcaattgattgatgtgatgaaagaattgaactgggaaaagtataaggcattaggtctggttgaatattttgaagatagagatggaaggcaaataggtagaatcaaggattggacgaaacggaatgatcatcgtcatcatgcgatggatgcgttgacggtagcatttacaaaggatgtattcattcagtattttaataacaaaaatgccagtctggatcctaatgcaaatgagcatgcaataaagaacaaatattttcaaaatggcagagcgattgcgcccatgccattgagagagtttcgcgcagaagctaaaaagcatctggaaaatactttgatttcgattaaagcgaagaacaaggtcattacgggtaatattaacaagacaaggaaaaagggtggcgtgaacaagaatatgcaacagacaccacgtgggcagttgcatttagaaacaatctatggtagtggcaagcaatatctgacaaaagaagaaaaggttaatgcttcgtttgatatgagaaaaattggaactgtaagcaagtcagcttatagggatgcattgttgaaacgtttgtatgaaaatgataatgatccgaagaaagcgtttgccggtaagaattcgctggataaacagcccatatggttagataaggaacaaatgaggaaagtgcctgaaaaagtgaaaattgtaacacttgaagcgatttatactatacgtaaggaaatctctcctgatttaaaagttgataaggtaatagatgtaggtgtccgtaaaatactaattgacagattaaacgagtatggcaatgatgcaaaaaaagcattctccaatcttgataaaaatcctatttggctgaataaagagaaaggtatatctattaagcgagttacaatttcaggaatcagtaatgcgcagtcattacatgtgaaaaaggataaggacggtaaacctatattggatgagaatggtagaaatattcctgtggattttgttaatacaggcaataatcatcatgtggcagtttattatagaccagttatagataagaggggacaattagtggttgacgaagctggcaatcccaagtatgaactggaggaagttgtggttagtttctttgaagcagtgacaagggcaaatcttggtctgccgattattgacaaggattataaaacgactgaaggctggcaattccttttcagtatgaaacaaaacgagtattttgtttttccaaatgaaaagactggatttaatccgaaagagatcgatttacttgatgtggagaattatgggttgataagtcctaatttgtttagggtacagaaattctctcttaagaattatgtttttagacaccatctagaaacaacaattaaggatacaagttctattttgagaggtattacatggatagattttcgtagctcaaaaggcctggacactattgttaaagtccgtgttaatcacatcggccagatagtgtcggtaggagaatattaatataatgaatgatttatggacaaaaacaataataatcctccaattccatctgatttctttctctataaaaacagcaatggagaggtgaaagtcgaaatctatatttttaatgagacggtttggctaccgcaagacaagatcgcacaattgtttggagtggacagaagcatagtaactgaacatctgaagaatgtatataaaagcggggaattatcaaaaggggtaacttgtgcaatttttgcacaagttcaaatcgaaggcacagggcaggtcacaagacagattgagttttacaatctcgacgctatcttatccgtaggctaccgtgtcaacagtattcaagccacacaatttggaatttgggcgaacagtgtgctgaaagaatatctgattaaggggggtgccatgaacgatgagcgattgaagaatccgcaaatgttgtttggtaaggattatttcgaagaacagttagcccgtattcgtgacattcgtggcaacgaacaacgcttctatcagaaaataaccgatatttattcgtaatgcagtgccgactatgaagcgggtagcgatgttactaagaagttttttgcaattgttcagaataagttgcattgggcaatttccaggcaaacggcggttgagattattgtttctcgtgtggacgctgataagcctaatatggcattaactacttggaagaatgcacccaacggaatgatacgcaatccggatgtttctattgcaaagaactatctcaatgaaatggaaatggatgatttgaaccgcattgtttcgatgtatttggattatgcggagcgtcaagcaaaaaaaaggacaagtgatgtacacgagagattgggtgaaaaagttggacgcatttttgcagttcaacgaataagccgtcctacaacatagcggacgggtgagctatgagattgccaaggcattagcggaacaggaatatgacaaattccatgttagacaacttcagagctacaaattgaactttgacaaacttttaaaaggaatgagtcatgattaagaaaacactttatttcggaaatccggtttatctatcgttacgaaatgcgcagctagttattaaactgcctgatgtagaaaaagcaacggttttgccggaaacgttgaaaaagcaggcggaagtaacgaaacctatagaggatattggaatcgtcgtgttggataacaagcagataactatcacttccggtgtgctggaggctttgcttgagaacaactgttccgtaatcacttgtgatagcaggagtatgccagtcggattaatgcttcctctttatggaaatactacgcagaatgagcgttttcgtaaacaattggatacttcgcttcctttgaagaaacaactctggcaacaaactattcaagcgaaaatcaacaatcaggcatctgtgcttaaagattgtatggacgaggaagtaaagtgtatgcgtatttgggctaccaatgtgcgtagtggcgatcctgacaatttggaagcacgcgctgctgcatattattggaagtctttattctcagatgttgatagtttcactcgggaacgtgagggaattcctcccaacaacttgttaaactatggatatgccattcttcgtgcggtggtggcgcgtgggttggtaataagcgggttgcttcctacgttgggtatccatcatcacaatcgctacaacgcttattgtttggcggacgatataatggaaccttatcgtccttatgtggatgagttagtgtttagtttgatacaagagtatggaaaaaatgcggagttgacaaaagagatgaaaactcgattactgactgttccgacattagaagtgataattggaggtaagcgcagtccgttgatggttgcggtagggcaaactactgcttcactttataaatgtttcaatggagagcttcggagaatttcctatcccgaacgatagattatggatcgttttaatgaatatcgtattatgtgggtgcttgttctttttgatttgccaactgagactaagaaagaaaaaaaggcttatgccgatttcagaaagaatctacaaaaggatggttttacgatgtttcagttttccatttatgtgcgtcattgtggcagtagtgagaatgcagcagtacatataaaaagagttaaatcatttctcccagaatttgggcatgtcggaatcatgtgtattacagataaacaatttggagatatagagcttttttatggaaagaaagtgcaagatgtcaatacgccgggacagcaattggagttgttctagaatacaaaatctcgcattaatgcgagattttgtgttggaaacagtcttctttttcttttttctaatttattcttaacttgttgaagaacattatgttatgcggggtaagctgtttccaatggttcaaagatactaatttgaaagcaaatcacaaccggggcatcgacgcggatatcgtccgtgaagctgtttccaatggttcaaagatactaatttgaaagcaaatcacaacttgacggtatttgggcaaaaaaacgctggtgctgtttccaatggttcaaagatactaatttgaaagcaaatcacaacgtgctattaattcttaactttgaggtatctgctgtttccaatggttcaaagatactaatttgaaagcaaatcacaactgatgtttatttgttttactcctttaagggctgtttccaatggttcaaagatactaatttgaaagcaaatcacaactgcacgattgttgcagaagaaagcacatcgctgtttccaatggttcaaagatactaatttgaaagcaaatcacaacacaaagtatacagatacgcaaatattggcgctgtttccaatggttcaaagatactaatttgaaagcaaatcacaacccttactgtcagcagaagacggtactaaaggctgtttccaatggttcaaagatactaatttgaaagcaaatcacaaccaattttcgaagattcaatttcatacaaagctgtttccaatggttcaaagatactaatttgaaagcaaatcacaacatacttgctacatttgcatatcttcgaatcgctgtttccaatggttcaaagatactaatttgaaagtaaatcataacgcatcgctttgtcttcatcagatagtatatgctgtttatgatggtgtagataataattaaaaagtactctacttagtaattgaaaagtatgctactaagtgtatctgattagacggtttaaatatagttaccattagaagctgtttcgaattgtgaataaccatttaatagattgtttatcggtttgttaattggataatattttgtaatttgtcctttggtctttaacagtaagctcctcccgcttccattcccaaccttgctttttaaaattccctgcccccatacttgctttaatcacaactatccctttcggaccagcacttatcccttttcccagaaaatactccctttttctctattttcttcatcctcaatactttctctccttttgtttttcctcttcctataacttgatttaaccctctgttaaatcaaaccttttgtttccaaataacaagtcttttcgaagccaaagctttgttctttccgcccctgaaataaatgtctccccaactgcattaacaatgttaacgcggtcttccattcaattcccgttcagccctcgtttgatttcccgtccaactcccgtcaattccctacctgtttttcagtttatctctctcccaatcccaattccttccgcgatattcttcctcgaaacatcccttttcctcccgcaaacacttctccttccccctttctcggcaaatccccttttccctctccccgataaatttcccctatataatataataatgtgtccctttccttccccgacctttcccttttccataatcaattatcagaaccttcctctccctcagccctttacgtttttattcaattttttttcaaaaaaatccccttttatatttgtctcttatctcctaatgccttacttttgcatccgctttccaagagacggacagcatttaattttgacatgttgcaacggcgtaggacctgccttacagaataacaaaaataatttcctttttatttggatcattattataaaagtcgttatctttgcagtccgattcgcagagcgagggcctttgttcgacacttctttccctttcgcacagagaggcttggaaataaaagacgggcattgaaaaaaaaacttcccaaaacatttggcagtttaaaataaaccccttacctttgcacccgcttttgaaacgaagcagaatttaaaaagaagagttctttgaaacattgataaacaatacaagtagtacaagtcaaatttagaaccgtcaatacttattatataggtatgtaaaaatgatcgtcaataaattttcgacatcctgaacagagctaatattttcccttattgggatatataacaatacttttacaatgaagagtttgatcctggctcaggatgaacgctagctacaggc

SEQ ID NO: 2332 - DNA, 18074 bp, synthetic construct
  misc_feature 1..18074: note = Synthetic
  source 1..18074: mol_type = other DNA
cacctacgttgtggtgacttttaatagttaccgaaggtccgtttaccgaaacgctttcaatcacatcggggtaaatagttccttgagccaaataagttacatcggtaatttcgtgggcttcatcatcaaaaacttcaataaaagttcctccaatagctttacgtttttcctcaggatcgcttttcccttttaatgctgaaagaaaacgctcactggaatctactccttttacgtttagccccatgtctttatattgctctaaaacgctgtcaaattcatttttgcgaagcaagccgttatttacaaaaatacagtacaggtttttcccaattgctttgtgcaacaagacagctgctacggtagagtctacacctccgcttaatcctaacactactttgtccaacccaatttttgtctttagctctgcaaccgtggtatctacaaaagctgcgggtgtccagctttgctccacaccggccatttttaccaggaagttttccagcaacattttgccgtgtgtagaatgatatacttccgggtgaaactgtatggcataggtttcttctccttcaattttataggcggcgttaattacatcggcagtactggccagccgcactccgttttcaggaagctttgcaatggtatcgctatggctcatccatacctgggttccttccggaatgccttcaaaaagggcttcgccgtctttaagcatggccaattttgcacgcccgtactccctaaggttggaaggctcgacgctccctccgtgaaaatgtgccagatactgtgcgccataacaaactcccaacaaaggcaattttccttttatgttggaaagatccggatgggctgcatcgtcattcctaaccgagagcggacttccggagaggataactgccttaaagctggaaaggtcttttggaatgttatggtatgggtatatttcgcagtatatgttgagttctcttacacgtcttgcgataagctgtgtgtactgcgagccgaaatcgaggataaggacattgttttgcatccgcaaaaatactatttcgatacaatttttcatacaaaatgtcttgctttttatatgaaatagaactctgtagtttatttgctttacactcaatatgatttgaaaaataaattttataaaaaggcgactaagggaatgatgatgccatacagtttattttcatctattcaaaacagtaatcaaatgcacgttaaacatatcctaatctattcgtaaaacaggtaatggcattcaatttttgggtaattttaaagctctatgctagaccaaaaactattacaaacgcttagcgaaaatttagaaaacgaacttcctataaacgaagtccttccagaagggggtaaacttcatattgataaaatattaccctacatctgtgtgtatcggtacaaaaaaactgacagctacttttcaggtttgctaaaaacacaggcatcgtatattattgtaaaggacacggtagctatttcagaattaataaaaacgcttgccattgccatttcaaaaaaactgaattcgtttcttatacttgaaatgtggcccctgcgaaaaaaccacgaagccgagtttgagatctcttgccctgcaggcaaagcacctgcaaccattaaagccttacaggatggcattaatgaaatgcgccttatttatcctgaagtttcagcaatagtatccgacacgcacaacagacatcccgaccggctggagccactgttaaatctggaccagacaaaagaatcgggaagtttaattattgggttggccgttcctacaatttaccaaaggccagaagaaaaccagatgttttccattttttatagaaaatttgcaacacatttttcagaaataataaaacgcgcagtatacgaatttataagagtacaaacatccaatccgtttgcacattacttaatgcttggaaaaacaaatctggaccggattaccatggaagcagacgaagccctggctgaaataagcgaaggaatgtcatttttaatgcgaaccacaccggtaaacagttctcaggagtgggaaaaatttaaagcctctaattttaccgaaaaaccagcatttaattataggttagttgccctggatcccgagcagcaaaaaagaaaactgtataaaattccgttggaaaaagtagacgatccaaccctggcctatatcttacgcgacaaacggctggaaattgaaaaacaacttactatgctggaagaacgcggaaccaatagctttcggtttgtgggggaaagtttatacggtgctattgaagacaatgtactggttggagcgcaggaaattttaaaaacatttcccgaaggggatagcccttccgaaaaagaaaaatttagttgttacgactttgccaaacacgcacaaaaagaaatagattattaccaggagaaatttccgcagttgcaattatcccttgaaataagaaaagatattgcaggcatcatggtttctgaaaccaagcttttaataagcaatcaaataatgatggattctcaacggtgcgacgctttaatacaacatgaggtagctacccatattttaacgtattgcaacggtaaaaaacaacctataaggcaaatgtatgcaggctttgcaggctacgatcaattgcaggaaggtcttgctgtgctagccgaatacctggttaacggacttacagtaaacagactgcggttactggcgggacgtgttatcgctgcacatagtctggtaatgggggcttcttttattgaaacatttaaccttttaaagaatttccatagtttcccggcacgtaccagttattacattagcatgcgtatttacaggggtggcggacttataaaagacgctgtttatcttgctggtttaatgaatgtactggattacattaaaaaaggtggaaacttagaaaccttatacgctggaaaatttaacaccaaccatgtgccgctcatagaagaacttatgcaccggaacgtacttaaaaaacctgttcttccaagatttttggaacgcgaaaacgtacaggaacgtctcaaaaacttaagaaacggaatacaacttacagaattacttaactaaagaaaaatatatgaaaattgcttttattattaacgatcacgcaaccgaaaaacctaattatactacaccagcattagggtatgcggcttacaaacgagaccatgaggtctattttattggggttggagaattagcatatgctagtgacggtcatttgtctgcccgttgtaaaacaacttctggaaaaaaatttaaaactcaggaaacatattttaagacagtacaaaaagaaaaattttctagaatcagttcgaaagatttagatgtattatttcttagaaatgaccccagcgatgaaattggcgagcgcgaatgggcacaaaatgctgcctttatttttggtgaaattgctacacgggataatgtaattgtactaaaccatccaaaaacactggcgagcgcggtaaacaaaatgtactttcaacattttcctgaaatattgcgccccaaaacgattatttccagggatcacgaagaaattagagccttctttaaagagcagaaacaaaaaatgattttaaaaccactacaaggctctggcggcacgaatgttttcatgatagacaaaaagaatgaacagaacttaactcaaactatagatgctattagccgcgatggctacgtaattgcacaagaataccttccggatgccaaaaatggcgatacccgattatttttaatgaacggagaaccactggcggtagatggaaaatatgccattatgcaacgtgtaaatgcaaaaggtgaaatacgtagtaatatacacgcaggaggaaaaccccaaaaagtaaaaatgaccgatcaaattatgaaacttgcagaaatagtacgccctaaattagtccaagatggtatgtttttggtaggaattgatattgttggagataagttgatggaaataaatgtgtttagtcccggaggattaaatgttatgggacaaatgtatgaagcagatttttccacagaagtaattaagtctatcgaaaaaaaggtatactataataaaacgtatgaagattacctcttcaatagccgcttagccactttataaaataaaaactgaaattcatggcatttttagattattataaaattttaggcatcaatcaaaacgctacggaacaggaaataaaaaaagcctaccgtaaacaagccaggaaataccatcccgatgtaaaccccaacgatcccgaagcgcagcggaaatttcaagaaataaacgaagccaatgaggtcctgagtaatccggaaaatcgtaaaaaatacgatcaatacggaaaagactggaaacatgcagacgatattgaacgcgcaaaacaacaacagcaataccaacgacaagcagggcaacaggattttggcggatttggcggggaggcctcagggtattccgatttttttgagtctatgtttggaggcggtcgcggcggctttgggcgttcggcacaatttaaaggccaggactacaacgccagcctgcaaattaacctgaccgatgtgtacacctcccaaaagcaaaccctgactgtaaacggtaaaaatatccggctcacaattcccgcaggtgtggaagatggtcagaccataaaaataaaaggctatggcggcgaaggtgttggcggaggtcctaaaggagatctttacattaccttcaaaattaataacaataccaagtttaaaagagataaagccgatctacaccatacggttacactggatctgtacacggctgttttgggcggcgatattacagtggacacctttaaaagcaaagtaaaactaaaggtaaaacctggcacccagaacaatacaaaggtaaaattgaaaggtaaaggctttccaaaatataaaaaagaagacacttttggcgatttttatattacctatcaggtaaccattcctgaaaagctttccgctaaagaaaaagaattatttgaagaacttgctaaactacaaacatcatgagcaccacagaatacatcacggtaacccatctttgtagccaatacaaagtgacatcacagttgtttcagcaattacacgaaacggggttaatacaggttataactgtagaagaagagccttgcgtacatatagaaactgtccatcaggtagataaaattatgcggcttcaccaggatttgaacgtaaaccctgaaggaattgacattatcctaaatctcctggagaaaatcgacaccctgcaaaccgagatgaactctctggaacgaaagcttcggctatataaagaataaaaacctataacgttaacacggtaaattttaaatccaggggatcgagtgtatcttttaaagtttggagtaaatcatctccataaacgaggtaatattcagaaaaattggtgttgcgctcctgcaaactctgctttgggaagagccggtcttgtagtgctgttaagcgcgctaactgatctgctagttttcttttttgggcttttaacagtcttttttccaggttgtccaagccatttaattgtttcttttcctgtgctcccacagctcctacaaaagaagcatcggtttttttcgctaactcatacaagtctttaaattgctgctgcaaatgttcccgttggggagaaagatctatttttattgctgaaatttgatgcgtaaaagctgttcttaagtcggtttgcttctggaataaccgttccaccgagacttccagattctgaagtttttctgaaagtttttcgggcaccaacaacaccgagtttcgcaataaaagtattgggaacggcacctcaaccgcttcaaagtactcttttaactgaaaccaatacgccagctcaccgccgccgccaacataacaaaggtttggtaaaatcacttcctgatatagggggcgtaacaaagcattgggggagaaacgctcgggatgggtttgcagttcgttgaaaatttcatccttggtgaatataagttcggtttcgtttacatagaattttccatcccgttctatgatgcgctcgcgaacaccttcagccaaataaaataaattgatttcccgcggatgtacttgttccccgtagcccaagtccactagtttttcggtagtttgagttacttttttaaaggataggttttcgatgagttccttttcagcatacgggataaattgttttttaagctccgcatcgtttccgtctatgattaccaggccgtatgctttaaacagctcattccctaaatagcgggtggcatctgccagatttttatgttttgtataagcttcggtaaataactcctgcaagcgttttccattttcactctcgccaaaggcttttgcagtttctttagcgacctctgctaacccttctgtagaaaattcacccactgccccaccgtccggtcgttcccaaaccatcttttttccttcaacattaaaataattaatctcctcaaaatcgtggtcttcggttgccatccagtatacgggtacaaaatggttggtaggatattcagcaatcagttgttctgaaagattaatcaccgaaaaaattttatataaaaaatacaatggcccggtaaaaagattcagttggtggccggtggtaatggtaaacgtgttttcttgtgaaagggatgcgatgttcttttgagttgcttctgaaatttcaaaaccttcgtattgtttttgaagttgattcactaaagtttggcggtccaaattgcgtacatttcgactccgctcagtgtgctccttaaaattttgaagtttcggaaaccttccgtagaactcttttagttcgggtttttcagccaaataatcacacatcaatttggaaaaatagccggtttcgctgtacggaatggtagattttgacataaaattttcagaaggtttgttcaaaaatacaggataattaagaattcagaatttagaatttagaatttgtgagaactttaagtaggtttcattattttaaaatttcagcatagcctgttaaaaatggaaaatctagtatcttagcgacccttaaacaaccataccatgttgaaacaccttacgcttacttttctttttatttcagtaacacttactgcgcaactacaatctccagccgatttcctgggctacgaaataggcacccaattttcccgtcatgccgatgtggtgcgttattttgaacacgtagcagccaatagcgatatggtaacctacgatacctacggaaaaacatacgagcgcagaccccttacctatgcagtagtttcaacagcgcaaaacattgcaaatattgagcagattagaaaagataatctaaaaaacataggcctggaaaacggtactgcgagtccgcaaaccgccattgtctggctaagctataatgtacatggaaacgaagcgtccagcaccgaagctgcgatgaataccctctacaaactcataaccgaaaaacaagcctggttgcaaaacaccgtagttataattgacccttgcgtaaacccggatgggcgcgatcgctacgctaactggtacaatcaggtaaaagctacgccgtacaatgcaaaacaggcagccatagagcataatgagccctggcctggaggaagacccaaccattatttatttgatctcaaccgtgattgggcgtgggcaacgcaggtagaaacacagcaacgattagaagtttacaaccaatggatgccacatattcacgtagattttcacgagcagggcataaatgagccgtattactttgccccggcggcagagccttaccatgagattattagtgagtttcagcgcgatttccagactgaaataggtaaaaatcacgccagatattttgatgccgaagggtggttattttttacccgagaacgtttcgatttattgtatcccagttatggcgacacctaccctacttttatgggggctattggaatgacctacgaacaagcaggccacggtagagctggactaggaattaacaccgacgaaggttttgagttaacattggtagaccgggtagcgcaccacaccaccacaggactttctactattgaaatgggaagtaaaaatgctgtaaaactaaattcagagtttaaaaaattctttaaaaatgacaaccttacctataaaagctacgtcttaaaaggacatccggacaaactgaatgcactagccaagttactggataaacaccagattacctacggaataaaaagcaacggtaccgtaaatggctttaggtatgctgaaaataaaaatggtaaaatggatgtcaccaacgcacttttggtaagtaccaaccagccaaaaggaaaaatggtcaaggtgttgatggaacccaacgcagtactaaccgaaccgttaacctacgatattaccgcatggagcatcccacatgcgtacgggctggaagcagtggcttctaccggttttgttgcagtagataaagaaatgtcggctttaaaaacaacaaatacagcttctccgaactcagctggataccttgtttcctggaatagcatgtacgatgcacagtttttagccgagctattgcaaaacgatattcgcgtacgcttttctgaaaaagatcttaaatttaatgacaaagatttcggtaaaggaacccttgtcattaccaaaagtgataataaaacaaatgaccatttcaacgaaaaagtagttgaaatcgccaacaagcacaaccgacaattatatgcatccaacaccagctttggagataccagaaccgattttgggtcgccagacataaaattaattaacaaccagcgcattgctgttttacgtggcaatggcgtttcttcgttaaactatggcgctatctggcatttctttgaacaacaacttaactaccctattacttcaattgatacgggcgattttaaagcagctacgctccatagttttgatgtgttggttctgcctagtggttggtattccagtttaaaaggtgatactatggatgctgtgaaaacctgggtacaacgcgggggaaaaattatagccattgggagtgccataaacagctttacagacctggatggttttgatcttaaaaacaatgtttcaacagatacaacgaacgacaccggggaaaccaataaaagtgaaggaaaccttactccctacgatcaacgcgaacgtacccatgtaaaaaatcttattacaggaagtatttataaagtaaaaatagaccccagccacccaatggcttttggatatagtgatacgtattatagcttaaaattagggagtgcttcgtattcatttttagaaaacggctacaacgttgggtatattgaaactccaatgtcggtagctggattttctggggaagacgccaaaaataaacttacaaattcattggtttttggagaagcaagagtaggcagtggtagcgttatctatatggtagacgatgtactatttagaagcttctgggaaaacggaaagctgttttttgtgaacgcactgttttttgtaaataataataagtttacgttgtagaaatctttaacgcttaaaatcaaaacgttataaaccgaagcatttgtttcggttttttttatataaagatttttcttactttgtgtgtcttccccacaaaatttgttaaaaattaaaaataagattgaaaaggtattgcactatttattatgcaaaacctcaaactttttaattttataaaaagtaatcgaaaacatttaaaaaagaaaggtgatagatataaatctaccaccttgaatgttttcacaacggaatagtccttattgtgaattgctttcagattgtaaatctacaaaatttatagttactaaaaatgaggataacctcaaaagaaaaaaaatgaaataatagttttataaaaaatatattattatgaaaagaatattaggattggatttgggcaccacctcaataggttgggcatttgttaatgaagcagaaaacgagacagagatgtcatttatagtgaaaacaggtgttcgagtggttccactttcaacagatgaacaaattagttttgaaaaaggacagagtattactattaatgcagatcgaactttaaaaaggggaatgcgaagaaacctgcatcgctataaaatgagaagggctgccgtgatcgacactttaaagtctattggttttattacagatgaaacgccactttctgaaaacggaaatgatacacacagcacatataagttgcgagcgaaagcagtatcagaaaagttgtccaaacaagatttcgctcgtgttcttttaatgataaataaaaaacgaggttataaaagcagtagaaaagcaaaaaaccaagaagagggacaacttattgacggtatggcagttgcgaaacgccttgaaaatgaaaagctattacctgggcaactttcatttattttattaaatgaaggtaaaaaaatgctaccaacttattacaggtcagatttgcaaaatgagtttaatgctatatgggactttcaaaaacaattttatgaggaacacttgactgaaaaacataaagaagctcttgaaggtctaaacaaaacagcaacaggacagtattttgaaaagactattaaaactcagagagcagagaacaaagggaaaaacaaaaagctgcaagagtatgaatggcggaacaaggcaataacagagcaacttaccttaccgcaagtagcatatattttaactgaaataaacaatcaaatcaatcagtcaagtggttatttgggtgctataagcgaccgtagtaaagagttgtgttttaatgatcttactgttggacaatttcaatacaaccaactaaaacaaaacccccttgcatccttaaaaaatcaagttttttatagacaggactatatggatgaatttgatgctatctggaaagaacaatcgaaacattattcagaattaaataagaaaattaaagataaacttagaaacattacgattttttaccagcgcaagctaaaatcacaaaagggacttataaacatttgtgaactagaaggtgtggaacgcaaagtaatgacagatggagagctaaagaaaaagctaataggcccaagggttgcgcctaaatcttcacctgtttttcagcactctaaaatttggcaaaatatcaataatattattttaaaaaacgaaaagacaaaagaaattgttgaattaggtgaagatttaagggaattgctgtttcagtatcttaattggaaagataatatttcggcaagccagctcataaattttttaataaaaaattcagatataccaaaaggaaagtggaaagtaaatcttgaaaaggtagaaggtaatagtaccaatgctgtactattaagtgtttatgaaaaaattactgaaattgaagggtatgataaactcaaattcagtaaccccaatgaagaactcattaaaagtttaaaggtttgctttactgaaataggagttgaaccacaaatcctggaaatggattatactttaacgggtaatgattttagcaaacaaccggcttacgagttgtggcatttgttatattcttatgaagatgattgctcaataacgggaacagaaagcctagaacaaaaactacaagaaaacttcggctttaaaaaggagcacgccaaattacttgtaggtgtcaactttcaacaggattatggaaatttaagtgtgcgggcattacgtaaaatatatccctatttagaggaaggcaaagtttatagtgaggcgtgtgctttggcgggatacaatcactccaagtccttaactgccgaagaaaacaacaagagaatattacttgataaattagagcttttaaagaaaaattcactacgaaaccccgtggtcgaaaagattctaaaccaaatgatacacgtggtaaatgctgtgattgagaatccagaaatgggtaaacccgatgaaattagagtcgaacttgcaagagaactcaaaaagacagcaaagcaaagaaatgaattgatcaaggtaattaccaaagctaccacagaccatatcgcatttagagataaaatcaaaaaggaatttggcttaccctatgttagtagaaaagatttaataaaatacaaattatatctcgagttaaaatccaatggatttcgtacactctattctaacacttacataaaacctgaagagctttttaccaagaaatttgatgtagaacacataatcccacaatcagtattatttgatgattcgttttccaacaaaaccttagaattgagagatgtaaacctcgaaaaaggaaatgagaccgctattgaatattgcagacgtaaaggttggggagatgattttaaatctcgaactgatgaaatttttaaagctaatggcataaaatacggaaagcgcaaaaaactgttgatgaccaagacagaaattcccgaaggctttttaaatcgggatttgggaaataccgcatatatttctcgcaaagcaactgaaatactgcaacaattaacgagaaaaaaagtggtctccacatctgggaagattactagtaaactgcgtagcgattgggaacttataaacgttttacaagaactcaattgggataaatacgaagtcttaggacttacatattatgattataataaagaaggaaaggcattggcaaggataaaagattggactaaaagaaatgatcatcgccaccatgctatggatgcaatcgccgttgcatttacaaagcctgcttttattcaatatttaaacaatatgcacgctaaaagtgaaaaagcaggagatatatatggcatagaaaaaaaatacacctatcgagataaggaaggtgggcgtaaatttcacaaaccttttgagaacataagagaagaatcaaaaaaccacttagcttctattttagtttcccacaaagcaaaaaacaaagtggtaactcgcaataaaaataagattaagataaagggtaacaatagtttcaagactaaaactgaactcacaccaagagggcaacttcataaagaaaccatctatggaaaatcattttacccagaagtaaaagaagaaaaaataaacggttctttttcaaaagaaaaaataaaaacagttacaaaaccaatttatcgagaagcacttttaaaacgactttcagaaaataaccatgatgccaaaaaggcatttactggaaaaaattcattgaccaaaaaccccatttttattaatgaaaaaacaaacgtacctgacaaagtaaaaacgcaacaactgcaacatcaatttacaatacgaaaggtaattaccccagaccttaaaattgataaagtaacagatgaaggcattaaaagaatactggaggaacgtctaaaagaatacaacggcaagaaaaaagcagccttttcaaatttagatgaaaaccccatttggctcaataaagaaaaaggtatttcaattaaacgagttacaatttcgggagtcagcaatgcagaaccactccatattgccaaagaccatttgggtaatgatgtcttggatgaaaaaggcaatacagttcccacggattatgtgagcactgggaataatcatcacgttgctatttataaagacgagaaaggaaatttgcaagaagaggttgtttccttttatgaagctgtcataagaaaaaacaatggtttgccaattgttgaaaaaaatcatcccaagggttgggaatttcttttcactttaaaacaaaatgaaatgtttgtcttcccaaatgaagattttgaccctttaaatatagatttatatgatgatgcaaatagagagttaatcagtagaaatctatttagagttcagaaaataggttcaaaagattattggttcaggcgtcatttagaaaccacattagttaccactaaagaattaaatgaagtcgtttatcatagaaagcgtaatcctaattcgattagtaaaatcatcaaagttagactaaatcatataggcgaaatagtgcaaataggagaatattaaagtcatgataaaacgaaccctctttttcggcaatccagcttacctcagcacgcgtaatgaacagttggtggcaaacttccctgatgaagaaaaaaaggaagctactattccaattgaagatttaggctatgtcattctggaagacccccaaatcacaattaccaacgggctcttaatgaaacttgtacagaacaagactgccgtaatcacctgcgataaacaacatttaccctgttcgttactgcaacccttagtgggacacacagagcaaacagagcgtatgcgccaccaacttaacgccagccagcccttaaaaaagaatctttggcaacaaactgtacaggcaaaaattgaaaatcaagcagtacacttagaaggtcgaggattgaatgctttaaaactaaaaagatgggcacaagaggtaaaaagtggcgatacccaaaaccacgaggcaattgcagcggcatattattttcaaaatatttataaagatttagttccagaatttgggcgtaatcagaaagggatagcgcctaataaccttttaaattatggttatgctattttaagggcgattacagcaagagcattagtaagtagtggcatgttgcccagcgtgggtgtttttcatcggaataagtacaacccattttgcctggccgatgatattatggagccctatcgcatttatgtggatgcagtggtatatgagataaccgaaacaggtgctaatattgaagagctcacccaaaatataaaggcccagttgctcacaattcctgcattagatgtacttatagatgagaaatggagcccattaatgacagctatgagccgtactactgcaagtttatatgattgttttaaaggtgaaagccgaaaaattctatatccaaaatttgtgctgaataccttgtaaaatgatttctgaaagtaatttttcaagattaaaccaataccgatctatgtgggtactcgtattttttgaccttcctaccgaaactcgtttagagcgaaaagccgcagcgggattcagaaaaaaattaattaatgatggtttcggaatgtttcagtttagcatctatgtgcgcttttgtgccagtagggaaaacagtggagttcacataaaaagaaccaagaacaacttgccgaaaaaaggaaaagtatgcattatgcaaataacagataaacaattcgggatgatggaactctttcacggtcaaaaagaaatagaacctgaaactcccacccagcaattagaattattctagaattcaaattgtctggtcgagcgtccatcagaatgaaaattcctttcgggctgacagtcgcaatctaatataacagattcaaattttaatcctatgattgtatttaaaaaacagtataccagccaattacggcgggtatactgcgaattatctctaaaattaaagaactgaaagcaattcacaacaaaagcatctaattgtctaacgtctttcttactgcgaattatctctaaaattaaagaactgaaagcaattcacaactcgaccccattcaagatactttatcttttgactgcgaattatctctaaaattaaagaactgaaagcaattcacaacatcctttgttgtggtgagttaccataaggcactgcgaattatctctaaaattaaagaactgaaagcaattcacaactaaagccaatctattagaagcggccacggtactgcgaattatctctaaaattaaagaactgaaagcaattcacaaccactggaataccttgtacctggatgcaagcactgcgaattatctctaaaattaaagaactgaaagcaattcacaacaagaagaaatagaaaaaggtgctttcgacgactgcgaattatctctaaaattaaagaactgaaagcaattcacaacgggcacaggtttattgtaaccgcagtgcaaactgcgaattatctctaaaattaaagaactgaaagcaattcacaaccatcttccaggtcttttgcatacccacggtactgcgaattatctctaaaattaaagaactgaaagcaattcacaaccggaaaattggataccactacgcgaaagcgactgcgaattatctctaaaattaaagaactgaaagcaattcacaactatcacactaccgtttgcattgtaaatgtcactgcgaattatctctaaaattaaagaactgaaagcaattcacaacaggttgcaaagaaaacctttctaccctctcactgcgaattatctctaaaattaaagaactgaaagcaattcacaactgcctcaccgactttaacaattttatacatactgcgaattatctctaaaattaaagaactgaaagcaattcacaactgctgaagtaaccaaaataaaacgggtgccactgcgaattatctctaaaattaaagaactgaaagcaattcacaaaaaaaaataaaccctgctttgtgaagtttctaatctgtgattaaacggctgttgtgttacacacaggtatcataaattttaaatagctgcctggctcaattgctttgaaatatttataaaaatggcagaattcaaaaaactgaaggaacccttgcattaaaattctcttacatcactcaaaccgaattgccttcacaggagaaattttcgatataatataactgggcagcaataacatgaccagacacaatacaaacgtgccaaggtttaatgccagaatataactaatatcaaggtaaacgggggctttggtcacataataggtgtctgggtttaagggaaaaagtccaaaatatttttgtgtgaagagtaatcccaaaccaattacatttccccaaaaaagccctactagtattaaatacatggcattgtataaaaacacttttcgcacactccaattactactacccagggcttttaaaattcctatcatctgtgtgcgttctaaaataagtaccaacaaagcagtaatcatattaatacccgcaaccagaatcataatccctataattagatacgtgttaaagtcgaataaatcgatccattcaaaaatagacccgtacttttgcctaatggtcactgcatccagatcgctgtctatagctttatacaccttgccacctaccgcatctatagcatcaaaatcctctacaaacacttcaaaagagccaatctggtcatcttcccatttattaaggaattgtatgtgcctaatatctgcaatgaggtattgctcatcaaattgctgaaaaccgctgttataaattcctacaatgtcaaatcctctggtacgtgctttttgtgttttcccttcctgcataaaaaaggtgatcactttatcgtttaactggagtcccagacgcttggcaaggtattctgaaattagtatttcttcgtttaaatcgcctttcgtatattttggaagacgtccttcccgaagaaactcttcaaaatactgccagttataatcggtacccacgccttttacaaccaccccttcaaaattggtttcagttctaattacagctcctttttgagcagtaacctgaatatgctttataccttccaccagattaaaaaccgggtaaaacgcttgctttttgcttattggaatttgcgattggttactctggttggtatcgtagttggtaattataatatctccgttaaaagccgataccttttcacgaatctttttttgaagtcccatactggtagcaacacttactaacatcataattatcccaagtgcaattgcagtgatcgcaatttttataattggccccgaaatactacttttatagtctttggcagcaatgatgcgtcgagcgatgaaaaattcgaaattcacaaaaataattatgcggttattattcttcaaaaataccattttaatagtttctctcgcgattttttcctgcggaagtacccacaatgaaacaaacgaaggtgatgatggtgcta

SEQ ID NO: 2333 - DNA, 18033 bp, synthetic construct
  misc_feature 1..18033: note = Synthetic
  source 1..18033: mol_type = other DNA
gtagatgctatttttattgagggtttacgcaaatggaatttgtatgaaaaggtatggcaagcgggtgctattttgctgccagtaaattcggtaggcgtaatgggagatgaacgaacctatgaaaaagtagtggcgttacgcgctgtagaatctaccgatgggatgaccgcagattgggtaaatttaccctatgaatttttacaagaaacctcaaatagtataataaataaggtaaaaggcgttaatagagtagtatatgacatcagttcaaaaccaccagcaaccattgagtgggaatagcctaataataatgtttaagttgttttttactgacaacactttcaacaaataataattaactaaataaataagtgaaaaaaattagcatccttttattgtttttcttattcggaaaatctatagcctttgcacaaactagttaccaaagtcactatgttaagcaaggggaaactgttttcagtataaccaagaaatacaatatctctgaagaagaattgtatcgtttaaatccagaagtcaaaaacgggttgaaaaacaataccgtacttattattccaacagaagtagcaagagaacctatagaaaacatcacttttaaagaccatagggtaaaacgaaaagaaacgctatttagcatttcgcaagtatatggggtgacggtagatgatataaaaaagcacaacaaacatttatattcttcgcaaattaaaaaaggagaaaatataaaaatacccatacgaacagttaccatagtttctaaccctatttctgctaacaaaggaaaaccagaagagataacttctggtgaacatgtggttgaaaatcaagaaactaaatttggtattgctaaaatatatggcattagtgtggctgaattagaagcattaaatccagttatttatggtacagatattttgcctttagcgatggtgctaaatgttccaaaattaccaattgaaaaaataacaatgccaattgacgaggaagaatatacgttttacaccgtaaagtcaaaagaaggattttatcggcttaaaattttatttggggtaacacaagaggaggttattcaactaaatccggaggctaaagacggtttgaaagaaggaatggtggttaaaattcctaaaaaaaaggtagcagtaaatgagcaaaccacagaaattgcaaccattttagatgtaaataaaattagcattgaaaacagactgactaattttagtactaaaaatgtagttgttttcttgccctttgaactcaataacataataaaggattcaatttctcaaaatgaaaatcaaataagtaatagtgcatctttgcgcattgctttagatttttattctggagtattaattgcggcagattttgcaaaacaaaaaggcatttcggtaaacctgcatatttttgataccgaggaaatggaattgggagttaatgctctatttaacagaaaaaacataaaaaatgttgatgtcgtattaggaccacttaggcaagtacaagtggagcgagtagctgcagatttagaggaaaaaaatattccagtactttcgccattaagtaacagacaaagtaagatgtattcaaattttattcaaagcatcccttcaaacacaattcttgaaaatgccatgatttctttcataagagaaaacagtgacggcaaaaatataatccttattgctgatggaagtaaatctgcacaacaacaaaaattacaaaatgcaattcccggaattatcctaatcaatcctggcgaaggaggctatttaaaaatggagctagtttcagataaattaagtaaaagtcaggaaaattgggtgatactagaatctaaaaaagcaactttggttaatagcgtcgttagtggtcttaatggactcagaagaaataatacgattcgcttgtttacactagacaaaaatgattcttatgattttagcgaaatttctaatttgcatttagccagacttagttttacctttccctcggtaagcaaaatctttgattataaagaagagagtccttttgtaagtgcttataaagaagtgtatggcacattaccaaatcgttttgccgctagaggttttgatattacctatgatatgctattgcgtttggcctgttcagaaagtatttttgaaaccaacgacctaatggatggagaaacctcctatcttgaaaataaatttaattacaaaaaaaataaccagggtggctattataatacttctgtatttatattgaagtataatgaagatttaaaattagaagaagtaaaatgagcacatcaaaagtagtttacaaaggcaatcttcgcacagaatgtacgcacttgcaatctggaagcacctatattacagatgctcctatcgataacaatggaaaaggagaagctttttcaccaaccgataccgttgcaacaggtttagccaattgtatgctcaccgttatgggaataaaagcggaaaacttagaagtacatttagaaggcactattgcggatgttaccaaaattatggcaaatgaacctagacgtatttcaaaaataatagtaaattttaccatgccaaaaggaatttctacaaaacaccaacaaatattagaacacacagcccgtacgtgccctgtgcactttagtttgcatccagatataaaaagagaaattaccttcacttggtaaaataaatgtattggatatctaaaataatcgtattctgcatacccttattctttgttgcagaaaatcctgtggcaatgcaatggaatgaaaattacaaactttcttgggatgattttcaaggaacaccgcccaataaaagtccatttgtggctagcacacaatcaggtatctattttagctactcttcacaaaacaaaaatggtgaaattactttaaccacttcagtatctgcaaatttttatcctgaaaattcctggtacttttctaaaaatgtaaatgctgctattttaaaacacgagcaaggtcattttgacatttcagaaatacacgctagagaacttcgtaaaaaatttagcatgtacaccgtttctgaaaattttaaaaatgagttacaaagcatatattccgaaacagaaaacaaccgaaatactatgcaaaataaatacgacaaagaaacgaaccattctaaaattattgaaaaacaaaaacaatgggaaagatttatacaacaggaactttctcgattaaaaaactggaaataagttatcatagaagtcgtcccagattctaaactttagtacaatttttaaatagtcataaaaaaaatcgcaattttgttacaacccgatgccaaccatttaattgaattagcccattacaaaatgccattcggaaaatataatggctggttcttgattgatattcctgaatattactacgtttggtttaagcaaaaaggattcccggaaggtaaattaggaaaaatgctggaacagatgtatgaaataaaactaaatggtttagaagaacttatctacaacatacgaaggaaatatcccaaataaatgagtaacttatattctgaaaactaaaagatattaacccaaataaaatttaaaaaaaatataattcatataaattattgatattcattattttcaatttttagtcatacgtcttatgtccagtccttcaagggttttaaacccttgaagggctcatcaatatagccaatgaacataaaatttaagaaaatataattaatataaattatggatattcattattttcaatttttagtcatacgtcttatgtcctgtaatcttaagtcgtattaataattaggaagctaataatattaacccaaatttcattgcaaagtatcatttcttctttgtatttttgcccattatttgcaaaaaccacaacaaccaaaagcacaaatggcaaacaccaaatatatttttgttacaggaggtgtaagttcttcactcggaaaaggaataatagcagcttcccttgcaaaattactacaagcaagaggctatcgtgttaccattcaaaaactagatccatacattaatatagaccctggaacattaaacccttatgaacatggagaatgttacgtaacaaatgacggcgcagaaacagatttggatttaggacactatgaacgttttcttaacgtagcaacttcaaaagcaaataatgttactacaggcagaatttatctaagtgttatcgaaaaagaacgcagaggtgaatttcttggaaaaaccgtacaagttatccctcacattaccaatgaaataaaagaacgtattcaaattttaggaaatagtggcgattatgatatagtcctaactgaaataggaggaaccgttggcgatatcgaatccttgccctacattgaagcggtacgacaattaaagtgggaactaggcgacgaaaacgcattggttattcaccttacacttgtgccatttttggccgccgccggcgaactaaaaacaaagcccacccaacattcagtaaaattattgatggaaagcggtgtgcgtgcagatattttagtatgtagaacagaacatcatctttcagatgatttacgcactaaattagccttgttttgtaatgtaaagaaggaagcagtaattgaatctatcgacgcatctactatctatgatgtacctaatctaatgttagaggaaggactagataccataacacttaaaaaactaaacttaagcacaaaccatattcccgatcttacacaatggaatcaattcattcagcggcataagaatccaaaaaatgaagtaactattggcttaataggaaaatatgtagaattacaagactcctataaatctattttagaatcttttattcacgcaggtgctgaaaaggaaataaaagtaaaagtcatccccattcattccgaacatgtacatcaccaaacggtggaaagcaaaataggaaaactcgacggcatcttggtagctcccggttttggcgaacgaggcattgaaggaaaaatagaagcagtaaagtatgctcgtgaacacaacattccttttttcggaatttgtttaggaatgcaaatggcggtaatcgaatttgctcgaaatgttttaggaattcacgatgctaattccactgaaatggttagcaacactaaaaatcctgtcatcgatttgatggaggaccaaaagaaaattaccgataaaggtggcaccatgcgtttgggtgcctggaattgtaaattaactccaggcagtttagttgccaaagcatatcaaaaagaaaacatccaagaacgtcaccgccaccgatacgaatataataatagctacaaaaaacaattggaaaatgctggttttaaagcaacaggcgttaatcaggaaaccggtttggtagaagtcattgaaattccttcacacccttggtttgtgggcgtacaataccaccccgaatataaaagtacagtagctagtccgcatccattatttgttgcttttgttcaagcggcttatgattttaaaaacaaaaagaatactaaaaattaatctaaataatttttttcggttgatatcgaaataagtaatagtatggaagaaaaaaaatttgattttaattcccttataggttttgttttaatagctggaattttaatatggatgctctatcaaaacgcaccaaccgctgaagaaattgaagctgaaaaaactaaaacagaattaattgaggcgcaaaagaaactgcaggaaacgcaaaaagcaatagatactgctgttgcgaaagtggaaaacactgttgacatagtttccgattccttgcaaactattgaactccaaaataaactgggctcttttgcttatgcagcatccctaccttctgccacagatgctactaccactatagaaaatgatgttttagaacttaaagtaagtaataaaggtggttatattgtagaagcaacactgaagaattttaaaacctacgattccatcccaatttttttgataaaagatggcaatgcatctttaaaccttcaatttcaagcagaaaacagagtgctcaacacaaaagacctttattttgagcctactttaagtctaaatggcgacaataaagtattgtccatgaaattaaaaacctctgaaaccacgtatttagagtaccgatatgagctgaaacccggtgaatatatgttagattttgcagttcaaaccaaaggattaagctcaattattaatacctctgagcctgcactaatggaatggcaattaaaagccttccgcaaagccaaaagtgtaacctatgaaaatagatatacagaattaatctgggaatatggagcaggaaaagatgactatttaggtcaaggtaaaagcaaagaagacacggctaaagaggtaacttacattgcttttaagcaacacttttttacctccattttacttacggatactccttttaaaagtgcccgttttttatctgaaaaccttgtagaagatgaagaaatagatactgtatttgtcaaaaattttgtcgcaaaatttccattagaatttaaaacaggcgagttggcacaaaccatgaactggtattatgggcctactgattttaaaatattagacagctacaatcgcaatctagatgaggttgttccattaggatggggcatctttggctggataaacaaatacctttttatgccattgtttacctggttaagcggatggatttcaaactatggtattataatcattgtaatgacaatattgataaaaattgcactttctcctgtgcaatacaaacagtatttatcgcaggcaaaaatgaaagttcttaaaccagaaattgaagaacttaacaaaaagtacaaagacaatgccatgaaaaaacaacaagaaaccatgaagctttacagcaaagcaggagcaagcccaatggcaggatgtctccccgcattgatgcagcttccggtgttttatgccttgtttatgttttttccttcagcatttcagttacggcaaaaaggatttctttgggcagacgatttgtccagttatgacagtgtagcagaccttcctttttatatcccattttatggagatcacgtgagtttgttccctattctagcatctatagccatctttgtatatatgatgatgaccatggggcaatccatgcaaatgcagcaacaacccggaatgccaaacatgaaatttttaatgtacttatcgcctctgtttatgcttattttctttaacaattttgccagcggactttctttatattattttatttcacaagtaataactatcggaatcatgttattcatcaaatattttatcttagacgaagaaaaaatcttagctaaaattgaagaaaacaagaaaaaacctaaaaagcaaaatcgttttcaaaagaaaatgtcagaaatgatggagcaagcagaacaacaaaaaaatattcaaaagaaaaaataataagaaactgtttgcgcttgtaaactagttttacattacttgctattatgcggttacaatttgttttatttctactcctttttggtagcttttccttggtatattcacaagaaaaaacaaatcaggtaaacgaaaacggaaaccgtcatggattctggaagcagtactacccagaaacaaaacaactgcgctacgaaggcacttttcaaaacggcaaagaaataggcccctttaaattttattgtgaaacctgtaaaaaacaaccttctgtaattaaagagtttaactcagaaaacaacattgcccgagttcagtatttttctaaagatggaaaacttcttaccgaaggacaaatggaagataaaaatagaattggaacttggaagtatttccaaaaagaatctgacaagatactacttacggaagaatatttagatggcgtgcttcacggcgaaaaaattacctactatgaaaatggtaaggtaacagaaaaagcaaactatgtacaagggaaacttcaaggcgaaactattttttatgacaacaacggcaccttaattaaaagtctaaactatgaaaatggggaattacacggtatagcaaaattttatacttctaccggactaattatgatagaaggaaactataaaaataataaggaatatggcgtgtggaaatattacagtgaaggaaaccttgtacaagaagtaaaaatagaaaactaatatttcagaaaagattaagaatatattgtcaaaggtagccatcgctacctttttttattttgtaaatttgcaaaatataaaaaagtaaggaacaagaaatctctttgctttaaatttagagagttaggattaaatatgaaacgagtagttgtagggcttagcggaggtgttgattctagtgtggcagcttatcttttaaaagaacaagggtatgaagtcattggtttgtttatgaaaaactggcacgatgactcggttacaatttctgatgaatgcccgtggctggaagacagcaatgacgccatgatggtagccgaaaaattaggaattccatttcaaaccgtcgatttaagcgagcaatataaagaacgaattgtggattatatgtttcgtgaatataaaatgggtagaaccccaaatccggatgtgttgtgcaatcgagaaataaaatttgacgcttttttaaaaatagcaatagacttaggtgccgattttgttgccacagggcattattgtcgtaaagaaattatagaaaaagaagaaaaacaaatccataggttactagctggaaaggatactaacaaagaccaatcttattttttatgccaactatcgcaagaacaattggcaaaaacactgtttcctgtaggcgagcttttaaaacccgaagtgcgaaaaattgccagagagctaaatcttattacagcagaaaaaagagattcacaaggcttatgttttataggtaaagtgcgtttgccagaatttttacaacagcaattacaacctaaagaaggccttatcattgaagtagcggaagataatttgctttttacattaaatgaaaatacatctgaaaatccgttagaagccgcaagcagaaaatttaagtatactttaaatgacggcaaaattgttggaaaacaccaaggcgctcattattacaccaaaggacaacgcaaaggtctaaatgtgggaggcactaaagaaccactattcattatagaaaccgatgtaaaagaaaatgtcatttataccggacaaggaaaaaatcatcccggtctataccgaaaaggactttttgttaaaaaggaagaagtgcactgggttcgagaagatttaagaatcgatgccgatgaaaaaatggaagtaatggcgcgcatacggtatcggcaacctttagaaaaagcaaccttatttcaaacccataacagactttttgttatctttgaaaatgcacaaacagcaattaccgaaggacaatttgtagcttggtatcaaggtgatgaattgttaggcagtggtgtaatttcgtaatttgcactaacccttcaagattctaaacccttcaagattctaaacccttgaagggttgaataagataaagtattgataaatcaaaaaatataaagcaaacagccctgtttagctattattttcttacttttaacaattgggtataaatatttatacaccaaaagcatcataaaaatccccgccaataataactcaatcttagattagggttgtaaataataatattttttctttaaaagagaagataagtaatctgtcttttaatcacttttttttagaaaaatttgtaaaaaataagcaaaaaaaatgccccgaagatagtcgaggcgctaaatgttttcacaacggaataatccttattgtgaattgctttataagttctgaaacaaatgtaagaaaataaattgaaacaaaggcaaactataaaatagtgtataaaagtgtaatgaatataaaaaaataaaagtaagcttatgacaaaaaatatacttggactggatttagggataacatctataggctttgcacaagtaatagaaagtaacaccccagaaaaatcagaaataatacagattggatctcgaatcattcaatatgataactttaacaaagtagataaatctggtaaagtatcagaatctaaaaaccctgagcaagactttacttctggaaaaggactttccccaaacgctggcagaactttaaaaagaggagcaagaagaaatttagaccgtttccagttgcgtagaaaaaatttagtaaacgttttggaaaaagcgaatataattacaaatgaaaccattttaaccgaaaacggtaaacataccactcacgaaacttggcgtttaagagctatttctgtaactaaacaaattgaaaaagaacaattggctcgcgtttttttagcaattaataaaaaacgcggttataagagtagtcgtaaggctaaaaatgaagatgaggggcaagcaattgatggtatggctatagccaaaaaattatataaagaaaatttaacacctggacaactggtttatcaattattgaaagaagaaaaaaaaagcatccccgacttttatcggtctgatttacaatctgaatttgataaagtttggaactttcaaaaacagttttatcccgaaatttttaacgattcattttacaaggaactactaggaaaaggacaaagagccacatcggcttctttttggaataaatacaaattcaatactgccgagaacaaagctaagtctagagatgaaaagaaattgcaagcatacaaatggcgaagtgatgctattgtaaaacaattggaaaaagaagaagctgccttcgtaatcacagaaatcaacaacaaccttaataattcaagcggatatttaggtgccatatcagaccgcagtaaagaattatatttcaacaaagaaactgtagggcaaaacctctataaacaaatccttcaaaaccctcatacactattaaaaaatcaagttttttatcgacaagattatttagatgagtttgaagctatttggaaagaacaagccaagcaccacatagaattgacagaggatttaaaatctgaaattagagatattgttattttttaccacagaaaattgaaatcccaaaaaggtttggtgagtttttgtgaatttgaatcacaagaaaaaatcattgatggtaaaaagaaaaccgttggttttaaagttgcaccaaaatcttcactactttttcaagagtttaaaatatggcaagtactcaacaatgtattggtacgcaaaaaaggcagtaaaaagagattacccaaaaatatagagcaaacaaaactttttgatgaggaaaaagaaatttttgattttgaccttgaaacaaaacaaagtttatttgaggaattaaatattaaaggtaatttaaaatccagtagagttattgaaatattgggatataagccaacggaatgtgaaattaattattctgaactagaagggaatagaaccaatcaagttttgtataatgcatacctcaagatattagaagttgagggctataacgaagatttgcttaaactttctgataaagatgaaataaacgtaaatgatttaaaaacacctgcatctgaaattaaagaaatggttaaatctatctttgaggttttaggaatagacaccttaattttagaatttgatgcagaaatagatggaaaagaatttgagcaacaagcttcctaccaactatggcatttgctttattcctatgaaggtgatgattccccaagtggtaatgaaaaattgtatgaactcttaacaagaaaatttggatttaaaagagaacacgctcaaattttggctaatgtaactttttcagatgattatggaagtttaagtagtaaagccattcgtaaaatatacccacacattaaagaattacattatgacaaagcctgcgtaatggctggttatagacactctgcttcttcactaaccaaagaagaaatagcagaaagacctttaaaaaatacacttgagttgttgaaaaagaatagtttgcgcaacccagtggtggaaaaaatcttaaaccaattggtgaatgttgtaaatactataattgacaaaaacagcaaaaaggatgaaaacggaaacgttatagaatattttaagtttgatgaaatccgtattgaattggctcgagagttaaagaaaaatgccgctgaaagagccgaaatgactaccaacattaatgcggcaaacgttgctcaccaaaagatttttaaaatacttcaaagcgaatttggtataaaaaacccaagcagaaatgatatcatacgatttagattatatgaggagttaaaaaataatggatttaaagatttatataccaatacctacatacccagaaatattatatttagtaaacagatagatattgaacatattataccacaatctaaaatgtttgatgacagtttttctaacaaaaccatcacttatcgaaaagacaatttagacaaaggaaataaaacagcttttgactatatcgaaagtaaatttggcgagattgagttagatttatatactaagagaatagaaacactctatgaacttggtaagaaaaataaagatgaaggaatttcaaaagcaaaatatcaaaaactgttaaaaaaggaaatcgaaattggcgatggttttatagatcgtgatttgcgagatagccagtatattgcaaaaaaggcaaaaaatatgcttttagaaattagccgaaccgttgtttcaacctcaggtagcgtaacaaatagacttcgtgaagattggggattaatcaatataatgcaagaactcaattttgaaaaatttaaatctttaggattaactgaaaaagtagaaaaaaaagacggcacttttaaagaacgcattatagattggagtaagcgaaatgaccatcgccaccacgcgatggatgcacttaccgtggcatttaccaagcataaccacattcaatatctcaattatttaaacgccagaaaaaatgaaaaccacaaattacacaatattattgttggaatagaagctctagaaaccaaaatactaatagatgatgaaggaaataaaaaacgtgtttttaacttaccattacctcgatttagacaacatgcgaaagaacatttagaaaatgttttggtatcgcacaaagcaaaaaacaaagtggtaaccaaaaataaaaataaaataaaaaccagtaatgggaacaaagtgaaaattgaacttaccccaagaggtcaattacacaaagaaacagtttatggtaaatacaaatatgatgtaaacaaagaggaaaaagtaagctctaaatttgatgcaaataccattaaaaaagtaagcaatcccttgtatagaaaacttttatcggaacgcttagaaaaaaatggcaacgacccaaaaaaagcatttgggggtaaaaatgtattgagtaaaaacccaatttatataaaccaagataaaacgaaaacattaccagaaacagtaaaactaacctggctagaagaagattattctgtaagaaaagaaattactcctgaaaacttcaaagatgctaaaaatatagaaaaagtatttgacgcaaaagtgaagaaaattttgctagaccggttaaagcaatttaaaaatgattcgaaaaaagctttttcagatttagataaaaacccaatttggctcaaccaagagaaaggcatcgctataaaacgagtaactatttctggggtgaaaaacgcagaattcttaaattacaaaaaagatcatcaggggaattttattttagataataaggaagaaaaaatacctgttgattttgtaagcacaggcaacaaccaccacgttgctatatacagagatgaaaaaggtaagttgcaagaaagagtggtttccttatttgaagcagtgcaaatggttaatgcaaaagagccaataattgacaaacaatttaatcaaggtcttggttgggagtttttatttactatgaaacaaaacgaatgctttgtttttcctaatgaaaaaactggtttcaatccatctgaaatggatttattagaccctaaaaacaaaaaactaattagtccaaatttgtttagggtgcagaaaatttccaataagaattatgtttttaataaccatttagaaacaaaagccatagatgggaatattcttaaaaataaaaaagatttaagtggaataatgtactattttattcaaacacccaataatcttgaaaatattatcaaagttcgcatcaatcatttaggggatattgtaggtgtaggagaatattaaatttgtaaaacatgctcaaacgaacccttttttttggtaatccggcataccttagcaccaaaaacaaacaattggtagtttcttttccagataaggaacaagaacccagaacaatacctatagaagatattgctgtggtggtgatggaaaaccagcaaatcaccattactaacggtttgttagaaaaattagtaaacaggggtgtggcagtcatcaactgcaatcagcagcatttgcccatcgggatgtttttaccgctaaatgggcatacagagcaatcagaacgtttcagaaaccaggtaaatgcatcactaccgctcaaaaaaaatctatggcaacaaactgtaaccgcaaaaattctaaaccaagcgggcttgcttaaagaatataatattgccattataaaaatgcaacattgggcaaaaagcgttacctctggagatatcttaaatcatgaagcacgcgccgcagcctactattggcaaaatttatttaacatacccaattttaataggcaacaaaacggtgtgccaccaaaccatttgctaaattatggctatgctattttaagagcaattacagcccgtgctttagttagttcagggatgcaccccacgttcggaatttttcatagaaataaatacaatgcttattgtttggcagatgatattatggaaccctaccgaccctatatagatttaatagtaaaagatatcgtagaacgagaagatcatatcgaagagatcaccgtggatattaaaaagcaattactggaagccatagcaatggatgtaactatagacggcaaacaaagcccattaatggttgcaatgagccgcaccacaaattcgttgcaggaatgttttagcggggtttccagaaaaatattatatccagaatatggatagtcttttttttataactgccagtaacactactcttggtggtctatcagaatacaaaatagtggtggttgggtttttactgaagctatcctgttaaaataacaatgaataatgaccgatttacaagacttaatcaatatcgaagtttgtgggtattagtattttttgatttgcccacggaaactaaaaaggacaggcaacgagctacccgtttcagaaaacatttactagatgatggctttgcaatgtttcaattttctatttatatgcgtttttgttccagtagagaaaatgctgaagtacatgtaaaacgaattaaaaacaatttaccaccattaggaaaaattggtgttatgcaaataaccgataaacaatttggaatgatggaattgttttatgggcaaaaccaagtagaaaccgaacagcctagtcaacaactcgagcttttttaaattaaaaaacagtgggtaaggcggtaagcttttgaaaaaaagcattcgttttttatttctaaaaaatagagtaaataacaacataccagcatgttaaacaggggtatgttgttaatcctccataaaaatagaactttgaaagcaattcacaactatagcttgaagttcctatgcttggaaaaggttgttaatcctccataaaaatagaactttgaaagcaattcacaacccccaagatagattcgatttcctccttatcgttgttaatcctccataaaaatagaactttgaaagcaattcacaacctaaccacacttattcgtttctatgttctagttgttaatcctccataaaaatagaactttgaaagcaattcacaacttagactgcgttaatacaggatttgtacaagttgttaatcctccataaaaatagaactttgaaagcaattcacaactagaaaaggctgggtattttactacctttcgttgttaatcctccataaaaatagaactttgaaagcaattcacaacatgttggcggcaaggctaatccaacacaccgttgttaatcctccataaaaatagaactttgaaagcaattcacaactacaccgtgccagatctatacggctcaatgttgttaatcctccataaaaatagaactttgaaagcaattcacaacccataactttaagcatttaccaaagctactgttgttaatcctccataaaaatagaactttgaaagcaattcacaaccatcgtctgcgttgtaatacctcgtaaaagttgttaatcctccataaaaatagaactttgaaagcaattcacaacttggcagcaattaatttttaaaaatggaaagttgttaatcctccataaaaatagaactttgaaagcaattcacaaccagatgctgaagcattaatcacacgcctgggttgttaatcctccataaaaatagaactttgaaagcaattcacaacttagagcaatggcattgcatttgttctgcagttgttaatcctccataaaaatagaactttgaaagcaattcacaaccacgcataccgcctggatccgagttaaaatgttgttaatcctccataaaaatagaactttgaaagcaattcacaacgccaaggcctatgcccattaatccgggtacgttgttaatcctccataaaaatagaactttgaaagcaattcacaactagaaacttacatttcttcaacaacgaatagttgttaatcctccataaaaatagaactttgaaagcaattcacaacctgacctcctcatccaaagaatcatctacagttgttaatcctccataaaaatagaactttgaaagcaattcacaaccagaggatacagcgcccggtgaacaactagttgttaatcctccataaaaatagaactttgaaagcaattcacaacttgtgttggtctatgttgccaaattttgacgttgttaatcctccataaaaatagaactttgaaagcaattcacaacttcccctaagccgtgtgttactgctataggttgttaatcctccataaaaatagaactttgaaagcaattcacaacatctctatacttttagctgctatttttgttgttgttaatcctccataaaaatagaactttgaaagcaattcacaacccacttattttttacactctatttagaattgttgttaatcctccataaaaatagaactttgaaagcaattcacaacttctgacaaaattcagtttggtaatgaaatgttgttaatcctccataaaaatagaactttgaaagcaattcacaactcataagctattctattaatatactttagagttgttaatcctccataaaaatagaactttgaaagcaattcacaaccctagcactgcactattataaactaaaaaagttgttaatcctccataaaaatagaactttgaaagcaattcacaacataggactttcaaacacgattgaggcagtcgttgttaatcctccataaaaatagaactttgaaagcaattcacaactcaacggtaaattctaaaatatcaggaactgttgttaatcctccataaaaatagaactttgaaagcaattcacaaccccaaagtcgctattactcgtctataaccgttgttaatcctccataaaaatagaactttgaaagcaattcacaacccttgactaaaggtatctaatccgccttggttgttaatcctccataaaaatagaactttgaaagcaattcacaaccaacaatttaattttgcagatgggcatccagttgttaatcctccataaaaa

SEQ ID NO: 2334 - DNA, 17951 bp, synthetic construct
  source 1..17951: mol_type = other DNA
  misc_feature 1..17951: note = Synthetic
agtctgcaaaagccaaggttggatttccttgccaggaatgcgcaagctcctcccctcgaatgacccctatagttttcaatcccaattcctttcctgcggcagccaaagccgcaatatgattggaaaaagcaccgccaaagcttaataaagtagtagcgttctgctttttagcttcaaggatattatactttagtttgcgaaatttatttcctgaaactttaggatggagcatatcttcacgtaccatccagaggtcaatttttgcattttttaggacatttacctctattttttgaacgggaacgatctttttatggaaactcaacgagctatttttcacaaaataaattgattttcagcgttttgtattttattaaataattctgaatagaaacgcaatttcgtaataaaatatttaataatcagctacttaagtccatttaaaataaaggattatcaaaattttcctcattattcatcttaatttttttaaggataaattttcaataagttaaataaattggtatttcatcgatattatttgcatttggtcggtaattatttataatattgtttagatttcttaaaacaatcgtgtatgaaaacaaaactacttatgttcgtaagtgtcttatttctgctaagcacttttgcccccgtaattaccaatgcccaagtaggaatcaacaccacctctccccaacccggatccatgcttgatgtttccagttcggacaaaggaatgttggtccctagggtaaacattgccaatctagccaccattgccccaattactggaggcggtactgaaagcttgattgtctataatacaaatactaccacaggaaaaggattttactattggagtggctctcaatggatagccatttctagtgacgactggaaaagaagtggaaattcgggaactaccccaggaactggagccggacaaaactacttgggaaccagcgatgcacaggattttattattgctacgaatggcaccgagagataccgtttcttaagcgatggccgcatgcaagcaggcgcttcaggatcggcaagcaatcccttatttgcatggactggcgattccgacaaaggtttttatagttctggaagtgatggtttcggtattgcaaccaatggaacggagcgtttcaacctaaccaattcagaaattgtggcaaacaaccctggaaacgatatcaattttcggattgccaccactggagataacaacgctctcttcgtagatgctgctagagataatataggtttgggcaccaacgcgccagacaatagtgctcaattggaattaaacgactccaaccgggggattttaattaaccgtgtggctttaacctctaccgcagctgccacacccgtcacttctccagcaaacggccttttagtttataatacggcaaatgctagtagcggaagcacggaagtacttcctggtttctactattgggatagtggacaatggattgccatgggaggaaccggaggacgggattggtctttggaaggaaatgcagggaccaatagtgctaccaattttattggaacaacagacaatgtctcccttaacttcagaacaaacgattcacaaagaatgcgaattgatgcagcgggaacggtcggaattggaaataatccttacaccgataccggacttagggtgagcaatgccgcacaaccgtatggaattgtttctgaaacatcttctacgggagtagccgtgtatgctacagacactggaacgggactgggcatgtttacttcttctgccaacaaccatggaatttttgccacaacagactatacaggtggggcttacttaattggaggcgttattggttggggaggcggaaacaaccgtgccaatggagttttagcggtagccgaccagcaagttagctcagattccaatatgggaattagagctgtttctggaagcactacgtctatttcttccagtgaaattcttaatgttggggtgaactccaatgctaccgatttagctttatatgccatgagtgaagggcctattacatctgtaggtgaaatggaagccgccaggtttcaatccaattatacaggagatgccatcaatgcagatgcaagagatcccagagcgcaactagcaggttttaccaataatagtcaggtgggaggtagcagtatgtattatggcggttatttttacagcggtggatctagcagtaattcttcctacgcatacgcaggagctcgttatggcggcaccaattacaagatcattggaaacggaaatgtttccaccatcgtcaatggagtggacgggaataagaaagtcatgttcgccccggaagcacctgaagtgctttttgaagactacggaacaggaaaattagttaatggagaggcgtacattgccatagaccccgatttctccaataacattcaagtggatgagaaacatcccttaaaagtttttattcaactggaaggaaattgcaatggtgttttcgtaacccaaaaaaccgctcaaggatttaaagtaaccgaattacaatatggaaactccaatgtcccattttcatggcacattgttgccaaccgtaaagatgaagtaggaagaactgcagaagaaaactctctttatgcagatttaaggtttccagacgcccctcgctctatggctccacaaaataatagtacacatgaactccaaaagctagaccccaaaccctcaattatcgttaccaacgattgagaaaaaaacattttgatttcatctgaaaaagtaggatccagaatttctggatcctacttttagtttttatttaacttatttgtaagaatattcttaatatattcattttgtgtgcatttcatcgaatttattttccttttaactaaaaaacgcgtaagattgctgactcaaatcgaattaacattttttaacaatttcagctatgaagtcaaactactttgctttttttattgtgacagtgtgctgctttggttttgtaaatgcccaagtaggaattaacactaccagtccctccgcaggaagtatcttggatgtggagagtagcgacaaaggagttttaatcccccgtgttaacatagccaatttagccacgattgcccccattacgggtggcagtacggaaagtcttttggtatataacacaaacactactactggaccaggatttttctactgggatggaaccgtatgggttgctatcgatggtggaagggactggaaactagaaggaaacaatggcaccactcctggaacaggggcaggacaacatttcgttggaacaaatgatgcccaagaccttgtagtggccaccaatagtaacgaaagatttcgtgtaaccagtgatggtagaatcctagctacacaattagggagcgccgctaccccgctatttgcctgggccggagataccgacaaaggattttatagttcgggtgccgatgaattgggatttgtaaccaatggaaccgaacgtttccgtatcccaaatgccaatcaggtacacgccatggccaatggagccaatggcaatcctttttactcttggaacaatgataccgacttgggaatttggagaagcactgccgacagacttaacatctctgccggaggtcgtgaaatggtcgaattcaatgaaagtggagcgaactcggaggtcgtttttaatgatggtggaaccgatactgatttccgtgtggaaacgagcggacaagcaaatatgatttacgtagatggatcaaataatattgtaggggtaggaacaaacactcccaatgggttactggatttaagctccagcactatgggaatgattcctcctcgggttgctttaacttcaacgcttacggaagcccctgtagtaaatcctcaaggaggaagcttattggcgggtacgtgtgtttacaatacggctaccgctggaactgctcctaataatgttgctccaggattgtatttttggaatggcgctagatgggtggcttttgcaggttccccaggaggtttagactggacgcttaccggaaatacaggaaccaatactacaagcaactacctaggaacggcagacaatgttggggtagtgtttagaaccaatggtaccgaacgtatggaaattgaagacgacggacaagtaaacataggccttggtgccaccgcaagcacagcgggttatcaattggaagtacaggctaccgcaaccgatggaaacgccattgttggccatggtaatggtcttggatatggcgttcgcgccgaaaacctctcggccaacggaggtgctggaagggctttcctagcccataacgacaattatgtgattaattccatcatgtacaatgcgaatacgagcaacagtgttgggcttttagcctctggaaatggcgcaagtttaagttactatgctaccactggtggaacctttaatggaaccaattttggaggtgctggaattgccaatgaaactaccggaacaggtattattggaactggaaatggcagaacttccattgtatatgatccagacggctcgggcgtaggtggatcgggtgatgtgttaggggtctatggatatgccggtaatggaggggtaagctcttctaactacggaaatgctggagcacgattccagttggatgccgacaatgatatcaccaccaccactggaaacggcgctacaagagctagtgctattttagctggttttaataacgttcgacctcccggaacttccagtagcagggatagttattatggaggctattttagtggcgggagcgaaggctcgggaaccccttcgtatgcctatgtaggcatgcgttaccgaaccaattccaatggagacggagtaagctttggaggacaggattataaaattattggaactggaagtgtttctaccttaattaatgaccaaaacaacaccccaagggtcatgtttgccccagaggctccggaaattttatttcaggattttggcgtaggtcaattagtaaatgggcaagcaaggattaatttagatcctattcttaaaaggaatatttatgtagacaagaacaaccctttaaaagtttatgttacactagaaggagaatgtaacggtatttatgtgaccaataagtctgccgatggttttaccgtaaaagaattacaaggtggcaccagcaatgcttctttttcatggcaaatcgtggcaacgcgagccgaccgtataaatgcagacggaactattgcctctaagcacgtgggaattcgattgccagaaggacctggccccattaaaagtaaagccatgaaggaggaaaaatccaaagaagtgaagttggacgatatccgtccttcggtttctgctaacgtaaaaaactaaagatactttacaaaattccaaaaagacctttgctttctatagtgaaggtctttttcatttttgtaggcttccctttcaaaagaaatgtttttatacgcttggtatctatttctgtactgcacccaacgacacaaaaactccattccataccagagataaaaaaataacaatagcatttctgcttgttgtcgcaaatggatactttcatgattcagaaaaacagcgtcctcctttaaactaggctcccttaccaatacaaaaggccacaaggccatccccctgaatttcttccgaagcaacaaacgatttacccaaacgatcattactgcaagataagaatttggtatttttgtagtatgagcttttttaagaaaaaaccggaactggaagaaggcgattactatctcaccccagaaggctaccgctgctttaccgaacagtaccacctaaagcgggggtattgctgcgaaagtggctgtagacattgcccttatggtttcaacaaaaagacaaattcgcaatccaaataattatgacattccaagaagaactattagaaggaattccccataccttacccaatcctaagaagtacgaccctcacattaaccatgctcccaaacggaaagaaattttaagtaaggccgaagggaaattggcgctccaaaatgctttacggtattttgagccgaaacaccacgccaccctcctacccgagtttcaaaaagaactggaaacctacggaaggatttacatgtaccgttttcgaccagagcatcctatttttgcccgtcctatttcagaatatcccggaacctgtgagcaagccaaagctatcatgctcatgattcagaacaatttggatactgccgttgcgcaacacccgcatgaattgattacctatggtgggaacggtgccgtatttcagaactgggcacaataccgactcaccatgaagtaccttgccgaaatgacccacgaacaaactttggtgatgtacagcgggcaccccatgggcttatttccgtcccataccaatgcaccacgagtcgtggtgaccaacggaatgatgatccctaactactcgcaacccgatgattgggaaaagtttaatgctttgggcgttacccaatatgggcaaatgactgcgggtagctatatgtatattggtccgcagggaattgtacacggtaccacgatcacggttttaaatggtttccgaaagattggcaaaagccccaaaggcggtttattcgtaacctctggattagggggcatgagcggggcgcaacccaaagctggtaatattgccggatgtgtgacggtctgtgccgaggtcaacaaaaaagccacccatacgcgtcatagtcaaggatgggtagacgaagtaatttcagatctggaacaactttgtgaaagagtgcgaagtgcagtatcgaaccaagaaaccgtatcgatagcctatgatggcaatgtggtggacgtttgggaaaaatttgatgaagaaaacatccatatcgatttgggcagcgaccaaagctctttgcacaatccttgggcgggcggttattatcccgtggggatgacgtatgaagcggccaatgagatgatggccaaccagccttcagcatttaagaaaaaagtacaggaaagtttacgccgtcaagctgcagctattaacaaacacaccactaaagggacttatttttttgactatggtaatgccttcctcttggaagcatccagagcaggagccgatattctttcggaagataaagacgcaccaagagagtttcgataccccagttacgttcaggacatcatgggccccatgtgtttcgattatggatttggccccttccgatgggtatgcgcttccggaaaagcagaggatttggccaaaaccgatcaaattgctgcggaagtattggaagaattaatgaagaactcccctgaagagattcagcagcaaatggccgataacattcagtggattaaaggcgcccaagaaaacaagttagtggtcggttcgcaagccagaatactatatgcagacagtgacggaagggttcaaattgcttccgcattcaacaaggcgattgccgcaggcaagataggccctgtaattttaggaagggaccatcacgatgtttccggaaccgactccccttatcgggaaacgtccaatatttatgacggcagccgatttacagccgatatggccattcacaatgtgattggcgacagtttccgaggggccacttgggtaagcattcacaatggcggcggtgtaggttggggagaggtcataaatggtggtttcggtatggttcttgatggtactaaggaagctcaaactaggttagaatcaatgcttttctgggatgtcaataacggaattgcccgccgaagttgggcacggaacgaagaagcggtttttgcgattaagagagccatggagcaaaacccaaaactctcggtaacccttcctaatttcgtagatgaaaaattgtttcagtaaaacacaaaagctatgaagtccttaaaatttttacccgtcttactccttacctttatcgttacttcctgcacaaccgtgcgtgttgcgaccgactatgaccgaaaagcaaattttggtgcttaccaaagctttgccttttacaaaccgggaattgataaagccaagattagcgatttggacaaaaaacgaatccttcgggccattgatgccgagttgaccgctaaaggaatgattaaatcggaaaaccccgatttactagtgagtatttttaccaaagagcgggaacgggtagatgtgtacaacaacaactttggttggggttggggatggaacccatggtggtatggcggcggtgcctggggctctaccgtaagcaggactcaagaaggaaccttatatatcgaccttattgatgccaaaagcaatgaattggtttggcaagggattggaagtgcccgattgatcacgaccagcgatatcgaaaaaaaagaagcacgtattcgggaaattgtttctgaaattttaatgaaataccctcccgaaaccccataaaaccccttcagaaaaacagtaaaaacccccacctaaaatgggggtttattttttgaatttcagtgagttacaaaatacatttgacccatcaaattacactaaaactaattgaaatgaaaacactttttaccttattactccttattttgacccttaccggagtggcccaagacgctactttcgttcacaccgttaccccctctaatacgagtgccgacctttcgtatatagaccatcctttgctcaacaacaatcccaacgcacaattgatcgtctctcacgtttggaacccaccgggaagcagcggggtttacaatacacaccgcaccgggttgtattatgatgctactgaaaataaatggggcgtttacaatgaagatgccaacaacatcgtgaatggatcgtcgtattttgtgtatgtagaacagaacagcgaggtgtatcaacatgttacctcattgtccaatcaaggaactagtgacgcctataccgtattgagccatcccgatttaaatgggaatcccgaagcacaggttgtggtttccacctattacaaccctaacgcttccagaaacgacaaaaactacggtacttggtatgatggtactaattggaatctatttacagaaggtggcgctactatcgaaataggcgatgcctttatggtggcggtcaatggcggagatttaacccaccgttatcgacatgttgcttcagctgcttctatttcaggcaacgtgactattatagaccatcctgccctcaatgggaatcccgatgcccgttttgtttttatgcacaattggggtgaaactggaacctctgccaatgtgattgtggataaggtacttggggtttggtatacgggcacgaattggtctatttataccgaagatatctcggcttttccagaagactcggaatatgacctgattatttttgatccaaccttaggggtttccgaaaacggttccctggcctcggtgagcctttaccctaacccagccgacacctatacgactattgaaagccaagaaattattgaggaggttcgggtatataatttactgggacaggaagtactgcgtatcgctggagaaggcatgaaaatgagcctagatacaagttctttgacttcagggacctatttggtaaacgtacgctgtgaaggacgctccaaaaccttacaattgcttaaaaagtaacccttacctttatggaaagaatgacaaaaggcgccctaaggcgtcttttgttttatacacaaccgaaagtatttttttacgatacagcttgattttaattttttatctatattgctataatccccacacaaagagatataaaaaagccccgaataaaagtcgaggcggcttaaatgttttcacaacggaataatccttattgtgaattgctttcagatagatacaaatatataaaaagaaaattaaatggtaatgaggatttccgtaagctactttgattattcgttattatatttaaatctaaattatttagtatgaaaaaagttttaggactggatttgggaaccaatagtattgggtgggctttggtgaatgaagccgaaaagaaagatgaagcttctcaaattattaaattaggtgttagggtaaatccattaactgttgatgaaaagacaaattttgaaaaaggccgtcctctatcaaccaatgccgatagaacattgaagcgaggaatgcgccgtaatttgcaacgctataaacaacgcagagaaaaccttattgaaatcctaataaaaaatggaataatacaaaaagacactcccctaaccgaggtgggaaaaggcaccacatatcaaacactttctctgcgtgccaaagctgctagagataaaattgaactggaagattttgctaaagtcctattggcgataaataagaaacggggctacaaaagcagccgtaaagccagcaatgatgaagaagggcaacctattgatggtatggctattgccaaagaattatatgaaaggaatataacaccaggacaatatgttttagagttgttagaaaaggacaaaaaatacatcccagatttttatcgttccgatctgaaacaggaattcaatgcaatctggaataatcaaaaagctttttacccagatatcctcaccaatgaactctacaaagaattagagggaaagaacaagtcccagacctggtccatttgccaaaaaccttttggcattgtaggtataaaacgaactgccaaaggaaaagaaaaaaaccttgaaaacttccaatggcgcgcccaaggactatctgaaaaactggatttggaacacttggcaatcattcttcaagaaataaataatagcattaaccaatccagcggatatttaggagcaatctcagacagaagcaagagattgtacttaaacaaagaaacggtgggtgagaatctttactcacaaattgcaaaaaatccgcatacttctcttaaaaaccaagtattctatcgtcaggattatcttgatgagtttgaacagatttgggaaacccaatccaagttccatcgtcaacttaccgaggaacttaaaaaagatgtcagggatgtcattattttctatcagagaaaattgaaatcccaaaagtcatcgataagcttttgtcaatttgaaagttgggaacaggaatatgtggaaaaggaaacgggtaaaacgaaaaagcgaacagtgggccgtcgcgtcataccaaaatcttccccactctttcaggaattcaagatttggcagaatttgaaccatttggtttttataaacagtgaaaccaatgaaaccattgaagtcaaagaattggaccaagaaatacgccaggaaatttttgacgaactcaatctgcgtggtgacctaagtcccaatgatttgctcaaaatcctaaaatcagaatttaaaattgggaaactgagcgactggaaatgcaattttgaaaaaatagaaggaaaccgaaccaatgcagcactttataacatttatcaaaagatttcagattttgaaggttatggagtggattggaaaaaggccgatgcagggaaaatcaataaagaactgaaagcgaccttcccagaaatagggattgatgcttcggttttagattttgatgctgaaaaagacgacttcacaaaacagtcaagctatcagctatggcatttgttatactctgccgaagaagatgataaaatttctgaagatgaaaagctcatatatggaaattcgagcgtagctctcaagaaaaaattgcaccaaaaatttggctttaagccggaatatgcaacaatgctatccaatatgtctctcaaaactgatcatgcaaatctatcggcaaaagcgatccgaaaaattttgcctcatctaaaagatggtcatctttattcagaagcctgcagccttgcaaggtataatcattccagaagcctaaccggtgaggaacttgcaaaccgagaactaaagcctaaactggaattactaaaaaagaacagtttacgcaatcccgtggtcgagaaaatccttaaccagatggtcaatttggtcaatcagctaattgacacctatgggaaaccagatgcaatacggatagaactggctagggaattaaaaaaatctgccaaggaacgggccgatatgaccaagggaattgcagatgccacaaggcgtaatgatgaaatcaaaaaaatcattaggcagaaatctggaataccgaatcccacaaaatcagatgttgtgcgatatcgtctatggcaagagctggaacccagaggtcataaagatttattcacagatacatatataccgctcgaaaagattttttcaagtgaaatagacattgagcacatcatcccaaaagcactattatttgatgattctttttcaaacaaaacactatcatataaaagcgtcaatcttaaaaaaggcaaccgaacggcacttgatttcattgcgcaagattatcattctaaactggaagactatacgaaacgcgttgaaacgatgtataaagatggccatatctctaaaggcaagcgaaataaattattgatggcactagtcgatatccccgatggttttattgaaagggatttacgcaacagtcagtacatcgcccgcaaagcaaaacaaatgctttttgaggtttttcccgaagtaatagccaccacaggaagcattacggacaagttacgtgaagactgggatttgataaatgtgatgaaagaattaaacctgcccaaatatcgtgctttaggtttaacagaatttgaagaaaggcttgacaaaggaactgaagaactctttaaacacgaagtcataaaagattggacaaagcgtaatgaccaaagacatcatgcgatggatgcacttaccgtagcctttactacacacaatcatatacaatacataaataacctgaatgcgaggagggattctgctttagacaatcatcccattattaagaatattgaaaatttaatcacagaaataaaccccaaaggaaaacgaatatttaagccccctatggaacgcttccgcgaaaacgccaaagcgcatattgaatctatattaataagcttcaaaaacaaaaataaggttgtcacaaagaatgtcaatataacaaaaaccaaaaatggagaaaacagaaaagtgcacttaacaccccgagggcaactccacaaggaaagtatttatggaaaatccaaaagaccaatggataaacttattagtctcaacgataagttttctaccaaacaagcttcattgatcataaactccaacgaaaaggaagccgtactagagcatttaaaaaaatatcaaggaatttctgaaaaagcctttgactccaaaaccttgagaaaagatcctattttgattaatgaacagcctttaaaacaggtaaaggtttttgaggaagtttttaccatacgaaaagatataaatccagaaaactttaaaaccctaaaacatcttgataaaattgtggacgagggcgtgaaacaagctatgaaaacacgtctaaaagaatataatggtgattttaagactgctttttcagatttggataaaaatcctatttggttgaatgaagaaaaaggcatttcaataaaacgcacaaaaattacaggcgtgagcaatgctgaagctttgcatcacgcaaaagaccatctgggaaaaatattaaaagataaaaatgataatgaaatccctgtggactacatcagtacaggcaataaccatcatgtagctatatataaggataaggatggtaatctacacgaaaatgtggtgtccttctttgaggctgttgagaaggtaaaccaaggcttaccaattatagacaaaaattacaatgcacaccttggttgggggtttcagtttaccatgaaacaaaacgaaatgtttgtatttcctaatgtagaagcaggatttaatcccttagaaattgatttgctcgataaaaaaaatcaaaaggagataagccagcacttatttagagtacaaaaatttacaattaaggattatttttttaggcaccacttggagacaaatgttgaaaataaccctgaaaataagaatgttacatggaaaagagaaggattgtctggaattgaaggaatagttaaagtgaggattaatcacattggagaaatcgttgaagttggagagtattaattcatatcgttatgatcaaacgcaccctcttttttggcaatccggcctacctaagcacccgtaatgaacaattggtagtgaatttcccagaggaggataggaaagaggccaccatccctattgaagatttgggctatgtagtgttggaagaccctcagattaccattaccaatggactcttaatgaaactggtgcaaaacaagacggccgtgattacctgcgataaacaacaccttccctgctctttcctgcaacctttagtgggccataccgaacagaccgagcgtatgcggcatcaactggatgccagtgtgccccttaaaaaacaattgtggcagcaaaccatcaccgcaaaggtaaccaaccaagcccaacacctattgttacaaggaaagcctgccctaaaactaaaacgatggagcaaggaaataaaaagtggggacacgggcaatatagaagccatcgctgccgcttattattttcaaactctttttgaggaaattgaagggtttagccgtaaccaaaagggagtggctcccaataacctcctaaattatggttatgccattttacgggctgttacggcaagagcactggtaagtagtggattgattccctccctggggatttatcaccataataaatacaatgccttttgcctagccgatgatgttatggaaccttaccgcccttttgtagatagggtggtatatgatttggtagccacaggctgtgctattgaagaattgacccagccccttaaaaccgagcttttgttaatcccggcgttggatgtagtgatagatgataagcaaagtccgttgatggtggccatgagccgaaccacccacagcttgtacgaatgttttgcaggaacgggcaggaaagtattatatccagaatttatggcttaaccatcaaaagggagaaaagaagttgataatgagcgaccgattttcaagactaaaccgataccgcagtatgtgggtacttgtattttttgatctgcctaccgagacccttacagaacggaaggtagctgccggcttccggaagaatttattgaacgatggatttggcatgttccaatttagtatttatgtacgtttttgtgccagcagggaaaatgccgccgtacatattaagcgtactaaaaatgccctgcccaagaaaggaaaggtttgcatcatgcaaatcaccgacaaacagtttggaatgatggaactatttcatgggcaaaaagaagtggcccaagaaactccatcccaacaactggagcttttctagaaatccaaaagtcctatttaaccacttgtagccctcttacatttatctttatttttatatcctaaaaagagggataaaaaacaggataccagctttttagggcgggtatcctgtgaatcttctactaaagtagtaatctgaaagcaattcacaacacgggggaagctacgccgccttccgtttccctgtgaatcttctactaaagtagtaatctgaaagcaattcacaacgtagccgtgtagttctttttcatttcttcccctgtgaatcttctactaaagtagtaatctgaaagcaattcacaaccgactattgaaaggtgtttgaataccccaacctgtgaatcttctactaaagtagtaatctgaaagcaattcacaacgaaacggctgcgcagtttcaaccgggggagcctgtgaatcttctactaaagtagtaatctgaaagcaattcacaacgtacaacatccacctttctttgcttttcctcctgtgaatcttctactaaagtagtaatctgaaagcaattcacaacgcgagttcgttgctcaagggggaaatagcacctgtgaatcttctactaaagtagtaatctgaaagcaattcacaactgtctcatcgctaccatcattgttgatatacctgtgaatcttctactaaagtagtaatctgaaagcaattcacaacagtaattgaataggttcctgaatgattggacctgtgaatcttctactaaagtagtaatctgaaagcaattcacaacgccgtgtataacgtaatcaaacttatatcccctgtgaatcttctactaaagtagtaatctgaaagcaattcacaacagaatctgattgcaaatgcactcaagtttacctgtgaatcttctactaaagtagtaatctgaaagcaattcacaacacaacggtcagcatatgattagacacgtaacctgtgaatcttctactaaagtagtaatctgaaagcaattcacaacggaaacgccgcaaggaatggcgccgccaggcctgtgaatcttctactaaagtagtaatctgaaagcaattcacaactgtctgtaaccatttcctgtgttaacgtatcctgtgaatcttctactaaagtagtaatctgaaagcaattcacaacagacggaaaacataaacgtaaaatcttccgcctgtgaatcttctactaaagtagtaatctgaaagcaattcacaacatgttttttgggcttgtgagcttgacaaaccctgtgaatcttctactaaagtagtaatctgaaagcaattcacaactctcgaatgatagtagtgtagagaatgtgtcctgtgaatcttctactaaagtagtaatctgaaagcaattcacaactgcctttccttttcttcatttcttatttaacctgtgaatcttctactaaagtagtaatctgaaagcaattcacaacgttgtcatagaacaccaattttcgggtaaccctgtgaatcttctactaaagtagtaatctgaaagcaattcacaacgtgttttcatttgtatcgtttttttacatgcctgtgaatcttctactaaagtagtaatctgaaagcaattcacaacttatgatagtttgtcaaatattggtttatacctgtgaatcttctactaaagtagtaatctgaaagcaattcacaacagcaaaggtccgatgaaactatgagaagttcctgtgaatcttctactaaagtagtaatctgaaagcaattcacaacgccgctttaacaggtcctataggattagtgcctgtgaatcttctactaaagtagtaatctgaaagcaattcacaacttacaaatcctatcagtacatagacaagcacctgtgaatcttctactaaagtagtaatctgaaagcaattcacaactaattcaagaaaggttctttacgcatcgaccctgtgaatcttctactaaagtagtaatctgaaagcaattcacaacattccagtttcaagttcgtactctccagcacctgtgaatcttctactaaagtagtaatctgaaagcaattcacaactgctgggtcggttgcagtgataccaccattcctgtgaatcttctactaaagtagtaatctgaaagcaattcacaacataggcagccccaagatgccaggacccattcctgtgaatcttctactaaagtagtaatctgaaagcaattcacaacccattggcaacggttacatcaacagactcacctgtgaatcttctactaaagtagtaatctgaaagcaattcacaacttcagggggagccattcattggattagcgtcctgtgaatcttctactaaagtagtaatctgaaagcaattcacaacaatcaatcgcataggaagtggaaacacttgcctgtgaatcttctactaaagtagtaatctgaaagcaattcacaacagtactgtcggcttctatttcctccgtggtcctgtgaatcttctacta

SEQ ID NO: 2335 - DNA, 17818 bp, synthetic construct
  source 1..17818: mol_type = other DNA
  misc_feature 1..17818: note = Synthetic
  variation 16430..16521: note = n is a, c, g, or t
gaaattctttatgcaaagaaaaaaggtgtggatttcattatttgcgatcatcatttaccttcggatactttgcctgatgcttgggctgtgttagatcctaagagacttgattctcactatccttataaagaattgagtggttgtggtataggttttaagttaattcaagctattcaaaaggaaaagcataggtcttttgatgaaatattgaatttcttggatttagtagctataagtattgctactgatgttgttccattgacgggagagaatagagtgttggcgttttatggtcttaaagtgataaatagatgtcctcgtgttggtattgaggctattttgtcttatagtaaaattaagcctgaaccaaatgctaagttgtattttaatagagaattaactatttctgatttggtttttttggttggaccaagaataaatgctgctggaagaatggaaagtggaggaaaggctgttgagttgctaaaatctaattctcgtgaggaggtggaaaaaattgcggcagagataaatcaaaataatgaagcaagaaaggatttagataaaaaagcgacagaggaggcaaaaaaaatgctaacttcttgtgctgatttaacttctaaaaagacgactgttgtttgtggtaaggattggcacaaaggtgttattggaatagtggcatctcgtcttattgaaaagtattataaacctacaatagtttttacaaagagtaatgatttgataacaggttctgctcgaagtgttaaagattttgatatttatgctgctattgaatcgtgttctcatttgttaactcactttggcggtcataagtttgcggcagggttaagtttagaggaaaagaatcttgaggagtttatgaggttgtttgaacaggaagttgaaaagaaaataactgatggtcaaatgataccagaaattgaaatagatttagaaatagaattaggtaatattactcctcgcttatttagaattttaaagcaatttgctccttttggtccagaaaataacattcctatcttttgtagtaaacgtttaatggatacaggatttgcaagaactgttggtactaatcatttaaaactttcagcggtttcaagagaaaaatcttcattcccttttgattgcattggatttggattggctgaatatcaaaaagaagttagtcaaggaggtatgtttgatatttgctatcaaatagatgagaatgattttcaaggaaagacttctttgcagttgaatttaaaagatttgaaaataattagttaaaaaatagaaattgtagtttatggcacaagacgataaaaagataatattctcaatggttggggttggaaaattgattccaccaagcagacaaattttaaaagatatatatttgtcattttattacggagcaaagataggtataatcggtcttaatggttctggtaaatctacactattaaaaataatcgcaggacttgataaatctcatcaaggagaagtgcatttttctccgggatattctgtcggatatttagaacaagaacctcaattagatgatacaaaaacagtaaaagaaattgttcttgaaggggttaaggaagttgctgatttgattgcagaatatgaagaggtgaatatgaaattctgtgagccaatgagcgatgaagaaatggcaaagttgattgaacgtcaaggagaattgacagaattgatggaacagcacgatgcttggaatcttgataacaagcttgaaagagcaatggatgctttgcgttgtccgccagatgatgctttggtaaaaaatctttcaggaggagaaagaagacgtgttgcattgtgtaggattttacttcaagaaccagatatattattattagatgagccaacaaaccatttagatgccgaaagtattgaatggttagaattacacttgcaacaatataaaggaacagttattgcagttactcacgatagatatttcttggataatgtcgctggttggatcttagaattggatagaggtgaaggtattccatggcaaggaaattattcgtcttggttagatcaaaagaccaagcgtcttgaaatggaagaaaaacaagaaagtaagaggagaaaaactcttcaacgtgagttggaatgggtaagaatgtctccaaaagcaagacaagctaagggtaaagcaagattgagttcttacgagcaaatgatgaatcaagacgttaaggaaaaagaagaaaaattggaaatctttattcctaatggcccaagacttggagacaaggttattgaagttaattctatctcaaaagcatacggagataagttgttatttgaaaatttaagtttttctttgccaccagcaggaattgttggtgtgataggaccaaatggagcagggaaaacaactttgtttagaatgataatgggattagaaacgccagatacaggttcatttgatgtaggccctactgtgaaagttggctatgtagatcaacaacatcaagcaattgatccagaaaagaatgtttgggaagttgtttctgagggaaatgaacaaatttctttgggaggaaaattagttaattcaagagcatacgtttcaagatttaatttttcaggaacagatcaaaacaaaaaaacaggaattctttcaggaggagaaagaaatcgtcttcatttagcattaaccttaaagagtgaagcaaatgtattgttacttgacgagcctacaaatgacatcgacgtaaatacattgcgagcattagaagaaggtttagagaatttcgcaggttgtgctgttgtgatttctcacgatagatggtttttagatagaattgctacacatatcttagcatttgaaggtgattcgcaagtttatttctttgaaggctcttattcagagtatgaagaaaataagaaaaaacgcttaggagatacaacccctaagagaatgagatacaaaaagcttatttcagattaaaaaataataaaatataatataacaatggaaaaaaaggaaataataatttgtttaggaagttcttgctttgcgagaggtaacaataaaaatcttgaatttatacaagaataccttaaagttaatgacttaaaagcaaagattactttcaaagggcagttatgttctcaacaatgtagccaaggtcctgttgtgataatagatggtgagatgttcacaatggtaaacaaaacaaaattgttagagatattaaacaataagtttggactttaaaaaatagtttttatgcaaaatactgctcctgtttatacagaaaaaagtaattgtcaagattgttacagatgtgtaaaagcatgtcctgttaaagcaatcaagttagaatcaggttcggcatcaatcgttcctgatttatgtatttattgtggtacttgtaccttaatttgtccgaatggaacaaaaaaagttagaaatgacttagctttattgaagcaatccttgatgcgacaagaaaaaataattgtttcattagcaccaagttatctaagtgaatacgcaaaagaagatattcataaagtaatagcagcattcaaagaagcaggtttttggcaagtatccgaaacagcaataggagcagaaaaagttgcagaagcaacaaaagcatggatagatgaacaaccaaatggagtatatatatcatcttgttgtccttcggcagtgcaactaatcaaaaaatactatccagaatactcttcatacgtagtaccagtgttttctccaatgattacacactccctattcttgaaaagtatttatccaaacgtaaaagtagcctttgtaggaccttgtgcagcaaagaaatcagaattagatcaatttcatgataagatagatttcgttcttactttccaagaaatcaaggaattgtttgatgatatgggcatttatttcgagtttatgaaaccaaccgaagaagatgtcttttttccattcaaagcctcaaaaggaaatctttatccaatagatggaggaatgctcacaaatatgattgacagcatcacaaccaccgaagcaagaatcaatcacaatacaggaaatgtagatgcacgttatatgacattttcaggcgttcaaaacatcaaagaaatcctttcagacttcaaacaattagatacaagttgtaaaacattcttagagttaatgacttgtgaaggtggttgtataaaaggaccttgctcaaacgaaaattgttcctcagcaacaaaaagagtacaagttcttaaaaatgtaaatacacaaaaacaagaacacaattatgaagaggcgttaaagaatttaaatatctccgaaaattacgattatatcaacgccgttgaacaaaaagaatacacacaacaacaaatacaagaagccctaaaaagagttaataaaaagagcgaagcagatgaattaaactgtggaggttgtggatacgatacttgtcgtcaatttgcaaaagccttaattgacggaagagcagaaaatgacatgtgtgtatcatatatgcgtaagatagcacaagacaaaaccaatatcttattaaagaaaatcccacaaggaatagtcatagttaatgatagtttaaaaatagttgatacaaacgaaaaatttgcctcaatgcttggcgaagaagtcaagatgttatatgatgcaaatccaggattacacggagcagacattacaaaactcgtgccattccacaaatttttctcctcagtccttagcacaggagtagatgttttagaacaagacattagagatggagataactattacagcctatcaattttctcagtacaagacttctccttagtatgtggaatcctgcaaaaccttcatgcaccagaagttagaaaagacattgtcttgaagagaacacaagatgtcattatggaaaatatgaaagttgttcaaaaaattgcctttctattaggagaaaacgcttcatataccgaagcaatgctcaattccatagtagaatcgcatcaagacaaagaaaaaaaagacataccattgacctttgacctataaaaatctaagaaatgttgaatagagaaaagttattcatagaagtaggcagttatcaaaacaacaaacacaaaaatattgtttgtggcgactcagtcttacttcgcaaatgtgcaggagaaaacagaaatatcgctgttttatctgacggattaggcagtggagtaaaagccaacgttctttcaacaatgacagcctcaatggcaatgaattttagagtaagacacgagccgattatccgtactgtacaatccataatgaatactttgcctgttgatagcgtaagaaacataagttattccacctttacaatagtagatgtggactcaaatggagaagcaaacattgtagaatacgacaatccttcactaatcttagtacgaaacggcaaagttcaacaaatagacggtagcgacacaatcatacaccgaggaaatgcaaacacatcttccttagaagaaagacgattaaaactatcaaacataaacttacaaaaagaagatcgtctaatattctactcagacggagtcacacaatcaggaataggaaatatggatatgccatttggttggggagatttagtttacgactttgtagaagaaatattaaaacaacaaccaaacatttcggcacgagaactctcaatgaaaatcgtaaaacaagccgaattaaatgacatactccgaccaaaagacgacacatcttgcgtagtaatgtacgtaagaaaaccaagaaaactcctaatctgcacaggacctccattctccgaaaccaaagacaaatatttagcagaaatagtatcctcatacgaagggaaaaagatagtttgtggaggaacaacttctcaaatcctttcaagagagttaaaaaaagaaataactgtaaacatagacgatatagtagcaggactccctcctaaatcagaaatggaaggcattgacctaatgaccgaaggtatcataacacttggagcattagtagaaatcttgcgaaaaggcccaacaacagacctttcaggacaaggaccagcatgggatatgctaagaatgatattagatgccgacataatagacttgttagtaggtacaaaaatcaacgtagcacaccaagatccaagtctgcctgttgaacttgaaatcagaagaaacgtagtaaaaaatatcgcttctttgttagagaataaatttatgaaagacgtaaaaatgcaatttatataataaaaataataaaaactgtaataaaatgttaaacgtaagaatttgtgtaggcacttactgttacataacaggaggtgaagaattggcaaagatgaaaaagaatttgccagaagacattaaagacaaagtagaaatgattggctcagcttgtttaggttgccacgatatggaaggcgttgcaaaaccaccatacgcaaaagtaggcgatgtcttaattcaagaatgtaccgaagaaaaactcttagacgagatttacagacaattaggaatggaacgcaagtaacaaaccacttaaaaaatttagaaaacaatggcattaaataacgcagtagaaataagacgcgaaatattagcgagactatcaaaactaataatcacagatcaattagtagaaaagatagatcgcttaccaatagaaatgcgtccaaaagacaaagaaaacacaagatgttgtgtacacaaagaaagagcagtcttaaaatacaaaacaatggccgtattaggctttaatgtttacgatgaaaaagacgaattagacccactttcacattacgcaaaacttgcacaagaaagaacagacaaaacctcagtaatgatgacagttgtagacgaagcatgttcatcatgcgttaaaaacaactacattgttaccaatttatgtagagcatgtgtagcaagaccatgtacatacgcttgtaaaaaaggagcaatctcagtaggagaaaaacaagctcacatagacacagacaaatgcgtaaactgtggaatgtgtatggaagcttgtccattccacgctattatttaccaaccagtaccttgcgaagaaagctgtccagtaggagcaatctcaaaagacgaacacggaatagaacacatagacccagacaaatgtatctattgtggtaaatgtatggtagcatgtccattcggagcaatctttgaaaaaacattcttgatagacatcttccgtgacataaaagaaggcaaaaaagtagtagccatggttgcaccatcattaggcggacaattcaaagcagactacggaaaagtacttgcaggcatcaaacaattaggattctttgacgtagtagaagttgccttaggagcaaacatcacaaccgaacacgaaagagaagaattcatagaaagacttcatgaaggagcatcatttatgacaacatcatgctgtccaagttggatgaatcttgtaagaaaacatttgccagaaatgcaacaatacgtttctacaacacactcaccaatggtttacacagcacgccacgtaagagaaaaatacccagacgcaaaaaccgttatggtatcaccatgcgtaggaaagagaagcgaaagctgtctatatgacgaagttgattacgtaatctcatacgaagaaatcgaagcattattcaaagcatctgaaatagatttagaagcattagaaccaatgccacttgatccaaatatcgtaggacacggaagaggatttgcaatgatttcaggagtaacagaatctgttaaactaacagctccagatccaaacgtaatcaaagaagttgtaatagacggattgaacaaacaagtaatacgtcaattaaaacaatacgcaaaagcaggacaatgcccaggaaacttcatagaagtgatgtcatgtccaggcggttgcgtaaacggctgcgacacaatcaacaatccaaaaacagcagcacgccaaatccttccaacaacaaaataaggaaacacacaaaacacacataccaaagggagaaacaaagcgttctccctttttttctttcctttttgaaaataaaacaaagaaaaaaaataataaaacaaagaaaaaattaaacaaaacaaagaaaaaaattgttaggatagcaaaacagtattaaccaattaaaatttaaaattatgttttgttatcaatgtcaagaaacagcaaagaatacaggctgtacaaaagtaggagtatgcggaaaatgtgagcatctctcaaaagaattagatgatttaatctttgaatgccaagaattagcagcattaaatcatcaattgcgtcaatatcaaaaagacgacctacaagcaagtcgtatgataaccgatgcactctttacttcaatcaccaataccaacttcgatatagaagtagtcgtttcaaaaatcaaacttatcagagaaaaaaagcaagaactcaaagataaagcacatcaaaataatgtcccaactcacaatctcaaactaacgtttctgccacccatacttggacaaagttcagtcttatcagaaaaagaccaagatcttagaagcctaaaacaactcatcatttacggactcaaaggcgttgccgcatacacaaaacacgcacaacgtttaggctatgaagacaattccatttacacaatccttgaagacgcactctcacaaacacgaaaacatcaaataaccaaagaagaactctttaattgggttataggagtaggagaattaggcgtaaaagcaatgcacctcttagacaaagccaacacaatcacctttggacaccccgaaatcaccgaagtaaaaacaaatgttggcaatcgcccaggcatactcgtaacaggacacgacttacaagacctaaaagaacttttagagcaaaccgtagacaaacaaatcgatatttacacacacggagaaatgctaccagcacactattacccatactttaagaaatatcctcacttcaaaggcaactatggcaatgcttggtggcaacaaaccaaagaatttgaaaaattcaacggcccaatacttttcacaagcaactgtatcgtaccaccacttgccaattctacttacaaagaccgtatctacaccacaggaacagcctatctaaaagactgcaagcatattccaaaagattatgaaaccaacactaagaatttttcttgcataatcaatcacgcacaccaatgtctgccaccacaaccgatagataacgccgaattacaaggcggatttgcacacaatcaactcacaaaactaaaaccacaaatcatttccgcaatcaaaaaaggcgaaataaagaaattagtcgtaatggcaggttgcgatggcagaatgccgataagagaatactacacaaactttgcaaaatccctaccttccgacaccataatcctcacagcaggttgtgcaaaataccgttacaacaaactcccacttgcagccaacaaagaatttccaagagtacttgacgcaggacaatgcaatgacacatattcactaatagtctttgccgaagaattaagaaaagaattaggcttaaagaacattaacgatttgccgattgtttataacatagcgtggtacgaacaaaaagcagtaatagtactactcgcaatgctatcacttggaatcaaaaacataaaactcggtccgacactaccagcctttctaagtccgaacataattcacctactgcaaaacgaatacaacctaagcacaatcaccacaatagaagatgatatgcgacatcttgcaatcaaataaacttaacactacatactggatagacataaaaacgaaagcgacacccgaaagggtgccgcttttaatgttttcacaacggaataatccttattgtgaattgcttcaatttagttctgcaaatatacaattattttctaaacaataaagaatttataaatatttttgtaaatttgtggcaatgtaaatagaaaaaataattataatgaaaaagatattaggcttagacttaggaacaaatagtataggttgggcagtagtaaatgaggcagaaaatgaaactgaacaatcttcaattataaaaataggagtaagggtgaatcccttaacaacagatgaattaggaaactttgaaaaaggaaaaagtattacaacgaattctgatagaacattaaagcgttcagcaagaagaaatctgcaacgctacaaattgagaaaagaagcgttgattaaaatattaaaaaataataattttatcagcaatgatacaattctgtcagagcaaggaaataaaacaacctttgaaacatactcattaagagcaaaagcggtagaacaagaaataactttaactgaatttgccagagtattgctaatgctgaataaaaaaagaggttacaaaagcagtagaaaagcaaaatcaacagatgaaggacaactcatagacggtatgagtgttgcgagagaattatatgatagagatttaactccgggacaatttttgttagaacaaatatacaaaggagttaaaactgagcctgatttttatcgttctgatttacaaagcgaatttgataagatatgggaatatcaaaagcaatattattctgaattgtttacagatgaattaaaagaacaattaaaagggaaaaataaaggacaaacatggacaatttgtcaaaaagcatttaatattgaaggtgaaagtagaactacaaaaggtgttgagcaaaaaatagagaactatcaatggcgtgcagatagtttaaaagaacaaatgactttggaacaactaacaatagtattccaagaaataaataaacaactcaataaatcaagtaattatttaggaaatataagtgatagaagcaaagaattatattttaatcatcaaacagtaggacaatatctatacagcaaactatcacaagactctcattatagcacaaagaataaagtgttttaccgccaagattatttagatgaatttgaatcactttgggaatcacaaaagaaataccataaagaactaacagatgaattgaaaaaagaaataagagatgtaataatcttttatcaacgaccattaaaatcgcaaaaaggattgttaagtatttgcgaattagaaggtagagaaatagaaatagagaaaaatggtaaaaaaataacaaaaataataggtcctcgtgtggctccaaaatcctctccaatatttcaagagtcaaaaatttggcaaatacttaataatgttcaaatagagggaaatgttataccaaatgttcagcaagatttatttggagaagcaacagagtttaaatatggaaaacgcccattaacacaagaagaaaagcaaactttatttgcagaactaaatataaaagaaaaactaactagctcacaagttttgcaaatacttgaaatgaaaggaaattacaaacttaactacaaagaaatagaaggaaataaaacaagagcctcattctttaaagcatttcaagaaatcatagaattatcaggacacgaaatagaatttacaaaaaagaaagcacataagattgaagaggaattaaaggaaatttttgtagccttaggatttagcaccgaaatacttgggtttaaaactgatttaacaaaagaagaaatcaaagaccaacaaatagaaaaacaagcatattataaactatggcatttactttactcgtttgaaggagatagttcaaaattaggcaacgaaaagttaattcaaaaggtaatggaactatgtaaaatgccaaaagaatatgcaactattttatctaatataaccttcccattagattatagtagtcttagcacaagagcaacattgaaaattcttccatttctaaaacaaggatttatgtatagcgatgcttgtgaaaaagcaggctataaacattcaaaaaaatcactaacaaaagaagaaatagaaaacaaaatactaaaagactctttatctcaactgcctaaaaatagtttaagaaatcctgtcgtagagaaaattcttaatcaaatggtaaatgttgttaattctattataaaagaatatggcaagcctgatgaaatacgcatagaattagcgagagaattaaagaaaagtgcaaaagaacgagatgaattaacaaaagcagtaaactcttctaaaaaagatcacgaaaaaatagtaagtattctccaatcttcttttaatatacaaaatccaagtcgcaacgatataattcgttataaactatacgaagaattaaaacctaatggctaccatactttatatacgaatacatacataccacaagaaagattatttagtaaggattttgatatagaacatataattccacaagcattgttgtttgatgattcatttgctaataagacattagaaaaaagagatgcaaacatagaaaaaggaagaatgacagcatacgattacgttttagaaaaacgaggagaacaagggattgaagagtataaatcaaaaatagataatcttaatataagttcatcaaaacgtaaaaaattattgatgcgaggaaatgatattccagacggatttatagatagggatttaagaaactcacaatacatatcaaaaaaatcaagagaaatattagaacaaatagttaaagtagttaatacaacaacaggttctgttacagataggcttagagaagattggcagttggttgatgtaatgaaagagttgaattggaataagtatgacaaatgcggacaaacagaatcctatactaatagagatggtaatgtaataaagaaaataaaagattggactaagagaaacgaccatagacatcacgcaatggacgcacttactatcgcttttacaaaaccaagttacatacaatacttaaataacttaaatgctcgtgtagaaaaatcagtagaagaacatcttgatttagataatgtagagattagactattagataaagacaaaagaagttctgccgtttacggaatagaaacaaaagaattgtatagagataagaatggtaagttaagatttaatccaccaatgcctttggacgaattgcgtaaagaggcaaaaaaacatcttgaagacaccctcgtgtctataaaggcaaaaaataaagttgttacaagaaatacaaatacaactaaaacaaggaatggagaaaagcaaattattcaacaaactccaagaggacaactccatttagaaacgatttacggaagaattaaacaatacgaaacaaaagtagaaacagtaaatgcttcatttgacattgagaaaatacaaaccgtagcaaacaaagaatatagagacgcattattaaaacgtttgcaagagtttaataatgatcctaaaaaagcatttacaggcaaaaatactttggagaaaaatccaatatggttaaataaattacatacagaccaagtttctacaaaagtaaaaatagtcaactttgtagatgtttatacaataagaaagcctattgataaagatttgaaaatagataaggtggttgatgtaaagataagaaagatattggaagcaagattagaagaatatggaggaaaagcaaatgacgcattttcaaatcttgatgaaaatccaatttggcttaacaaagaaaaaggaatagcaataaaacgagttaccataacaggcattagtaatgcaacagccttacgttctaagagagataaagaaggaaactttattttaaatgaggatggtactaaacaagcagtagattttgtgaatacaggaaataatcatcacgttgcaatttatagaaaacccgttttagataagaaaacaggacaacaacaatttgatgataatggaaatgcaaaatttgaattagaagaaaaagttgtttctttctttgaagcaacaattagagcgaataatggagagcctataattgataaagaatttaataaagataaaggttggcaattcttattcacaatgaaacaaaatgaatattttgttttcccaagatatgaaacgacaaaagatgtaaatggcaatgaggtaacaataaagacatttgatccaaaagatattgatttactaaatccagataattattctttaatcagtcctaatttatttagagtacagaaacttgcaacaaagaattattgctttagacatcatttagaaacaactgttgatgatatcaaagaattgaaaggaattacttataaatctcaattaggtcttaatggcattataggaattgttaaagttagagtaaatcatataggtcaaatagttgaggtaggagaatattaaaaataacaactcttatgattaaacgcacgctttgttttactaatcccgcttatttgtcgttgaagaacaatcaattagtaataaaacttccggaggtggaaacaaacacttcgcttccggaaagtttcaaatcagatgcaacaaaaacaattccgatagaggacataggaatagtggttttagacaataaacgcataacaatcacgcaaggggttatggaagccttgttagaaaataatgcagcaattgtaacttgtaacgaaagtcatcttccaatcggaatgcacttgcctttggttggcaacaccacacaaaccgaacgaatgcgttatcaaatagaagcttctttgccactgaaaaaacaactttggcaacaaacaatttcagcaaaaattcaaaatcaagccgctgttttgaaacaaatgcgaggaacagaggtgaggaatatgctaaaatgggcaagtgaggtaaagagtggcgatagtgaaaaccttgaagcaagggctgcggtttattattggcaaaatgcttttccgatgattgagaattttactcgctctcgtgagggtgtttcgcctaataatcttttgaattatggttatgcaatccttcgtgcaatagttgcaagagcgttagtttcaagtggcttgcttacaactttgggaatacatcatagaaacaaatataatgcttattgtttggctgatgacataatggagccttatcgtccatacgttgatcgtttggttatgcaactctatgataaatatcccaattgtgaagaacttacaaaggaacttaaagcggaacttttgcaaattcctgtattagatgttgtgatttctggaaagaaaagtcctttgatgattgcggtgagtactactacttcttcgcttcaaaagtgttatagtggtgaattgcgaaaaattgtctatccaataataacttaaataaacaagtgcaacggtttagtgaatataggattatgtgggtaatggtactttttgatttaccaacagaaacaaaaaaagacaaaaaggagcatgcaaagtttcgtaaacgtcttttagaagatggatttactatgtttcaattctcaatctatgttcgacattgtgcaagcaaagaaaacgcagatgttcacatcaaaagagtaaagagtttcttaccagaatatggctctgttggtataattcacataaccgataaacaatttggagaaatagaaatctataattgtggaaagaaaactcctacacaagcaggaggacaacaattagaattgttttaaattccaaaaaatcttaattaataattatattgttataaataatagccttatttttaaattctattaccttatataaacaacagaatccgagtcttttactcagattctgttgtttttgcaaatgcaaagatactaaattgaaagcaattcacaacaggtgcccaaacgttattatacttatctagttgtttttgcaaatgcaaagatactaaattgaaagcaattcacaacacagacggcgatggagcagacagaactcccgttgtttttgcaaatgcaaagatactaaattgaaagcaattcacaacttattacctcaaaacattaaatgttgcaatgttgtttttgcaaatgcaaagatactaaattgaaagcaattcacaacaatgaattgttgaaaggtctcaagtttgagttgtttttgcaaatgcaaagatactaaattgaaagcaattcacaaccatcactaagtatatgtcaaagcaggttgggttgtttttgcaaatgcaaagatactaaattgaaagcaattcacaaccgaaattttgttgttaatagagagtacggagttgtttttgcaaatgcaaagatactaaattgaaagcaattcacaacactgctacgcatatcacaaaaaaaaatgtagttgtttttgcaaatgcaaagatactaaattgaaagcaattcacaaccttccgcttttaaagcaattcggagaaaagttgtttttgcaaatgcaaagatactaaattgaaagcaattcacaacataactattcagcggagtatgttataaaggttgtttttgcaaatgcaaagnnnnnnnnnnnnnnnnnnnnnnnnnnnnnnnnnnnnnnnnnnnnnnnnnnnnnnnnnnnnnnnnnnnnnnnnnnnnnnnnnnnnnnnnnnnnattgaaagcaattcacaactaagggatattgatacgcaattttccagagttgtttttgcaaatgcaaagatactaaattgaaagcaattcacaacgtgccgatgcaaatttaaaattccaaatggttgtttttgcaaatgcaaagatactaaattgaaagcaattcacaactgttgcgttagctaaaaatgaacatacctagttgtttttgcaaatgcaaagatactaaattgaaagcaattcacaacgagcttgcaggtggagaatgaaacactgagttgtttttgcaaatgcaaagatactaaattgaaagcaattcacaacagttattgaaatttcatataataaataatagttgtttttgcaaatgcaaagatactaaattgaaagcaattcacaacgacttcacaacgattcgcaacaattgattggttgtttttgcaaatgcaaagatactaaattgaaagcaattcacaacggtcttggcgttacccatcaaccgacattgttgtttttgcaaatgcaaagatactaaattgaaagcaattcacaactcttcaccttttatgtcgtcaggtgtatctgttgtttttgcaaatgcaaagatactaaattgaaagcaattcacaacttccaaacgtaataatcgtttacttgttcagttgtttttgcaaatgcaaagatactaaattgaaagcaattcacaaccgtagtctctaagtccacttctgctaatctgttgtttttgcaaatgcaaagatactaaattgaaagcaattcacaacaatagctgctatcttgctacatatcatctgttgtttttgcaaatgcaaagatactaaattgaaagcaattcacaacagccggtaaaacaaggagcgcgccctccgcgttgtttttgcaaatgcaaagatactaaattgaaagcaattcacaacaagtatcttctgtataaactacttgttctcgttgtttttgcaaatgcaaagatactaaattgaaagcaattcacaactccgcactctctctcgccaatggcataaccgttgtttttgcaaatgcaaagatactaaattgaaagcaattcacaaccagccatacctctctacatactcatcgagcgttgtttttgcaaatgcaaagatactaaattgaaagcaattcacaacactgtgcaaatatataatgacttttttaatgttgtttttgcaaatgcaaagatactaaattgaaagcaattcacaactattacactgcaatatgtaagcaatatactgttgtttttgcaaatgcaaag

SEQ ID NO: 2336 - DNA, 17808 bp, synthetic construct
  misc_feature 1..17808: note = Synthetic
  source 1..17808: mol_type = other DNA
tggtgatagacctcaatgccgagcaatatggctccgacaggcacaagtaccgttataacattacgtccacgataaccgtcacttcacgcaacgtaaagcgcgtgcgctctatcattgcgcggcagggagagctgctgcggcagggtgtcgccgttgtcgacggatatgccggcagggtggagtatgagtatgtttcgttccagaagataaagccgaagatgatggaagaggcgatacgcaatgcagagaaaacggcgcaacagtttgcagagaacagcaacagtcgtccggataagataatgacggctgaccagggacagttctccatttccgacagagactcgaatacaccgtatataaagaagctcagggtggtgacgacggttacttactcgctgaaagactgaccggcgtcagtgacaaagagccatgtctgggtaatatcggaagcggcagcaagcccgaaaggcaataacggcaaacggcagggacatcgcaatgttgtgcctgccgtttgtctttgcacagtgcacaactcagcggcaattgtgcacttttaacccttttttctttgtgacaacgcagaaaaagtgtatttttgcattctatagattatcttaacaacctgtatctggcaacgtgtcttacggcatttaagttgtcggagggtgacttatgaaaacattacattatacactttaatatatgaaattgaaaatcatcgtgcttgcaaagcaagtacccgacacaagaaatgtcggaaaagatgcaatgactgcggagggaacggtaaaccgttctgcccttccggcaatcttcaaccccgaagacttgaacgctttggaacaggctctgcgcctgaaggaacaaaatcccggttcgacagtaggcttattgaccatgggtcctccccgtgcggcagaaattatccgtcagggactttaccgtggagccgatacgggctggctgctcaccgaccgtctttttgccggtgccgacacgcttgcgacatcgtatgcgctcgcaacggcaattaaaaagataggcggtgccgacatcataatcggcggacggcaggcgatagacggagacacggcacaggttggaccgcaggttgcacagaaactgggtctgtctcaagtgacatacgcagaagaaatcgagaagtgtgaggacggcaagctgaccatacgccgccacatcgacggaggtgtggagacagtggaggccccgatgccaatcgttatcaccgtgaacggaagcgcggctccgtgccgtccgtgcaacgccaagctcgtgatgaaatacaagcgtgccacggtgccattggagcgtactgaagccacggcatacgacaggctgtacgatgagcgtccgtatcttacacttaaccagtggtcggtggcagacgtcgacggcgatgtgcagcagtgcggactgagcggctcacccacaaaggtaaaggctgtgaagaatatcgtgtttcaggcaaaggagtgcaagtgtatcagcggatgcgactgcgatatagagtgcatgatgaaggaactgatcgacgagaagattattggataaggtttaattaaagggagatagaaggagttaaaggagatagaagatataatgagttataggacatttgtttatgacgcagggtcttgagaacatattagtttggcaaaaagctcacggatttgttgttatggtttatcatacaacaaaaacgtttcctgaatctgaacggttcgggctgtgttcccgggttcagcgtgctgccgtctctatggctgctgactaactccccataactacatttaactcctataagaaagaaaatatgaacaacgtttttgtatattgtgaaatagagggtaccaaggtacaggaagtatctcaggaactgctcacaaagggccgcaaactggcaaatgaactcggtgcggaactgcatgccattgttgccggaacgggtattaagggtgttgtggaggaacagatactgccctacggtgtggacaaactgttcgtgtttgacggtgaagggctgttcccgtacacgtcggcaccgcataccgaaatacttgtaaacctctttaaagaggagaaaccgcagatttgtctcatgggagcaaccgttataggacgcgacctcggtccgcgtgtgtcgtcatcgcttacgagcggacttacggcagactgcacacagctggaaataggaagctatgatgacaagaagtcgggcaagcactatgacaacctgctttatcagatccgtcctgcattcggtggaaacatcgttgcgactatcgtcaatccggaccaccgtccgcaaatggcgaccgtccgctccggcgtgatgcagaaggctgtttacgagggtgaaagccgcaaggaagtggtatatcctgaggttggcaagtatgtgtctgacacggcttatgtcgttaaggtgctcagccgtcaggtagaggaggcaaagcacaatctgaagggtgcgccgattgttgttgccggcggatacggtgttggcagcaaggaaggatttgacctgctgttcaagctcgcgaaggaacttcacggcgaggtgggcggctcgcgtgcagccgtagatgcaggctggctcgaccatgaccgtcagatcggacagacgggtgtcaccgttcatcccaaggtttacatcgcatgcggcatcagcggacagatacagcacattgccggcatgcaggactcgggcatcatcatctctgtgaacagcgaccccgatgctcctatcaacaagattgcagactatgtaatcgttggtaccgtggaggaggttgtaccgaagatgataaagtattataagcagaataataaataataacagaagttaaagaagtcaggagaagttaaggaagttagaggacaatagctttatgacctatagtttcgagagtattatcgcttggcaaaaagctcacgcttttgtattgcaggtatatagtataacccgtcatttcccggaagaagagaaatacggattgacttcgcagttcagaagggcggcaatatctatcgaagcaaatatagcagaaggatataagaaactcggaaagtctgacaaactcaggttctttaatatctcacagggtagtctggaagaatgcagagactatcatctcctcgcaagagacttgaactatctgcatcaagatgaatttgagttattgcattacagcatagaagagacaagtaaatttcttaattcctattgtaaggcaattgtaaatgacgcagcaataaaaaatgagcgggatatatcaggtaatgtcctttaacttccttaacttctataacttccttaacttctataaaagaaagaaaaatgtcaaactattatagcgaccatccggaacttgagttccacctcagccatccgcttatgaagcgcgtggttgaccttcgtgaaaagaattatgtggatgcggcagaacatgcagacgctcccgttgactacgaagacgccattgagaactacaaacagatactggaaataaccggtgatgtatgtgccaacgtcattgctcccaactctgaggatgttgacctcgaaggtccgcaccttgagaacggacgcatgatttatgcatcaaagacatacgagaaccttgacgttacacgcaaggctggtctgtggggcatcagtatgccgcgccgctacggcggtctgaacctgccgaacaccacgttctccatgctcagtgagcttatcgcggctgccgatgccggttttcagaacgtatggagcctgcagagctgtatagataccctgtatgagttcggcagcgaagagcagcgccagaagtacatcccgcgtatctgtgcaggcgagacaatgtctatggaccttacagagccggatgcagggtcggacttgcagcgcgtaatgctaaaggctacattcgatgaggagaacaactgctggcgtctgaacggcgttaagcgtttcatcaccaacggcgactctgacatccacctcgtgcttgcacgctctgaagagggcacgcacgacggacgcggactgtctatgttcatctatgacaagcgcgacggtggcgttgacgtgcgtcatatcgagcacaagctcggtatccacggctcaccaacctgcgagcttacatacaagaacgccaaggcagagctttgcggaagcacccgtttggggcttatcaagtatgtgatggcattgatgaacggtgcgcgtctcggtatcgcggcacagtcggtaggtgttgagcaggaggcttataacgaggcactggcatacgccaaggagcgtgcacagttcggagagaagataatcaacttccctgccgtttatgacatgctcagccgcatgaaggcaaaacttgatgccggtcgttcgcttctctatcagacagcacgctatgtagacatctacaagtgtctggaagacatcgcacgcgaccgtaagctgacaccggaggagcgtcaggagctgaagaagtatacacgtcttgccgacgcgttcacaccattggcaaagggcatgaactccgaatatgccaaccagaacgcttacgatgccatctcagtacacggcggttcgggttttatcatggaatacaagtgccagcgtctctatcgcgacgcacgtatcttctctatttacgagggtacgacacagcttcaggttgttgcggcaatacgctacatcaccaacggaacatacctctctattatcaaggagatgtttgaaaacgctgtcgctccagagcttcaagccctcaaagaccgcactgctgccctcgttgagaagctcgaggatgccgtcaacaccgtcaaggaggcaaacaaccagtgtgttcaggacttccttgcgcgccgtctctacgagatgaccgccgacgtgataatgtcacttctcatccttgacgacgcaacccgcgcaccggagctcttcaccaagagtgcaaacgtgtatgtccgtcatgcagaggcagaagtaaacgcacaccacagcttcatcaagaacttccgttccgaggacatcgagttctacaaggcgcaggagaacgcagccgcagaggcgtaaagcacgataatacattcaacaaaaactctccattggattgaaaagccaatggagagtttttattattcttttcctgtatttcaacatccattcttatacaagaacaacatgtatatttctatttcgttaatgttttaatccacaacatgattacggcattattacaatattgggaaatcttttatttatctgtgctttctcgtcatcggacatcttgccccgtattaagaacgtgccaatcttaatattgtccatccattcaggcaaagacacctttccgatgaaatcaagcttgagatattctatatatttcagttttgataatactgatggtacttctttaatacgtaatgagaaaccattctttttcatttcctgcaatatgtcattgtctgtgtcggtattacgtacgagccaacctattttaggtgtcaaggcaagtgtaacgctgtcttcctcaacaccaacaaagccggaccacagttccatctgagtttccttcatcgtatcaccgtttatggcaatatacttgaaaggcactcttaccatttccggcatcatcttggtcagattattagccattgtgatacgcttaccatccttattataagggaaaagccgtagaaaccatccgtcaagcagggtgggacgttccgacgaacatactccgccacgcagctggtccgggtggtaaagtgtaaccatgtctttccaaaacctgcggtttggtctgccttcagatgcttttataaattctccgagaactggcttcagccttccaatccatttctccatgccatacttctccaatgaacaagtcttatccaacactttcttccagtcgtcaggagtacctgtcagcgttatctcaggtatgccacaggcaatgtagactacgatatagtcgaaataagccttcatgacgtccattaatgtaatgccggatgctatgcgctccacctttccggttgtactgaagtctgcaataaatgtttcagcaatattgtctttggtattttcgccaatctgccttatgaagtcatccattattccagaccagtcggcatcttcgctcatcaggtcattatttgtttgcaccacaaggttcatcttgtcatcgtgaaagacaaacttgtcacgcaacttttctttgttgccgttcgcataatgactgaaaacctgacagatattcagccatatcatgtcaggggaaagaacaagaggtctgtgttccgcataagccctgactatacattgaaaaagaacgtccttaccgattgtcttaaaagagcagtccttaaaacttgaagcaatataaccgctgtcagtctttgctgcattatattccatcagaagatattttgcagcgttatcaccaataacggttctccaatggtattcactccgtggagctggcagattctcgtcaacggcaaatgtaatactcctatctgtcttatttataattccatacaatgtgtcaggctcttgtgcatatattggcaggaatatgataatactgtataataagcaaagaatgtgcttcataactcttcataaatttaaggattcttatgaaacaaagatatataaagtttctcttcagaataaagataaagatatatttttacgtgaattatagatttatatacaaatattatgacaataatagtataaaacaactctttttattgacacttatcagttaatttactacctttgtaggaaaataatgacagattgcctgttaagtaaaactaagggacaataatgtttatgaaaagactactgttgacttaacaggaacatccatatctaaaaaactatataaataaaatgaatacgttaaaaaataagcttcttgcttttatattattacttcccttatcattgttcgcacagcagccagtaaatgaaaagccacgtattcttatcagtacagatattggaggaacagatcccgacgacaatcagtcgatgatgcactatctgctttacagcaatgagtttgactgcgaaggactggtctcttcgccttcctttggagacggcaataaaagcgagatactgcgtatgattgacatatacgaacaggacttgcctaatctgaagaagcataataaagagtcgaaaactcccaatgctttttatccgtcaccggagtaccttcgctctataacaaaacagggaagacacggttctgcccctctggcaggatattccacggctacagaaggttcggaatggattgtgcgttgtgccaacaagcaatcacaacgccctttgtatgttcttgtatggggctgtttggatgatgtcgcacaggctctgcatgatgcgcctgagatagccaataagatacgtatatactggattggcggtccaaacaagaaatggggtatcaacgcttatgtttacataattgaaaactttcctgatatttggatgatagagaacaactccacataccgcagctttattgccaaatataaacagaaggaccagtggaacggaggtttctataaccactatgtaaaaggatgcggttatctcggagccgatttctacaattatttgcaaggaaagcctaagctcggagacaccccgtcgcttctttatatgatggacggcgacccggcaaatccggaaaaggaatcgtggggcggaagttttgaacgttacaattatactccaaggcgtgtgttccaccatacaactacagataaagacaccgcacagatatactccattgtagaatggcacataaaaggtccggaatgtaaaacgctgaatgttggcgacgagtgcataaccttaaacattgcaaagcagaattggcgcggatattatctcggcaacggcaattatgtggtaagatacagtacatacaagacgggaacccaaccgtataccataacttccgagataaaaggctttcctgtacaaaacggatatataactattgacaatgcctttcccggaaagcatcgtgacacagattatactgtaggaaaacaatggtggtctgacagaacggcaacagaactgtttcatgacggcaaccaaggtgctgccacgatcttcaagttccgcaaggacatcatagaagactggggcaggagatgttcgtggctgaaagacataagtgaataaacagttaacttttataatataagtgcaaataaataaggaaaccgatttataaatttatactatgtacatattagatttgcttttgtacattcgtataataaacagttaacatatttagtataatgaaaactatcacatatttaatcgtattgtttctacaacttctttgtttagctccgataaatgcacaagggatatatgagaaggtgacatctttagatcaggttaatgagggtggaacatttattatcgttaggatttataataatgtttcaatgggaaatattgttagaaaaaacaaagtaagcgtttgtcaaggagttacaataaacgtaaatgaaaataatacagatttgctttttattgaaactgtgaatacagacctttcaccttttgaagttgaaataacaaaagatacagaaaatgctggcttcttttatcttaaaacaatacaaggatatttgttttccgattcagagacaagtagagatattgagtattctgaagaatctaataaaggtaataaatataagtggagtatcgacattggagatgccgataataattttgctaaaatctcaaataaatcaacaaaacgtattatatgctatcaaagtagtacaaaagatttcagagcagagacagccaactccgcagccaacatacaactcttccgtaaaatccctgccgacaatcctatagcattacaaataggcgcagccaaatattccacattgtattatagcgacaagaaccttgttgtaccaaatggagtggaggcatatacattcaaatatgacaataacggtttgcagattagcaatacgtataagtatctggatgtaattcctaaaggaacagcggttgtattacacggatacggaagtttcgattttcttgaaacggttgcttcaggtgttacggacaacaataatgtcttgaacggaacagacaataaagaaaacatcccgactgatgataatgacagttatttttattacatgctttctctcaactcgtcaaacgaattaagttccgtcggattttattggggaacagaaggcggaggaccttttgagaacagtgcccacaaggcttatctcaaaataccgaagtcagccacatcaaatgccaaacaatcattcttattcagcgatgtggaaacagggaccactcaaatatcccgtcccattatcggcaaaatcaccgacaaacattattataccattcaaggaagcaaaatatcaagacccgtccataaaggcgtatacatcttcaatggtaagaaatttgtcattaaataagaaatacatgaaaaacaaatatattacacccgtcatctatattattgtaccggataccgccttttatttcatgtctggttcttccgaaaaaggtcccgaagatttgacagaaactaaagaagtaggcaacaaaatccagctaagcaagttccattctgtttttgacgagcaggaagatgaagacgaaaacgattggtaataaacggtttagatggaaataatatcattataacaacaaactaaacccgatttaaataaaaagcccaccgttaaggacgatgggcaaacctgaatgttttcacaacggaataatccttattgtgatttgcttaaaattcattgcaaatatatggaaaataattgacattcaatatattttctatgttatttttgtatatttgcgttatgaataaagcattttaaaccttaaacatataatcacaatattatgaaaaggatattaggtctcgacttgggaacaagcagcataggatgggctgtcgtaaatgagaaagaaaatgccgacgaacaatcttcgatcattaaactcggagtaagggtgaaccctcttaccgttgacgagcagcgcaatttcgaagctgggaaaccaataacgaccaatgcggacaggactctgaagcgcagtatgaggcgcaatctgcaacggtataagctaaggcgtgagaatctgttggagatattaaaagacaaccatttcataacaaacgagacaatactcgcggagaatggcaacaggacaacttttgagacctaccggctcagggcaaaggctgccgttgaagagatttcattggaggagttggcaagagtgctcctgatgataaacaaaaagcgcggatataagagtagccgcaaggttaacgctgacgaggatggaaaaatcatagacggcatgagcattgcccgagagctttatgacgaaggctgcactccaggacaatatgtcttaagcctgatgaaaacggggaaacgatacgttccagacttttaccgttctgatttgattgcggaattcgatagaatatggaattttcagaaacagttctatcccgaaatccttatagacgagctaaaagaagaactggcaaataagaataaaaaacagacatgggcgatatgcgccaaaccattctcgctggtaggaataaaacgagagataaagggtagcgagcagaagaaagagaactacgaatggcgcgtcgcaagcctttcgggacaaacagaccttgaaaggctcgctattatattacaagaaattaacggacagataagcagttcaagcggttatcttggagaaatcagcgacaggagcaaagaactttatttcaaacgtcagaccataggacaatatcttatggaaagacttgatacaaatccgaactatagtcttaagaacaaagtcttttacagacaggactatttggatgagtttgagaagatatgggaaacacagacaaaattccatgcagagcttacagacaaattaaagcgtgagatacgcgatgttgtaatattctatcaacgtccgttgaagtcccagaaaggactgataagtttctgtgagtttgagaacaaacagatagaagtaaccgttgacggcaagaaaaaactgaagacaataggtatgcgtgtgtgcccgaagtcttcacctttgttccaagagtttaaggtttggcaaatactaaacaacatacaagtatcgggaaaggttatccctgtgcaggacacagacctgttcggaacaacatcccgtatggaacaaggcaagcgttttctttatcagggcgagaaagagacgctgttctatgaattgaacatcaaagaaaagatgtcaaagaacgaggttcttaaactattgttcaagaaccacaaggagcttgatcttaactataaggaaatagaaggcaaccggacaatggcggctttgataaaagcctgtcagacaataatagacatgagcggacattgggaatatgatttttcaaagatgcagacgaaagacgtgatgcatatcatagagactgtattccgcggtcttggattcaatacagacattctgcattttgatgcttctgtcgaaggcaaggcgtttgacaagcagccggcatatatgctttggcatctgctttactcttttgccggtgataactctaaatcaggaaacgagaaacttatccataaaatttcagaattatacggctttgataaagattatgcttcaataattgcaggaataagccttcaacaggattacggcagcttgagttcaaaagccatgcgcaagatactgccacacatgaaagacggtttggaatacagcgtagcctgcggatatgcaggataccgtcattcaagtgaatctctgacaagggaagagcttgacaataaggtcctgaaagaccgtttggggcttttgccacgtaacagcctgcgcaatcctgttgtggagaagattcttaatcagatgataaacgttgtgaactctgtagtcgaggaatatggtaaacccgatgaaatcagaatagaacttgcacgcgaactgaagaagagcgcaagtgaacgcgaggaacttaccaaagcaataaacaagaccacaaaagaacacgatgaatataagaaaatactacagacagaatttggtattgccaatgtaagccgtaatgacattatcagatataaactgtatatggaactaaaagataatggattcaaaacactatattccaacacttatattccacaggaaaaactgttcagcaaggagttcgatatagaacatatcattccacaggcaaaactgtttgacgattctttctcgaacaagacaatagaagcccgtgcaataaatatagaaaaaagcaatgccaccgcttacgatttcgtttgtagtaaatatgatgcagaggaaataaaaagatacgaagtgagaatagaagagctgttccgcaatggtataataagcaagacgaaacgtgacaagctgatgatgaaggaggcggacattccagatggattcatagaacgagacttgcgcgattcgcaatacattgcaaagaaggcacgcgagatattgtgtgacatagcaagggaggttgttacgactaccggttctgttacttcacgtctgcgcgaagactggttattggttgatgtaatgaaggaactgaactgggacaaatatgacaggcttggacttacagagattgtagaagacaaggatggcagaaagatacggcggattacagactggacaaaacgcaacgaccaccgtcatcatgcaatggacgcactaatcatagcctttaccaaacggagttacatacaatatctcaacaacatgaatgcaaggagcgacaagagcggaagcatttatgccatagaaaagaatgaactttaccgcgataaaggcaaactgaaattctatcctccaataccgcttgacgtgttcaggacggaagccaaacgccatcttgacaatatccttgtatctataaaggcaaagaataaggttgttacaagaaacttgaatgtcactaagacaaggaacggtaagaataagaaaatgcaactgacaccacgcggacagttgcataacgagacaatatacggaaaaataaaacagtatgtcacaaaggaagagaaggtgaacgcctcattcacagaagacaagatctcgacagttgccaatcagaaataccgtatggcactgttagagaggctaaaaagatataatgggaattcaaagaaagcgtttacaggaagcaatacgcttcagaaaaatccgatatacttggatgatatgcacactatgactgtgccggaaaaggtaacgactgtgacttttgaggatgtatatacgataaggaaagagatatctccagaccttaaaatagacaaagtaatagatgttcacgtgcgtgagatactgaaagcacgtcttgcggaatatagcaacgacccgaaaaaggcatttgtaaaccttaaggataacccaatatggctgaataaagaaaaaagaatagacattaagcgtgttacaatacgtggtgtaagcaatgccgtggcactgcatgacaaacatgataataaaggactgcttgtttttgacaacaatggtataaaacaaccgacggattttgtaagtacaggcaacaatcaccatgtagcaatttatcgtgatgcagaaggtaatctacaagatactatcgtttctttttatgaagcgacaatgcgtgcaaatatgggaatgcctgtagttgacaaggattacaagaaatcagaaggatggcagttcttgtttacaatgaaacagaacgaatactttgtattccctaaccaagaaacaggatttaatccgaatgagatagatttacttaatccaaataactatgcggagattagtaagaatttgtttagagtgcagaaactttttaaagcaataggtagagaatatgtatttaggcatcatttagaaacaagcgttgatgataataataaattgcaagaaatagcatggaaacgtataaactcattaaacaagttaaaagatattgtcaaagtccgcatcaaccacatcgggcaaatcgtagcagtaggtgaatactaaaatcaaattaccatgataaagaaaacactatatttcggcaaccctgcatatctgtcactacggcaaggacagatggtgataaggcttcctgatattgtcaggaacgagacacttcccgaacgcatgagacagcagggagagataacaaagcctatagaagatattggtatcgttgtacttgactgcaaacagataaccaccacacaaggattattggaggctttgctggaaaacaacagtgccgttataacctgcgataaccgcagtatgcccgtcggactcatgcttccactatgcggtaattctgtgcaaagcgaacggttcagagaccagatagacgcttccctccctctgaaaaaacaactatggcagcagactataaaggcaaagataagaaatcaggcagcaattctaacacattggacaagtaaagagactggctgcatgaggcgttgggaaaatgacgtaaagagcggagaccccgataaccttgagggacgcgccgctgcatactactggaaaacattgttctctgactttgatgaactgaaagatttcacacgcgaccgtgacggaatataccccaacaaccttctcaactatggatatgcagtcttgcgtgccgtagttgcccgtgcccttgtttccagcggaatgcttccaacattaggaatacaccatcacaacagatacaacgcatattgtctggcagacgatataatggaaccataccgtccatacgtagatgagattgtcttctctatagtgaaagaatttggcggtaaagaacaagatctgacaaaagacataaaggcaaagttgctatccatcccgacaacagaagttattataagcggaaagcgcagtcctcttatggttgcggcaagccagacaacggcatcattatacagatgttttaatggcgaattgcgtcgtatcgcatatcccgaaatgtaatcaaaaattcatggaccgatttagtgaatatcgtattatgtgggtattggtgttttttgatttacctaccgaaacaaagaaagataaaaaagagtatgctttgttccgcaagaatctgcaacgcgacggatttacgatgtttcagatgtctatatacgtgcgccattgtgcaagtatggaaaatgccgaggtacatataaaacgagttaagtcttttcttccacaatatggtcatgtggcgataatgtgtattacagacaaacaattcggcaatataaacgtattctatggctcgaagcctctcgtctcaaatgccccaggacagcaacttgaacttttctaatttttttaacttttaaacatattctttatccttgttgttatagagaatagcatcttcaaagacgtatttaaaccaaaaaagccacctaaatacaataatagaatcttaccagctgataagattctattattgtgacaagcatcttttttattttctatcacttcctttattagattgtatatcagcatattaccaacaatgtgatgtttgtctctatgcaaatatatgaattttaaagcaaatcacaacaggttgcttcttctttaactcagattactgatgtttgtctctatgcaaatatatgaattttaaagcaaatcacaacttgaaaaggctaagaaagataatgattgggatgtttgtctctatgcaaatatatgaattttaaagcaaatcacaacatcggcgaattggtaatagtactaataaggatgtttgtctctatgcaaatatatgaattttaaagcaaatcacaacggggttcttccagcccttccgcctgaactcgatgtttgtctctatgcaaatatatgaattttaaagcaaatcacaacatgaaggattaaattgttctgattatactgatgtttgtctctatgcaaatatatgaattttaaagcaaatcacaacgttcgccatgtcatggtcgcccgggcagtcgatgtttgtctctatgcaaatatatgaattttaaagcaaatcacaacaaggctgaacgtgttatttcttctcttcgtgatgtttgtctctatgcaaatatatgaattttaaagcaaatcacaacgtattcggaagtgtgctcaactgggtacgtgatgtttgtctctatgcaaatatatgaattttaaagcaaatcacaaccctttttctgtcggaacctcgtacgagggtgatgtttgtctctatgcaaatatatgaattttaaagcaaatcacaacgtaagactgttggagaagttatttcagacgatgtttgtctctatgcaaatatatgaattttaaagcaaatcacaacaggtcagcaacaacttctccgacagtcttagatgtttgtctctatgcaaatatatgaattttaaagcaaatcacaacaagcagataagactaatgctgaagcagaagatgtttgtctctatgcaaatatatgaattttaaagcaaatcacaactaaagattaagagacaaagtcagatttatagatgtttgtctctatgcaaatatatgaattttaaagcaaatcacaacaaatagttatcaatctgtaattcgtcggcagatgtttgtctctatgcaaatatatgaattttaaagcaaatcacaacccaacaatatcattccacattttattgccgatgtttgtctctatgcaaatatatgaattttaaagcaaatcacaacagaaaacctaaattcgtggactttggcaatgatgtttgtctctatgcaaatatatgaattttaaagcaaatcacaacagcagggttacaaagacacagacatatgtagatgtttgtctctatgcaaatatatgaattttaaagcaaatcacaacgacaattattgagttatcctgtcagcaacgatgtttgtctctatgcaaatatatgaattttaaagcaaatcacaacgtattaaagagatacaatctcgtacatccggatgtttgtctctatgcaaatatatgaattttaaagcaaatcacaactcactttaattcaatagatatagctttcccgatgtttgtctctatgcaaatatatgaattttaaagcaaatcacaacagaatcttgtttggcatagccccatgtgagatgtttgtctctatgcaaatatatgaattttaaagcaaatcacaacagacaactgaggcttatgcttctgctggaggatgtttgtctctatgcaaatatatgaattttaaagcaaatcacaacccggtgtcaaatatccggcgcagctcatcagatgtttgtctctatgcaaatatatgaattttaaagcaaatcacaacgcgaattgttttttcttgtgaattcagatattatgactatttttgtagtgcgggatgagtgagggagataatgcccccgcattctgcaccagtctggcgagggggtgtttagcacaaatacgcattggcggttcacaccgccttttttatttcagagcttttgcagaacccattttcattcattgcggaaacaataaattaacgtgagtccgacgaatatagcaaaccacccctgcctctccttaaaaaaaggaggggacgcggagtaagggagtaaggagtaaagtattaggaagttaaagaagttatgggaagtta

SEQ ID NO: 2337 - DNA, 17765 bp, synthetic construct
  source 1..17765: mol_type = other DNA
  misc_feature 1..17765: note = Synthetic
gcatcggctacattcgtgaatcagcaggcaatcgtcaggttcacgctcttggacaaagccgacggcaccaccttgctgaacccaacggcgctgaccatccaatatggtggagaaagcctgtcattgaccatccctgcagacacctatacaaccaatggcgccggtgtcatctacgtagcaataccaggattcagcggcaaagaggttacccttacggcaaaagtcggtgatgacacctacaccttcaccaaatcaggtatcaccttcgaaaacggagagtattacgagattaacgtgaagatgaaggaataacacaaaagtattacaataatagagaaatttgaaaaagtatcttaatctgctgctcgttgccatcctgttctgcggaatgggggggatgagctcctgttctacggcatgttctatgcggctcaaccagaggctattgtacgcagcaccataggtgacagcctgtataatgtcattcacgagaagacaggcgttgagccgggaatgtcgcaccactactacgagattatgcgtgctgactcatccagcgccgccaccgtggaatactacaaacaactggccataaccctacaggaagccgaggcgtatatccgtcggcgcaacgaagaacgtccgcaagacgaactctacgagcattggtacgttaacgtgagttcggtataagataatgcaaaaagttgacgcaaatcgtcaaatccaagccttgtcgtgctgggaactatactcggtcgtcggaggaactatagtttgtcgtcggaggaactatagtttgttcggcttgttccttcagggtatcgtgacacaggggggagtagacgaggcatatatacgtaaaggccgatacgtcctgtcgtgaaagacgatacgtccttttgcaaagagctattcactgtgtttgcttgcatatttgaacctcagtttttgcgaggattgggtgaagattggccaaaacaagtcctattttgagccaaaaatgttataaatccgtaaaaaagttacggaataggaaaataatttgtatatttgcagcggtttttcaaataattatatctatgctggttaaatttgccgtaaaaaactttcgaggttttgcagataggattgagtgggatttgtcccatccaagtaattactcgtttaatacctacgctatcaaagatggcgtcgtaaagaacggtattatttatggccctaatggttctggaaagtcaaattttgctttggctatcttcgatatagtctatcatttgacgcaaaagtataagaaagaggacttctataaaaactacgtgtatggaggagactcaaaagggaaagtgctgtttgaatacaccttcaagtttggtcctcaaattgtggaatatagctacggcaagaatatgttcggcatgttgtttgcagaatcattgtcagtcgacggagtgaatgtgtttaggcgcgagtttgacaaattagaacttgacgaagagcagtttccaatcaatgcagatgccaaaaagaaccttcaggctaatgcgaacaatatctccattgtgaattatctgcttacttcttatccactatccaagaatcactatcttattctcttgcgtgattttgttaattctatgttatggtttcgcagcctcaaagccaatgagtatataggattagataatggtattacacaattggacgaatacattattcaaaacaaatttgtagaggattttaccgcatttctaaataatgtcagtggtcaggactttatattcgtgaagcctaatcccaccgataaactacttgcatgtaaattcaaatctggaattgtattgtttgatgatatcgcttctactggtactctttcgctagaactcctctattactggctaaagaagatgaacaatgcttcattcgtgtttattgacgaatttgatgcattctatcacttcaaattggcatatgaggtttgcaagcaactcttcaatctcgattgtcaggtgtttacgtcatcacataatacttatttgatgactaatgacttgctgagaccggactgcaacttcattttgcagaacaataagatcaagcccctacaagcctgcacagaaaaagaactgaggtttggacacaatatcgaaaaactattccgtggaggagcttttgaggtatgatactatttatatttgaaggtaaggacgataagacttatttcgagtctatcaaacggcttttctttccagaaaagtcggagaccttcgtatgtacctataatagcaatatctactctctttatacaaaactgaagaatcacgatgcgctgaatggaaaactggaagtagatacagtctctgtattcaaggaaatcctgacagaaaaaggtgacaacactttaaaggacatcagagaagacgaagtttctgaaatctatcttttcttcgattacgatttccaagagaattccagaacgcttgaagaaaacaacaagcgactgagtgagatgcttgatcatttcacagacgagacagacaatggcaaactttacattaactatccgatggtagaatctcttcgctataccaaagaattgccagataatgattattggcgctatacggtatctcgccagaaatgtcaagaagaaagtttcaagcatcaagttcacgagttctcattctacaagtcaaacctggaatatcttgtgctcacaatcaagcctgcagacgacgaaacaaagattctgcataaggcagatacagccaagacgaattggctgcaccttgtcacgatgaacacgagcaaggccaactatatttgtaatgataagaacgaacttcctgaagaagtgaattcacagaaagagatatatgataatcagcttgccaagtatgtagatacagaagaatgcaagatcgctatccttaatgcattcccaatattcctatttgactacttcggcaaaaaaattgtcagcgacagagaagaaacagacaaaacccaataaatatgagcaacaaagaacctggctacgtttacatactgacaaatcccagttttcgagaagattgggtgaagattggcaaaagctcacgtcctgtggatgtgagaagcaaggaactggataatactgccgttagcaagtcaatacattcgccttattcctattaaaacggagttttttttcaaaaacacaacacactacacaaaaaatgcccctaaatatcaaaactccacccctgccgtctgctcttgtcaagggtggagttaattcatttgccgaatcttcctttcagtcgtttttcccactccttcgccatggtagcaaagcgttgccagatacatatcagtattacacgaagataaaatgacaatttgcatttttaagagctcgtcatttcgtctcaaaaaaaatgcccccgttaaaggacgagggcgacctgaatgtcttcacaacggaataatccttattgtgaattgctgaaattcgttgcaaatgtacctcttttctacttattggcaaacattttcttcatttttttgctcagctgtcggaaattcttgctatttttgcaccaaaatataacttaattgacctatgaaacgtattttaggactggatttaggaacaaccagcataggctgggctttggtgaacgaagctgagaatagcgaggagcattcttcaatcacccgcttaggcgtgagagtggttcctttgaccgttgacgaacagaccaattttgagaagggaaagagcatcacaacgaatgccgaccgcacgctggaacgcagtatgcgccgtggtttgcaacgttataagctacgtcgcgcagcactcatccaatgtttgaagaaagctggcatcattaacgacgatacgattctcacagagaatggtcctcgcacgacgtttgcaactcttcgggctcgtgccaaagcagcgactgaagaagtcagcctcgaagaatttgcccgtatcctattgatgataaacaagaaacgcggctataagagttcccgtaaaactcaatcaaaagaggaaggtacattaattgatgggatggagatagccaagattttgcatgacgagcaaattactcctggccaatatatctattccttattgcaagcagataagaaatatattccagaattctatcgttcagacctacaagcagaatttgatgccatatggagattccagagattgtatcatgcagaaatcctaacagatgatttctaccaacaacttcaaggaaagacgaagactaaaacaacaagtatcttcctggctaaatatggtatatacaccgcagaaaataatggttcaaatcgccgtttacaacaatataaatggcgcgttgaagcacttcaacgggaactcaccaatgaggaactcgcttacgttatagctgatgttaatggagcgattagtggaagtagcggttatctcggagcaatcagcgaccgctctaaagagttgtatttcaaccaacagacaataggccaatatctccttcaggaaatagaggccgaccctcattatagtctgaaaaacaaaacattctatcgacaggactatcttgaagagtttgaaaagctatggcatgtacaatcgcagttccatcccgagctcacgcccgaactgagaaagtatgtccgggacatcatcattttctaccaacgccccctaaagagcaaaaaggcgatgttggatatatgtacctttgagaatagacaagtagaagttaccgaggatggaaagacccgcacgaagacagtcggactcaaagtctgccccaaatcttcacctctattccaggagttcaaaatctggcaaatcctcaacaacctcgaagtagaatacgaagcacccggcgaagacctgtttgccgaaacggaacaaagacgcctgctctctcttgaggaaatggaaatcctcgcgcacgaactattatataaagataaactcaccaaacgggaagccctctccatcctatttggcaaatcagcaaaaaaatacgacttgaattataaagagatcgagggtaatcgtactattgctgccctgtatcgtgcatttttcaacatctttgcactttctggccatgaggaatatgacaccaataaactgacggccaataaaatcgaagagattgccagcaatcttttcaggctactcggtttcaatgaaggcgttcttcaatttgacgcttcagcggaaggccatgcattcgaccaacaaccactttatcagctttggcatttgctttattcctacgaaagcgataattccaagaccggcaacgaggcactcatcaagaaacttcaacgcctctgccactgcgaccgcgaatatgcacaagttttggccaacgtaaccttccaagaagattacagaagtctcagtgccaaagcgatgcgcaagatcctgccgtacatgaagcagggcttgacttacgataaagcctgtgaagaagctggctaccgccattcagaacgatctcgcaccaaagaagagcttgccaatagagaatatctcaaccgactcgaactacttccacgcaacgccctaagaaatcctgtcgtagagaaaattcttaaccaaatgataaacgtcgtaaatgccgtttgcgaagaattcggcaagcccgatgaaattcgtattgaactggcacgtgacctgaaacaaaacgccaaagaacgtgagagaaccacggcagatatcaatgctgctaacctgctgaatgaaaagtatcgtaaagagctggagacagagttcgggatccaacatgtcagccgtaatgacatcatccgctataagttatatttggagctgaagggcaacggattcaagacgctttattccgacacctatattccaaaagaaaaactattcagcaaggaatttgatattgagcatatcataccacaggcacgccttttcgacgattccttctccaataaaaccttggaagctcgtgacatcaacatcgaaaagagcaatgcaaccgctttcgacttcatactcagtaaatggggcgaagaaaaggctgccgcctacaaagccaagattgacgacctctaccgaaagggaattatcggcaaatctaagcatgacaaattactcatgcgtgaagcagatatacccgatggattcattgaccgcgatttgcgtaactcacagtatatcgccaagaaagcacgtgagattcttgaagacctcgttccagtagttacacccaccattggaagcatcaccgaccgtctgcgtgaggactggcaactcgtggacgttatgcaagaacttaactgggaaaaatacgaacgtttgggactaacagaaacatataaggacaaggacggacgagaaattcgacgcataaaagactggaccaaacgcaacgaccatcgccatcacgcaatggatgcactgaccattgcattcaccaaactcgctttcatacaatacctgaataacctcaacgcacgcagcgacaaaggtagtagcatctacggaatcgaacaacgatacttataccgcgacagtcatggtaaactacgttttcgtgcaccgatgccgctcgaccagttccgggctgaagcaaaacggcaacttgaagatatttttatatccatcaaggcaaagaacaaggtgatgacgcagaatgtcaacaagagtaaaatcaaaggcggtaccagaagaaaagtccaactgactccacgaggacaattgcataacgaaacaatatatggtcacacgcttcatcgagtgacggaagttgttaaggtcgatggtaagatgacatttgaacgtgctcaactggtggccaagaagatgtatcgcgaagccattcttgcccgccttgctgacttcggaggtgcccccaagaaagcattcacgggcaaaaacttacccaaaaagaatcccatctggcttaatgaagaacacgcggagcaagtgccaccacgtgtaaaactggtttactacgaggactattatcccatccgtaaacccgtttcgcctgatttaaaaatagataaggtaatagatgtgggtgtgcgtcgtatcctcgaagagcggctaaatgaattcggcggcgacgccaagaaggctttctcaaaccttgaggagaatcccatctatcttaataaggagaaaggaatcacgattaagagcgttcgcatccgtggagtcctcagtgccatatcattacacgaagccaaagaccacttcggacgtgtgattacggatagtagaggaaaacatagggaagttgatttcgtacaaacagccagcacccatcacatcgccatctatcgcgatgctgacgggagtttgcaagacgtggccgtatccttcttggatgcaacgacacggaaaagacttggtcaacctgttgttgatacagactataaatcttccgaaggctggaagttcctcttctccatgaagcagaacgaatacttcattttccctgatgtggagcatggattcgacccaagtgaaatagacatatttgacccgagaaataaggcagagataagtaagcggttgtatagggtacagaagatgtcaaaaactgatggtggcagagattatttctttaggcatcatttagaaacaacagtggaagacaataatgctttaatgggaatagcatttaagagaattcgaaacgtaaaagcacttgaagacatcgtcaaagtccgagtcaatcatctcggagacatactaccagcgaaagaaaactaatatagaatcataaaagactatggaaacgaattacataataacatataagcctgcggctgatgtcatcaaactagtcatctttcaagggcagtacgaaactcgccagcattggcggacgaactgaataccgccaattcttggatatagaagagttgaagaaattgctatgaaagcctatgattaaaaaaaccttatgtttctcaaaccctgcttacctcagtttacgtaacaagcaattagtcattcagattcctgacatcgagcaaaatgacacaatcccagaggcgttcaagaagatgaatgaacgcactatccccattgaagacatcggcgtagtggtgcttgacaacaaacgaatcaccatcaccactggcgtgatggaagcgctgctggagaataacgccgcagtcatcacatgcgacagccgtagtatgcctacaggattgatgttaccactttatggcaatacgcttcagaatgaacggttccgcgaccaactcgatgcttccgtgcctttgcgcaaacaattgtggcagcagaccgtcaggcagaagattgccaatcaagagaaggtgctacgcacgaacacagaagccgaaactcgctgtatgcaagcatgggtggatgaggttcggagcggtgatgcagacaacctcgaagcgcgggctgcggcttactattggcgtaacctgttcccacaaattcccaatttcgtcagaggtcgcgaaggcgagccacccaataacctattgaactacggctatgccattctgcgaggtgttgtcgcaagagcgttggtcagcagcggactactccccaccattggcattcatcatcataatcgttacaacgcctactgcttggccgatgacatcatggaaccctatcgtccttatgttgatgagttggttatcaagataatccgaaaacaaaaagactatacagagttgaccaaagaactgaaggcagaactgctcgtaatccctgttttggatgtcattatcgagggtaagcgcagtcctttgatgattgcagccacacagaccaccgcctcactctacaaatgctttagcggcgaactacgcaaaatcagttatcctcaaatggagggatgaagccatgatcatcattgacgattcttctcgtttctgccagtatcgtgttatgtggattctcgttttctttgacttgcctactgacacaaagaaggaacgtaaggctgcagccaagttccgaaaagacctgcaaggagatggcttcacgatgtttcagttctccatctatatacggcattgtgccagccgcgagaatatggatgtccacatcaaacgcgtaaaagcagcactacctgaatacggaaatgtaggcatattgggaattacagataaacaatttggtgacattcaacttttctacggtcaaaaggaaaaagcaccatcggcacccggtcaacaacttgaacttttctgagcatcatctttggatagcggatttcgccagtaatgacgttaaccgctatctaatcataaacaatttttaaatcctaatattcaacctaagtctttggattataccatcttatacacatcgtggtgtttatgatggttcaaagatgaagaatttcaagcaattcacaaccactgttgatctcctcagcgagacgcgagggtgtttatgatggttcaaagatgaagaatttcaagcaattcacaacccgcttgttttttcaataacccgtttaagaggtgtttatgatggttcaaagatgaagaatttcaagcaattcacaactggctcttctcttttgaatactgctaatggggtgtttatgatggttcaaagatgaagaatttcaagcaattcacaacaattatagttatcgttatatgtattcaattggtgtttatgatggttcaaagatgaagaatttcaagcaattcacaaccgcctttgcgagcagtccctcatagtagaggtgtttatgatggttcaaagatgaagaatttcaagcaattcacaacgaggaccaggtgcagatatactatcctggcggtgtttatgatggttcaaagatgaagaatttcaagcaattcacaacagccacttcctacaagcctaaaatgctgaaggtgtttatgatggttcaaagatgaagaatttcaagcaattcacaactgatctggtcgtcatgccggcatgaccctgggtgtttatgatggttcaaagatgaagaatttcaagcaattcacaacaaaccaagccttcgtgcctcgtacatgaaggtgtttatgatggttcaaagatgaagaatttcaagcaattcacaactgccagttgcagctctgcctctatctgcttggtgtttatgatggttcaaagatgaagaatttcaagcaattcacaaccttcgacaagtaagcgtcaccgttcagcagggtgtttatgatggttcaaagatgaagaatttcaagcaattcacaacccattctttttcatagaaatctgactgtacggtgtttatgatggttcaaagatgaagaatttcaagcaattcacaacccattctttttcatagaaatctgactgtaggtgtttatgatggttcaaagatgaagaatttcaagcaattcacaactaaacttgctcctttttattatgaagttgggtgtttatgatggttcaaagatgaagaatttcaagcaattcacaacactattctttttctctgcttcctttttcttggtgtttatgatggttcaaagatgaagaatttcaagcaattcacaacaggagcctcattcgttttttcaataaccgggtgtttatgatggttcaaagatgaagaatttcaagcaattcacaaccgcttgctccagcaacccttcgtagtacacggtgtttatgatggttcaaagatgaagaatttcaagcaattcacaactgactctctcgtatagcgggtcgggatcttggtgtttatgatggttcaaagatgaagaatttcaagcaattcacaacccgtgaggtctttttttacgctgccacttcggtgtttatgatggttcaaagatgaagaatttcaagcaattcacaacaatcagcgaaatattccataaacgagtacaggtgtttatgatggttcaaagatgaagaatttcaagcaattcacaacatagtcgagcagcgcctgatctaccatcttggtgtttatgatggttcaaagatgaagaatttcaagcaattcacaactccacggtggcgatagcgttggccgttgacggtgtttatgatggttcaaagatgaagaatttcaagcaattcacaactattcggcacaaccaaagtacgaaaaaggcggtgtttatgatggttcaaagatgaagaatttcaagcaattcacaacagagtagaggagctgggagagcatacggcgggtgtttatgatggttcaaagatgaagaattctatgtgttaacaggatgtcaaagaacttgaagtctcacccttcttttggctataatgactaaaatctgggctcagacgctgcaaagatagcgaaaaattgtaaaagcgaagaagtgaaatgagaaaaaataaggtcaaggggtcaaaatagcagcaaaacgcctcaatttcgctcatcaatgcgaagaaaaaggcaaaaagatttggcggaacggagaaaaatgccttactttgcagcgtcaaaaagaaattcttggctatccgggcagaatcccgagaggagcaagactgaaccgacactactccaaatctataaagagctgcttcggcagctctttatttgtaatacaatctcgcaaacttggttacaaagttccgatcttccagagtctttcgagtaacagacaaaactttactacccttaaatacaagaacttgaacagcattggtgtttcgctcaaagtacttctgaatgctgcgagccaaggccgttccacgataatctacggccatattcaataggatatggttcgtctggccaacagattccataagtctgtttaataccgacgattttccatgaatggtttttaaatcgtaaagacgatagatgcccttgcggacaaatataaaatctgcacttcggacttcttgtggattaggtagtatgaaaacacgaaaaccatgttctaccgctcgacgagcggcattcaacaatgcgagataatcctcatcatgctcgttaatggcagaatagatttcattttctcctttgacgggttggaatattttatgttgagttatcaactgcaattgtcttgtaaagtcaacacctctcaggatatgtagtttcgccaattctaaggctatatcattcatctgtatatgatatcggattctaaacaatgcgtcagtatatgtaatgtcttcgccttcttatcggccacgaatgacctccatttcgggctctgacggcacaaagataatgattatttcgctatcatcagcaaaatctgcaagaaaaatgtgtttaatggataatttataatgtataattgataatgtagtcgagaaaatgcaagaaaacgcccatgcttcgcccgccgaggcaaagaaaaacaatatgagggtgaggagcattgcagaaaaaacggagaattatttcaaaaacactacacactacacgaaattgtgttcataggctcactttctgcctgtttatgggcaaagagtgggaaaagttgtgtagtgtgtagtgtttttttgatggcattttgcaaaaagttgactcaaaaacactccgaacactccgaaacactccgcatataacccttcaaaatgtcatctccagatggcaaaccgattatgagaatcggagtgtttcggagtgttcggagtgttttcgcgtcaactttttgcaacgctctccgctataaagtcacctcttctgcgataagacgttacgtcctccgcaataggacgtcacgtcttccacgataatccgtcacgtcttccgcgataggacgtcacgtcttccacgaaaggacgtgagggccgggacgtatatatgtctcggcctttacgtatatacataaacgcccgcacgtatatatgtctttggggggcgggactattggatgagggattgggcggcgcggaggaggacgcggtcgtagccgtagatgtcggaatggaagtcgaggtggtgggtgatggggtcgggataggcggtgtagtagatgatgaagagggggacgttgggcttgatgtcgtggtaggtgagcagccgcagtgggcgctggatggtttctccattgcgttcgcgttcgcggaggtctttcaggtagtcgcgtccgcgttcggactgcggcgccttgtccatagagaggcgcaggcggtcgagggtccattcgtcggcatcgggcagcaggaaacaggcgagttcgaagggttgctcaacgcggatgcagccgtgggagagggtgcggcgctcgcgctggaaggcggaggggttgttggtgtcgtggaggtagacggcgaagtcgttggggaagcggaagacgatgcggccgaggctgttgcccgcgccgccgaactgggctatgcgcactcgcccggacagcatctggtcggcagtgactcgggagggtctgagggtgtcgcccgtggcccggttgatgatgaaataacggtggcgcgcgaagtaggcggagtcgccggcgtggcgggtgatatcggtcttgacgatgttctgggggataatccattcgggattcacctgcatgtatttgagggcgctgtggaggaggggggtcttggtgagtgtgctgccgcagcagatgcgcatggtgaggatgctgtctggcccgatggcccacagttgctgggcggcgaggttgacgatggcgggctgtggcctctgccagcggcatcgttcgaggttgatggcgagtttgcggcggagttctttgctggtggtggtgtcgatggctgcgcgcagggcttcgctgacggctcctgtggggcgggagttgcgaaggtagtccatgcggtcgtcggagagtagctggcgcagcgcttcggcgtagtcgggtgtctgcacttcgtaggcgaagaggcgtgcatagccgggccctgcgagtttgttgtccagttggttgagcagcttgtcggggcgcaggaacccgtagcgctggcctgtacagtagtggacataggtgcgcgagaggttgtagtcgaggcggggcagcacctcgttgatgctcacgccgagggagtcgaaggcgaggcgatggatgatctcgaggtcatgggcaatctgcggaaggaggaaggctgcgctgtcgagacctgccagggggagctcgcggcggaggatggcgagcagggtgtcggcgtcttcagagactcccattcggttgaaccataggggggtgtcttcatagcggttggcagtgctgtagtgctggcgcacgatgaggtgtgccttccagtcggaggtgtcggcgctgagaatctgccggaggttctgctgcagctgcagggtgtcgaggtcatagacgtagcttccgaaggcggagcggtcggcttcggaagtgggcgtcgttgagcaggatagcaatgcggcgcaggtgcatgcaatcagaaggatagattttttcaacgtgccgaggtatttgatgtcgcgtacctaaaggcacgcatattcattgccattgcataccagccaatgaattggctggctaccattatcatgccccgctggggcattgtgcattgtgaattttgaattatgcattgtgaattattcaacgcttcaacactttcttgctcgttccgtcggctaagcggacgatgtagagtcctggacggagggcggcgaagtcgcgcccgaggtagtggccgttgaggttgtagtagccggcgaggacgtcggaggcgatgacggctgagggttctgcctgctccatctccaccatatcgtgcacctccggagtcacgcctttgtcggtgccgatgacgacgtcgaaggtgtggatggtgttggtgaatcctatcgtgggtcgatgcatgtggtagaatgtgttggcgccgtcgggatagcggcctacggactcgtcgcccttatggctgttgtagacgagggcgtcggcaaattccttcagttccggatggtcgatgaagaagggtgcgttgcgctccacgaactcctcagaggaggtgagcctcacttgttctcctttcttgttgcccagtttgaagggggtgtggagctgactgaggctttcgaggtcgtctgcccagacggtgaggaatccatgtgctgggacgatggtgttgagtgccgatgtggttggaatctgatatttgttcggctccttgggatcgtcgctgaggtagagtccagctgcgtcgaggtcgtggtcggtggtgttgtagagctcgaaccagtcgttcttcttgaagtattcattgatgaaaaccgtgttgccggcactcacctcgttgatgcggatggggttggcgatatcggcgagcagttcctcgtcaggcagtttctcgaagacggcgatgatggcttgctgcacgcctgggtcggcgatgtcctgtatgtcgatttctgcgacttcatctacgagtttgtagctgcctttggtgatggtggcgccccagtagatgtctgacgaggaagcagaagtgttgtggacttctgcactaatggaattggtgccggagcgcagcaattcgttgggaatcgtcagtgtggtggagtaggcctggctgccctcgtaggtggtggaataggtgttgtaggtcggagtgccttcgggcatgtggtagcgggtgagctcggttccgttgatatagatgaccacgccgtcatcgacatagtaggtgaggcggaagacatcgttctcggtgggggctgtgttgagctggaaggacttgcggaaataataggtgggacgcttgttggagctgttgccgccgtagtccagttcggtggtgtagtctccggcgccggcctctattccaacggttccgtagccgaagggagcctgacctttcttccagttggtgacgttggacacgcgggtgttccagtttttatcgtcgagcgagccttggtcgtagtagctccacgtgtcgttgagggcaaccagtgtctcctgtgtggaatattctccatttgtccgccagccggagaaacgatatccagccggagcctttgcctcgatgatagctggggcgaagagggtgccgttgaagcgtcctgtaggtacgtcgatgttgttgataagcagcttggcatcggggatattggaggagatctggatggggtagcctttgccgagttggaagtaggagctgagtgcgctgatacgtgcattgcggttgctgttgttggagatggtgctgatgaggctattggcagaaccccagggcgacttgccctcccagctgagggcctcgttggtgcggtttgccagttcctgaatgatggcgctgcagcgttccggctcgaagacgcttccgtcgacgatgcaataggtgtcgatgaagcgtttgcggtagggcaggtgtttgagcatattcagatggatggcaatgaggtagctctgaccgccgctgtagcgcgagtcgttgaggctgttgggcaggcggctgaccatgttggtcatctggaatcctgcatctaagtcaatcatcacgaggtggaacttgcctccgtcggcgcgcgagcggaatcctttgacattgttgcagttcgtgagccagtcggaactgccgatgtagcactctgcagccatatagttgcagtactcatcgatgtccacgagttggcagatctgcttgtaggtggtgtcggccagcaacctgtcgccaaggttcttggaaagctctatccagcgcagcatggctttgttgtcaccggacttctgctcgtagcctttggaaccgttgatttcgaactcgtcgatttcatccttgtcgatgccgtagttgctgtaggagaagttcttgttgctggtttcgcgcatgttgtaggtgtactggaacacgccgttgaagaatacgtgtacgggctgcacagagagaccatcgacattgaatccgctgcggaggatgcattcctggatgccggcatcgatgattcggcagttgtggtcgttgccgccattgcgcacttgaacggctttgtgtttgatgtagggtttctcctggaagaagggataggggaggaagttctgtccctcgtactgcttggctgccttcaagcggaaggagctgggcgcaaagtggcggctccatcctccggcgacttcgaaatccgtctcttgctgaatgggagaggtggtgtagtcgccggcttcgtcgggcatcagatattcgaaattgacgggtcgctcccaggcgcggttcttgttgctgttgtccttgttgttgccgttggttccgttggtgccgtcgacatagacgccgatgcggttgtcgtagaggttcttcgcgtcggtggccacagagacgatgggcaggtagtagttgcggtccttatagatataggaacgcgtgacgacaggactggggaggaatccgtcgcggaagaggcggaaccggaagacggtggtcttgttgataacaggcagacgtccgtcgaggttgcgtatgccgttttccagagtgggtgtggagccgtcggtggtgtagacgaggaatgctccttcggggatttttacttcgatgtagaaggggtcggtgaagacggtgccgtcgggcgctccttccagagacggcagttgttcgctggcaaaggtgctgccagcgttcgaggcggcaggggtgggagtgctggtataggaccatgtgccggcaccatcgacggtgcgggcatagctgcaacgtgtgatggcgggcggatagctctggctgtcgatgagttcctgactgctggtgtagaggtagatggtgccgccttccgagttgagtttgaagggcacctgtttgtaggcgttggtgctgtagcgcgtgtcgg

SEQ ID NO: 2338 - DNA, 17758 bp, synthetic construct
  source 1..17758: mol_type = other DNA
  misc_feature 1..17758: note = Synthetic
gttccaaaggaagactgaactatcgttgagtgatatgattttggtcatatcgccgccgtatttgccctgcattatgatgacattctgccccacgatggagcggagtttgaatttcggagaaattttcataaaataacttgaattttgttagtgcaaatgtcgttaatttgcttctaaaatgcaaaaaatgcgcgcagattgagaaaaatatgcctttaatacttgcaagttagtgtttttctgtctatcttgcagcgtttttgaaagaagtttcaattactaatttaaaattaaataacatgaaagagctcgtagctaaaatcaatgctgaaatcgcagaatttcaggcaaatgctgaggcacaggtagttaagggaaacaaggctgccggtgcacgtgcacgtaagaacgctttggaacttatgaaggatcttaaagaattccgcaaggtttcagttgaagcttcaaagtaagaaacatgaaaaaaataaactgcgtcagatttgtcaattattttcgagtatagatttcttttggaagaaggagtgtactggaggtacacgactgatgagaaaggaaagatagaccgaaaagaatgagaaagatgatgaaggttattttttgaaggtttcaaagtcgctaaacaagcaaaaagaaaggtcgctgatttttcggcgacctttcttgtataaaccttcaaaaaataacctacatccacacttcttgaagaactttgagatgtggatgaaaaagattcttcgccacgtcagaaatatatctggtggcggaacgtctctgtttccaaaaaatctcctgtcagcagacaatcttgttccgcattttcctcaggcatcctttcaaccaacagcagcggctcctgtagctcaactgctactatgtcaccgattctgagcgaaacgacttccgacacctcagcaatggcgttctcgaccatctctcggctgccttccacggtgctgaagatgactttcccgttttttcgcagcacaaattcgttttcatcgttgtcgagcacgaggggattgtagagcgggaaggggagtattgaactatggtcaaggcatgcggaccaagtcagttcactcttcgcagaggaggcatctacagtctcggtctccagggcattcccatcaacggcggtgcctggacgtatgccgccgtagagcaggactccgaagttgaatccgtcatagtagcgatccgcgaacttgtagccgatgcatttaccggccttgctcactctcacgaagagtacgggggtgaacctgtagccttctacggcagggattgcatagatgtccttgttctcgcgctcccatgttgtgtcgggcctgcatgtgcagagcccttccatcggtttgactatgatattcatggctctaaaataactttcctgtgccgaacctctcctggagcgcagctgccgcagaagctgtctcactttcattgagaggtttctttgacgcttcgcgtctctctttctcgaactgctccttcagtcttgcaaactgatgtttggtgtcgagcatgaagtcaccgcgatcaatccaactgaaataggacggatcgttttcgtagacccattttgccgccttgcccttgtattttccgaaattcacctccacgactcccttatcatttagaatgagccgtccggcgaagtctacatacctgttcttgacgaatccggcgagggcattgagatcgttcttcagcaccgggaaacccttgtccgggtcgactgtcgagtatttgtcaagctgcgcctccaccacttcaaccgtcgccagcacatcggcttccgcggcatgtgcgttctcgaagtcgcaaccgcagtagaatcggtgggcagccttgagattacgcggctcataggcgaaataaatcagctgggcgtcaatcattttcttcgaatgcaggtcgaggtcgaaggacttgtgcctatagcagcgtgtcctttcgatttcctccgcaagcatagggaggtcaaacttctgcgagttgtagccgccgagctcggagtctttcagccactctactacctcgtcgacaatttcccagaacttcggttcgtccttgagttcctcatctgtgattccatgcacggccatcgcactcgggtcaatcggcctctggcagttgttcacatagtcccacgggcagacccgccatgtctttacacgcctttctccgtcgggaaagacctttacgaagcagagctcgatgatcgagtccgtcggtatattcaatccggtgctctcaatgtcaaagaaaacgaccggtttctccaaattaagtttcatttatcaaaaattatcgaagtccaacgccgcagatggccgttttatggaattacgatatcattataggcataataatgccgcaaagcttttcgcgctcaggctcattctccccaggctgaataagcgcagcccgcttgtcatccaagaatctcatctcaagttcgccacagctgaagttagagaggatctcaatcaagaacggagacttgaacccgatggtgagaggtgcgccctcgtagtcgcaggcaatcttctcgtgggctgcaatcgagaatccgagatcctgggccgaaacctctatggctccctccgagaggtcgaacttcacgtggttggacgccctgttagcgcagacggacacacgcctgatggtgttgaggaattgcactctgtcaatcttgagcacgtttgagttgttctgcgggatgacttcgcggtatttcggatatttcccgacaatcagacggcagatgactatggtctgtccgaacttgaattcggcattcttcgcgtcaaaagagatttcaacctcgtctacgtccttcccgataatggtcttgaggatggacgcaggttttttgtggaggatgaacgaggccttctccgatgccttgacatcctttgccgtgtagcagatgagcttgtgcgcgtctgatgccacaagtgttgtggatgcggtgtcgatgtcgaagaatatgccgttcatcgcgggacggatttcatcatcggccgtggcgtagattgtgcttgtgatgccttccacgagcgactgtgccggaaatgtcagctttacagccgtctcgtccgtgcctgtaatctgagggtagtcatcggccggtctgtaggggagagtagatgcaccgcttgcccaactgcactcgaatgcgctgtctcctacggtcttgattgtcagaggctgatccggaagttccttgagcaagtccataaggtgttttgccggcactgtcatccgtcctgtctcggtgataccttccggttcaacttccgttctcagagtgagttcggagtcggaggccgtaatccgcaggactttggagtcgagttcgaagaggaagtcctcgagaattgggagagccgatttcgttggaattgcctttgaaacggccatgaccgccttctgcaggtcagaacttgatatgatgaaatccatgtcgttaaaaatttgtttgtcgtatttatgtccatgtgctgtcacgatgtcaatcggtgtggaacgtgcaaggcacatataactgacaaatatagccaaaaaacttcagaaaaatccattttgactgacaaaatgaaagaaaatggccaaaaggaacttcactttgtacgattattgtagtatgcgacaatgtgcaggcgctacggtgcaagactccgttgtgccctgatgtacgaaaatataaaatataacaatatgaaaaaaggaatattatatgccattatgtctgccctgtgtggggctgtggcggcctttatcgtcgtaaagtgcagtggaaattcagaggaaccggcccggcaggcgactgtagccgagtctgatgtcaagttcaggactgtggatctctcgaacgataattggccggactttacattcgcggcagaaacctgcgtcgatgccgtggtctatgtcagggttacagccacccagcaggtcgtgagcaacgccggtccgctcttccgcttcttcttcggctatgagggcatccctcattcccgtgaggtccagggcagcggctccggagtcatcatccgcgaggacggctacatcgtgacgaacaaccatgtgattgccggcgccaagtcgattgaggtcacgctgaacgacaatcacacctatcctgcgaaactcatcggcaccgacccggccacggatgtcgcccttatcaagattgaagagcacgggctccctgtcatccctcttgcggattcggacaagctccgtctcggcgagtgggtgattgcgataggcagtccgtatgacctccgttcgaccatcacggccggaattgtcagcgccaagggacgcacgatgcctaactattccggcgagtttaagattgaatcattcatccagacagatgctgcggtgaatcccggaaacagtggcggtgcactcgtgaacaaggaaggacagcttgtgggcgtgaatacggcaatcatttcacagacaggatcatacgcgggttattctttcgcagttccttccaacatcgtcaagcgtatcacagacgaccttatggactacggaacggttcaccgcgccatgctcggcatttcaatggccccggtggatgaggaaattgcaaggaatttgaaactttcgtcagtaaacggcgtatatatagcagatgtggtgaaaggcagtgctgcggagaatgccggcctgaaggtgggcgacgttctcgttgaaatcggcaatgtgaagattacgggctccgcttcggttcaggaagctgtgaatagtttccatccgggcgagaagactgccgtcaaggttatccgtgacggctcagaactgtctttcgatgtggtgtttaaataatcgtaacagatgagacagctaaagattacaaaatcaattactaaccgagagtcggcctcgctcgacaagtacctccaggagatcggtaaggaagatttgattacagtagaggaggaggttgaacttgcgcagcgaatcaggaaaggcgaccaggctgcccttgaaaaacttaccagagcgaaccttaggtttgtcgtttctgtggcaaaacaataccagaaccagggtctcagtctcccggaccttattaacgagggtaacctcgggcttatcaaggcggcagagaaattcgatgagacaagaggctttaagttcatttcgtacgctgtatggtggattcgtcagtcaattctccaggctcttgccgagcagtcgagaatcgtgcgccttcctcttaaccaggtgggctctctgaacaaaatcaacaaggctctccagaagttcgagcaggaaaatgagagacagccgtccaacgaggaacttgcggagatgattgacgttccgaaagacaagattgccgatacgatgcgcgtgtccggtcgtcatgtctccgttgacgctccgttcgtcgagggcgaggacaatagcctgcttgacgtgcttattaacccggattctccgaatgccgaccgtggacttgtgaacgagtcgctcaacaaggaaatcgagcgtgcgctttctactcttgcaccgcgtgagcgtgaaatcatcaagtcattcttcggcataggatgccaggagatgacccttgaggaaatcggcgagcgcttcggcctcacacgtgagcgtgtgcgtcagattaaggaaaaggccatccgcaagctcaagaacaattcccgaagcaagcttctgaaaggctatctcggataattttgaatgtttctcacttcgttcaacgggcggactgcatgtcggctttatggatggggtgagtttgttttgtaaataatatacttatataatgattttgacaccggaaaaacttatcgccggcagcgcggctgaggcggtcaggcagttgtggggcgctgaggttgatgcatcgctcctgcaggtgcagattacgagaaaggagtttgacggagactacactcttgttgtgtttccgcttttgaaaatgtctcaccttgcgccggaggctaccggcaatgcgattgggcagtggatgctcgagaatgttcccgaagtcggtggatacaacaccgtgaaggggtttctgaatatttcgctttcaaacgtttattggaacgaggtgtttgcagaggcgtttaggaatgaggattttggccagcttccggcaaccggaaagaccattatggtcgaattctcgtcaccgaacaccaacaagcctcttcacctcggtcatgtgcgcaacaatcttctcggatggtccgtttcccgccttcttgaggcgaacggtcataaggtcctgaaggtcaatcttgtgaatgatagaggaatacacatctgcaagtcaatgcttgcatggctaaagaccgcaaacggcgagactccagagacctccggcaagaagggagaccacctcgtgggtgactgctatgtggctttcaacgacatctacaagaaagaggtggaagaacttgtcgccggcggaatgtcgaaggaagaggccgaaaagaatgctccgagtttgaaggaggctcaagaaatgctgctcaaatgggagcagggagacccggaggttcgcgctctttgggagaagatgaattcttgggtgtatgacggcttcaacaagacttatgccgaccttggaatctcttttgacagaatatattacgagtctcagacctatctgctcggcaaggctctggtgcagaagggactggagatgggcgttttcgaaagacacgaagacggctcagtctggtgtgacctcactgccgacggactcgaccagaaacttcttttgcgtagcgacggcacttcggtttatatgacccaggatctcggcacggcagagcgccgtttcgaggagtatagtcttgacgaactcatctatgtggtcggcaacgagcagaactatcattttcaggtcctcaaactcatactcaagaaactcggtttcgactggtccgacaacatctaccacctttcctatggtatggtggaacttccggaaggaaaaatgaaatcccgcgagggaactgttgtggatgcggatgaccttctcgagaagatgtacaacaccgcgaaggagacttccctcgaacttggaaaacttgacgatatgtcagaggcggagcaggacgaacttttcagaatgctttctctcggagcactcaagtacttcataatcaaggttgaccctcgcaagacaatgcttttcgaccctaaggagagcatcgacttcaacggcaacactggtccgttcattcaatatacccacgcgaggatcaagtccattctccgcaaggcccaagcccagggcatcgactggacttccgtttccgagagtgttgaattgaacccgaaggaagtcaggatcatcaagatcctcaacaacttcccgaacaagatcgcggaagccggcgaggctcactctcctgcaattgtggcgaactacgcctacgaacttgccaaggagttcaaccagtactaccacgatactccgattttgcgtgaggaaaacaaggctgtccttgccttccgtctccgcctcatcgaactgattgcgcgtgtcctcacaaaggccatggatattctgggcatcaaacttccggagaggatgtagtcgttcctcctttctcagctgatagagcaatgggctggtaaaggatttctttgccagcccttattatgtcctcttgtaatgactacagatagtcgtcgaagtaggtcgtcactttgtccatcagatggatgcggttgcgcccgaatacattgtgtttggccgtagggtaggggaagtaatcgacagggatttcgaggtcgatgcagcgctggatgaagctgaggctgtgttcccagaccactgtgtcgtcgattgccccctggcagattagcagtttgcccttgagattagccgcttttgtaatcagacttgtgctttcgtaaccttcgggattttcggcaggattgtccatatacctttcgccatacatcacctcataccatttccagtcaatcaccggtcctcctgcgacaccgactttgaatacttcgggatatgtcgtcatcagcgatatggtcataaatccgccgtaactccagccgtgtacaccgattcgctcgccatcgacataggggaggcttttcagcatcttgattccttccatctggtctgccatctctgcttttccacagtttctccagattgctttttcaaactccgctccccggtaggacgtgccgcgattgtcttgaacataaacaagatagcctttctgagccatcagcatttcccagtagcgcagccccccgagccaaaagttgttgaccatctgggagtgagggccgccatagacatagactatgacaggatattttttccctgggtcgaagtctttgggtttcagaagcctgtagtagttgtcgaactgtccgtccgcgctttttactgtgccgaggtctatttcacagaatccgaatggcttggtgctgtcttcggcgcggaaaagcacttccttatccccgctgaatctgccgtctttcccgattttgcccgccgtgctgcatttctgcacagtcggtgggacattgagactgctgtacatttcgtaaaatgcgctgcaatcctgctccattttcaaaattttgtgccaaccaggctcggttgtaagtctctcgcccacaaactttttgggcagtctgaattctccttttgagttttgccgaacggcggtcctgaagacatgcctttcaatcggactgacttcgtaggaatagtagtaaacccatttcccgtcgttggcgatatactcgacgtctgcatcaacttttgtcagacgctccactttgcccccgaggtcgcagaggtagagattgcggaatccgtcgcgattgtttgtgcggtagataaattgggtggaggagtgtcccaggggagccttgctgtcctttatgaaaaagaccgggtccgaaggctctacatatttttcgtctgtttcgctgaaaattgtcccgagaaattctccgcttgaggcatcgtagcggttgaagtgcatttctttctggcttctggagagcacctgaatcaatatgctcccggaatcaggagtccagcagatgttgctgagatagcgctcctccgtgaaatcagtgacgtccatatagactgtcttttcgctgcaaaggtcatatactccgagacttatcttttccgagctcattcccgccataggatattttatgctcgtgagcgttcctgtccgggtggtgatgtccagaagagggaagtcggtgaccgcagtttcgtccttgcggtaaaaagcgagtttcagactgtccggtgaccagaaaagaccgccgtcgattccgaattcgttgcggctgacagtctctccatagacaatccccggattctctgcccgaacaatcaccttcccatccaaacgaatctgtgaaatcccgtcaactctctcactgacagcgcgttccgtcttattcccgtctgccatccattcaaatcgcggaagcctggtccgcaaacctttccccagcacggcctcctccatcgtaaggtcacgtcccgattgtgcttcccgcacagcaaaaaccccaggttgagcgctcagacccaagccgagacaaaggctgagaagcatagatgttataacttttttcataatactatttttcatcgattttatccattattggtgaactggatttgttttgcaaataaaactctatgcaaaagaaacaggtgttatcaatgatgatggcgaccttttcgggccgccataaatgttttcacaacggaataatccttattgtgaattgcttcaaattcaatggcaaatttattaattatttttgaatagtcaatatttcagaccattttcttcaaaaaacgacatttattgggaaatgagagtagatattcataaattttgattaagtttgaagtctatatgactgataaccaaataacattcgtttaatgaaaaagatacttggacttgatcttggaacgacttccatcggttgggcattggtgaatgaagctgaatcttcggaggaaaagtcgtcgataattaaacttggagttagagtaaatccgttgacaactaaagaacaatctgattttcaggaaggtaagcctatttcgacaaatgcggataggacgctcaaacgtggaatgaggcgcaatcttcagcgctataaactgcgtcgggaaaagcttattgagttgatgacggatttgggttggattgatgaatcgtctgtgcttgccgagcaaggtcccgagactacattcgagaccttgagactcagggccaaatctgtcgatgaggaggtttctttactagaactggcaaggattcttctcagtatcaatagcaagcgtggttataagagcagtcgtaaggcaaagaatgatgatgaaggcgcactgattgacggaatgtccattgcaaagaaattatatgacgagggactcactccaggacagtttgtatataataggatgagcgaaggaaaatattcggttcctgacttttaccgttccgaccttgtggctgagtttgacaggatttgggacgaacagaagaagtactatccggctttgcttactgacgaattaagggagaacctcagagggaagaataaaggacaggtttggaagatttgcgagtctgcttggaatattgtcggtaaaaagcgggacaagaaagggcgcgaactatcgcttgagaattatcagtggcgtaccgaagcactttccgctgaattacctcttgaggatctgacttgtgttcttcaagagatttcttctcaaatcaatttatcaagcgggtatcttggcaaaatcagcgaccgcagtaaggaattgttttttggaaaggaaaccgtcggtcagtatctgatgcgccattttgatgaaaaccctcatttcagttcaaagaatgtcgttttctatcgacaggattatcttgatgaatttgagcgtatttgggagactcaaacgaaatttcatccggagctcactcccgaactcaagcacaaattccgcgacagaatcattttttatcagcgtccgttaaagagtcaaaaatcacttgtaagtatctgtgaatttgaacataaggaagtgaaggtccttgtggatggcgtggcaaagacaaaagttgtcggaccgcgtgtttgtccgaaatcctctcctttatttcaagaattcaaaatctggcaaattctcaacaatctgaaggttaacggcgaacggattccaaaggacaaaagggatattctctttgaggaattgagttggaaaggaggaatgaaaaagtcgggagttttgaaacttctgtatggaacagccagtcgtgaccttgacctgaattacaaggaggtggaaggaaacaatacgctttcttctttcgtgaagacttggcttaatatgttggaaaccaccggtcttgacattacggggtacgaaaaacagcctgctgtaaagttgattcctttgttgcgtcagcaatttttgcaacagggttgggatgccagtctgcttgaaaacaacatcttggcattgggagacaaatttgaacatcatccgctatatcgcctatggcatttgctatattcgtatgagggagacaaatctaaaacgggtaatgcctctttgattaaaaagcttcaggagggattcggttttgatgaagatagtgcaaggattcttgcaggcatatcctttactccggattatggaagtctgagtgctaaggccatccgaaagatacttccatttatggagaatgatgggcaagaatatagtgaggcttgtgcttctgcgggttatcgtcattctgcaaaatccctcacaaaggacgaaattgcaaacagagtcttgaaggagagggttgaacttcttccgaaaaacagccttcgcaatccggtagtcgaaaagattctgaatcagatgattaatgtcgtcaatgctgtcattgatgaatatggcaaaccggacgaaatacgcattgaacttgcccgtgagctcaaaaaatctgcgaaagagcgcgatcaaatgacttcggcaattgcgaaatcgacaaaagagtatgaagagttggctgaaaaactgcgttcagaattcgggatcctcaatgtgagccgtaatgatataatccgttatcgattatggaaagaattggagaacaatggttacaagagtttatattcgaataaatacattcctaaagagaaactgttttccaaggatgttgaaattgagcatataattcctcaagcccgtctgtttgatgattcttttgcgaacaaaactctcgagtacagcgatgttaatagagaaaaaggtaattcgacggcaatggattatgttcacaacaaatatggagcggaagaagcggaaaactatcggcagagagtgcagaaactctataatgatggctttatcgggaaaacaaagaaagagcatcttttgatgcgggagtctgagattcctgacggattcatcaatagggatttgcgtgagacacagtatattgcaaagaaagcaaaggagatattggaagaacttgttccttatgtagtctcgacaaccggctcaattactgacagacttcgtgaagactggcaactcgtaaatgtgatgcaagagttgaactgggataagtattcagcgcttgggcttactgaagtgcgagaagaccgtgacggcaggcggataaggaagattaaagactggacaaaacgcaatgaccacagacatcacgcgatggatgcgctgacaattgcgttcacaaagcgttcttacattcaatacctaaactatctgaatgcgcgtttgcaaaaagattgtggagatgaggctatcattaaccttgatgaatatgtgcttgaggacttgaacaatgtcgaaaagactcagattgccgctgtggttcgcgctatcgaaagaagccagctttatcgtgacggaggcaagctgcgtttttgtccgccgatgccgttggatgagttccgggcagaggcgaagcggcatttggaggcggctcttgtttcaataaaggcaaagaacaaggttgtgacccgcaatactaatatcacccaaaaagccgggggaacaaatcgaaaagttcaattgacgcctcgtgggcaattgcataatgagactgtttatgggaaaactaagcagtattcattagccgaagagaaagtgggctcgtcatttacgctggaaaaaattgcgactgtcgcaaagaaagcatatcgggaggcgttgttggcaaggctcgaagagttcggtggcgatccgaagaaggcattctgcggcaaaaacagtttggacaaaaatccggtttggttgaatcctgcccattctgcgtctgttccagtaagggtcggagttgtgggaatgacagaaacatatacagtccgaaaagaaatcagtaaggatcttaagttggacaaggtggttgatgccggcattcgttccattttgaaagctcgtttggaagaatacggaggcgatgcggcaaaggcgttttcaaaccttgacgagaatcctatttggcttaatagagagaagggtattacaatcaaaagggtcacgatttctggggtaagtaatgcgacagcattgcacgacagacacgataatgttggagatgtgattcttgacggagatgagtgtaggatgccttcagattatgtgagcttgagtaacaatcatcacatagcaatctatgttgattccgatggaaactatcaagaacaggttgtctcattttttgaggctaccgctcgcgcaacggatggcgttcctatcgttgacagggatttcaaaaaggatgaaggatggagtttcctcttctcgatgaagcgaaatgaatatttcgtttttcctaatccgcagaccggtttcgatcctaatgaggtggatttgatgaatccggacaattattctcagattagtcctaatttgtttagggttcagaagttggcaaccaataattatacgttccgtcatcatttggaaactaatgtcgaagagaatgttcttttacgagattctacttggaaacgaattcagacaactaattatctcaaaggcatcgtaaaagttagagttaaccatttgggagagattgtggcggtaggcgaatattaagtccactccgttatgataaagaagaccctctattttggcaatccggcctatttgtccttgaaactcgaacaacttgtcatcaaaactcagaagcaggaggatgacggggaaagcatcaccaggacgattccaatcgaagacatcggggttgttgttcttgatcataggcaaattaccatcactcaaggggttatggaaaaactccttgagaataattgtgcggtgataacttgtgatagtcgtcacttgccggtggggctgttgcttccgcttgttggaaatacggttcagaatgagcgtttccgtagccagattgattcgtctcttccattgcgcaaacagctttggcagcagaccattcaagcaaaaattgcaaatcaggcagctgtgttggagtattccacttctcgccgacacgggaatatgcttgtctgggtttcgcaggtgaaatccggggactcagataatgttgaggcccgtgcagcgacttattattggaagactattttcccggaaaggccggattttcttcgcgggcaatttgaagacgatcccaatggtttgtttaattatggctatgctgttttaagggctgttgtagcccgttcccttgtgatgagtgggcttctaccgactctcggcattcatcatcacaaccgctacaatgcatattgccttgcagacgacattatggaaccctatcggccttatgtggaccgtcttgttctggacataatagcagaggatggcactttgtctcttacgcagagcgcaaaactgcggttgttgtcaatccctgtgcttgatgttgaaattgatggtcacacaagtccgttaatggtggccgtttcgactactacggcatctttggcaaaatgttttggtggagatctccgaaagatagtctaccccataatgatataaactttgtatgacagagcgtttcagccagtatcgggttatgtgggttcttgtgttttttgatttgccgacggacacgaagaaggagaggaaggctgctgcggatttccggaaaaaactgataatggacgggttcataatgtttcagtattccatttatatgcgccattgtccgagttccgaaaatgcggctgtccatacgaagcgtgtcaagtcttttcttccaccatccggtcaggtcggaatattgtcaatcactgataagcaatttggctcgatggaactgtttttggcaagaaaaattagtcagttaccatccggagccggagtccaattggaattgttttagctttagtttgatttgacttgctgtttttcggctttttcagtagaatttgaatttatgtataaaaacaaaatctcggctttttaatagtcgagattttattttctgatagccagtcttaatgatttgtgaatcattgatttatctgtgttctactggtttcagcgtgtcaaagataaagaatttgaaagcaattcacaactgggacgacttttcttctgaaaatcacgttactggtttcagcgtgtcaaagataaagaatttgaaagcaattcacaacactgagatgcggtatttctcgttgcaaagaactggtttcagcgtgtcaaagataaagaatttgaaagcaattcacaaccagtatgaaagcatccttattcttcgggtactggtttcagcgtgtcaaagataaagaatttgaaagcaattcacaacggtctcccggtatccttgcaccgaacatgactggtttcagcgtgtcaaagataaagaatttgaaagcaattcacaactctaccagattttgacaattcgggctttcactggtttcagcgtgtcaaagataaagaatttgaaagcaattcacaactgaaaactgaagacatcttgaaaattcttgactggtttcagcgtgtcaaagataaagaatttgaaagcaattcacaaccttaaagaacttgattacaaacacacattactggtttcagcgtgtcaaagataaagaatttgaaagcaattcacaacgggcgcctgaaagaccgggaaaaaaacccaactggtttcagcgtgtcaaagataaagaatttgaaagcaattcacaacggtcatagggcagcggataggcgagatataactggtttcagcgtgtcaaagataaagaatttgaaagcaattcacaacatattgtggcaaattttttcttcagcctcactggtttcagcgtgtcaaagataaagaatttgaaagcaattcacaacaataaatgtatttgctctcataactctataactggtttcagcgtgtcaaagataaagaatttgaaagcaattcacaacatattgcgtgttgtttggtattgcaaaggactggtttcagcgtgtcaaagataaagaatttgaaagcaattcacaacataataacgagcaggctgaattccgccaatactggtttcagcgtgtcaaagataaagaatttgaaagcaattcacaacgaggaataattatgtatgataccaaaagaactggtttcagcgtgtcaaagataaagaatttgaaagcaattcacaacgagttcgagaagggactgggcgttgtgtgtactggtttcagcgtgtcaaagataaagaatttgaaagcaattcacaactggaaatcaagaaaacagatgtaaaaaacaactggtttcagcgtgtcaaagataaagaatttgaaagcaattcacaacctaaagaacgtttcttcgtttctgttgctcactggtttcagcgtgtcaaagataaagaatttgaaagcaattcacaacattcgtacctttgttccataataataaaagactggtttcagcgtgtcaaagataaagaatttgaaagcaattcacaactttagtgtcgctcacactctctcccttgagactggtttcagcgtgtcaaagataaagaatttgaaagcaattcacaacttatgcgattcaagattgacgaacatttgactggtttcagcgtgtcaaagataaagaatttgaaagcaattcacaactacacatgggaactttacgaacaggcagcactggtttcagcgtgtcaaagataaagaatttgaaagcaattcacaactattcgtgagccgaccgcgcacatcacttcactggtttcagcgtgtcaaagataaagaatttgaaagcaattcacaaccctccaagcatttcctgctcatatccttgaactggtttcagcgtgtcaaagataaagaatttgaaagcaattcacaacggatttgatatacaagaatccgaagtttgactggtttcagcgtgtcaaagataaagaatttgaaagcaattcacaactatacttgggaactttatgaacaggcagcactggtttcagcgtgtcaaagataaagaatttgaaagcaattcacaacatttccgcatctttgttgcataataataaactggtttcagcgtgtcaaagataaagaatttgaaagcaattcacaacgccgtcaatcttcattccgaacaacgctttactggtttcagcgtgtcaaagataaagaatttgaaagcaattcacaaccggg

SEQ ID NO: 2339 - DNA, 17570 bp, synthetic construct
  source 1..17570: mol_type = other DNA
  misc_feature 1..17570: note = Synthetic
  variation 7539..7567: note = n is a, c, g, or t
taacctttctgataaggccaagcacagcctgcatcgactccaacggacgttcatccatcgcgatcatggtcttctcaaaccagcctttcgatttcagatgacgggcgaagtcagcgatgaaagagccccaatattcattgtactccgggctgcctggagtgacctggatcgtagtgttcgaagaggtcgcctgatcgtagtagtcaaacgacaaagcccatggaatcattgagtagcagttgatctgccggtctattcccaaagagaacatgaactccacccaacggtcgaagatcgtgtagtcgtaaagccatgtgccgtcaatgcggcggatcttagtgaccatcgaaccgaacgcgtcttcggtctggccgttccacggacggttcatgatggtagccgtgacggatttctgccctgcgtcagccaacatcttcatcaccggtcgcatagcctcgaaatgagcatcactccaaagcgggacacccgcatggcgtgccactgaatatggattctgccacaggtccagatggaacgcccattcatgggccggaggaagaatatgctcggacacgaccagttccacattgaggctgcgggacttcgcgccgacggatgagacggtcagccggcctgaatatttgccaggcttcgcatcggaaggcacacctacagtcatccagacaggctgcctgcgccctgccggaatattcattgactccgcaaggtcaagcacatcagcgacaaggacttcgccccacttggacttgtcttcccgggaaccgcactggccatatttcgtcgtatcaagcaagtccgagaccacgaaactgacaaactggagagtgatgttctcggaagaaatcacggatttcccgttacgcagatcggaaacagacaacgtcacgtccttcagatccgagtcggacgagatcactgcctgggcaaacactttctccccacgccaagcggaatgattgaaggcctttttctgaaactccaatgactgacctccaccgataacacaatgtgagcccgtagaagcccagtccaacttaatagcagactgcggctgtgcagccgtaaggattggcagcacaaccgcaagcaccaaagtaagaacattcttcatcttaaatcattttagatagtcgtaaaaacaaatcgccgcagattttgcaatgatgcggcgactcattttcaacttgctacagtcctaactgcttgaagaagtcgttccccttgtcatcaacgagtatgaacgcagggaagttctccacacggatcttccagatggcctccattccaaggtccggatattcaacgcactcgatgctcttgatgctctcgtaagagaggacagccgcaggaccaccgatggagccgaggtagaagccgccgtgcttcttgcaggcatctgtcacaacctgtgtgcggttgcccttggcgatcatgatcatgctgccgccgtgatcctggaagagatcaacgtaaggatccatgcggttggccgtggtaggtcccatcgagccacaggccattcccttaggggtcttggcagggcctgcgtagaacacaggatgatccttgaaatactgcggaagatcctcgcccctgtcaagtctttccttcagacgggcatgcgcgatgtcacgggccacgatgatggttccattaagactcaaacgagttgaaacagggtatttgctgaggagcttgcagatctcgctcatcggcttgtcgaggtcaacgacaacaccctcgccctctccggcattacgcaaagactctggaatccattgcgttgggttatcgtccagtttctcgatccaaacaccgtccttgttgatcttcgccttgatgttgcggtcagccgagcagcttactccaaggccgatcgggcagctcgctccgtggcgaggcagacggatgattcggacatcgtgggcgaaatatttgcctccgaactgagctccgagtccgatcttgtaggcctcctcaagcacctgcttctccagctcaacatcacggaaagcgcgtccggtctcgtcaccggtcgtaggcagagcgtcatagtaatgtgtggaagccagtttgactgtcagaaggttcttctcagccgatgtgccaccgatcacaaaagcgatgtggtaaggagggcaggcagcagttccgagagtcttcatcttctccacgaggaaaggcacgagagtgccaggattgagcactgcctttgtcatctggtagagataggtcttgttggctgagccaccacctttcacaacacagaggaacttatattccataccctcctcggcctcgatgtcgatctgggcaggaaggttgcacttcgtgttgatctctttgtacatgtccagaggggcgttctggctgtagcgcagattctcctcggtgtaggtcttgtaaacgcccttggacagagcctccgcgtcatcgaatccggtccagacctgctggcccttctctccgtgaatgatggcggtgccggtgtcctggcagaaaggcagtttgcccttcgcggccacctcggcgttgcgcaggaagcgcagagccacgtatttgtcgttgtcggaagcctctggatcgctcaagatcttggcaacctgttggttgtgagccggtctcagaaggaagttcacatccctgaaagcggcgttcgcaagcatcgtcaaagcctcaggagccaccttgagaataggatgaccctcaaactcgccaagagacacgccttcgcctgtcagcttgtagtactcggttgtgtccggtcccaactggaacatcggagcatatttgaattcagccatattaatgaaatattttagtgattatcagtcaatatcctcaatcggagccgtagcgccgccggccccctcctgcatcaggtagcgcttcatgaactcgttcaggtcgccatccagcacgccttgggtgtcagcggtggaataccccgtccgcaggtccttgaccatcttgtacggatgtaggacgtaggagcggatctgggagccccactctatcttcttcttcgtgccctcgatctcggcctgcttctcctgacgcttcttcagttccaggtcgtaaagccttgacctcaggatgcgcagggcgttctgccggttgtcctgctggaagcgggactccgtgttctccacgactattcccgaaggaatatgccgcacgcgcactccggtctcgaccttgttgacattctggccgccgtgaccgccggaacggaacgtgtcccactccaaatcggaagggtttatctcgatgttgattgtgtcgtccaccaacgggtacacgaaaacggacgagaatgtggtctgacgcttgccctgtgcgttgaacggagaaaggcgcacgagtctgtgcactccgttctcagccttgagatagccgtaagcgtagtcgccctcgacctggatggtggccgacttgattccggcttcatcgccctcaagaaggtctgtgacagtcactttatagccgtttctctcgccccaacgcatgtacatcctcatcagcatcgaactccagtcgttcgcctcggtgccgcccgccccggaattaatcgtcagcacggctccaaggttgtccccctccgcacccaacatattcctaagttccaatgcctcaatggcttctaccgcttttgaatatgattcctcaagttcctgcgtctccgctgtggtgacactctcgtccgtgcttccgccgagactttccttggcgaaatcgtacagcacatcaaggtcatccacctcggtggaggccttgtcaaaacctgtcacccaagactttacactgttaaggttcttcatgaagacctctgcggccttcgggtcgttccaaaagtcctgtgactccgtcttcttctgcaaagcggctacctgcccacgtttcgcagggatgtcaaagacacctccccaacgtctccaaccgctgatgcagagcctcaatctgatcttttagtatcatctgctctccattttaaatttgttcctggcaaaccccatatttgcagagtggttcactgcaccaaggaatgcagtgcaaaggtaatgattttctctgattcacgccaaggacgatggaacattcatctgaccgtaaacacgttaacagccactcataaatcccgagtcggtggcgcataattttctatcaatcagcaacataaggtttcgtcttcaggcaaatcaaaccaaagacagcaggcttatccgttgattatcagccacatacacaccacatcacctatacaaaaccgtatgctgctccgcatacacatcaagcacgaatcgcattcttctgaaataaaaaagacgagaagcatacgctccccgccttaagtgttttcacaacggaataatccttattgtgaattgcttcagatgtgacaaatttagcgaaaagatgtgaatatccaaataattattctaaattagcgggtaaagaccatagagtcttgaattcaaccacgtatcataatgcaacaacacctcgtatgaaaaccattcttggattagacctcggaactaccagtataggctgggcattggttaaggaagcagagccattctctgacgagaaatcagagattgtcagactcggtgtacgtatcgtgcctcttacggtgaaagagaagacgagttttgaaaatggcaaaagcattactacaaatgccgacaggactcaaaaacgtggaatgcgtcgaaatcttcaaaggtataaactaagaaggcaggccttgattgaggaactaaaggatgcgggatggattgacgacgacttcatcttttcagagactggccctggatcaactttccgcacattacggcttagggcgaagtcagcatcggaggaggttactcttggcgacctggcgaggacgttactacagataaataagaagaggggctacaagagttccagaaaagcggcttcaagcgatgacggccaggcaattgacggaatggctgtcgccaaggagatgtatgacaaaggattgactcccggggaatatgtctatcagcgtatgctcgaaggcaagtacgctattcccgagttctataaatcggacttgcaggatgagttcgacaggatatggactctccagaaatcctttcatagtgaattgaccgacgaactttacaggaagctgtctgacagaaacaagagccaaacctgggcgatatgtcgtgaggaactgggcatccaaggactgaaaagcaaattcaccggaaaggacagactaagagaagcctaccgttacaggcatttggccgcctcacaggaagttgatctggaagtcctgacctgcgccttacaagatatcaacggccagaaagcctctctcagtggtcttctaagcaagattagcgacagaagtaaagaactatacttcaataatttgaccgtaggtcagatgttacttaagagaattgaggataatccaaacaatagtctgaggaacattgtgttctacagacaggactatcttgatgagtttgaaagaatctggaccgaacagtcgaaatatcacgctgaacttacccctgaactgaaaaagagactccgggacataatcatcttctaccaacgtccgctaaagagtcagaaagggcttatcagtctatgcgagctcgaaaccagaaaggtagaggtcaccgttgatggagtaaagaaggaaaagaacatcgggccacgagtatgtccgcgttcctctcctttgttccaggaattcaaggtctggcagacaatcaacaacatcttggtcaacggaaccgcccttgatgacgaagagaagtccgtcatcgcaaaagagttgatgttcaaggacaaacttaaagacagcgatctcctcaaactgctgttcaaaaccacaaagggactgagtgtcaacttcaaggagattgacggcaaccgcacaatggcgacattgatgaaggcctgcttcaagattgccgggaacttgggatatgacgacactgctctcgctaaactctcttcggaagaccaaatagacaggatcgaggaaatattcaaagagcagggattcaatacagaatttcttcatttcgattcctcgcttgcctctccggaatttgagaatcaggactcctacaggctgtggcatctgctatattcttatgaaggtgataagtccgcaagcggtaatgagtcgctcgtgaaatgcataatggacctgtgctctatggatgaggggtcagcaaagatacttgccgcctgcaccttccttcccgattatggcagcctgagcgcgaaagctatgaggaagattctgccatatatgaaagatggccttgaatatagcgccgcctgcacgatggccggttaccggcactcaaagcgctcgctgaccaaagaagagcttgacaccaaggaatattccgaccgcctttccattttgccgaagaacagcctccgtaaccctgtggtcgagaaaatcctcaaccaaatgatcaatgttgtgaattccgtcatagatgtctatggcaagcctgacgaaatccgcatcgagatggccagagagctgaaaaagagtgcgaaagaaagagaggaggcacaaagggacatagcatccgcgactgcggaaaaccagaaaataatcgagatactaaaaggcgagccattctacctcccgtttccgacacgtaacgacatcatccgttaccgcctgtaccaagaactggctcagaacgggtacaagactctttatagcaacacttatattcctaaagacaagctgttctccaaagaatttgacattgagcatatcatcccgcaagctctcatattcaatgactcctttgccaacaagacacttgaatcaaggcaatgtaatcttgagaaagggaaggcgacggcaatggattatgtcaagtcgaaatatgatgaggctggagtccagacataccacaatagagtcaatggtctgataggcaaggggatttccaagactaaggccaaatggctgctgatggaaggcaaggatattccggaagatttcatcaacagagaacttcgtgacagtcagtatattgccaagaaagcaagggagattcttgagtcacttgtcaaattcgttgtcccgacaacaggctctgtgacggcaaggctacgtgaagactggcagcttgtgaatgtgatgcaggagctgaactgggagaagtatgcccggttgggccttaccggtgtcagggaggacaaggatggacgcagaataccgttcatccaagactggacaaaacggaatgaccatcgccatcacgcgatggacgcgttgacaatcgttttcacccgccggcagttcatccagtacctcaaccacttaaattctaaaattgatgctgtctcttgggacaagaaggatctggatcttagggattatgaccttgatgacatcaagttcggcgatatgagcgccggagacaggtacggcatcgtcaaggctttgcaggacaggttcctttacaaggacggcaacgataaatnnnnnnnnnnnnnnnnnnnnnnnnnnnnntaaataccgctttgtcccaccgatccctatggacaagttccgtacaaaagcgaaagagcaattgagcgacattctcatctccttcaaggcaaagaacaaggtctgcacaagaaacgtcaacgtgacaaagaacaagggaggggtaaacaagaaggttcaacttacaccccgtgggccgttgcataatgaaaccatctatgggagcagccgggaatatgtggccaaggatgaaaagataggcggttcattcaattccgaaaagatcttgactgtctgcaagaaacagttcagggacgcccttgcgcgaaggctggaggagtttggcggagatcccaagaaggctttcaccgggaagaattcaccggaaaagaatccgatatgggttgatgaatatcattcggagcaggtcccggtcaaagtgaggacaatgactataggacagaggttcactggccggaagcccgttgatgtcaagcttaagatagagaacgtcattgataaaaagattcgtgagattctccaggctcgcctggacgaattcggcggcaaggcggaaaaagctttcacgaatcttgacgagaatccgatctggctcaataaggaaaagggaatcgcgatcaagagggtgactgtgtcaggtcctgcgaatccggtttccatccgaatcaagagggacaaggatggcaagcctatcattggcgattcaggtaaaacaatagggtctgattttgtgaagcccgataacaaccatcacattgccatattcagggattcttctggaaaacttcaggagcatccggtatcttttcttgaggcgactatcgccaagtctaacggcttagatgttgttgaccggaactacaagaaagatgaaggctgggagttcttgttcactttgaaacagaatgagtattttgtctttccgaatccagagactgggttcaatccattggattatgatttgacggatccgagtaattatgcggagatcagtccgaatttgtatagggtgcagaagataactaccggagactattttttcaggcttcatcttgagacaacagtagaggaaagcaaggcactgaaaggaataacctggaaacgtattagaaatgcatccgctcttgaggaactcgtcaaggtccgtattgacaatctcggtagaatcgtagccgtcggggaatatgattaaacgcacactctatttcggaaatccggcatacctgtcgctgaaatcggggcagcttgtgatcaacaaaccagcctccggtgaggaaaagaaggaggtggccaagactgttccgattgaggatatcgcatcggtagtacttgacaacaaacaaatcacaatcacacaagctttgctggataggcttcttgaagagaattgtgcggtcataacctgcgattcctcgcatcttccgaccggactgatgcttcctctggacggtcacacgctccagaacgaacgtttccgctcgcagattgccgcatctcttcctctgaagaagcagatttggcagcagactatccaatccaaaatcgccaatcaagccgcggttcttgaatatgccaccggcgaaaagcatccgaatatgcttaaatgggcgacgggcgtgcgtagtggggatcccgagaatctggaggcacgggcggccgcatattactggaagacgcttttctctgacattatcagaggtttcatacgaggaagggacgaagatgccccgaacaatctcctgaactacggctatgccattgtccgcgccactatagccagagctttggtttgcagcggtctgttgccgaccttgggtgttcaccacagaaacaagtataatgcttattgtctggctgatgacattatggaaccatatcgcccgtatgttgatttgcttgtctatcagatagtgaaagaggatggtccgttgaacctagacacatctataaaggcaaggcttttgtccattccgatgactgatgtcagaatcaatggggtgacaagccctctgatgatagcggcaaccacaacttcctcgtcattggctaaatgcttctgtggagaatccaagcaagttttgtatccgattttgtaatgaaccgctcagaacggataagccagtatcgtgttatgtgggttatggtgttttttgatctgcctaccgacacaaagaaggaggttaaggctgcgacggagttccgtaagctgctgattagcgatgggttcataatgttccagtattccatctatattcgtcactgcgcaagcgcggagaatgcggatgttcacataaagagggcgaagtctttccttccgcccaaagggaaagtcgggattctcaggataactgacaagcagttcgccgcgatggaacttttcaactcacagaagtctgaaaatcttccgaaagagggcctccagttggaattgttctgaaaaacccttcaccctacaacaaaaaatccggcaaacgccggattttttgattctcgaacatctcatataagttactacatctcaacgttctacacaaactctattgtgttcaaagaacgaagatacaaaatctgaaagcaattcacaactagttatgatacatggaaggacaggagatgattgtgttcaaagaacgaagatacaaaatctgaaagcaattcacaacggcagcggttcgtcttctcgtcgtaccacgattgtgttcaaagaacgaagatacaaaatctgaaagcaattcacaacacatgcgtatctttctccggcagttccggaattgtgttcaaagaacgaagatacaaaatctgaaagcaattcacaactatggccttgttgaccttgtcgctccacgcattgtgttcaaagaacgaagatacaaaatctgaaagcaattcacaacgaaccgcctttgttaaactcatcgtaacatattgtgttcaaagaacgaagatacaaaatctgaaagcaattcacaacttggatgatgcagtgcctgaaatggaagagattgtgttcaaagaacgaagatacaaaatctgaaagcaattcacaacgtatttgaagaaatagttgttgtcgtcccaattgtgttcaaagaacgaagatacaaaatctgaaagcaattcacaactcacggccgcggggaaaaaacacaaataaattgtgttcaaagaacgaagatacaaaatctgaaagcaattcacaacttctccttctccatcctgagcctttcccacattgtgttcaaagaacgaagatacaaaatctgaaagcaattcacaacagatttgtcaacgaaaatataatagccgtaattgtgttcaaagaacgaagatacaaaatctgaaagcaattcacaacaaaagcctcagtgccgctccacgtgccaatattgtgttcaaagaacgaagatacaaaatctgaaagcaattcacaacttctggaacatttacatttacatttacggttgactactctttcacattgcatcaatgtacatttgggtctacacacctaaaaccataaaccggtaattataaagtggatatcattccaggtgcgcggcgtttttcacacctggaatggacgatgcccacagaacgcgtcgcggagggtgatcatacatacaggtgtgcatgaatgcccacaccaagaaccgtaagtcgatcgttatcaaactgatgccactccaggtgcgaggagtttttcatacctgggaaagaacaatgcccatggaacgcgtcgcggagggggtgccgcctcgcaggtgtgcggaaacattcacacctgtagtaccaaatcgttgtctgtcaacaaaataaatttccaggtacggcataacaactccgaatgggtgccacgcctcttcaatgatgcctttgaagttaaagacatttgcataggtaattatcaggaaagtctatacgagtagactaattatcgcactattatactaataatcaatcaaatacatacgaaaacgtttcgcggtaattctgattataataatgagttgagagatctatggccaactggtatataatttccaatctgaaagtaactcacgactcaccgtctcaaccagagtgagaagaagcggtcgtagatgacgtaggagtcatcatcttctttcagaacaaggcctttctcgacaaggacggccaaagcttgacggacactgctcggtgcggtcagattgttaagacgcataaactcggcatcgtacggtttcgtcacctttccggcacgggctatggcatacaaaagccttaactgacctttggacaccaattcgcagtacgtcttgtaagttgagctctcctcttctataacatcattgacaaccctatggacatcttccttagtgacagtcttttgcggcaatgaatataacatattcatcaagtcctgaacataccaagtgtgccctgacatcagttcatagacatattcaaagactccttccgccatttgcttccctccgcgcgcgaaaagtctttccgcaaaggaggaatatgactccaaagggatcgtcctaaggacaatcttttgagtactttggtaaaacggtcgatttgccgacgagaacatcgcctccatcaaatgctttttgcttccggcaaagatgaatctcgcatttgtctgaaactgaatatacgagcgcaaaagagcctcaacacctttttcaggatattccgtaatctgctgaaactcatctatagcgacataaacacgtcttcctgcattggcgagatagtcgaaaatctccttcagacccaattcagttttagattcttgaaggtccaatgacactgtaggtgacagattggatggatcaagagaaaagaccgggcgaagatttcggaaaaactccactatctgcctctttgcgctgtccgtacgggaatcaagggctcctagcaaggtcttgccgaacaacaaagtaaaatcccacagattcagagttggaaaaatatccatatagacacataccgcagacttatcctgtcgcttgattgtgtcgaacacgtgaaggatcaagcccgtctttcccatacgtcttgggcttgtcagcgtcacattgcgtccgttacctaacgcacctatgaccttggctgtctccgtttccctgtcacagaaatattcctgtcctgcatatccggttatcaagaaaggattatccggactttcattcacttttatgctcataattacaatcgattatactcaactgcaaagataacacaaaaagtgaaacataaaaagtgaaacgctatttatgaaacgaattttcggtaggagggtcacttcgacaggctcagtgaccgggaaagcaatcggcagtgaccggcaaagagaacgctgagcctgtcgaagcgactgtgaaagcgcagttacctgaacacaggaatttccgtcttgatgaggatgcctctcggagcgccgtgctccaatggagtgagttcgatgttctttgaatatgaacgcgttacagacgcggtttgtggatagaccttgccagcggcctgaagggcagcgcggagcatcgtctcgttctcgtcccccaactgacagccatcaaatgggtcgtcatcaatcctaacatccacagggatgccgtcaggaatcgattcattgcggccatcacgatctgcgaacttactgatcatcacgtacattccccaatccttaatcaaagaataatcgtacgtgctattgtagaagtccttaggagcaagcaggattccggcacagtattttccgtaagtctgttggccgacaagaacaacgtccatgtaaggtttaagcccaactattaggccctcggaggccgaagcagtgcccccggtcacgatgacatagagcttgtctattcccaaattagcatcggacacgtcaatcctgaggttctgcgaacttagttcatgaatattcgaaaaatatgtgtttgtgtcctctccctgctccttccaagcctgagcaagaatcgaattatagacttcagtctggaatatgtccccggcagcgacatttgccctcggagcaatcatcgaagccaacacattctcggtgaatgcatagccacccccattgtacctcaggtcaaggattagctcctgaacattttcagacttaaatctcaggaacacgtcacgaagagattgagaggatttcaaatcgaatccagagtaggctagatagccgatcttcttgccgttcacatccaatgtcttagtgacaagaattgggtcctcgtacatgtcaacagccctcaggccaaccgtcctcacttcttcaccgatgtgatcaccatcaagtttggtcactccaagttcaatagtgcgggaattaaaagcatcatagatgttattctgagtgatggcttttccgtcaagagtgatgatgacatcgccgcgtttgagccctaccttctgggccggaccgccgttgctcacataactcacgacaaggaaatactcaccttccctattgctaatccttcctacttgaagatcatagccataagtaagtccgagtccttgaaccgagtttgtgaacgattcgagatcatcagtaaggaccgtccacttgtcaacctccttgccaacctcatggtagcggatgctcttgacaacctccatcggcatcctgcaagtgtctggatccagttttgccagattcttctcaatctcctcattccaaaggtaataggtttccagcacgtcaatcgcgaaccggtcggccttggcgatctccggggtaggggcttcgtccttattgtctgcattggtttccacacagcctaaaagccccaaagccaccgtcagcaccaccgcggcaccgcacaaattcttcgtattcatattcatagatttcccaaataaccattattcagattccgcctgcaaattggacggaatttcacaaagatattcatttttctttctctttcatttctttgttgtatctttgattgaataattttcattgcggcgatgatcggcattttcgattctggttcaggcgggctgtccgtacttcgggagatccttcggcttcttccgggggaaaggtttgtctattacgcagacaacgccaactgcccttacggggaaaagacaccggggttcatccaaaaccgcagcagggcgatcactgaatatctcctctcacggggggcgcagatcatagtggtggcgtgcaacacggccaccgcagcggcgattactactcttagaaatgaatatcccgtccgcttcatcgggatggagcctgctgtgaaaccggcggcgctcagctcgaagaccggagtgatcggcgtgctggcgacagcggggactcttaaaggatccaaatacttgacaaccaagggcatctacgaggatgacgtgaaaattgtcgaacacgttgggcaagggttcgtggagcttgtggagaatgggattctggacgggccgctggcagaagagactgtcaggaaaagtctccagccacttcttgacgcaggtgcggacaggattgtgctcggatgcacgcactatccgtttcttcgctctgtcatccaaagggtcgtcggcccggatgttcaaatcatcgacccggctccggcggtggccaagcatctggttgaggtgatgaaagaggaagggctgctctcttcggtggcttcgacatctaagcccgacatcgaactgatcacctctggtaacgacacctccgccaaacgcatccttagcatcattcttgaagaagacggcttccgtcacatcaatcagtaaacaaaggcaaccgccaaaacacataaagaaatggaatcaaacaacggaatcgaggtcaaagacttcgcctactgctccgacaagtaccagtacacgatgggcaaatccttctacgaaaccggcaggaaggatgacatcgcagtcttcaacatgttctacagaaaagccccggagaacaacaactgggcagtggtcagcggcatcgaggaagcaatcgaatgcattcagaaccttggcaaggccgagcctgatttctacgaaaagttcctccctggcgatgaatatgccgaattccgcaagtacctctccactttgaagttcacaggcaacgtctatgcgatgcgtgagggcgagatcgcattcccgaaccagccaatcatcacggtggaggcccctctgatcgaagcgcagatcttggagactcccctcctctgcataatgaaccatcagatggcggtcgcgacaaaggcctcaagggtctgccgggccaccaaccgccctgtcagcgagttcggatcacgccgcgctcacggaccttgggcagcgacatacggagcgaaggctgcgatcatagcgggctgcgccagcacctccaacatcctcaccggagtgctgaacggagtcccttccaccggcacgatggcccacagctttgtcacctcctacggcagcaccgtcgaaggcgagcacaaggccttcgtggactacattggcacccaccgcggcgaaaacctcatcctcctcatcgacacctacgacaccctcaaatgcggaatcctcaacgccatccgttccttcaaggagtgcggcatcgacaatgaatatcccaacggctacggcgtgcgcctagacagcggcgacctcgcctacctctccgtcaaagtccgcaggatccttgacagccacggacttaccggctgcaagatcttcgcgaccaactctcttgatgaatatctcatctcggaccttgagcgtcagggtgcctgcatagattcctacggagtcggtgacgccatcgccaccagcaaggccgccccctgcttcggcaacgtctacaagctcgtccagatcgacggccgtccggtcctgaaacgctccgaggacaggatcaagctgatcaaccccggattccagatcacctaccggatcacgaagaaagacccggaccttggcgaagtctacaaggccgatgtcacctgcctgcgcgaagacaccctctcccaaaggatagaggctggcgagaccttcacgatctacgacgagcaggaccgctacaagtacaagatcttccaatccggtgaatattcctggagacccctccagcatcaggtcataaaggacggtgaaaggtgcgccgaaagccacaccctccaagagaagaaagccttctacaacaacaccttatcgcatttcagtccgtccgaaagacgcctcatcaacccgcactactacaaggttgacatctccgacgacctcctgaacaccaaactcgaaatcctcgacaccctaaacaaagaaatcgaagccttcagcatcgactgaggccacccttcttccagcaactagacaggagcgattcccctgatcatcgctcctgtcaaggtcattggccccgacaagcgcaaaaattccccttttcgctcctttccaatgctcaactgcactatcatcctatcagaattttacaaaaattgcatatagtttcgtgcaattttcttaattttgtgcacgcaactatcagcagatatggaatcttaatatgccacatacaagcaaaagcttgagttcacacctatgtcgttcttccgcgacttccacaatgccatcaactggaattgccggataatcgggattctcggacagaaaggagtcgggaaatccacccttatgctccaacatatcaaaaaattcgaggacatcagcaaggttctgtatgtgtcagctgacgacatatatttttcggcacacacgctggttgacacagcaaagaggttctttgcagaaggcggaaaagtgttttatattgatgagatccacaagtacggaggatggagcaccgaagtgaaacttatgtacgaccaattgccactgctcaaggtggtatattcaggcagttccattcttgacctaaaaaaaggtggcgctgatttgagcagaagggccatcgagtacaaaatgccggtctggtctttcagggaatacctcaacctacaacaaggatggaatctga

SEQ ID NO: 2340 - DNA, 17366 bp, synthetic construct
  misc_feature 1..17366: note = Synthetic
  source 1..17366: mol_type = other DNA
  variation 16369..16765: note = n is a, c, g, or t
  variation 4896..5200: note = n is a, c, g, or t
tcagaatctttcctttcaaaagtggcgaaacacgtgtaagtggtattgaattcgttcacaaggagcctcagtcaattaagatcgaaaaccatacaatccagctgggatacccacaagaaagtctagacgatgaatcagtttcattttcgaatgtccactatgttggaaggtaccaaaagcagcagctcccagcttctaagcgtcagccatacttgcacttccttcttgactactctattggcaatgaaaacaagcttgagacatatttaaatcaagcgaacaaaattgagcgccatgctgggtttagcttgaatgattctaaagtctcggtagtaaacacagaaattttgaccacgagcctggcacaaataggagaaatgaagcttgactctcacggaggtttctttcttgaaaaggcattcaagaaactgctcattaatgaatttattgagcccaaaaactcctttccagtttttattgtactaacagatgatatcaactccgcggttttcacaaggaatttggcagactatacctttgccataccagaaaacacacaattttatgtgcttaactccaagggggaacttaccgctcattccttaatcggaaacacattaaagggaatatctatatccaagatttccaattcatttgattcaactgttctctggacaagcccggaaggaaaggactattatttagcggccgatgatcagccaagtattatacccttagttcagctggaaagtgttcaaaaccaaaaacctatgaatgaatgggaagcagcactgacggcccatgctgagtggaagaaattcaggttcggtactcaatcagcacaaaagtcctggctcaatttggttagatctagtttcgagtcacagaccatgaacccaacaaccgctttcatagctcttgaaaatgaatctcaaaaagagcttctcaaaagaaaacaagatctggtcttatccgggaaacaatctctagacttgggtgaagatgtacatagaatgtccgaaccaaatatttattggttgattattgctgttctacttttggtcttgattaatcggtttaggcctactttctccaagtcaaaggcattaagtgagactcactagatgcagtgaaaattacttcagaccataaagcgattatgcggagctttttagcggctggtagataacgattaggctcaatgaaaaggagtaataaatttatgcttaagatgatatatatggcaggtattgttgtcatgttaatgatacttatactggctttggttagagagtacttcgaagttttttggacattttgaaattgagcttatgttgagaatagtttctcctcctccgccctacgggcacctcctccagaggaggacattcttgcaacctcctgactactgtgtaaatcggctttagtatgtcaccccattttcctatcctgagcttgccgaaggatcggcccagcccaagggtgacacctctatatccattttgcaaacaggagtgctctaaaactttgagggcaaataatcatcagcgtcctctgcgagagacactgatggcgatacgagcggctattgcagtcattgttttaatattcatctggcaatgcttttctccttgagtctatcctaaaaaatcaattttgatcaagattaaataagtggtgttctagcatcaatttgtcattgcattcctgttttctaatttctgttcaactgataactacttctacgaaactttaatcattccacctcagttgtaattgcgttggtaaatcctgacctttgtggattctgctctggcagcctgctctgatggaaaaattcaaagaaaatgcgacaatagaacctgctcctgtagacatctcaggtcatgaaaatattgaggtttttggtgccagggagcacaacctgaaaaacattgatgttactattccgcgcaataagcttgtagtcattactggtatttccggatcgggcaaatcatccctggctttcgataccatctatgcagaggggcaacgcaggtatatggaaagcttttcggcctatgctcgttcattcattggcgatatggaaaggcccgatgttgacaaaatcaatggtttgagccctgtaatttccattgagcaaaaaactacctccagaaacccccgctcaacagttggcacactgaccgagatttatgattttctaaggcttttgtatgcccgtgccggaatagcctattcttacctgaccggtaaacccatgattcgccagtcggaagaccagattatcgatcacctgatcaagaatttcgagggtaagaagttgatcattctggcccctgtggtaaaaggacgaaaaggccactatcgcgaacttttcgttcaaatccgcaaaatgggcttcaccaaagtgagggtagatggtgtggtgatggaaatggtgcccaaaatgcaagtagaccgttacaaaacacacgacattgaaattgtcatcgaccgtataattgcagacccaaaagaccgcttccgcattgcccaaagtgtgaaaaccgccatgagccatggcaatggagtgatgatgattcgcgatgaagaaaaccagattcatcatttttctaaatacctcatggatccggaaacggggttgtcgtacgatgaacctgcaccgaacaacttttccttcaactctccatatggtgcgtgccctacctgtaatggcttaggacaaatagaagagataagtaaagagagtgtggtgccagatcccaacttaagcatcagccggggcgggctggctccgctgggcgactatcgcgacatttggatattcaaaaagctcgaagccatactcaagcgccacaaggccaacctgagcactcccataaaagacttacccgaaggggtgctggaaaccattttatatggagacgatgtacctgttgctgttagctccaaaaaatatccgggaaccaactggaacaccaagtttgagggaataattaagtttctggaaaagcaaatggaagaaggcactgaaaaaacacgtcagtggattgccgactttatgaccgtgaaaacctgccctgaatgcaacggtgcaaggctaaaaaaagaatcgcttcactttaaaattgccgataagaacattgccgaattagccgaaatggacattgagtccttaggccactggctggtaggccttgaagaacggctcaccgaaaagcaaaaccaaattgctccggaggtattaaaagaaataagaaagcgaacaggctttctgctcgatgttggcctggactatcttacactcaaccgtccgcttcgaaccctttctggtggagaagcacaacgtattcgtttggccacacaaataggcactcagctagtgggagtactctacattatggacgaaccaagtattgggctgcaccagcgagacaatgtgaaacttattaatgccctaaaaaacctacgcgacattggcaacaccattatagtagtagaacacgataaggacatgatgttggcctctgactttatcatcgatataggtccaggagccggacgtcatggagggcaaatagtggcagccaatgaccccaaaacctttttaaaagaaggaggaaccaccgccaaataccttaagggcgaaaaagcaattgaaataccctcacagagaagaaaaggcctgggtaaaatgctcaccctgaaaggagccagcggaaacaatctcaaaaaagtagacctgaaaattcctctgggtaaaatggtgtgcattacaggggtttccggtagcggtaaatctaccctgattcacgataccctcttccctatcctgaaccatcatttctataaatcgcgtaaatcgccccttccttacgaaggtatttccgggttgaaagatgtcgataaggtgatagaagtagaccagtcgcctataggtcgaaccccaaggtcgaacccagccacctataccggagtattctcagatatacgcaccctgtttacagaacttcctgaagccaaaatcagaggctacaaagcaggtcggttctctttcaatgtgaagggtgggcgctgcgaaacctgtgaaggtgccggaatgaagctgatcgaaatggatttcctaccgaacgtgcatgtaccttgtgaaacttgtaaaggaaagcgttataaccgcgaaacacttgaagttcgattcaaaggaaaatctatctcggatgtgctggatatgaccgtagaacaagccgttgaattcttcgaaaaccaacccaagattttgagaaaaattcaaacattgaatgatgtaggcttaggctatatctcattaggtcaacacgccacaactctttcaggtggtgaagcccagcgggtaaagttagccacagaactttctaaaaaagacacaggcaaaacactctacattctggatgagcccacaaccggcctccactttcaagacattcaacatctgctcgatgtactcaacaggcttgtagacaaaggcaataccgttttggtaattgagcacaatttagatgtaattaaagtagctgatcacattatagaccttggccctgagggtggcgacaagggaggtcaaatcatagctcaaggcactcctgaagaggtcgccaaaagcaagaaaagctataccgctaagtttttgaaagaagaactaaccgcccaaactaaagctggcaaggcttaacctcattaaaacaagaaggaaatactggagcaatcctgaaacgcactcttccaagctaaacgaaaccagagcggctcccttgccttgctgagcttgccgaagcatctctctaatctcatgccagtcttggtgtcctcaccaaggcattaaaaggtgaatcggtgaggacaccgattccggcnnnnnnnnnnnnnnnnnnnnnnnnnnnnnnnnnnnnnnnnnnnnnnnnnnnnnnnnnnnnnnnnnnnnnnnnnnnnnnnnnnnnnnnnnnnnnnnnnnnnnnnnnnnnnnnnnnnnnnnnnnnnnnnnnnnnnnnnnnnnnnnnnnnnnnnnnnnnnnnnnnnnnnnnnnnnnnnnnnnnnnnnnnnnnnnnnnnnnnnnnnnnnnnnnnnnnnnnnnnnnnnnnnnnnnnnnnnnnnnnnnnnnnnnnnnnnnnnnnnnnnnnnnnnnnnnnnnnnnnnnnnnnnnnnnnnnnnnnnnnnnnnnatcggtgaggacaccgattccggccagggtttagtgcataaagtcatctttctatgctgaacaaggccaaatccgatccctttccttgctgagcgaagccgtagcatctctccaatctcatgccagtcttggtgtcctcaccaagacattgccataatctggatgggaacgaagcagggcccatcaaagtcctctatgagagactttgatggggcactagaagcatctgtctaaccttacgccagccttggtgtcctcaccaaggcattaacaggtgaatcggtgtggacaccgattccggccagggtttagcgagtaaagtcatctttctatgctgaacaaaacgagagtcactccctttccatactaagcgaagtggaagcacctgcacaaacattctaagctagcagatacttcaaccatagtctggatggaaacgaagcagggttcattaaagtcctctatgagagactttgatggggcactagaagcatctgtctaaccttacgccagtcttggtgtccacaccaaggcattaacaggcgagtcggtgtagacaccaattccggccagaatttagcgagtaaagtcatctttctatgccgaacaaaaccagagccactccctttccatactgagcgaagccgaagcatctgtctaacctactaacttggtagattcctcctcaaagtccggacgagaaaagggaacgtaagaagtagctacaaaaaaatagtgctgccgcaaccgcggacagcaccatcttcaaccaaaacattaaaatcaacactgtatctaacacctcaacgtcaggctcgttagcctgacttcaaccatcgattttaattgcctttttctgactttataacggcagctaagaactgctattataaccgtcttcttattatttgctcttttaacactttttgacacgccaatgttcccacaaaaactcacaagtatgcgaaccgaaacattttgccctatgttatgcttccaaacccacaggctatgagcagctttgaacatctccacctggagattccgaagtccgacaagcaaagaatcgtaataataggcggaggctttggcggcattcaactggtaaaaactcttcaaaaatccaactttcaaattgtacttctcgatcggcacaactaccatacatttcagcccttgttgtatcaggtagccacagccggtttagaacccgactctattgcgggagctttgcgtcagctttttgcccggcacaaagacttttactttcgtatggctcgcgttaccgggatagactcggaaagaaaggtaattaagaccctggtgggggagttagaatatgaccttctggtaatagccaacggatctaaaaccaactattttggcgataaggaaatgtacaatcgtacgtttccgatgaagcaaattccacaggcgttggatttgcgcagccacatgcttcaaaactttgaacaaacggtgctttctaaagaagatgaagaaaaagaccgtctgaccaactttgtgattgtgggtggaggccctaccggtgtggaagtagcgggggcattgggcgagctcaaaaagcatgtgttgccaaacgactatcctgatattgacttcgacataatgaaactgcacctggtagacgcaggcccaagactactggcgggcatgtctgaaaaatcgagcgccaaggccgagttatacctcaaagattttgatgttgacgttaggcttaacactcgcctggtctcttatgatggtagagatgtggtgctaaccgatggcaccgttattccggccaaaactgtcatatgggctgccggggttacgggcaatattatggacggtttgccaaaagaaagcattggcggtggacgaataattgtgaacgagttcaatgaagtaaagggtctgcaagatgtattcgccctgggagatattgctggtatgtatactgcgcaaactcctaaaggacaccccatggtggctcccgtggccattcagcaagccactaacctcggcaaaaaccttatgcgggcacaaaaaggcaaatcgctaaaaccgtttgtatataaagacaagggctcaatggccaccattggccgtaaccgcgcagtggtagacctccctaagtttcattttggtggcttgtttgcctggatggtctggatgttcattcacctaatgtctattgtgggttttcgaaaccgattggtcattttggccaactgggtgtggaattacctgacctacgaccgcggcaccaggctcatcattcgcacctttgttagaaacaaagactacaagccgggagatacgctctgatttccagccatattggttgtttacctcttgcaacaatgctttgttttgattgggcaggtttgcttatttttcgggttctaccatgggcaagaaaagactatactggattctacaaatactcggctgggggctctactttggctccaactttatctcgcagggcttagatccctttgagctgggagaaaaggccgtacaaaaccagcgcaccgagttggccattcatagcctattcttttttcttactacccacgtcctcatcagaaacataattattaagcgcaagtgggtacaaatcaacattgcgcgggtaattcccagaattttaggtgtcattcttttggcttctatactggccaacctgctcacctttcttatgtactatgtgtttggcacccgatcgttcaacgacccaagcctggttaccgaggtacttctactctttgctacctccattgtgcttttcattctctggtccacggtatactttctctatcactacctggaaagtaacaaccgttcgctcaaatatgaggcggccatgaacgaaatgcacctcaaccaactcaaagcgcaactcaaccctcattttattttcaacgcccttaacagcatgcgggcgctggtagacgaggagcccgctaaggccaaaattgccatcacacaactttctaacatattgcgcaactcgctcattaccgataaaaaaagagtagtaaattttagaaatgagctgaacaccgtaaaagactacctcgcgcttgagggtattcggttcgaagagcgtctgaaagtaaggtatcgcatagaccccagctccgaccgattcgatgtaccccccatgatgctacaaaccctggtagagaatgctatcaaacacggggtttctaacctgatggagggtggccttattgaaattcagtcggcagtacacgatagcatactggttataaaaatcagaaatagcggccaattgcttccgaacagaaaaaaaaccagcaccagaagcggtgtaggtttggtgaacaccaaagaaaggctgaaattgatttatggcgatgccgccacatttaatatttataacgaaaatgataagtttgttgtgactgaagtgaaaatacctcagcgcatttaaatataaattctatgagagcacttattgtagatgatgaaagactggctcgtaaggagcttacgaatcttttgcaggaatttcaggaaatagaaattgtgggcgaagccgtgaatgctgaggacgcggaagaaaaaattaatgccttaaagcccgacctgctgtttttagacattcaaatgcccggtaaaacaggttttgaactgttggaatcgctcgactctgtcccggatgttgtatttaccaccgcatacgatgagtatgccctaaaggcattcgactacaatgccatggactatctgcttaaaccaattgagccagacagactcaaagaaacggttcaaaaactgattaaccgcaacagcaaacccaaggccactaccgaaagcaaccctcagaagctgggaccaagcgatagggtgtttgtaaaagacggagacaaatgctggtttgtaaagctggagaacatccgcctgttcgagtcagatggtaattacattaaaatatacttcgacaactataaacccatgatccacaagtcgctcaatgcactggacgaaaagctggacgaccgttcgtttttccgtgccagccgcaagcacattattaaccttacctgggtagaaagcatagaatcttggttcaatggtgggttaatggttgtgctgcgtggaggcgataaagtagaagtgagccgaagacaagccgcccgctttaaagaaatgatgagcctttagtgctccaataatcgtgtggaatggaacctgaccctggcggaaacgtcagggttttttttgtggaaaatcaagttccggaaaccctgaaacctgaatccccaaacttgttgaattttaggcgcactttgatagtttatattttttagcgaaattatttcacctaaatacccgaagactctcaaagactaaaaaagaaagcgacccgtaaaggccgctttaaatgttttcacaacggaataatccttattgtgactagtattcaaattgtatttgaagctacacttaattttttaaatataaaatagcacataatgaaaaacacctcaaaacagcagtgatagacaaaacgaaaataaaaagaagggggatacccccttccaatcagaatactaatcacaactcactcatgaacaatcgtgattttgcagactaaattgaattactcttctgtatggtacttgccgatgatacaattctcataaaactggttagaggatatttttactctaaaagtaatatcactagtccgctacaaatatataaaagataatagactttcatgagtgagggtttgtaaaattttgtaatttacatttaagtatgattcaaagaagaaaaattctaggcctagaccttggcacaaattcaattgggtgggctttagttgaagaaaaaagaggttccgacaagaaacttttggatggccgaatcataaaacttggcgtacgagtgaaccccttaacggtagatgagaaaagcaacttcgaaaagggaaagcctatttccactaatgcaaaccgaacatcaaaaagaagctccagaagaaatttacagcggttcaagctaagaagagaacatttgttcaactctcttttaaaagctggcataattaccagagattctattttggctgaaaatggaaatggaacaactcaccaaactctacggctcagagcaaaagcggcccgagaaaaaattgaattagaagaattagccagagtgctttttgcccttaataaaaagagaggttataaaagtagcagaaagacaaaaacccaagaagacggtgtagccgttgatggcatgtcaaccgcaaaaatactctacgataacaacctgacaccgggacaatttgccttagaacaactaaaggagggtaaaaaatacattccagacttctacagatcagatctacaagaagagtttgatagggtctggcttcatcaaaaagcgtattacccagaaatacttacagatgctctttataaagaactcaaagacaagaataaaaaacaaacctgggcaatatgcaaagaaccgttttccattgaaggcataaagttgaatggaaataaacatgagcaaaaaattcagcgatatcagctccgggtagacgccctatctcatcaactttctctcgaacatctggttatcgttcttcaagaaatcaatagtgataaaaataagtcgagtgggtatttaggtgccatatctgaccgaagcaaaattttatatatcaataaccaaactgtaggtgaatatctgtggaaacagatcgaagaaaatcctcatatcgcacttaaaaaccaagttttctatcgccaggattaccttgatgagttcgaaaaaatctgggaaactcaaaccaaatttcataaggaattaaaccctgcgcttaaagaagaaatacgtgatacgattattttctatcagcgcaagctcaaatcacaaaaaggcctgctgagtttctgcgagtttgaaagctgggaagccataaaaagagacaaggaaggtaaacccattctaaataaaagtacggggcaacccaaaatgcaaatcactggccacagggttattcccaaatcttctcccttattccaggagttcaagatttggcaaaatatcaataaccttagattcatccccaaaaatgaagggacagaggggcagtacactttaggagaagaagataaacaactgctttttgacgaactcaatataagagggagtctatctgaaaaagaagtattaaacgttttgggactttctgataaagagtggaaaacaaaccaacctgtacaagatcgaaataagaaaactgttaggcctatagaaggcaaccgcaccaaccaagctttgtacaacgtttatcaggcgattgcagagagagagggctatggttttgattggtcaatcaagtcggcctcagaaataaaagctgagctaaaagccatctttccagagattggcattgatgcggaaattttggattttgacgctaacaaggaaggggagttatttgacaaacagccgagttaccaactttggcacctgctgtattccgcagaagacgatcagaaagtaagtgaagaagatcgactgatttatggcaatgccgatgtcaacttaaaaaaggcactccattcaaaattcggctttaaaccagagtacgcaaccatgttggccaatatttctttacaagaagatcacggcagtctatctgcaagagccataagaaaaatattaccctttcttcaggcaggtcatatctattctgaagcctgtcaacttgcgggctataaccactccaatagtttgacaaaggaagagcggaaagctaagggtttaaaaggcaagcttgaagtattgcccaaaaacagcttgaggaacccagtagtagaaaaaatcctaaaccaaatgatcaacctgattaatcaggtatgtgatgaatatggtaaaccagatgaaataagaatagaactggccagagagctcaaaaaatcggccaaagaaagggaagaagccataagttcaatcaatacggcaaccaaaaaaaatgaagaaatccgtaagattatccgaaaagactttggttttacccctaccaaaaacgatgtcataagatataggctctggcaagagctgcagcacaatggaggcagaacaattttcaccaaccaaaaaattgaataccgtgaactctattcaaagaacatagacattgaacacatcataccaaaagccctgttgttcgatgattccttttcaaacaaaacacttgccttcagaagtgttaatctaaaaaaaggagaccgtacggccattgatttcatagaggaagactatctcagtgaagtgaacgcctacaaaaatagggtagaaatgctttataaggctgaagccattagtaaagccaaataccagaagttgctcatgccggctaataaattacccgatggttttattgaaagggacctgcgaaacagtcagtatatagctaagaaagccaaggctatgctagaagaagtatttgaatcggtagttcctacaacggggagtataacagatcaattgcgagctgattgggatttgatcaatgtgatgaaagaactcaatcttccaaaatataaatcgcttggcttaacgaaagtagaaaaaagatgggattcgggtcgtgaaaaagaaaaggaggtagaagtaataaaagattggactaaacgcaacgatcacagacatcatgccatggatgcccttacagtggcttttacttcgcacaaccatattcaatacatcaactacctcaatgccagaagagatgaaaaccataaaaaacactctaatataatggccattgagcaactgattaaaaaagaccggaagtttgagccacctatgaataatttcaggcaagaggccaaaaaacatcttgagcaaatacttgtttcgtttaaaaccaagaataaggttgtcacacaaaatatcaacaaagcaaaaggaagtcacaaaaaccgaatccaacttacacctcgggggcaattgcacaaagaaaccgtgtatggacaaatcctacgcccatcaaaaaagccaaccaagctcaattccaaatttagcattgagcaattagcgctagtggttcaccctgagcaaaaagccattgtagaagcgcatttggaaaagtttaataaaagcccagagttggcctttagtacaaaaacgctaaaaaaatctcctctagagtacaaaggacagcctttgaaagaagtctattgttttgacatcatttacacgattcgaaaagaagtaaaccctgacaatttcaaggatcaaaagagtattgaaaaggtagttgatgtcaaacagcgagagttgttgaagtcaaggcttgcagaatctggcggaaacgccaaagcagctttttctgatttggataaaaaccctatttggctcaataaagaaaaaggaattcgtataaaacgagtaaccataacaggggttagtcaggtagaagctcttcacaacaagaaagaccattttggtaaagaaattctggatgagaatggcaactctcaaccagctgattttgtcagcacaggcaataatcatcacatcgcaatattccgagacaaagagggcaaacttcaagaaagtgttgtttccttttatgaggcagttgcaagaattaacaatggactacccgttattgataaaaccttaaatgctgatatgggttggcaattcctttttacaatgaaacagaatgaaatgtttgtgtttcccggagaggactttgatcctagtgaagtagacttattggatgagaagaattcggcacaaataagtaaacaccttttcagagtgcaaaaaatagccagtaaaaattatttcttccgtcatcatctggagacaactgtagaaaccattaaggtgttaaatggggtagcttaccactctcaattgggtctgaatagtattgagggcattataaaagtgagaataaaccatttgggaaaaatcgttcatgtaggagagtattgaaattgctcttggcaagcttagaactttccaagagatcaaagttcttaaccataattgaaaagacacggcacatgcaaacagaaaagtactatcacatttataatcatgccaatggaagagacaacctttttatctccgtagaaaactatgaatactttcttaggcagtggaccaaatacattaatccgattgccaacaccctggctaactgcctaatgcccaaccattttcattgtttggttctgataaaggatcaagaggagatagaagcatcttttggaaagtttgaaactttccaaaagctagagtaccgcctaagtaagcagtttgcaagtctattcagcagttatacacaggcttttaacaaacggcataaccgaaagggaagcctttttgcccctaactttaaaaagaaggagattacttcgaatgactacatctccaaagtaattgcctatatacacaccaaccctattcaccataggtttgtacaaaacataaaagactggaggttttcaagttatcagagcattctatcggataaaccgacacaagtcaaccgacaagaagtgcttaattggtttggtggcaaaaacgcattcgaagactttcatcagtcatatataaacacattaccaagtgaataagacacgaatatttagacgctaaccttccaaaagtttagagtttttggaaggttcaaacgaaccgcatatgataaaacgcacactcttatttggcaacccggctcacctttctaccagcaaaaaccaattggttgtcaaatatccgaatgccgaccaaaagaaaactatgcccattgaagatataggtgtggttttattggaacatcctcaaatcaccattagtcatacattgataagcaagcttttgggcaatcaggcggccattattacctgcgatgctcatcatttacctcaaggtttaatgttgaatttgaatacgcaccacaagcaagttgcacaaatgagcagtcagctagccgctacagactccttaaagggcaagttgtggaaacaaaccattaaggcgaaaatccggaaccaggcggcattgctcaaagccaatggtattccggcagaaaacatggaacactgggcaagaaaagtgcagagcggtgacccagataaccttgaaggaagggctgcagcatattactggaaaagccttttcactgaccttataaaaaactttaaaagaggccgttttgaaggagagcccaacaatcttttaaattatggctacgctattctgagggcctccgtttcacgctcactgatggtctcgggtcttttgcccaccattggctatcatcatcataaccagtacaatagttactgcctagcggatgatgtaatggaaccatacaggccttttgtggatcaactggtattggaattagtaagaaccgaagacaactatgctgaactcaccccagctctaaagcaaaagctcttacaaattcctgttcttgatgtgaagataaatggcttaaccagtccattaatgacagcgctgcaacaaactacatctagtttgcaaaagtgttattccaaggaattgaaggaaatcaaattcccagcttttgagttttgacaggcttaatcaatatagagtcatgtgggtaatggttctcttcgatctaccgacagaaaccaaaaccgacacccgcaattatcggaagtttgtggatatgctggaaaaagatggcttcactcgttttcagttctccatttttctcaggcattgcttaagtatggacaatgcaaaagttcatatgaaaagggtgaaaatgaaccttccacccaaaggacatgtgggtatttttcatattacggataaacagtttggcatgatggaagtatttatctcggccaaaaaagaagaattgccccagccaacccagcaattagagcttttctaaaagcgagaaaccccaagctaagtctctgaaaatatgaggcttaacttggggtatcctcagctaagatacaatttgaatgctagtcacaactaggcgttttagtgttggcccttccggtggcctcagctaagatacaatttgaatgctagtcacaactgagagcgcgtcttcagatcaaggctagctcctcagctaagatacaatttgannnnnnnnnnnnnnnnnnnnnnnnnnnnnnnnnnnnnnnnnnnnnnnnnnnnnnnnnnnnnnnnnnnnnnnnnnnnnnnnnnnnnnnnnnnnnnnnnnnnnnnnnnnnnnnnnnnnnnnnnnnnnnnnnnnnnnnnnnnnnnnnnnnnnnnnnnnnnnnnnnnnnnnnnnnnnnnnnnnnnnnnnnnnnnnnnnnnnnnnnnnnnnnnnnnnnnnnnnnnnnnnnnnnnnnnnnnnnnnnnnnnnnnnnnnnnnnnnnnnnnnnnnnnnnnnnnnnnnnnnnnnnnnnnnnnnnnnnnnnnnnnnnnnnnnnnnnnnnnnnnnnnnnnnnnnnnnnnnnnnnnnnnnnnnnnnnnnnnnnnnnnnnnnnnnnnnnnnnnnnnnnnnnnnnnnnnnnncaatttgaatgctagtcacaacaaacaccgttccctcatcagcattaggtagcctcagctaagatacaatttgaatgctagtcacaactagttataatgcctgtaggctgggaattgccctcagctaagatacaatttgaatgctagtcacaactaaactcagattcatgaataaaactgtaatcctcagctaagatacaatttgaatgctagtcacaacgttaaggtgtttatgtctgtccatgccgcacctcagctaagatacaatttgaatgctagtcacaactcgagaacagcccgggccgtgttggctacacctcagctaagatacaatttgaatgctagtcacaacgtgcagagggtgctctttgtactcttctctcctcagctaagatacaatttgaatgctagtcacaacgatgtctccttgcagacctgtaagcattctcctcagctaagatacaatttgaatgctagtcacaacactactatcatctgaatgtcatgctgcatccctcagctaagatacaatttgaatgctagtcacaacacataagtagctctttatgatcaggattctcctcagctaagatacaatttg

SEQ ID NO: 2341 - DNA, 17338 bp, synthetic construct
  source 1..17338: mol_type = other DNA
  misc_feature 1..17338: note = Synthetic
tatcctgtacgtgcagggcaaataatcgctttgagtggcaataccggatattcttttggtccgcacctgcatcttgatgtgtttgaggcagatacggatgattatatcgaccctctgccattcttcaagaagaaagtaaaagatacgactgccccccgtgccgaaagcatcatgcttttcccgcaacccggcaagggagtggtggacagaactcagaaacgacagtcatttccgctcaaccccaaacaacccatcactgcatggggagtgataggagcaggtatccgtgcttacgactatatggacggggtgcataaccgttacggtgtgcatacggttattctggaagtggatagcgtggaagtgttccgcagtgtggtggaccgtttctcggagaatgaaaaccgcatgataaattcatggacctacgggcaatatatgaaatcgttcatcgaaccgggaaatacgctgaggatgctacatgcttcaaatgataaccggggactgatagatattaatgaagagcgtccgtaccgctttgtctatacgctgaaggatgcgctggggaatacctcgagagtgcgtttcaccgtgcatggaaagcggacgacgatagctcccgtggaacatcgtgagaagtatactttccgatggaacaaggtgaactatctgcaggaacccggtctgtctctggtgattcctcgcggaatgttgtatgatgatgcatatctgaattatgctgtgcgggcggatagtggagacatcgcgtttacttatcagttgaatgatacacgtattcctttgcatggccgttgtgagttgcgtatcgggttgaggcgcaaaccattggaagatatgtcgaagtactatgtggcaagtgtgaattcccgtggaaaaaaatatggcataggtggtaagtacgaggatggcttcatgaaaaccactatccgggaattaggtacctataccgttgccatagatactgtgccgcccgaaatcactccgttgaacccgaaacagtggggaagtacggggcgcattgtgtttaaggcgaaggatgaagaaaccggtataagcagctatcgtggaaccatcgacggggagtatgccttgtttggcaaacctaattccatcagcggaaacctggtgtatgagattgaccctaaacgagtggaacggggcaagcacgtggtggaaatcactgtgacggatggttgtggcaaccggacaacagaacagtttacgtttgtctggtaaacaagtctgtgctatctctgtgccatctccgtgtctgctccgtaccaagtccgtaccatctccgtatcttataggtacggagatcatacggacctgacacggagatggtacggaccggatacggagatcatacagacttgctatggagataatagatacgatacacgaatcaataattaaaataatagaagtatgaaaagtaaaagactgactctttccgttttatttgtggcggttgcagtggtgaatgcactggcttgtaccaacctcattgttggtaaaaatgcctccacagacggttctacaattgtttcttattctgccgactcttacgggttgtttggcgagttatatcattatcctgcgggaatgcataagaaaggtacattgatggatgtgcatgagtgggacaccggcaagtatctgggacggattgagcaggcacgccagacgtataacgtcatcggcaatatcaacgaattccagcttaccatcgcagaaaccactttcggcggacgtcccgaactggtagacacgaccggcattatcgactacggaagtctgatttatctcggtctgcaacgtgcccgtaccgctcgcgaggccatcaaggtgatgactgaccttgtgcaggaatatggctattatagcagtggcgagtctttcactatcgccgatccgaatgaaatctggattatggagatgattggcaagggccccggtgtgcgtggtgccgtatgggtggctgtacgcatccccgatgattgcatctcggcacatgccaaccaatcacgtatccatcaattcgacatgaacgataaaaacaactgcatgtactcttccgatgttgtctctttcgcccgtgaaaaaggttacttcaacggagtgaacaaggactttagttttgcagacgcctatgcccctctggatttcggtgcacgccgttattgcgaagcccgtgtttggagttacttcaatatgtttaccgaccgtggtgaagagttccttccttatatagaaggtaaaaccgaccaacccatgccactttatctgaaagccaaccgcaaaatctctgtgcaagacgtgaagaatgccatgcgcgaccattacgaaggtactccgctggacatcagcaaagatttcggtgccggtccttatcatactccttaccgtctttctccgctttctttcaaggtgaacggccaggaatacttcaatgagcgccccatctctacccagcaatccggttttgtgtttgtatctcagatgcgctctactatgcccgatgccatcggtggtgtgttgtggttcggtacggatgatgccaacatgacggttttcactcctgtatattgctgcacggataaagtgcctgtatgttactctcgcgtagatggtgctgattatatcaccttctcctggaattcttctttctggattttcaactgggtggcaaacatggtttatcctcgttacgacttgctgattgatgatgtacgtgccactcaaaccgaactggaaactactttcaacgatgcgcaggaaggcattgaatctgctgcatccaagctctactctaaagacccggcacaggcaaaagcattcctggccaactatacgaacatgaccgcacaaagtactctcgacacttggaaacgtctgggtgagttccttatcgtgaaatataacgatggcgtagtgaagcgtatgaaagatggtaagttcgagcgtaatgctatcggccaaccggcaggtgtgattcgtcccggatacccgaaagagtttctggaagaatatgtgaagcaaaccggcgaccgctataaaataccggaataataccctgttgcaggctttgcagattttacaggaacaataaaaagcctgtgaaatctgtacaaagcagtgtaaatctttaatgaaaaagtaggataattgaacttattcgcctacatttgtgtcttacaaacaacagatatattttaacctctaaaataacaataattgtatggaaaatcaggaacttatcaagcaggtaactgagaaagcccagaagtggctcaccccggcttatgatgccgaaactcaggctgaagtaaaacgcatgttggaaaacgaagataaaactgaactgatagattgtttctataaggatttggaattcggtacgggtggcttgcgcggcattatgggtgcaggaaccaatcgtatgaatatctataccgtaggtgctgcaacacaggggctttccaactacttgaaccaatgcttcaaagataaagaacagatttctgtagtggtgggttacgactgccgcaacaatagcgataagttcgctcaaatctctgccgatatcttctctgcaaacggcatcaaggtgtatcttttcgatgatttgcgtcctacaccggaagtttcatttgctatccgtcacttcggttgccagagcggtatcaatatcactgccagccacaatccgagagaatataatggttacaaggcttattgggatgacggtgcccaggtgcttgctccacacgataccgctatcatcgacgaagtaaacaaggtgactgttgatgatattaaattcaatggcaataaagatttgattcagattatcggtgaagacatcgataagatttatctggataaggttcattctatctctattgatccggaagtgattaagcgtcagaaggatcttagcattgtctacactcctttgcacggtgcaggccgcgtattgattcctgcttcattgaaggaatggggatttgaaaacatcaattgcgtgcccgaacagatggtgaaggatggcaatttcccgacagtggtatctccgaatcctgaaaatgcggaagcgctctctatggctattgcattggcaaagaagatcgatgctgacattgtgatggcaagcgacccggatgccgaccgcgtgggcatggcttgcaaggatgataagggcgagtgggtgcttatcaacggtaaccagacttgtttgattttcttgtattatatcatcaagaatcgtattgcaatgggtaagatgcagcctaatgacttcatcgtaaagaccattgtgactactgaactgattaaagccgtagccgacaagaataagattgagatgcgcgattgctacaccggtttcaagtggattgcacgcgaaattcgtttgagcgaaggcaaacaacaatacatcggtggcggtgaagaaagttacggtttcctggcagaagactttgttcgtgacaaagatgctgtttctgcctgttcactgttggctgaaatatgtgcctgggcaaaagatcagggcaagacgctgtatgacgtgctgatggacatctacgtagaatatggtttctctaaggaaactactgtgaacgtagtgaaaccaggtaagagtggtgcggacgaaatcaaggctatgatggataatttccgtgctaatccgccgaaggaaatcggaggttcacccgtcaagctgattaaggactataagacattgaaaactatcgatgcccagggaaatgtgaaagacctggatatgccggaagcttccaatgtgcttcaatacttcacggaagacggcacaaagatttctgttcgtccgtcgggaaccgaaccgaagattaagttctatatcgaggtgaagggcgaaatgggttgtccgaaatgctacggcagtgcagatgcagaagcagaagaaaaggtggtggctgttcgtaagtcactcggtatctaaggataatttgctgtaaggcagaaggaaaggtgtaatcctgcgaagggttacaccttttctgttttttaccgggtagtgtgtgcattcttttcggattaaggttcttttaccttctttaagtcaatcctctaatcattctctgttaaatgccgttctatatgcaacatctaaacctaaactaaaatagttatgaaagatcttgttgccggcattaagtatgatgccgctaaagtgattgaacaggccgtagggccaagtaaagaattctgcatgggttacatgaaccccggtgctccgaatggtcagggatatatctctaccatgaaactctcagtgggcacagtcgatgtaaaagaccttgacgcagttaccgaaaacattgtttcgtatgaccgttgcgaaaagaacgacgcctatatcggacaaatcaacatgctgaccgtatcttctttctgcggccagaacggtgctgtatggggatacgatctcgctgtacatgaagatattgctacaggtaaggagaaacccatgtacatgcaggaacaaccggacggaaaacccgctattcccgtatataatgcccgcccattgctggaagcaagtgaacgtctcttcggacgtgaggggcaacgacgtttcccgccgatgccgggcgcacatgtcatctgtgccaataaggatgtgacagcccgcggtcccgtgtgggtatggtcggccattggcattgccatcctgaaaaatcgtagtgacggctcttgccttttcatcgaggatgccaacacgtatggcgatgacaactccaccgaagccgaaatcataggttttctggaaggctcactccgcaaagtaaccaacagcattgtgctgtgcggacaagaccagtcggtagagtacgaccgcatttatgtaggctacaagtacactttcgtagaaccgaaccaagtgggttgcgcgttgacttgcgccccgtacatttatctggctcagaatgctattcccgaaggtatgaaagctgccgacctgaaaggtatgcctatcgacgagtgggaaaagaaactgggactggagcacctgacaatgattgaataataagacctaacctaaactttaactatataaatatttttatcatggatgaaatgaaagggacacgttatcccattttcggatttgtaattggtggtacaggcgcctttaacgacggtatcccacctcagccttatgaaacctataacctcgccttgcacgaagccggaattgaaaatttcaatcttattccttacacctctgttatgccgcttgaaatacgtggcaacttggtgaccatcaccccggagatgaatcgcaccattagctaaataagtgatatggcggatacttcaaagaaattaggattgggcggactcgtcgccatcgtctttggttccatgattggtggaggtattttcaatatctcgcaaaacatggcacaaggagcggggttaggggccactcttatctcctgggttatttcgggggtgggagtattgttccttgtgctcaacttcaaggtgttggccgatgcccgtcctgatctcaatgcaggtatctatcagtacgcaaaagagggttttggcaattatgtgggatttaacattgcctggggatactggctgtgtgcagctatgggtaacgtggcgtttgccgtgatgctcaatgactcgttcggtgagttcctccctgtgctgcttcatcatggctggcagacggtggtgtttggatcgttcttcatttgggccatgtatttcattgtggcaagaggtgtgaaagctgccgccgctttgaatacattggttactatcgtgaagttcgcggcgttgatattaattgtcattatcctctttattttctttaaaataggcgcgctgagcattgacttctggggacatacgcctgatctgggttccataggggcgcaggtaaagagtaccatgcttgtcaccctctggtgtttcataggtgtggaaggtgccgtagtgatgtctgcccatgcccgcaacagtagagatgtgggtaaagcgggtgttatcggtttcctgctggcgttggtgctttatgcgttaatcagcgttttgtcctacggtatcatgcaccagcctgaactggcaaagttggatgacccgtccgtggcatacgtgctgaaacatgcggtgggcgactgggcttatacctttgtggtgctcagtgtcattgtctctgtcattggtggttggattgcctggacgttgatgtgtgcgcaagtaccctatacggctgctcaggtgaagatattgccaaagtcattcctgcgtgagaataagaagtcgacacctatttatgccttgctgatatccagtatcatcatgcaggtgtttatggtgatggttgctatggcgaagtcggtttacgatgcagctattgatattaccggtgtcatgatccttccctcttatctgttctgcggaatctatctggtgaaagccagctttatgaaaggggaactgaacacaacagatccgaagaagattggtcaataccgctttatcggtattgtgtcttccctgttctgcctttggttgctctatgcaggcggattattactcttgctcgtgacgtccatcttctatttggttggtatctacttctatgtagtggcacgcaaacagaaccaggcgcagggcgaactgattttttctcctgccgaacgttggctggcactggctattgcagcttgttccgtgatagcggtgatactattgattgaaggaaaggtgggactctgataaataaaaatagaagaattaagaattgaaagttgtcggctgccgggaggcagttgctgatagagataaaatgcagattgcggttgcacgtgattggttgatgtgaatgagagtcgtttcattcgtagttgttcgtttgttgagtgcgtgtcctccgcaatctgttcttatttcatttatctcttccttttaactttttaattcttctttttgatttagccaccagtctatcattttccgtgcgatacttagtttacgtggaatttccggaaggttctctttggagtagaaagcaccggcgctaagttcgtctttctgcagtttgatttctccgtcttcgtaatcggcaatgaaacctaccatcaatccgctgggatagggccagggctgatttccgaaataagtgatgtttttcacttttaatcccgtttcttccattacttcccgttgtacacattgttctagcgtttccccgggttccaggaatccggctaccagaccatagaatgttccgcggaagttgcgtgcatgcaccaacagaatttcttttcctcggcgtatcagtacgatgatagcggtagagatgggtggatacatttcgtaaccgcaagaaggacattttttcatgataggcgtttgctgttcggtaggcataccgcatacggaacagaagcgactgtgctggtcccaatacaatatctggtatgcttttccggcggctttatattcttccagggtgatgtattcataagacccccgtaggttgaccataatccattcttctgtttctgcaacgagctgttcaatagcaaatgtatgtaccatttcatccgtaggcagaaatacttcgtggattgtactgcctgcgtcggttttcaatggtgcttctgcaccataaggtacacagtatttaatttctcctttttctgttttttcctttttcagcagcagttggtctttaaagaagacgaaccactgcgtagggttttgatctaattctttcattttccttcttcatttttgatgtatactacgtttctgcctgttccgcgccggcgtaggataccttcagtgataaatgcattcaactcattcatggcagttcgctctccgctaccggttagcctaatgtattctctccgtgagacgcagacatttttatcgagaaatgtgagcaatgcttcttttttcttttcgatattgatgtctccctttgaagggcgggtaggtgactggatacgttctaatatcatttgagttctcattttctttttgaacgccttgctagtgcgcagacacacatttttgaagacgattgattctgcacgtatctttttctccggtgtggcttctctcaggcacttcagggatgtactgaggaagccgagttctcctaattctacgatattaccgtccgatagtaattcgcacaattcgtccgtaataccctgtagggctccttccaacagggcatacggcaggtgttggaacatagctacttgcttcaggaactctttggtagtatacgtctttttgggatagatgcgggcatgaagcgctttttctgttttttttcctttcggatcgggcgtttcgtaaagatcataatatgcactcataagattttgagttaaagggttaatgatgttagttttttagggtgcataaatatattcttgttccttcagtaattaaattctttagtttcgacgaattaatattgcattcgcatgaatttatttgtgcaacaagtgtaactctttcatgcaatatttgtatatgtttcgtgcaacaactgttgcatgaaaatatcatatcctttgcatggaaaaaatttagtatgcaaaggtataaataatagtgaaacgatggagggtttttaggaaaagaattaataattgtgcatggtgttgaaagtgtagtaggggcaaggcataaaaaatcccccgttaaaggacgagggaacctaatgttttcacaacggaataatccttattgtgatttgatttcattttagttcgacaaagataggaaataaaaatgatataccctaaccctttatgaaatattttattgtgtttttatatgagaggcctttggtaataaaatattctgaataaaaatagtttgttttattcttcctattgaatatttttcatacttttgtgtagaagaactttgaaaacgaaatgttatgaaaaaaatattggggttagatttaggctcaagtagtattggttgggctttggttaatgaaggagcgaacgatgaagaaaaatcctctattatcaaacttggtgtgcgggtaaatcctttaactgtagatgaagcacagaactttgaaaaaggaaaaagtattactacaaacgcagatagaactcttaaaagagggatgcgccgtaacttgcaacgctataaacagcgtcgtgaagctcttgttgaagtgctgaaaaaacatgaattcattacagctgggacattgatgtcggaacaaggtaataaaacaacttttgaaacgtatcgtttaagagcaaaagctgtggaagaagagatatctttagaagaatttgcacgtgtattactaatgattaataaaaaacgtggttataagagtagccgcaaagccaaaggggatgaggatggtgtattaattgatggaatggacgtggctaaaaagctttatgacgaggacctgaatcctggggaattgtgtctgcagttgcttgaggcggggaagaagacactaccggatttttatcgttcagatttgcaagatgagtttgacaagatatggaattttcaaaaacagttcaatcccgaatctttttgtgatactgcaaaggaagaagtaagagggaagaatagaactcagacttggaccattctatcaaagtattttgtttggactgaaggtgattctgtgtggaataacgaagaagcaagaacggaagaacggataaaagagtataaacttgttggtatcaaacggactaccaaagggtatgaacagaaacttgaaaactaccgttggcgcgtacaagccctttccgaacagttgaatcctgaaataatagctattgtcttgcaagaaattaacggacagattagtgcatcaagtggttatctaggtgccattagtgatcgtagtaaagaactcttcttcaatcatcagacggtaggtcagtctctgatgtctgaattagataaaaatcctaatggtagtttgcgcaataaggtcttttatcgacaagactatttagatgaatttaatacgatatgggagaaacagagcttgtatcacaaggagctgactgttgaactaaaaaaagaaattcgcgatatcattatcttctatcaacgtcgtttgaaaagtcaaaaaggactgattagtacctgtgagtttgaacaacgggaaattatagtggaaaaggatggaaaaagaaaaactaaaattataggttgcaaagtgatcccccgttcacatccattgttccaggaattcaaaatatggcagacgttgaacgacgtagaagtttatgtggcagatagaagaactaaacggaagcaagacaggaagtcaacaacattgtttagtgatacggaagatattttgctggtggaaggaaaacgatatttgtatcaggaagagaaagaactcttggcaaaagaactttttgtcagagaaaacatgaaaaaagcagaagtactgaaactgctatttgaagacccaaaggaattggatttgaattttaagcagattgacggtaatcgtacaggttttgcccttttttcggcatatagcaagatgattgagaaatatggctatgagtcggtgaattttaaaaactcagctgatgagataattgagaagcttcaaatcatatttgctgatttaggatggaatacggaattgttctctattgatttgagcaaggatgacaaagagcttgaaaaacaaccttatttcagactttggcacttgttgtattcttttgaaggtgataatacccccaccggaaatggcaagttaattgaggcattgatgaggctttgcagcgtggaaaaagaatatgcctcagtgcttgcaaatgtatcgtttcaagaggactatggaagcttgagcgcaaaggctataaaaaaaatattaccttatttgaaagagggtaatcaatatgatgttgcctgtgaatatgcaggatatcgacattccaaatcttcgttaaccagagaagaaatagataataaggtgttgaaaaataggttggaaatccttcctaagaatagtttgcgcaatcctgttgttgagaagattttgaatcagatggttaatgtagtcaatgcagttattgatacttatggtaaacccgatgagattcgtgtagaattggctcgagaactgaagaaaggtgctaaagaaagagaagaactgacaaagtctattgctcaaaatactcgcgaacatgaggctatccgccaattgctgcaaacggaatttggcatgatgcatgtcactcgcaatgatattattcgttataagctttatgaagagttgaaggataacggatataaaactttgtattcagaccaatacatcccgagagaaaaggtcttcagtaaagagattgacatagaacatatcattcctcaagctcgactttttgatgattccttgtccaataaaacattagagtatagagctgtcaacatagagaaaggtaataaaacggcttatgattttgtaaaggaaaaatatggcaatgatggtttacgacgatatcttaatcattgtgaagcattatttaaggacaagaagactaagctgaagaaattaaaaatggaagatcaggacattcctgatggtttcattgatcgtgacttgcggaacacacaatacattgctaagaaagctctgtcaatgttgagtgaaatttcccgtcgtgtagtagctactactggttctataactgatgaattacggaaagattggcaattagtggatatcatgaaggaactgaatctgccgaaatacgaagcattgggtttcgttgaaacttttaaggataaagacgggagaattataaaaaaaatcaaggattggagtaaaaggaacgaccatcggcatcatgctatggatgcgttgacagtggcctttaccaaagatgtttttattcagtattttaataataaaaatgctttttggatgtcaggctctaaagaacatgccaacataacagcaataaagaataaatattttgagaaagggaaagcacttgcacccataccattggaacagttccgtacggaagcgaagcatcatttggaaaatatactggtttccatcaaggcaaagaataaagtcgttactaacaatataaatcgtacaaagaaaaaaaatggtgaaaatctgaagttgcaacaaactccacggggacagttgcatttggaaagcatatacggtagttatcggcagtgtatcataagagatgaaaaagtaaatgcttcttttgatgccagtaagattgccaatgtaagtaagtctgcttaccggaatgctttactaaaacgtttggaagcttatgataatgatccaaagaaagcgtttaccggtaaaaactctctggataagaatcctgtttatctggatgaaaataaaatggagaaagttccggatagggtaaaaatcgtagaatttgaaactgtatatactatacgtaagcccattgatcccaaattgagtatagataaagtagtggatgccaggatacgtacacttttgaaaaaacggcttgaagaatatggaggagatgctcaaagagctttttctaatattgaggagaatccgatatggttgaataaagaaaaaggaatatccgtaaaacgcgttgcgattagaggtatcagtaatgcgcaggctttacatgataaaaaagataaggatggtaatcctattttagataaagaaggtaaaggtattcctacagattttgtgaataccagtaataatcaccatgtagctatttatagaaaaccggttgtggacaaaatgggccaggttatacttgatgagaatggtagtccgaggtatgaacttggtgaggatgtgatatctttctttgaagcagtagcgcgagttaatcttcgacaaccagttgtagataaggactataagcgaagtgaaggatggcagttccttttcagtatgaagcagaatgagtattttgtatttcctaatgaaaaaacgggatttaatcccaaagaaatagatttgctaaatcctgaaaattatgcattgataagtcctaatttatttagggtacaaaagattggtttgaatgattatactttcaggcatcatttggagacaagcatacaaaataattcaaatgaattgaaattcattacttggataagatgcggaaaaaatggcataaatggtgtaattaaagttcgggtaaatcatattggacaaattgtttctatgggagagtattgatatgagtggtattaaactttctcaagatcaaaacggaagatggcaaaagacgaaagattcaaacagtaaatataaataggttttttcgtattgtttaatctattcattttcctaaagtagagcctttttaagttgtggctggcacaagtaatagggtataaatgcatactagaaattgaaaatctagaactagtccaagaaggttatatttctcttgataatttttattggatgttgatagacaaaaatacgttgcaaccgcctttttacgcaaataatgaataaataatttttaaagtctgcatactatgattaagaaaacattttatttcggaaatcctgtttatctatctttgaagaatgctcagttagtgattaaactgccggagattgttaaaaataacactttgcctgaagggtttaaacaaacatctgaggtgactaagcccatagaagatattggagtagtggtattggataataaacagataactgtcacttcaggggtcttggaaactttgcttgaaaataattgtgcaatcataacatgtgacagtaaaagtatgccagttggtttgatgcttcctttgtatggaaacactacgcagaacgagagatttcgtcaacaacttgatgcttctctaccattgacgaaacagctatggcagcaaactataagagctaaaatagaaaatcaggcggtagtattaagtgaatgtgctggagaagaaataaaatgcatgaaggtatgggctgctgatgtgaaaagtggagacctggataatttggaggctcgtgctgccgcctactattggaaaaatctgtttaagatagagggatttacaagagatagagaaggtattccacctaataatctgttaaattatgggtatgccatcttgcgtgcagttgttgcccgtggattggttataagtggactgttgccaactttggggatacatcatcataatcgttataatgcttattgtttggcagatgatataatggaaccatatcgcccgtacgtggatagattggtgtatggtatggttaagaaaggattgaattatactgaactgacaaaagaattgaaggcacagttactaactattcctacattggaaactaacatttcaggaaagcgcagtccattgatggtagctgtcgggcaaactacagcttctctatataagtgttttagtggtgagttacgtagaatattctatccagagatgtaaatggaccgatttagtgaatatcgcattatgtgggtacttgtactatttgatttgcctactgaaacgaagaaggataagaaggcatatgtagattttaaaaagaatctgcaaaaagatggatttacgatgtttcaattttctatatatgttcgtcattgtgcgagcagtgagaatgcagaggtacatataaaaagagttaaatcgtttctacctgaacatggaaatgtaggaatcatgtgtattacagacaaacaatttggaaatattgaacttttctatggaaaaaaaacaatggatgtgaatacgccaggacaacagttggagttattctgaaaagaaaatcccgctatttggcgagattttctcttggaaactaagttcttttttaaattctaaatagtggtgtaactatttgaatatgaactaataactgataatcagttgcttctaatggctcaaagatactaaaatgaaagcaaatcacaactgtatgacacgcagtaatcgagcaaattcagttgcttctaatggctcaaagatactaaaatgaaagcaaatcacaacaaacttcccttaatgttaatttcctgaggcgttgcttctaatggctcaaagatactaaaatgaaagcaaatcacaactatctttttgttgattataaattaataattgttgcttctaatggctcaaagatactaaaatgaaagcaaatcacaacgaccgccatagtggacataaggtttgaggggttgcttctaatggctcaaagatactaaaatgaaagcaaatcacaacggaaagacagtaacaacccttaccgctatcgttgcttctaatggctcaaagatactaaaatgaaagcaaatcacaactaagccttatgtcaagagctttaatatcctgttgcttctaatggctcaaagatactaaaatgaaagcaaatcacaaccaaatgtacatattacttttggataaacaagttgcttctaatggctcaaagatactaaaatgaaagcaaatcacaaccatgtggcgaccgaaggataacaccaccgagttgcttctaatggctcaaagatactaaaatgaaagcaaatcacaactacgtaggctctatacagttctctgtctatgttgcttctaatggctcaaagatactaaaatgaaagcaaatcacaactgcgatacagtaccccatacgcttgcatcggttgcttctaatggctcaaagatactaaaatgaaagcaaatcacaacttcattggatggagcattaaggatttcaagttgcttctaatggctcaaagatactaaaatgaaagcaaatcacaacacatttttcaacattgatttcataactacagttgcttctaatggctcaaagatactaaaatgaaagcaaatcacaactcctccgctatggcttctgctcttggcgacgttgcttctaatggctcaaagatactaaaatgaaagcaaatcacaacttacagacagttgtatgtgtgagtatgtttgttgcttctaatggctcaaagatactaaaatgaaagcaaatcacaacagtttcaacagagtaatgagagtgtctttcgttgcttctaatggctcaaagatactaaaatgaaagcaaatcacaacagtcagtttcagttgagcattgtccacgtcgttgcttctaatggctcaaagatactaaaatgaaagcaaatcacaacaataaccacgccagccaattggtttatactgttgcttctaatggctcaaagatactaaaatgaaagcaaatcacaactgcgct

SEQ ID NO: 2342 - DNA, 17270 bp, synthetic construct
  misc_feature 1..17270: note = Synthetic
  source 1..17270: mol_type = other DNA
gtttgcagccaccggtgtgcgtgtaggatgggcattgggtccggcaaaggtgatttccaagatgaaagcgctcatttcgcatgtgggtacttgggcgcctttagcagagcagaaagcaacagcgctatttctcaatgaaccagccgctattgatacctttctaactccctttaaagaacaattacaccaacgattacaactcgtttatgagcatattactcgacttaaagcaaagggctatccggtagatgccattgagccacaagccgctttgtatctcactatcaagttggatttggtaggtaaaacattcaaccaaacaatattaaaatcacaagaggaagtgaccaactttatcctcggtgaagcccaattagccattgtgcctttttcatgtttcggtgctacttccgattcgccctggtatcggttgagtgttggtacttgtagaatcgagaatttaaatgatgtatttgcaggactagagcgagccttgtcgaaactacaataatgggctcctttgttatggctttttgttgaggtcaaactgcccgtccttacgacgaacgatgagcgcatcgtcttgtagcctgcgcaagtactccaaaacttgggtatgaacagccgtttcaaaatggttcataagttcttccaggctttgactctgttgttgtaaggcttgtaaaatggattgtttcattgttcccatatcgaggttgggttgcttcttttgggtacatatatcgcaatgcccacattggtaatgagtcggtaccttttctccaaaataccgcagtagtaacagttccctacagtattgtgtgtttcttaatatagctatcatggcatccacacgctcttgatgttgttggcgcaaatgggctatccgtttcatatttaagttcaagaacctgctatccacacggtaatggtgaaaaaacaactgaggtttatcggttggtggctggtaatcgataatctgcatccgtgaaagttcttgcaaacactgctctgtagccgatacagtaaggttgcatcgtttggcaatgaccggcagtcgtaccggcgtagggaaagaagaaatagaactgtacaaccgcagtaaggcaagacatacgactcccagatgtgggtgcatgttatatagtctatccaacacttctctgaccactaaaaattgtacggtacctagcttaaagaccgattctgtcattgtccataatccttcttgctccaagaggcgcagtgccgcgtagcagggcagggtaggtagtttgaatttggcgacaaagtcagccacatcaaaatcatagtagcggtcgggttgtgtgccaatttccaattgcaggtattcgcataccgattgatatactttgcgtaaaaagggtgtctccggatacttgatggaggtgctttccatcaagttgttgcaatcgttttcattccaaagcaaaacagcctttgccggcgcgccatcacgcccagccctgccaacctcttggtaatacgcttccggatgttccggtacatctatgtgcactaccaatcgcacattcggcttgtcgatgcccataccgaaagcagtagtagcaacgatagttggagcggattctgttatccattgctcttgcgcatactcgcgtttgtctttgctcatgccggcgtggtaagcggtggctttcagttggtgtgcttgcaactgtgttgccaacgattccgtttgctttcgagagcgacaatatactatttgagatgcctgtggttgcgcctgaatggctgaaatgcaagccggagctttgttttcacggtatgcaacctggtaatacaggttctttttctgaaagctgtttttgaacagtagaggatttctcagttgtagttgtcgaataatatcttcttgcacttccggtgtggctgttgcagtaagggctaaaaaaggaatattcggaaagatctctttcagccttacaatctttaggtaactcggtcggaaatcgtgcccccattgagagatgcaatgagcctcatctactgcgataaaacacagcggcaattcgggcaaaaaatcttgaaataaggtagattgtaaacgctctggagaacaatagagcagtttatactccccatgaattgctttacggagtatttgtttgatgtcgttatacggaatgcctgcatgcagtgccaccgccggaatattgcgccgggtcaattgttgcacttggtcttgcatcaatgctattaaaggtgaaacaacgagacaacatccttcgcaaagcagcgccggcaattggtagcaaaccgatttgccacctcccgttggcaatagcgccagtacatctttttggtttaatacggctgtgatgatttcctcttgtaaaggacgaaaggaggtatgtccccaatattcttgtaatgttttttgcaatagcgacaaacgacaaccgtacttttaggggtatattttatcaataaacacaggcttcaatccgtagttccataaatgtgcttttatctcaggatgttccataatatagcgaacagtagcagtgtacagccaattacaatcactaaaacggctggtttgatgcggcataaattgtgcttgaatacccatggcagacggctctatcccgaacaagataacagttcgcactttccatgcttctttgatggtgtgccaagctaatttttcgccttccggcaaccataataaattatagtcatccgtagacagttggcaagcggtcaagattttttccatcatttgccgctcttcttgggtatccgatgaaggaggtgcaacgaccaataccggcttgggttcaaaacctttgttttcaatgctttcctgattccaaaaagcatcattggcaaccggcacaacgggtgtttgtatcaatgaatggaatggcttgtttgacatggatgaagtcccttagcgaaaaaaatcgtttatttgcgaagttaaacaataacgacttcaaattatgacttccaccatcaccgatattaaaattcaaaaaattgcaacgtctcgaatcaacgaactggatgagaataatttgcagtttgggaaattgtacaccgaccatatgttcatcgtgaagtatgaaaatggcgcttggttacaaccggagattgtgccatacggcaatttgagtttaagccccgcaacttctttttttcattatgggcaggccatatttgaaggagtgaaagcatacaagaatgctgcgggagaggtggtcatttttcgtcctcatgacaactggaaacgcatgaatgtatctgctgagcgtatggctatgccggaggtacccgaagaattattcgtcggaggtatgaaagccttgattgacctagatcgcaactgggttccccgtggcgaaggagcttcattgtacatccgtccgtttatgtttgctacagatgaatttgtaggcgtgaaacccgctgagaagtttacgtttatgattatttgcagccccgccggtccgtactacgggcatccggttaacatctttgttcagcacgattatgtaagagcctttcccggaggcatcggatttaccaaagctgcgggcaactacggcgccagcatgtatcctaccttgcaaatacgcaaacaaggctacgaccaaaacctttggatggatggcatagaacgcaagtatgtacaagaaatcggtacgatgaacgtgttctttgtaataggtgataaagtactcacgcccaataccagcgaaactatattaaaaggtgtaaccagagacagcgtcattaccttattaaaagataacggctatacagttgaagaacgccccatcagcattgacgaaatagaagaagctcataaaaacggtacgttaaaagaggcctttggaaccggtacggctgcatccgtagcacccattgcttcgcttacctattatgaagaccgcatggagctaccacctgtggagcagtggaaagtggccaattgggtgaaaaaagagttggacaatattcgctatggcagaacatccgatacccgcaattggatattcaaagtgtaacagtatgacacaataacttttttgataatcaggcttcgatttcttttcgttgcctgattttttttgagcctataatactgtctttcaaactatatatacatttctttattgtgtgttgtatcggagggaagcgccattgtaaaggaattgtagcatgataaatttgcctcctttcaaaatgacccaccttctttatgtttgttttttataacttcgccagttatataaccatagccaaagctttatatcattaggataaatattgtggaaatggacaatagtataggaatcaaattttttaaccatcatggagacaacaattatcgttgccatagtagctgtggcagccatattaatagggatttttttaggtaaaattatatttgctaaaaacacacaggcacaaatagacgaagccaaccaacaagcacaaaaactgatagaagacgctaaaacacatgccgaaacgctgaaagaaaaaaagatgctggaagccaaagagcattttttacaactcaagtcaacgcatgaaaaagaaaccttagtcagaaatcagaaaatagccgaagccgaaaaccgcatcaaacaacagcaacaaagctggaatgataaaaatgcttcgctgcaaaaacaggtaaacgaaaacgagcagctcaaacaaaacttagataagcagctggaagtagttgccatcaaacgtaatgagttggagcgccatcaggaagagcacatcaaacggttggaaaaagtagccaacctcagcgccgaagaagccaagaccgaattgatggaagtggtgaaagaggaagcgcgcaccaaagcaatggcgcatgtgaaagagattatggaggaggcaaaagtaaacgccaccaaagaagccaagaaaatagttatccaaaccatacagcgcacagctgccgagcagactattgaaaatgcgattactgttttcaacttggaaagtgatgagataaaaggacaaatcattggtagagaaggacgaaatattcgtgccttggaagcagcaaccggtgtggatttgattattgacgacacccccgaagccattgtgctcagttgcttcgacccgctgcgtagagaagtggctcgtttatcgctgcaacgcttggtgcaagatggtcgcatacaccctgcccgcattgaagaagtggtagagaagacccgcaaacaattggaagaacaattgatggaaataggggagcgcactattatcgaactgggtattcatggtttgcacaaagacctggtgcgtatcgttggtaagatgcgtttccgctcttcatacggacaaaaccttttgatgcactctaaagaaacagccaacctctgcgctatcatggctgctgagttggggttgggacaaaaggttgtaaaacttgccaaacgtgccggattgctacatgatattgggaaagtgccggatgaagaaaccgaattgagccacgcattgcttggggctaaatgggcagagaaatgtggcgagcatcctgcggtagtaaatgctatcggtgcgcaccacgatgaaatggaaatgacgtatatcatctcacccattgtacaagcctgtgatgccatcagtggtgctcgtccgggtgctagaagggagatgatgcaaagctatctgcaacgtatcaaagacctcgaaggactagccatggcgtataatggtgtggaaaaagcttatgccatacaggctggtagagagttacgcgttattgtagaagctgataaagtaagtgatagtgacagcgatcgcctgtcttttgaaatagccgataagatacagaaggaaatgcaatatcccggacagataaaagtgaccgtgatacgagagttgagagcggtgaatgtagcgcgataagcaacgattaaattattgagtactcatacctataccttgtatcgtgaatagcgtgcaaggtatttgtataaaatagggttggtagcaagcaaaattgcaagtgccttttgaggtgcatgtaaacaatgcctcatagtgaaatatagatgaacggagcgtcgcaaatcaagcttcatagcagcaacgatgccggcttcataaaaaataatggaattgggtatcacccccgaaaattatggttttggaatgcaaaagaaaatagaattattggcaccggcaggctcttttgaaagcctgaatgcagcgatacaagccggcgcggatgccgtgtattttggtgcttcgcatttgaacatgcgggcaaagtcgattcattcatttcaattggatgacttgcatgaaatagctagcctctgtagaagtcatcaagtgcgcacctaccttaccttgaacacggtaatgtacgaccatgacatgaacctcattcgtacggtgttggagcgggtgaaagaagaaggtattgatgcggtcatcgcaaccgattttgcggtattagagttatgccggcaaatgcaaatacctttgcacatctccacgcaagccaatgtgagcaacgtagaaacggtacaattcttttcgtctttttcggatgtgatagtgttggctcgcgagctgacgctgacacaaaccgcccatatcaccagagagattgtacgacgagacatacgaggcatttccggtgacttgatgcgtattgaaatctttgtacacggggctttatgcatggctatttccggaaaatgctacctgagtttgcacgagcagaacgcctctgccaaccgaggcgcttgtacccaaaactgccgccgtccgtatttggtgaccgacctcgaaaccggtaatgaattgttggtggataatgaatacatcatgtcgccgaaagacctttgcaccattcacattttggacgaaataatagacgcgggtgtgcaggtgttgaaaatagaaggacgtggaaagagcgctgaatacgtatataccgttacccaatgctatcgcgaagcgctgcaagccattgcggagggtacctatacaccggagaagatagaggtatggatgcaaaggttgcgtactgtttataaccgtggtttttgggagggttattatttgggcaggcacttgggtgaatggacacgcgagccgggctcgatagccaccgaaaagaaagtgtatatcgcaaggggcagcaactatttttctaaaattggcgttgccgaatttgaaatggaaagcggcacgttgaaaaagggtgatgcactgcttctcattggtcgtgatttgggcgccgaaaagctgcaattggaagacctctacgtaaacggagaactagcagctgaagccaaaagaggcgataagataacctttgcctttggaagaaaagtgcataaaaacgataaactctataaactcgtttcggacaaacatgcctaagttggtgcaataccgtaacaaatgcattggttgtggtgtgtgccatgagctacagccggatctttggcgtatgtctaaaaaagacggactcgccaccttggtgaatgggatgcagaaaaaagaagtatggcaattggaggttagcgagaccatcgtacaacagtcgaaacgaacgatagaagcttgtccggcgggcattatcaaaatcatgaaataatccttctgccatagcgatacaacatatcaatcgcattagctgatcttgctccaattatttccgttctgttcactttgcaatttgaagtagagagggtggtgctctacacggcttaattgtgggtcttgctccaatagcatcttggcagcatttcgggtttcttctaccaagtgtacatcttctacaatatcggctattttcaatttcagcaaaccgctttgtcgggttccgtgcaggtcgccgggaccgcgcatcgccaagtcttcttcggctatcacaaagccattgctggtagtcgccattacctgcatccgttttttaccttcttcggaaagcttgctgcctgtcaacaaaatacaatatgattggtcgctgccacgccccacacgtccgcgcaactggtgtaattgcgacagcccaaatcgctctgcgctttcgatgagcatgacggaagcattgggtacattcacacccacttcaataacggtagtagctaccagcacttgtgcttctcctttgatgaagcgttgcatgttgcgctcacgttcggcggcttcttgccgtccgtgcaccatggcaatacggtatttgtggtcgggaaagaaggcctttacttgctcatagcctgccatcaaactttcgtaatccaacttctcactttcttcaatcaatggatatacgatataggcttgtcgacctttgtccacctcggtacggataaagctcatgacctgtgcccgttgcatttcgtggcggtgtgccgtgataatttcttttcgtcccggtggcaattcatcaataaccgaaacctctaaatcgccgtagagggtcatggctaacgtgcgtggaatgggcgttgccgtcatcaccagcacatgtggcggtttttggtttttctcccaaagacgggcacgttggttgacaccaaaacggtgttgctcatcaatgaccgccatgcctaaattttgaaattggacactgttctcaatgagggcatgggtgccgataacgatgcggatgtttccgctttccaatccttttaaaatgtctttccgctcctttcctttggtgctaccggtgagcaaggcaacggtaaactgcaacgactccaacaaggtgtgaatactctgaaagtgttgctgcgccagtatttcagtaggagccataaggcaagcctgaaagccgttatcgatggcgagcaacatggtcattaaggcaacaatggttttgccactgcctacatcaccttgtagtaagcggttcatctgcctgccactcatggtgtcaacccgtatttctttgagcacacgtttctgcgcattggtaagggcaaacggtaggtgctcattaaaaaatgtatgaaagcaatcgcctactttttcgaacacataaccgggcacaatggtatgttgttggcgcagtcgggcgatgcgcatttgagatagaaacaactcttcccatttcaaccgatgcttagcggcttgttcttgttcgctgtctttcgggaaatgaatccatgaaagtgctttgtataaaggtgctaagcggtattgctggcgcaaggaggccggaagataatcgttgatatcggtgggttgcaatttggcaaataccgcctgtgtgagtttggcaaaactacgattggtaataccgatggcgcgaagcttttcggtggtagggtacaccggttgcatttgtggcaatgcaccattgggcggcagtggctctatatccggatgcaccatattgtgcaagctgttaaactggcttacctttccgtacaccaataccggttgttgttctttcagactttgttgtatccattttataccctgaaaccataccaactcaatgctgccggtattgtcgtagagtgtagccgtgaggcgtttttttctgccggtaccatcttcgcagatgttatagattaccccggaaagctgcacccattcggatgctacggagatgtctttgatgctgctgagggtggtgcggtcgaggtagcgataggggaagtgatagagcaaatcttcgaaagtgtgaatttctaattctttgcacaagagcgcaccgcgttgcgggcctaccccttttaaaaactcaatgggcgtttctaatatggatgtattcgatgcgatgcgagaacggtaaaaagtgaaatacgattgtaatgggtaaagataaaacaacccgaagggattcgtaaagggttgtaaataattacttatcttgatgctgcaatgaggaattgcataaaaaagccccgaatatatagtcgaggcactaaatgttttcacaacggaataatccttattgtgaattgctttcagaacatcaaaactaaataaccttatggaaaaaacaaacaaaaaaattttaggactagacttaggaacaacaagtataggatgggcttatgtaatagaagatgaaaatttgctccaatcagaaattaagcagattggagtaagagtttcacaactggataatttcgttagtacaaaaacaggtaaagaatcaaaggacccattgaaagattttaatagtggcaaaggaatttctccaaattctggaagaacactaaaacgaagtgcacgtaaaaatctggatcgatttcaattgagaagaaaagaactttttgaagttctaaaaaaagctaacatcatacagaacgatactaccttaaatgaaaatggaaaatctacaactcatgaaacctggagaataagagcaacggcagcaaaaaataaaatagaattgcatgaatttgctagagtactttttgcaattaataaaaaaagagggtacaaaagtagtaggaaagcaaagaatgaagaagaaggacaggcaattgatggcatgggtatagccaaaaaattgtatgacgaaaaaataacaccaggagaattggtatttcaaagattgctaattggaataaaatcaattcctgatttttatcgatcggatttacagcaagaatttgataagatttggaatatccaaaaaacgtattatcccgatattttaacagacactttttatcatgaaataaaagggaaaggtcagaaggcaacatcaactcttttttgggtgcgatatcagtttaatacagcagatatcaaaggattggatgacaatctaaaaacagagaaaacaataaaatttagtaagagagagcaaaagaaattgcaagcatataaatggcgcagcgatgcagttcatcagcaactagaaaaagaacaaattgcattcgtacttgcagatattaatggaaatattaacaattcaagtggttatttgggtgccatatcagatagaagtaagaatttgtactttaaaaaaatcactgtgggtgagtacttatttgaacaaataaaagcgaatccacattcttctttaaagaatcaggttttttatagacaggattatttagatgaatttgaaaaaatttggtctgtccaatcaaaatattattcagaattaactgatgaattaaaagaggaaattagggatgtaattattttttatcaaagaaaactgaagtcacaaaaaggcttaataagtatttgtgaatttgaagagaaagaagttgttataaataaaaatggaaaatcaatctctaaaaaaattggaccaagagtaatccccaaatcctcaccgctgtttcaggaattcaagatttggcaaaatttgggtcatatcattcttagaaacaaaaacgtttctacgaaaaccctaatagataatagtcaaagtgatttgtttgaagaaaaacctcaagactttattcttgactttgaggcaaaaaaaatcttgttcgaggagttaaatctgaaagggaatctaaaaattaatgatatcttcaaaatcttgggtcataatcctaaagactatcaggcaaactttacagagattgaaggaaacagaaccaatcaggctttatataatgcttatttaaaaatcttagagattgaaggatataacgaagaattgttgaaactttcagatcaagattctattgaaataaatagtttgaaaacatctgcttctgaaattaagaatatggttaaatccatttttgaggtgttaggtataaatactggaatattggaatttgatgcagaactaaaggagtccgagtttgaaaaacaagcttcatatcagttatggcatttgctttattctgctgaagatgataataaaaaatatagtgaggaagatattcttatgtttgggaattctgatattggtctgaaaaagcaactttgttctaaatttggatttaaacctgaccatgcaaaaattatcgccaatgtctcattgcaaggtgactatggaaacctatcttgtaaagctataagaaagatatatccatttataaaagaaactgagtttagcgaagcatgtgttatggctggttatcgccattcaaaaaattctctaacaaaagaagaaaacgaaagtagggtattgaaagatactttggagttattgccaaaaaatagcttacgaaatccggttgctgaaaaaattctcaaccaaatggttaatttaataaataccctaattgaaaaaaatagtgaaaaagatgcaactggtaaaattatccgatactttaaattcgacgaaattagaattgaactagctagagaacttaaaaagaatgctaaagaaagagctgaaatgactgcaaatattaatgcagccaagattgctcatgatggaattattaaaaagcttcaaaacgaatttggaattaaaaacccaacacgtaatgatattattaggtataaactatatgaggaattaaaaaatattgggtacaaggacttatatactggaacttatatacctcaagaaaaattattcagtaaggatatagatattgagcatattattccacagtcaaaattatttgatgatagtttttctaataaaaccatagtgtacagaactattaatttggataaaggtaatcaaacggcttttgactatatttcatctaggtatagtgaagaaaaattgaaggaatatcaatcaagaattgaagagttgtatggacttggatctgaaaaaggaataagtaaggctaaatatcaaaaacttctgaaaaaggaatctgaaataggagatggttttattgaaagagatttgagagatagtcagtatatagctaaaaaagccaaagaactactgtttcagattagtagaaacgttgtttcctcctcaggaagcattacggataggttacgtgaagactggggtttgattaacatcatgaaagaaattaatttgcccaaatatcgttctcttggattgaccgaaatggaggaaaggaaatacggtcagaaagttgaagtgattaaagattggactaaaagaaatgatcatcggcatcatgctatggatgcgttaacagtagcttttacaaagcatagtcatattcaatacttaaaccatctaaatgcaaggaagaatgagaataataaatatcataaaatcatagatgcaatagaacaaaaagaaactaaagtaattgttgatgatactggaaataaaaaacgtgtatttaaagagccaattgaaaatttcagacaaattgctaaagagcagttagaacaaattttgatttcacataaggctaaaaataaggttgtaaccaagagtaataataaagtaaaaggcagcgataaaatacagcaatgtttaactccaagaggacaattacataaagaaacagtttatggcaggtatcaatattattcaagtaaggaagttaaggttggtgccacttttgatcataagcttattgatcaggtaagtaatccattatataaaatgttgctgttagagcgattagctgaaaataataatgatcctaaaaaggcattttcaggtaagaactcattagcaaagaatccaatttatttggatagagaaaagaaatcaataatgccagaattagtaaaattggtttggcttgaagaggactattcaataagaaaaagtgttacaccggataatttcaaagattcaaaatctattgaaaaaataatagatcctattgtaagaagggtaattgcagatagattacaacaatatgaaggtgattctaagaaagcattttctgatttagatcagcatcctatttggctaaataaagagaaaggaatacagattaaacgagttgccatcagtggtgttaaaaacgcagaacccttgaattataagaaagaccattttggtaattatattcttaataatgaaggtaggcgtgttccagttgattttgtaagcactggaaacaatcatcatgtagccatatatcgggatggaaatggaggattacaagaaaaagtagtatcgtttttcgaggctgttgaaagagttaatcaagggttagaagttgttgacaaaatatataatagttcattgggttggcaatttttgttttctatgaaacaaaatgaactatttgttttcccaaatgagaaaacaggctttaatcccgctgaaattgatctgttggatcccagaaataaaagtcttataagcgcaaatttatttagagtgcagaaaattgctactaagaattatatgtttaatcatcatcttgaaactctttctataagtggagagattttaaaaaataaaaaagagttatcaggcattatatattattttatacaaacacccaataatttgaatggtattattaaagttagaaccaatcatcttggagatattgtgagtgtaggtgaatattaaatagtaaactcatgctcaacttcaacacctattaccatattttcaatcacgccaatggcgatgataatctgtttcgcgaagaaaagaactacgatttcttcttacagaaatatcatcagcatattgacccgattgccgatactatcgcctggtgtttgatgaaaaaccattttcatctgttggtgaagataaaaagcgaagcggattttctatcaacctttccaaagtttaaaactttggaaaggttggaagatcaatcgaaatttattagtaaacaattttccaattttttcagcagctattcgcaagctttcaacaaagtctatcaacgacgaggttccttgtttataaagaatttcaaaagaaaagaaattaataaccatcagtatttacagcaggtgattttgtacattcatctcaatccggtgaagcatggtttcgttcggcggggcaacgattgggcacactcttcttttacaagtttctatcaagaacaggcgacacttgcctaccatttgtttggtgatgaaaacagttatctctcagcgcaccaagccaaggaaggtttatttaccgactatcaaaaattggaacatgaattaacctaacagaccactaagccatgataaaacgcaccctttattttggtaacccagcctatctaaaaacgcatcaggagcagttggtggcagagttggtggagcgaaaggaagtgaaaaccgtacctgtcgaggatattggcgtattgatattggaccaccaacaaataaccatcacacaagcgctcttagctaaattgttggcgaataatacggctgtcattacgtgcaatgccacccatcatcctacggggctgctgctcaatctggatggtcataccctgcaaagccagcggtttaaggcacagatagatgcctcccttcccttaaagaaacaactttggcaacagaccatcatggcaaaaattaaaaaccaagccaatctttttagtcataaaaacatacccaacaaaccattgataaatttgattactaaagtgcgcagtggtgatagcgataattgtgaggcgcatgcagcagcctattattggaaacatttatttccggattttttacaattcaaacgaatgcgggaaggagcaccgcccaataatttgttgaactacggttatgctatccttagagccattgtggcacgtagcttagtaggttccggtttgttgcccactctgggcatctttcatcgcaatcaatacaatgcctattgcttggctgacgacattatggagccataccgaccttatgtagatagggtggtatgggatattgtagcaatgaatggtcgctttttagaaatgactcccaacatgaaacaactactactgtcgataccggtgatggatgtaatgatagatggagaaaagagtccgttgatgatagcggtgcaacgcactacagcaagcttggctaaatgttttgaacaagcgtcgaagaaattgctctatccggaattataaattattgtgtaatagggggggcaatgctatgtattggacaaggcttggggaaacatgatgcatattgagtaggagtatggcaaaatatgaaatgatggattggtttgcaagaactgcacaaaccagtgtgtgtacaaaatactacggacaatagaaagaacgtaaatacatgcagaaaggaggctgcacttatgcttgaacgcctaaatgcctaccgtattatgtggatattagtaatgtttgacctgcctacggaaaccaagacagacaaaatggcctatacccgttttcgtaaacgaatcctttcggatggttttgtgatgtttcaattcagtatgtatatccgacattgcagtagccgagaaaatgctgatgtgcatatattgcgcgtgaaaaaaatagtacccgaacgagggcatatcggcatcctctgcattacggataagcagtttgggacgatggagatttttagtagcggtgctaaaagcactactccacagcctacagtacaattagagttgttttagactaaaaaaatggaacggttacgcataaaaaagccgggttgttgcccggattttttatgtcgttgaaccatcttgaaagtcaatatggacaagcctcttgtagaaatcagttgttagcgacctaagataattcaaagaactgaaagcaattcacaacgccgaaacaaagatacatacgagtaggattgttgttagcgacctaagataattcaaagaactgaaagcaattcacaactagataacgactatatgtttgcaggctttggttgttagcgacctaagataattcaaagaactgaaagcaattcacaaccgagattctgaagattaaaattctctccatgttgttagcgacctaagataattcaaagaactgaaagcaattcacaactcccatttaagtaccacgccatcttctcttgttgttagcgacctaagataattcaaagaactgaaagcaattcacaaccatacggagatgtacacaaaacacttgagtgttgttagcgacctaagataattcaaagaactgaaagcaattcacaacaagtaacttggcacgggatgctgcaatatggttgttagcgacctaagataattcaaagaactgaaagcaattcacaacaactacaagtgacagcagatttgataaagagttgttagcgacctaagataattcaaagaactgaaagcaattcacaacatcgtttgcaatattattctgttccatcagttgttagcgacctaagataattcaaagaactgaaagcaattcacaacggtagtgttgaaacagcaagatgaacaaatg

SEQ ID NO: 2343 - DNA, 17249 bp, synthetic construct
  source 1..17249: mol_type = other DNA
  misc_feature 1..17249: note = Synthetic
gcagatgcccgtcacgacgcatttcccgaatcctatcttgtccgcgagccatcctcccacgaccggcataaaatagaccgccgcgaggaagattgaatatacctggctggccgttgactgctcccatccgaacttagcctggaggaacagcataaagatggccagcatcgtgtagtagccgaagcgctcgcccgtgttggcgagggcgagcgcgaataaacctttcggttggtttttgaacatactatgttactttgttactttctcaagccacttgaccatgccgagcataacgcccattgccaggaggcacatgcagaggaacacgctccagcaggcccacagaggcatcttgttgtacatcagagggccgatccacaagaagaggttgcccaccgcggtggcgccgagccagagtccctggcaaagtccgagaaggtgcttcggggcgaccttcgacacgaacgagagacccagaggagagatgaagagttccgctaccgtgaggaagaagtaggtcgcgatcagaacccaagggccggccttcatcgtggcctgctgggcgacttccatacctctgaaatcggtggctgaagggtaacccatcacgcctgagaatatcgcgaggaacagataggcggtcgccgcgattcccattccgtaggcgatcttgcgaggagtggagatctgcttgcctctcttgccgagggcgccgaagatccacatgatgataggggtcagcacgatcacgaagaacggattgacggcctgccagatctctggggcgatcttgtcggtgttgacgaagtcacgcgcgaagagcgagagggactgtccgttctggtggaacgcgagccagaagaagatcacaacgccgagaaccgcgaacagggcgtacattctctgcttgatctcctttgccatggtggccttctcctcggcggtgtagccggcattggcggaggctgccttcttggcaggagtagggaatttcttcttgttggcaaggaataccacaagagagatcatcatggccacgacggaggcgatgaaggaatagtggataccggcgttgaacacgtccagatagttcgtgcagaaagtgcctacggcctctccgccctgggccagcatcgcaggatcggcgcccgccttcacggcctcgtccatgaagttctgcgaggtggtgccgttgctgatgaactcatggcagagtctagggagctgtgagttgtagatgaatccgttgactttcagccaccagcttctcagaagaggagccacgaacggagccacgaggcctccgatgttgatgaacacgtagaagatctggaaaccggagtcgcgctttccctgtgcctctttgagagcctcgggaccctgcttggcggcctcggcctcgaaattgtcgtacatctgtccgacgatcgcctggaggttgcccttgaacagaccgttgccgaacgcgatcaggaaaagagcgaagcaggtcatcggcagcagccacgccttgttctcaggtgtcgcgaggatcggaacggagagaaccacatagcccaacgccatgatgatgagacctttctggatggttcccttgtagttctgcgtgcggtcggcgatgatacctcccacaaggctgagaatgtatattccagcatagaagaatgagtagatgagtcctcccgtctcgtcactcagcccgaacttcgaacaaaggaagagtgtgagaaccgcattcataatgtagtacccgaagcgctcgcccatgttgctcagcgccgctgaaatcagtcctttaggatgtcctttcatacaatgttgtttacttttaaattatttgtgttattaatatttcattctatgccccgcttggctctccgtttggctgtcatacgtgcgcccaaaatccatctctctcttcctgctcgcataacaagttactaatatacgcaaaactcctcaactcaccaaatttatgtcgtagtctgactctcggtcataaaatcagcttcaatatttgattctgaaatagtcaaggagtttcttgtaatagtcttgtgctgtcagacaggtatctgtaagatacccgggaattgtttcccattcgtgcaatccacgataatagaacattttcagttcgtctgtaataatgaacggaacaatgtcgtgattaagacattccttgaacattatcaggcgtccgactctgccattaccatcctgaaaggggtgtattgcttcaaaacgctgatgaaagccaagtatatcatcaaacagaattacctttttccctctgtattcttttaacaatgcacgcagttcatgccctacattctgtggtgaggtcgtctccattcctccaacctcgttaggtatccgtttgtattcaccgaccgtaaaccaggatttcgatgcgtccgaagtcccgcttttcagcaaccggtgaagttgttttatcatactttctgtcaatggctctttcgcgtggtcaattataaagtcgatgcagcggaaatgattggtggtttcaatgatatcatccactttcacagcattatccgtgattccaatcgtgttagtctcgaatatgtatcgagtctgctcttttgttaaccggctaccttcgatatggtttgaattatatgtcaggtcaatttgagtgcggtgatatattccgcctttgattccggagtctttttgctcgcacaatgtcttcaaaaggggagatatcctgttttttgcattcttgcgctgagggagtggagcctcggctggcacactccacgttttgccgacaagctgtgctccagcaattttaccttgaacacagtagttcctcactgtgcgttcggcgacaccgtgtgccgctgcatattctttagtagagacgtaatccataatctacggcacggaaaatagcatatgccgatacaaatataggatttcttgccgataacggcaagaaatggcggttattttgtctattcttccgaactcatgccgataggccttgtccctaatctgtgctcagcttgcacgtaaattatcatttatctgacagtcatatccccaaggtgtcagtcaggcgaaagattcggaaatacgaggaatctaggtacgccgtttttgagttctcgttcccataaccgaaaaattgcctaaatttacacccaaaacagaaacgcagatggaaatcgatgaattggaacgtggccggctgaggagcaaagtgctgaacttccttaaggccaatgatattgaatataagttgtacgagcatccggcattgtgctcggtggaggagtgcctgacgtattgggggaatatccccgaggcgacgcattgcaagaaccttttctttcggaaccataagggaaaccggcactaccttgtcagtatggaatgccacaagacgctcgacattcatagtatggagcatatgctgaagcagggaaagctgtctttcgcgtcggaggaaaggatggttcgatgccttgatctgcatcctgggtcggtgtcggccttcggacttatcaatgacatcgatccgaaggatgcggatcccaaggaactcttcccgaacggtcaccgtgtcaaatattacattgacagcacgttgcgtaccgccgacaagataagtttccacccttgcgagaacacggccagcgtcgtgatctcaggcgcggacttcttgcgtttcctgtcaatctggggcggcgaggtggaatggctggaaatatgatggggtcctgacctcaattaaatttcatattgacctcctctttcattatatttgcctgatgtgcgacagattgtagaaagatgaagattttgacgaaactgatgcaaggacttctgagggtgatctcggcgcttccgctgggattccattacgcgtgggcgggcttctttgcctggctgctgcgtgatgtgatgcactatcggcgtgatgtcgtgatgatcaacctctcccgcgctttcccagacaagaaatacaaggagctgaagcaaatctccaatgccttctacaagcatttcggcgaggtgatagccgagaccatctggttcggcggatgccgcaatcctgaaaggctgcacaggaaacgtctggttgaatataccaacctggacaccgtggaggccgcgcttgccgagagccccggggttgtcgtcttgaacagccatttcggcaactgggaactaaccggtggctgcctgacttacgactacaggccggactctgagcggtcaaagatggaggcaaatgacatcatcgccgtttataagcctttgagcagcaagatgtgggacgagataatgcgggtcaaccgctgcgctccggttctgcgttacgactacaccggttacgtcagttccgtgaacctcctgcgtttcgccttgtctcacaaggaggacaagaaaatctacataatcccgaccgaccagtgcccttaccggaactctacggtgaatgacgttgtggactttatgcaccagccgacccggacgatgctcggcggcgcgtcgatcgcccacaaactgcactacagcgtcttctatatgagcctgattccggtctcccgaggccactacgaatggaccttcaaggaaatatgccgcgacgcctcggtgatgacccctcactcgataatgcaggaatattacagcctgcttcaggtcgatctggaaaaacacccggagaactacctctggacgcacaaaagatggaaatgacaaaaattttatgaatatgaagaattaccgcacagtatcgcttctctgtctggccgccgctttgctgccggagggaagaatctcggcccaggatcccgtaggaaccgtttcctacgcccttcctcagaccaccatcacaatcgaggtggaggccgtccgtgaatatttctacgcaggcccttacgccaagtacgcccagaaatatcttggcgttgacgcccgtcaggcagaccagaccacctgcacgctcagcacggtccgtatgaccccgtacatcgaggccgaccagaatttccgctactatgtcaatcctgacaaggccacgcagtctttcctttcgcttacctcccagggacttatcgcggtcaatgacggaagtttcggcgagagcgccgagtggaggttcaccacgcaggccggggctgatttcaacgggaaaggcgtaagctccaaccttacatccgaggccgccacgctttaccgtggagtcaaggaggacgcttcctacaaccgcatcgccgtgcagcagaatatggttgtccagaagtcccttgagcagagggccaaggaggcagccgacatgatattcaatcttcgtcagaaaagggttcagatcgtcacaggcgacaccgacgccacttacagtggtgaggctatgggggcggccctcaaggaaatctccgctctggagaaggaatatatgtccatgttcatcggctacagcgatttccagacccagaaactcaaatgcgatgtcgttcctgtaaagaacagaaagtctcagacttacgtggcgttcagaatctcagatacagacggaatcgtctcggcagacaatatgtccggaaaaccttaccttttggagattgtccctcagccgatcggagaggcttccggcaagggtgcccaagcaaagtcgaatgtggccatctacaggattccggccatctgcacagtccgtctttccgatggcgtgacctcgttccttcaggacaggatggccatctaccagctcggaaccgagggctatttcccgctttcaaagtaatccggaaaaaatattcagcaaacattaaagaatacatattcacatattaatagaataacgctatgacaattaaagatttgcagccaaaggccgtttgggagaacttctacggcctgacaagggttcctcgtccttcaaagcacgaaggcaaggttcaggactatctcctgggctggggaaaagaacacggtgttgacgtgaggaaggacgacaccggcaacatcatattcacagttccggccactccaggctacgagaaccgcaagggagtgataatgcaggcccacatggacatggttccgcagaagaccgctgacacgaagcacgacttcctcactgatcctatcgagaccgagatagacggggagtgggtgaccgcgaagggaactaccctcggagccgacaacggaatcggagtcgctctcgctctttccgttcttcaggacaagactttgaggcacggcccgcttgaggctctcatcacctacgatgaggagaccggcatgaccggagccaactcgctcaaggccggaatattaaagggagacattcttctgaaccttgactctgaggaggaaggcgagctttgcaccggttgcgccggtggagttgacggcgcggctgacttcgcttacagaacatataagactcctgaaggattcgtcggctacaagatcaccgtcaagggactcaagggcggacactccggaatggacatttccctctttaggggcaacgccaacaagatcatctgccgtcttctcgaagccgtaatctctgaatatgacgtaaaggtcgcgtccatcaccggtggatccctccgcaacgccatcccgttcgaggccgaggccgagatcctcgtcccgtcagcggactcgcgcaaggtcaaggctctcgttgagaagaagttcgaggagtccaagttcgagtaccagtactcagacccggatatgattctcatctatgagaagcagagcgctccggctgcccgttacatcagccctaaggtgatcggcaaggctgtcaaggccatccttgcctgccctcacggagtccagaggatgagcgacactcttcctggcctgaccgagacctctaccaatatggctatcgtccgcacccagaagggacatctcacggttcactccttgacccgcagctcgatcgacgcggccaagatgtatctcgccgactcgatccgttacgtatttgagcttgccggcgcgaaatattcgacatcaggcgcttacagcggttgggctccgaaactcggcactccgatgatcaaggttctggaggacaccttcaagagcctcttcggaaaggaactcaagatcacggccacccacggaggacttgagtgcgccattatgggagccaagtatccgaactgggagatggtctccataggacctaccatcctctatcctcactctccggacgagcgcgtgaacatcgcttccgtcgccgagacctggaagttcctcgtcgccgtgcttgagaatattcctgaaaagtaatttgtcttgacctctaatttgcgaaagttgagataattgactatatttgcagtccttttgggttggcatacgtccccgaaaggactgcaatttatttattattaaacaattaagtcaaatgttaaaacagtacgagaccgttttcatcgcaactcccgttttgtctgaacaacagatgaaggaagcggttgccaagtacacaaaactgatcgccgacaatggtggcgaggtagtgtacgaggaggactggggacttcgtcagctggcatatccaatccagcacaagacctcaggattctattatcttatccagttcaaggctgagccaagcttcatcgccacccttgagacccagtatttccgtgatgagaggatcatcaggttccttaccgtggctcttgacaagcacgccgaggcttacgccgcgaagagaagggagaacaggaacaagcctgccgctcctaaggcagaggaggctccggctgaggctccggtagccgctgaagagaaaacagaggaaaacgcataatcaaggaggaatgaattatggcacagaatgacgcacagaacgcaggaatccgctatctcaatcctcctacagtagaggttaggaagaagaagtactgccgtttcaagaaggcaggcatcaagtatgttgattacaaggacgctgagttccttaagaagttcctcaacgagcagggtaagattctccctcgccgtatcaccggtacttctctgaagttccagaggaaagtcgctcaggcagtgaagagggctcgttcccttgctctgcttccttatgtaactgaccttcttaaataataggagagcgagattatgaagatcattttgaagaaagaagttgccaatctcggcgaggccggagatgtggtagaggtaaagtcaggttacggccgcaactaccttatccctcagggattcgcttgcgccgccactcagtccgctcttaagcagcttgaggagacaaagcgccagagggctcacaaagaggccaagcttatcgctgacgccgaggctctcgcagccaagatcgaggccacacctgtcaaggtggccgtaaaggtcagcgagtccggcaagatctacggttctgtcaccaccgctcagatcgaagaggctctcaaggccgctggtgtagaggttgacaagaagaacatcaccctcggtgagatcaagaccgtaggcgagtacgaaggcaccgtcaagtgctacaaggctgtcaaggccaccgtaaaggtaaccgttgaggccgaggcctaatcccaagtttatgttaagccgattttgcctgacaatattttagaccgcagatttcctgcggtcttttttcgtccctctcgggcaacgcttgaggccgaaaatgtcgcccgtcgctatcctcttgtttttccgaattaacgtcgccgcctattacgaaaaaaagcgagtccaaagacccgctccagatgtttacacaacggaataatccttattgtgaattgcttcgttattgtgattacaaagataatgaattaaatcaatttaacaaattttcttcaaatcgtttgacattattgataataaaacgtaaattgtggtcataaaactaccatatacgattatgaaaaaagttctgggacttgatctgggaaccaccagcattggttgggctatggtgaaccaagcggagaataatgaggagaaatcatccatcatcagagccggagtcagagtcaatcctttgacaacggaagagaaggatgcgtttgagaaaggtaaagccgtcaccacgaacaccgacaggcggctcaaacgctctatgcgccgcaatcttcagaggtacaaacttagaagaaacgaacttgtctcaatcctgaaggaacttggctggattgatgattccacaatactggctgaacatggcaacaggtcaacattcgaaacttacgaactacgttcaaaagcttgcacggaaagtgtctccttgacggaattggcacgtgtcctgttgatgatcaacaagaaacgtggctataagagcaatcgaaaggcgaatgcggaggaggacggacagcctgtggatggaatgtccgtcgcgaagttactgtacgaaaaggggaagactccgggacagtattgctacagccttgtcaagaaaggaaacaaggttttgccagagttttatgcgtcggatctgaaatcggagttccgcagggtctgggagacgcaacgactttattatcctgaatatcttacggaagagttctggaatcagattgacgggaagacacgttcctctttgacaaaactcttctttgcgaaatacaaaataaccaccgcggacaataaaggtaaggacaagagagttaaagcctatgaatggcgggccgcggctgtcgagaacaggttgccgattgatcaggtagcatatgtcttgtgtgacatcgctggaaaccttggatcgtcaagcggttatcttggcaagatcagtgataggagtaaggaattgtatttcaacaaacagactgttgggcaatacctttattccaatattcagaaggatccgcatttcagtacaaaaaacaaagtgttctataggcaggattatcttgatgagtttgaggctatttgggaaagctaggcatcttttcatcccgaattgactgatgaactcaagaaggagatccgcgatgtcgtgatattttatcagagaagactgaaatcccaaaaaggactgatcagttattgcgagttcgagagcaggaaggtagatgtggaaatcaatggccggattgtacagaaaatccgcggttgcaaggttgctcctgtctcgtcaccgctgtttcaggagttccgtatatggcagaagatcaataatatcatcgtcaccaataaagagactggagaacaaggcacgctggaacaggatgacaaggttagattggcagagtgcctaagggtgaaggacaaactgtctgataaagagattcttaagttgttgttcaagaaacctaaggatttagagatgaacttcaaatccattgagggaaatgaaaccttgggcaaactatattcaaaatttcttgaagtggtgtctttggccggtaacagtgactatgaatattcaaaactacgtcaagaggagttgatgaatatcctacggactgaatttgcaaggaacgggttcaacacagcggtccttgaatatgatccgtcgctgcctaaggaggaatatgaaaggcagccattgttcagactttggcatttgttatattcatacgaaggggataagtcccagacaggcaatgccagtctgataaacaagatcgcagagatctgcggaatgccggaaaatcttgcgaaaattatcgcctccgtttcattcaaacaggactacgcttcactgagccataaggcgatgaggaagatacttccgtatatgatggacggaaatgaatatagtctggcttgcgaatatgccgggtacaggcattcaaagcaatccttgacaaaggaggagatcgagaataaggtcttgaaggatcgtcttgatcagattccgaaaaactctctccgtaatccggtagtcgaaaagattcttaatcagatggttaatgtgatcaatacggttggtgacaggtatggcaaaccggatgaaatccacatagagctggcaagggaacttaagtcctcgcaggaggaaagggctcgggccacggaatccattgcgtcaaacaataaggagaatgataggatcaggatgattcttgagaatgagttccatcttgcttacgtcagcaggaatgacattgtcaagtacaaactgtatgaggaacttaagaacaatggttacaagacattgtattccaatcaatatattccggcggacaagcttttctcccgtgagattgacattgagcacatcatcccgcaggctgtgttgttcaatgactcactgtcgaacaaaaccttggaattcagagatattaatctggaaaaaggcaaggacaccgctttcgattatgtcaagaacaagtatggggagagcgggcttgaggattataaacttcgggtaaaccatctctttgagtcaggaggcatctccagaacaaagcgtgacaatcttcttcgtgattctaagaatattccggaaggattcgtcgaacgcgatttgaagggcactcaatacatcgccaagaaggcccgtgagatacttcttgaatatgtccgtgtggtggtctcaacatcaggatctataactgacaagcttagggaagactgggggctggtgaatgtgatgaaggaactgaatatgccgaagttcgaagcggctggatttgtggagacaatcacgacttcggacggaaaggatattcgtaagataaaggattggaccaaaaggaatgatcaccgtcatcacgctatggacgccatcactatcgcgtttacaaaacttgctcatattcaatacctcaataaccttaatgccaagggtgacaaatcttccagcatttatgcgatattgcagaaagagacttatctctccggctccaaaagattgatcattcctccgcttccgttggaccagatgaggcgggaggtccgcagacaacttgaaagcattctcgtgtcaatcaaggcaaagaacaaggtgatgacggagaatatcaaccgtataaggatcaaggacggtgtgaaaaacgtcaagtgcctaaccccacgtggtctgctgcataaggaacaggtttatgggcaacgtaaacgttatgagacttatgatgtggcggtgaacgggaagatgactgaagacgtgatcgctacagttgcgtcaagtgagacgaaagcggctttggctttgaggctcgcgcagttcaaaggtgacccgaaaaaggcgttcaccggcgctaattcattggataagaatcctgtttggcttgatgccaatcattctcgcaaggtcccggcgaaagtcaagtgtgtgcgtttcgtgaatgtatattccatcaggaaaaacattgatccaagccttagtgttgagaaggttatggacggaagagtgcgccgcatcctcaaagacaggttggctgagtttggtaacgatccaaagaaagcgttcgtgaatctggacgagaatccgatctggttcaacaaggagaaaggtattatcctgaaaagtgtgaccatagccgagaatttcgaccttgaccctatcaggatcaagagggataatctcgggcgtgtcatctgcgacgcagaaggaaatcatattccatcggactatgtcaatttcaggaacaaccaccacgcggcgatattcgaggatgcggacgggaatattcaagaacacatagtttcgttctatgaggcggtgcggagaaagtccgctggacttcctgtcgttgacaaagaatataatgctgacaaggggtggaagttcttgttcacgatgaagagcaacgagatgttcgtctttcctaatgaacggacagggtttgatcctcgggcggttgatttgatggatcctgagaattattcggctatcgggccaaatttgttcagggtacaggctgtatctactcgtgattattggtttaggcatcatctggagacatcattgggagcagataaaaaattgaaggatattacttggaagagaataactaatattgagatatttaagcaactcgtaaaggtgcggataaaccacatcggagagatagtttcagtcggagaatatgattaaacggaccctgtatttcggaaatcctgcttacttgtcctacaagatgaagcagttggtcatccgtcttgtggctaatgacccagatgagtattccgagcagatccgtactgtgccggttgaagacattggagtagtagtggttgataatcagcaggtgacattcacatcaggtctgatggctgcgttgttggaggagaatgtcgcgttggtgacctgtgactccaaacatattccgaccggattgatgctttcgcttcaagggcattcctcgcagaatcaacgcttccgaaatcagttggaggcgtcattgcctcttaaaaaacagctttggcagcagacggttgagtgcaagatccgcaatcaggccgctgtgctgaaatatgtctcgggagaggatgcgaagaatatgcttgcgtgggcaggttcggtcaagagcggagattccgagaatatggagggacgtgccgcagcatattactggaaaaatgtgtttgaggtacgcttcgtgcgtgaccaattcggggaatatccaaataatcttctgaattatggctatgccatattgcgagctattgtggcaagggctcttgtcgccagcgggatgcttccacttcttgggattcaccaccacaacaagtacaatgactactgtttggcagacgacattatggaaccttacaggccttttgtggataggttggttctcaatgttatggatgaatatcctgatgataaggaactgaataagaacataaaagcacggcttttgactattccggtccttgatgtgaatattgatggacataagagtcctttgatggtcgccgtgtccaccacgactgcctctttgtacaaatgttttagcggagtatgccggaagatagtttatccatcaatgtagaaaccaggtacagtaaatatcgggctatgtgggttcttgtcttgtttgatttgcctgtggcgacaaagaaggatatgaaggccgcctcggctttcagaaagagtctcatagaatatggattctctatgttccagttttccatctacctgaggcattgtccgtccaaggaaagtgccgatgtgtacattctaagggtgaagcgtatccttcccaaaaaaggaaagataggaatcctgtacatcacggacaaacagttcggcagtatggaactcttcatcggaaaggattcctctcctctcccacaggtcgaacagcagttggaacttttctgacagaatcacaaacccttgataaacaatgaaatcccagccctcaaaggccgggatttcctctttcagttacagttcataaccctctgacccatactgttttgcagagaatgagctgtaaatcaacccaaaggtacaaagaacgaaagcaattcacaacgccctcgatgatgtcagcgttcttgttgtgctgtaaatcaacccaaaggtacaaagaacgaaagcaattcacaactcctgaaattgatcgtggttggctgatgagctgtaaatcaacccaaaggtacaaagaacgaaagcaattcacaacacgaggcagtccctgtaaattcttcggctggctgtaaatcaacccaaaggtacaaagaacgaaagcaattcacaacggcgtagagccgaataaattacgatttgccgctgtaaatcaacccaaaggtacaaagaacgaaagcaattcacaactgctcacacttaagtgtggtcagctcgtgcgctgtaaatcaacccaaaggtacaaagaacgaaagcaattcacaacttaagatgagaaccgatttggttttcgacggctgtaaatcaacccaaaggtacaaagaacgaaagcaattcacaactacgccaaattcaaagatttggttgctcggctgtaaatcaacccaaaggtacaaagaacgaaagcaattcacaactgcgtatttattcggattggttcctcaacgctgtaaatcaacccaaaggtacaaagaacgaaagcaattcacaactgacaaagcaggaattcatagaacgcacgggctgtaaatcaacccaaaggtacaaagaacgaaagcaattcacaacttcttgcacctgaacgcgttcaggtaggccgctgtaaatcaacccaaaggtacaaagaacgaaagcaattcacaacacttcttttgataacaacgattgggaggtgctgtaaatcaacccaaaggtacaaagaacgaaagcaattcacaacttacgggcaagttgagcggcaggggaattgctgtaaatcaacccaaaggtacaaagaacgaaagcaattcacagcttcctcttgttccactttattcacgaggagattaaagtccccgtgaatatcgccacatatggcaacattgcagcactttggaaaatcataaatattgggatatgtatcagtattcatctcacagaaatgccgtattgataagttcaaggagtcgctcggcattcaagcctctaagtcctgcatttttgaagaaatcgggatttgatagttctcctactctttgataaaagtcattcatatcgtttttcattttttcagggagtgtaaagtgagaatcctgcggcagcatagcaatcagtctgaaaatatctttcttatgcttctcaatgtctcgactatctaccagtttgccttctgcttttctatccagcatctctgtatatgctttagctttcaaacaaattagagcttccggacttgcaacatggatgtcgtcaatatttctgctatgctcaatcgtgaatgcatagtagttgtcatccattagaattacagacagactggagaggtcttctccaacgcttatcggttctatatgtgcatctggtggaaggtttagaatgcctgtatatcttgcaaaaagctctatttgcttcggataggtcttgtcttgaggattggtaaaacgataatattcgtgtttgaattcgtttcccccttggcttcggtgaccgtaattggcagccttgataaaatcccacaaacgtaatccgaaatcaggtgtaagggcttcaacaacaagtacaaggtcaagatccttcgttgcacgaggattcatatcaagttcttcttaaagcagattgcacgcagccccacctattagcacatatttgtctttataatcattgaagtattccttccagcgttcaattcctgttaccatttcatttcttcaattaaagtgtcacattctaattgtattctttcatcatcgctatctttcatgcacagataaagcgaaagtttgtctactattccgttttctgacaacaacgtcggagaatatttccatacttcgacctttatgtccccgtattatttgctcattattgcggcattctctttggctgtcactttgtcgattgcaacaactggggttgttggctcagcaagcatggtataatgtcccattgctgtttcaccagacatcaaacttcctgtaggttttatgtcagtgaaaagaatgcgctctataggagacgacatcagtggaagggatttattccataattccatcttgttcaatactatttggacagatttctgtttgcctccaacaagtgtaattatattattggtttcaagccaccttagagcaacattgattgttgggtacgctaaacctacaagctctgctattcctgaagtatttaaaccgtcaatcgtactcttttctaggtgatagagtacaagcatctgagcaacaggaggcattttatttggcatcaccttaggcttgttcctcatttagcgcagcacaatgagaagacttggaatgaaaacaagcttacctggtacaatgaaatttactttggcatgagttagcctagatagattgtatgatgcaactgactaaagagcaaacacaacaggatgatggaagacctccatcatctttgtctgatgtttggatagcagcatcggagaaatgttatcaaactcggtgggcaccgctatggtaactatcgtctccataaactcaacatcataaagagtatagcagcaagcaattgctaaaggaagtttactatcatcctttttttcatgagtaatcatccttatttcactacctgtcagttcggcaagaaaatctattaccttatcaatattatatttcatattgcatattacaatagttcgttaattttataagttttacgccgcggcgcgaacgccgtagaataa

SEQ ID NO: 2344 - DNA, 17237 bp, synthetic construct
  misc_feature 1..17237: note = Synthetic
  source 1..17237: mol_type = other DNA
gggtgacacaaggaagcgtgaagggatttattattgtacagtcggacaagcctacactcgaacaggcaaaaacagacgcgatgcagaaggtccgtgcagagatagccgagtcggtggcaacaaatgtacaacgtactgtcaacagctattcgcaaaaaaccattgacaatggcaactcttcatctaacaagacattgactattgagtcggtttcaaaaattgcaaatatgcctgcaatccaaggtgtcagtattacaaaagctgatacttaccatgagatttaccgtaataagaagagcggagaatcctattgcctcctttatgtgaagtatccattctctcagttcgacctcgttgagcttgtgtccgcatacgagtcccatgaaaaggaaatagatgataggattcaggcctttgaagacggccttgaaacacttgagtcggtagatgatgtgaataagtctatcatgggtctttcatctttatctaaagaacttggtcaggaagattaccgcatcgagaggataaatggtctgataaaacgttataaccatgtttatgaatgtattgttgttgagattgttagcaacactcccggcaaacttgtcgtgagactcgtttgtgacggcaaatctatcacaacatctcaaatgccccgcctctcgtcaaactgtgctaaccaattcagtacgagactttcaggcgataatattgtcattgaatataattctgattattgttatgctcaagacgataattttattgatttaaggtttaaatttggtacaaaatttgtcaagaagcaagtttcatttaaattaaaataattaatatcttaaaactattatcatgaaaagaattagtctatttcttagtgttgcattgctttcaataatagcaatgtcatgtggttcaagtaaggctgttgtaaataatactcctgcatctcagcctatggcgttaccatgcccagaatgtacagagggcgatttcttcgcatatcttggtcaggcagtagcagaatcggattatgaccttcaagacgcaaggatttttgcggcacaggctgctcgtgacgaaatccaggctatggttgagagcgttgttacaaggtctgtcgataacttcagtcagaaacataggtctggaacagaagttcaatcaattgccaaacaaacaattcagtctattaatgtcgtcaagggaaaacttaaaggtgctcctattaaatgctggggaacaacaccaagcacatcaaaagccggtgctcagaatgtatgggtgtgcgtacagcttcctgtaaagactgtctatgacgaggttgtaaaatcaatggcagcagatgagactattaaaattgattttgctcaagagcaatataaagacgatttctatagggcccttgaggaatataaaaatattcagtaatgaaatatcaaggtcttaattctgaacaagttattgaaagccgtgctaagcacggcttaaatattcttacgccaccgcgtaaggaatcgttattccatcagtttgtttgcaagttcaacgaccctatcatcaggattcttctaatagcgctgcttttgtctatcggagtcgctgcatatcagtattttaccggacaagaaggagcgagcgttctgtttgaacctctcggcatacttgtggctattttgttggctacatgcgtcggattcgcctttgaggttagcgcgaataagaaatttgatatcctaaatcaggctaatgatgaggagatggtcaaagtgatacgtgacgggaatgtcacccttgttgaacgtaaagatattgtggttggcgatattgtcgttgttgagaccggcgatgagatacctgctgacggagtactgctcgatgcattcgaactccaagtgaatgagtcggaccttaccggcgagcctatggcaaggaagaccactgatgaggctgagtttaacagtgaggcgacttacccttctaactgcgtcatgcgcggtagcaaagtaatcgacggacacggcgcgatgcgtgtcgaaaaagtcggtgacgccaccgaatggggcaaggtgtataaaggctcccagatagataacaatattaaaactccattaaaccaacaacttgataagcttggcaatattgtcacagtggcgagttatatcgtcgcatcaatcattctcatcgctcgtttcgtcatgtacttcctatttgttgacaagataaacgatggcattgaatggatggggcttgccacttactccttgaacaccctgatgattgccgtcaccatcatagtggtggcagtgccagaaggactacctatgagcgtgacacttagtctcgcaatgagtatgcgccgtatgcttactgctaataacctcgttcgtaaaatgcacgcctgcgagacaatgggagcaacaacggttatctgtaccgataagacaggtactcttactcaaaaccaaatgagtgtcaatgatatctcttctttcgccctgccaaagaaagtgttggataatgggaatgtgtctaaactgtttgttgagagtatagcaataaatactacagccttcctcgatttgtcagatgcaaataaacctaaggttattggtaatcctacagaaggggctcttctcctctggcttcatagtcagaatgtgaactatctacaatatagagacgacctcaaactttaccaacaagtgcctttctctactaaatataagtttatggcaactgtcgttgagtctcctacctttaataaaccgatgttctacgttaagggtgctcctgagataatacttcagcactgcaataaacttgttacggaacaaggcgaggttgatattgagccttatcgctctactattgaaagtcaattgtcatcttaccagaacaaggcgatgcgaaccctcgcttttgcatataaggtcggtgacccgaatgaacagtcgttcgacaccgccaccgacaacctcgtggcagaaaaccttgttcttctcgctatcgtggctatcgctgaccctattcgtcctgatgtcgcagatgctgtggcaaaatgtatgaaggctggcattgatgtgaaaatcgttaccggtgacactcccggcactgcaatagagattggccgccagcttggtctttggaaagataccgaccagcgtgacttcaaccatatctccggaaaggattttgaagccctctctgatgaagaggctaaaagacgtatccctatgattaagattatgtcgcgtgcacgtcctatggataaggaacgtcttgttcgcctccaacagtcgaacggcgaagtggtggcagtaacaggtgacggcactaatgacgcacctgcattgaaagccgcccaagtcggcctctctatgggtgacggcacaacagtggcaaaagaagcctccgacatcactattctcgacaactcgtttaagagtattgcacgcgccgtgatgtggggcaggtcgctttatctcaacatccaacgttttatcctcttccagatgactattaacgtcgccgcttgcttgctcgtgatgttcggtgccctgctcggtacggatatggtccttaccgttacacaaatgttgtgggtaaaccttattatggatactttcgccgccctcgccttggcttcactgccgccctccgaaagcgtcatgaaagagaaacctcgctcaaaagatgcacatattctcacaaaaccaatgatttactctatctttatcgttggctctttgttcgttattttaatgctcggcttcgttcagtattttaaacatgctgatgtgcagtctttattgtcgttctctttccatgattatctcgtcaacttttttaacttcaatgtgatggataatgtgcgctataccgcctatgaacattccctcacgttcacgatatttgtgttccttcaattctggaacctcttcaacgctaaggcattccatacgggtatgtcggtgttccgtgactttggaaagaatgtaggtggtttcgaactcgccctggtaatcattctcatcggtcaggtccttatcgtaacatttggaggcgagatgttctcggttgagcctctgtgctggcgcgactggctgatatgctttgttggtacaagccctgtccttatcgttggcgaaattattcgtttttttgtaaaggataataactgataatgagaatacttattcttaacggccccaatatcaacctcataggcaaacgcgagccttcaatatatggcaatatgcctattgatgaatacctcgcatcggtatgtgagcgtttcccagagcatgttattgatgtgtttcagtcgaatcatgagggcgtgttgattgataaacttcaagagtcaataggtgtatatgatggaatagtcttcaaccccggaggctattcccatacatctatcgcacttgctgacactgtcagggcgataaatattccggtggtggaagtgcatatctctaacatattcgagagagagccttatcgccatcactcttttactgctgaggcttccgtgtgctcaatagttgggcacggactggaagggtaccccgaagctgtttcttttcttataggaatgtaagttgctgattaagagaagtctttctcgtcaagctcggtgaacagccgcttcttctcaaggaaatgtttgaatactatattgcgctggtatatttgagaaacgtgtttgtgttgcgatgcgtctcttttcttttttaatgaaggcagatgcctgtagaagcttaaatgtgccctgataaccgcccagaaatcagcgaggctgccttctgcaaggaacttaaatgccgctatccaatcaagaagaatcctatatgcgatgatggggaagactgagcctttgggaaggtttttcatcagaagtgaaaggttgttcctgaagttcagatatgtctttctggctgagtttttaggcagtgtgccgccaccaatatgatatacttttgattcgggacagaacatcactttgtaaccctcgttttttaccctccagcaaaagtcaatttcctccatgtgggcaaagaaactgtcatcaagacctcctgatttatggtatatgtctgaccttacaaacatgcatgcccctgtagcccaaaatacttcctttgtgtcgtcgtattgaccttcatccttctcaagatgttggaaaacccttcccctgcaaaacggatacccgtatttgtcgatgtatccccctccggcacccgcgtactcaaaacgctccttgtcataatatgacagtatcttcggctggcatgcagcaatagtcctgtcactatccatcagcttgatgaccggctcaatccaaaaaggagtaacctcgatgtcggaatttaacagacaataatactcggcttcaacttgacgtaatgcaatattgtatccagtggcgaaacctccatttttgttattgattatcagcctaatatcagggaaatttgccttcatgaatgctacggagtcatctgttgaggcattgtcggctactattacttccgcctcgttgctatattgtattactatcggcaggaatttgctcagaaaatccttcccgttgtaatttaatatgactaccgcgacttttttcatagtgcaaaaataacaatattttcaatgaaaacggctattctctgcaaaatgtttaataaaatagttggggatttattatccgcccattcttaataatcgccatgttccttgttgttgacaatgtatttaccgatagagaatgtccttatctgctcgttgaaaatccaatgttgtaagctgcgctgtagatagaaaaatggtggtgagattcatcttgttgcagtattttgttacaggatttagaagtcatgagcgcataaaaagagacatgaggctggataattccctgccccatgtcaatacaaagtatgtgtggtatatggtatgtaaaaaattactcttagtgttatcgtggattatcgtagtaatcctttgcgtggtctccgtatgagtcaggcattgcatattggtcaacgccgtaatcatagtatgttccgtaagtcctcttataaatctctgttgtccatctgaagttgctgagttccccgacggcgtcggaatgaatgagttggaagtcgtttgtagctatgtcaagtgtcatgaagacgaacttcttgttcctttgagagcctaaggtgtagtaatgccatatctcgtatgggtaggctccgggctcgttatagctttggactatcctgtcaggagcaccgtatttgaggaacactctgcctctgtcggtagcgtaaccctcgttgttaagagatttgaatgaaacgttaaccctttgaacctgagcatagtaatcttcccatgctttgcggggctctatgctattcctacttgcccagaatgtgaaaaagtattgctgcatcatctttagatcttcggtcttgataagctctgccgaatactccctttcaacctgagtggagataggggcgagggttttgatatatcggcgtatggagtcgatgtttgaaatctgcccgctgaaaactttctcggtgtcaattgatgagagcgttgatgggtcgatgatgtagtttggattactcctttggaagaaatatctgtttagcccgattacagcattgttcctgtcacgcgcctcaaggacgaggtaataattcccggaaggaaggtttgtgatgtctatattgttgataatcacttctgtgtctttggtgttcatcctttttgtgaagtaatagttgtttaattttgaaccattttcaaaggcgcagatgtatgtgtttaacaagtatttctcgtcagaaccaagttgcttgttcgagttgtatatctctgcatagaatgacagcttgtttgtcgtctcaggatagaaaggcattatcattggaataagttcgtatccgtttttggtgctgttgctcaccttgtcgctctttgagtagctttcgagtccaatgatgcttgaaatacagaagccttcaggaaagtcaactattatctggtcttcaaccttaaaaggcttgtcagtcttattgttgacatcttctaatacaatttccatggtgtatgtcccgttaggaagcgagtagcgctgaaagtccatgaagaagcctccgatatttgcagtgtcgttctctattgggctgtcgatgctatacttgccgaagttctttatcgtttcaccttgtttaaataatattgtgacgttgattgttgcgttgaacttgttttctgtgttttttgtgtatgtaaggctgcttttatcaaaggttatgtatgtctctatatattgtgacggcttttcacccgtgacgttgaacgcagcgtatgaaatataggagtttaaaatcttgacgtctttggcattcgcaaatgttgcaataatgcttaacaataaaactgtaaaaattcttttcattttttctgattttgtgatgcaaaagtaaaatgaatactcagccatgtcaagtaatattatttctatttttatggaatcgtatcgacaaaatctttgtaacctattgtaataaaaatagttgtgttttttgaattaatacttgattgagcgtaaaaaagaaggaatgaatgtgtaaagtggctcgtcggttttcaatattcctcttactttgttggcgcgtttgttggccgaactatacgtttgtttgaggagaacggctatttcgaggtcgctgaattgcatcaggctgaagatgatgaatcgaatatctgaggaggtaagctcaggatatcgtgataagatggtgtgagtaaggttggggaaacagctgttgaaagtggtagtcagctgtatcagttttgtttttgacagcgctaattctgggtagtcgcccactgttttgataaagaattcttttccttcgatggaatttttaatctctaaaaatggtttgctgttggagaaagccttgtagtcttcatcgaacgagcggtgttcgataatattttcgtcagaaatctcaatgtccatgggtgaccttgatgcgctgtcgatggttcgggaaatgctaagggttggagtctctgttggcgaaggagactctgtcgtggcgccgtctggttcagatggagcctctggtaatgaagccgtctctgattgtgtccgagtgtcttttctctttttcctataatatagaataagaattagtactattattattaatagggcggcgataactgctgttattagagaagtgtcgtttggctttgccgttaccattaagttatttgaaaaagagtcgaaaaatgattcgagttgaagtctgacaggggtgagccttgcttcagaagagaggactctcgcttgatattgagcaaattcgaattccttttcacgttcacctatcagaaagaatatttccgctaatttctctgctgctttcagcttcatgttgggagaaccgtcgttgaagcaggggaggaggttgtctattgcttttggatagtcgttgtggttatagaaatagcatgaggcaaaatagtgataatcaatggagttttgtggttttgacgatacagcgttgaaaatagagtcggcagtagcgttatcttgaatatggtaaagggagacgcctttcttaatcagaatggtgttgagttgttcttctgtcaggtttctcttaccctcggcagtctcgtaattcagcagagcgatattagagatgtggttgtgctcgtataagtcgccgattttaagtagcatgtcaataacctcgtgttgccgttgagcattggtgaatttttcgagtgcgtcgttatagaagaatgaggcggctttcaggctgttgaagtcgttatagatgtttccaagggcgtccgacacctgtccgaggaagtggaagtcatcgttgcttatgtttttactataggtgatggacgatttttttgcgagatatgattttgtgagagtgtttgcagcttcaatatagtcctttttattatacaattctcttccgtttaagtagtaaatctgcgatattttttccaataaatcagggtctttggcgtgagataagtcaacattatcggccaatgaaacgtatttttcaatataatcctgtctgttgttgtatgaaaactggaagtcgagtatttcggagcgtgacgaggcgttcttacagcagttgaaagacaatgctatgagaatcaatgttattatgttagtattttttaacgctcttttcataattgggatacaaagataggttattttttcattagaaaaggaggtaaataaaaaaaatgaaaaaaaagtttgtcgctttgaaaacttttgtatttttgcagcggagatatggcagagcggtcgatcgcggcggtcttgaaaaccgttatacagaaatgtatcgggggttcgaatccctctgtctccgctggggagcaactcgcagatgggttgctttttatttgaagataggttaggagagatgccagagtggtcgaatggggcggtctcgaaaaccgttgaacgctatgcgttccaagggttcgaatccctttctctccgcatcttttgattttatggtgttaatattttatcccgctttcgaggcgggtttttcttttttgctgctcctgcttatcacaagttgttggtgctaataatcatttggagtttataatcgtcgaaatagttgagaatacatatcgttgataatattttcattggtatgcaaacaattgttttattgatggtcgaaaattgtcaagatacggtaaaagagacgttattattatccacatgacatgcagcggttttcttggatttagttaaaaaaaagcgacactctgatgggcgccgctttaaatgttttcacaacggaataatccttattgtgaattgcttcaaattttggcaaaaataataattttttttaagacatgttaatattttttttcaaaaaattgtatttttgtgttttaaacacaagaagtgagaacgatgaaaaagatattaggacttgacttgggcaccaacagcatcggctgggctgtggtgaaagaagctgaaacagctgacgaacactcgtctatcgtaaaattgggagttagagttaatccgctcacagttgacgaattgacaaatttcgaaaagggcaaaagcattacaactaatgccgaccgcactctcaaacgcagtatgcgtcgcaatttgcaacgctacaagctgcgccgtgaacaccttatcgaaatattgaaagccaatggttttatttccgatgaaaccattttgtccgaaaatggtaatcgtacaactttcgagacttatcgacttcgagccaaagctgctaccgacgaaatttcgttggaagagttcgctcttgtattgttaatgataaacaagaaacgcggctacaagagcagtcgaaaagcaaaaaacactgaaggcagtcgaaaagcaaaaaacactgaagaaggaaaactgattgacggcatggagattgcgcagcgtctttatgacgagaatcttactccggggcaattgtcgttggagctgctgaagagtgggaaaaaatatcttcctgatttctatcgttccgatttgcaggcagaattcgacaaggtttggaattttcaaagtcagttttattcatttttgaccaatgatttgaaagatgaattgaaggggaaaaatgagaaagcgacttgggctatttgcgctccatcaaaggacaagaatgctgaagattctcgattcgtttggcattggaaagaaacggaatctatatggaatgaagaggctgcctctaatgaaactgttgaagttgataagacattgattggtgcaaaacgctctggaacaactgtcgagcagaaagtagaaaacttcgagtggcgtagcaaggccttatctgaaaaactttcgccggagcaactgattgtcgtgttccaaaaaatcaacggtcagatcaacaatgcaagcggttatttgggcgacatcagcgaccgaagcaaggaactatatttcaatcatcagacagtcggtcaataccagatggcgcagttggacaagaatccaaactacagcctgaaaaatcaggttttctatcgacaggactatctgaatgagtttgaaaccatttgggaaactcaagccaagtttcacaaagaactcacacccgaactcaaaaaagagattcgcgatgtggtgattttctaccaacgtccgctgaaatcgcaaaaaggattgatttcgttttgcgaatttgaaagccgacagattgaagttgaggtcgatggcaagaaaaaactgaaaaccatcggctgtcgtgtatgccctaaatcatcacctttgttccaagagttcaagatttggcagaggctgaatgatgtcgaagtgtcgggcatgattgtgccaaatcagcaattggatttgttcggtttttccaaagacaatacatacggaaaacgcagattgctgcaagaagagaaagaaatgttgtttgccgagttgaactgcaaagaaaaactctcgaaaaaagaagttttaaacttgctctttccgatgcaaaaagatgtcgatatgaatttcaaggagttggatggcaatcgtactcaagcccaattattccaagcatatcagactattgctgaaagaagtggccacgatgtggaagatttgttgaagaaatcagcaatagagatgcttaactgtgtttctgatattttttgcacaatcggaatcaataccgacatattaactttcaattccgcacttgaaggaaaagaatttgagcagcaacctatgttccgtttgtggcatctgctctactcttttgaaggcgacaattccgctatcggtaatgaaaaattaattgagaaattacacgacacgtttggttttgaaaaggagtatgcggcagttcttgccaatgtcgttttcaaggatgctggcgattatagtagtctgagcacaaaggccatacgtaaaattctgcctcacttgaaagatggcaacgattatagtgtggcatgcgaatatgctggttatcgtcattccaaacattcgctaacgaaagaggagattcaaaataaagttctgaaagacaaattggaacttcttcctcgtaacagtttacgcaatcctgtggttgagaagattctcaatcagatgataaatgtagtaaatggcatcgttagcgaatatggcaagcccgacgaaattcgcattgagctggctcgcgaactaaagaaatcggccaaggagcgcgaagaactatcaaaatcaatcaacgaaacaaccaggctacatgaggaattggtcaagaaactgcaaaacgagtttggtctttcgcacgtgagccgaaacgatattattcgttataaactgtatatggaattggaaagcaacggatacaaaacgttgtacaccaacacatacatacctcgcgaaaaactcttcagcaaggagtttgatattgaacatatcattccacaagccaagttgttcgacgattctttctctaacaagactttggaagcgcgacaagccaatttggataaatcgaatacaactgctttcgattatgtagcctcaaaatatggtgatgaaattgccaatggcgaatacaaaacgcgtatcgagagtttgtataaagatgggaaaataagcaaaaccaagcgcgacaaactgctgatgaaagaggcagacattccaagtggcttcatcaatcgcgatttgcgcgactcgcaatacattgccaagaaagctcgcgagattttggaagaattagttcgctttgttgtgccgacaacaggttctattaccgaccgcctacgtgacgactggcaacttgttgatgttatgcaggaactaaattggaagaagtacgaacagttgggcatgacggaaataattgaaggtcgtgacggacaacgcatccgtcgcataaaggattggaccaagcgtaacgaccatcgccaccatgctatggatgctcttacaattgcatttacaaaacgttcgttcattcagtatctgaacaatttgaacgcccgcgtgcaaaaaggtgtttacgattggattgatctcgatatggtagagattgctaacttgagtaaagaggacaagaccaaggagatttatgccattgaaaggaaagaactatatcgtgataatcacggcaaattgcgcttttatccgccaatgccactcaacgagttccgcaccgaagccaaacgtcagcttgaaaacaccttgatttcaatcaaggctaaaaacaaggtagttacgcgaaacataaacatatcgaaaaagaagtcgggcgctaacaagaaagtgcaacttactccacgagggcaattgcatttggaaacaatatacggaagcagcaaacgatatgtaaccaaagaggaaaaagtaaacgcaagttttgatgcagataagattcaaacggtggcaagccaacgctatcgtgaagcattgtctgctcgcttgaaccaattcggtggtgatgctaaaaaagcctttacgggtaagaatagccttgagaaaaatcctatttggctcaatgttcagcataccgacaaagtgccagaaaaggtcaagaccgttggttttgaaacaatctatactatccgcaaagaggtctcgcccgacttgaagctggacaaagtcgttgatacgcatgtacgacagattttgcaagcgcggttggatgaatttggcggcgatgccaagaaagccttctcaaacctcaccgaaaatcctatttggctcaataaagaaaaaggcatctccataaagagagtcacaattacaggcataagcaatggcgaacctttgcacagcaaacgcgataaagatggcaatcttattcttgacaacgaaggcgcaaaacaaccagtcgatttcgtgaatacgggcaataatcaccatgtggcaatttatcgcaaaccaaaattggataaaaataaccagcccgtactcgacgagaatggcgacatcgtctatgaactagacgaaaatgtagtttcgttctacgaagcaaccactcgcgccacgcttggtttgcccatcatcgacaaggattacaagaaagaggaaggctggcagttccagttcacaatgaagcagaacgaatattttgtattcccacgatacgatgccgacgggaatatgacgttcaacccattggagcacgatgaagcatggttcaagaatccagaaaactacgccgagataagtccaaatctgtttagagtgcagaagattgcaacgaaaaattatttctttaggcatcatttagaaacaacagttgcagaacctaaagaattaaaaggtattacatataaaccacaattgggacttaatggcataggcaaagatggaaatgctatcatcatcaaagtccgtgtaaatcatattgggcaaatagtttatgtgggtgaatattagtagataaggtgaattgttatgattaagcgcacactttgtttcagcaatccggcctatctgtcgctgaaaaacgcacagttggtcatcagactccccgatgcggagatgtccgaagatacagaacatgtcaggaccgaagcagtgaggaccatcccaatagaagatgtcgggtttgttgtgcttgataataagcagattactattactcaaggacttatggaggccttgcttgataataattgtgctttgattacttgcgacagctctcatctccctgtcggactgttgcttcctttatgtgggaatactcttcagaatgaaaggtttagaagccagatagaagcctcattgcctttgcaaaagcagctatggcagcagactatctcatctaaaatccgcaaccaagcggctgtgctgagtgagatgcgcggcatagatgctgcaaatatgttgaagtgggccgacgatgtgaggagtggcgacgccgacaacaaggaggcgagggctgcggtttattattggcagcacgctttcccgcaggttgaaggttttttgagagatagggaaggagtgccgccgaataatcttttgaactatggctatgcaattcttagggctgtagtggcaagggcgttggtttcgagcggcttgctcccaactttcggaatgcatcatcataacaggtataatgcgtactgccttgccgacgatgtgatggaaccctaccgtccatatatcgacaggcttgtgatgcagttgttcgacagcggttgtgactgtgctgtattaacgaaagaactgaagacgcagctgttgcaaatccctgtgcttgatgttgttatcaacgggaagcgcagcccgctcatgaatgcggttacaactacaacggcatctttgcagagatgttattcgggagagataaggaaaataatttatccggagatgtgatggaaaggttaagcgaatatcgtattatgtgggtaatggtgttttttgatttaccaacggagacaaagaaggagagaaaggcggcttccgatttccgtaagaagcttcagaatgatgggtttacaatgtttcaattctcaatttatcttcgacattgcagcagtatggagaatgcggaagttcatatcaagagggtgaagatgagccttcctgaatatggatcggttgggataatgtgtgttactgacaagcagttcgggagcatggagttgttttataatcgtaagacaagtaatccggggacgcctggccagcagttggagttgttttgaattggaaaaaagagtgaaattaaaaaaatcccagtcgtttgattgggatttttttaattctgaaacaacgtttaatttggtgattcacaatcagttatgtgtatcgtgttgtttcgactgcaaaagtacaaaaaatttgagagcaattcacaacttttgctttacatctgccaatattagcgcggttgtttcgactgcaaaagtacaaaaaatttgagagcaattcacaaccaaatttacattcatcaagccacataaaaagttgtttcgactgcaaaagtacaaaaaatttgagagcaattcacaacgatatacttctgacacacaaggaagcatgggttgtttcgactgcaaaagtacaaaaaatttgagagcaattcacaacgttcgtggttctttgccagaatttgattcagttgtttcgactgcaaaagtacaaaaaatttgagagcaattcacaacacaagttggcaatatgtttaacatacggcggttgtttcgactgcaaaagtacaaaaaatttgagagcaattcacaactgcgacactgaaaggagcccctttaaaagggttgtttcgactgcaaaagtacaaaaaatttgagagcaattcacaacgctccagcagcacagccttcttctattgcggttgtttcgactgcaaaagtacaaaaaatttgagagcaattcacaactacggccttacagcgtatgcgtatactcagttgtttcgactgcaaaagtacaaaaaatttgagagcaattcacaacaatgtcgtatcgcacagatagcgaagcagagttgtttcgactgcaaaagtacaaaaaatttgagagcaattcacaacatagtctttatcgtggttttctcagcccaagttgtttcgactgcaaaagtacaaaaaatttgagagcaattcacaacggttagttaattaggttagttaattaggtgttgtttcgactgcaaaagtacaaaaaatttgagagcaattcacaaccttgaggacagggtgtccgcattagaggaggttgtttcgactgcaaaagtacaaaaaatttgagagcaattcacaacacaaacctatttttaaacttaaaatcaatgttgtttcgactgcaaaagtacaaaaaatttgagagcaattcacaaccataaaatggagcaaaaaaatagtaaaattgttgtttcgactgcaaaagtacaaaaaatttgagagcaattcacaacgtgaaccgttagcaagggtgattgtgagttgttgtttcgactgcaaaagtacaaaaaatttgagagcaattcacaacggagtggtgagcctacaaagtcatggtatgttgtttcgactgcaaaagtacaaaaaatttgagagcaattcacaacggatacggacttagggttagtattgtagggttgtttcgactgcaaaagtacaaaaaatttgagagcaattcacaaccaggaaggcgggtatctctgcctccatcctgttgtttcgactgc

SEQ ID NO: 2345 - DNA, 17159 bp, synthetic construct
  misc_feature 1..17159: note = Synthetic
  source 1..17159: mol_type = other DNA
ttcaatgtctttttgaactccgcgcgttaatgcgcaaatcgtaggccatgtaactgctttagatatttcgactaccgaattaaaatcgccaggactcgaaacaggaaaaccagcttcaataacatcaacacccaaaacttccaaggcgcgtgctacttgaattttttcaactgtattcaattgacaaccgggcacttgttcaccatctcgcaaggtggtatcgaagataaataatctgtccataattatatttatttgactcctaccctcaaaaaggtataagagtattgttttgtttaaattttattttcccacttacttctttcaagagtttggggttaaaaaaaagcctctcgcaccgtagtgagaaaggctttatatatctattgtacatttacttacatacataccaaactcacttctacttgttttgcaagagaataataccgagtaaaatgatatgtaagaaattcttgttcattggttctttttctaaaagtgctgcaaagatactgcattttttcaaacttacaaattcaaactgaaatatttttgatattttttgttacgaagtgaaatatttttattgttattgcttacaaaagcccctatctttaaactattgcctcgcccactaatttaattattgttttgttataaacaagattggttcattttagttcattttgaggagtattttttgcttttcaaaataaagacacaagtaaatgaaatgatatcgatagatgaacatttttgtatgaattaaactcatttacaaactttgatttgcgaattaaatatcttcaagagttaggataattttaaagagaaactccccgatactattaagcatcggggagtttctatcgtatcttttgtcttgattcttggttcttgactctaagattattttgccatttcaatagccacagccacttgtacagtagctccaaccattgggttatttcccattcctaggaatcccatcatttccacgtgagctggaacagaagaagaacctgcgaactgagcatctccgtgcatacgtcccattgtgtccgtcataccataagaagctggacctgcacccatgttgtcagggtgaagagtacggcctgtaccaccacctgaagcaactgagaagtattttttgccaccttcgatacattcttttttatatgtaccagctactgggtgttggaaacgtgttgggttagttgagttacctgtgatagaaacatcaacaccttcagcacgcataatagctacgccttcgcgaacatcgtcagcaccgtaacattttactgctgcacgaattccgtcagaataagctttagtttttaccacattcaattcgcctgttgcataatcgaagtcggtttgaacataagtgaaaccgttgatacgtgagataatcattgcagcatcttttccaagaccgttaaggattacgcgcaatggttctttacgtactttgttggccgattgagcaataccgattgcaccttctgcagcagcaaatgattcgtgtcctgcaaggaaagcaaaacatttagtttcgttgcgaagcaacatggcagccaagttaccgtgaccaagacctactttgcgatcttcggctaccgaacctggtatacagaaagcttgcaaaccaataccaattgcttcggcagcatcagcagcgtttgtgcaaccttttttgatagcaatagcagcacctactacataagcccactttgcgttttcgaacgcgatgttttgaatactttcgcaaattgcgtaaggatcaatatttttggctgcacaaattgcttttgcctcgtcgatatctttgatatcatacatatttagagccgcattgactttatcgatacgacggtcataactttcaaataacataacttttttgaattaaaaattaataattaagaattaataattgagcgtttaatcagagtgtaataattaataatgcagttattttttatcattttcatttgttgaattaattattgaaataagaatcttttttagttctacacaatcagtgtgaatgctttcaaattctttttgtgtcaaataatctgtttcaactaataattcgagccaaaattcagtttcgttagtttctttgagtgcaatcttaagttttgaaataaaatcttttgtgctttgagcatatacagattctctaacatttgcaccaatacttgttccgcttcttagtaattgttttaaaatatgaaatcctttgaaccgaatttcaagatgttggtataatctgataattctgattccaaaggttttgcttttctcagcaattacgttttcggctttcataacttggaattattaattattaattcttaattattaattactcatgtcttgggtcgatatatttagcagcgttatcaaaacgaccgtatttgctggtcgattttttcaaagcttcgttagcgtctacaccttttttgatcaagtccatcattgggccaaaacgtacgaattcgtatccgcaagcttctccatcttcgtccaacgccatacggttgatataaccttctgccatttccaaataacgaacacctttagcatttgtgctaaacatagttccaacttgcgagcgcaagccttttcctaagtcttcaagtcctgctccgattggcaaaccaccttcagagaaagcagattgtgtgcgaccgtaaacaatttgaaggaataattcacgcattgcgacattgattgcatcacatactaagtcagtatttaaagcttcaaggatagtttttccggtaaggatttcggcagccattgcagctgagtgagtcatacctgagcaaccgattgtttcaaccaatgcctcttcgataataccatcttttacgttcaaagtcagtttacatgcaccttgttgaggagcacaccaacccacaccgtgagttaaacctgaaatatctttaatttcttttgatttcacccatttaccttcctcaggtatgggagctggtccatggttaggaccttttttcacaacacacatgtgttctacttcgtgcgaataaatcatacttttgttatttagttagtataaaaattagtttgattaataattcttgaaattcgaccgcaaaagtacactttttttaccgttttacaatacatttattaggcaaatatctttgaaaaacaaaactttttacacaataattgttagcacattaaatacatttcgaacaacaatggaaatcctgctgaaaaacaatcaatatgcttatctgtcaaacaattaaaattattctaaaacagttatttcaaagttctgattattgctgttcaagcatattttcacccgcagttaaagtattttttgaataagtcagaacacaaatcctttacagaaaatatatatcataacgattttattacaattagaatttgaaaattttgtcaactgtcacacttttacaagaattaggaagtagcatattaaatgatatacttttttatctttcgataataaattaaaaaaaatagtatggcttttgcgcttctgctatgtttttactgattttattactaattttgtcagccattacatgtcataattacagttaaacgttattgattatatgcaacactcggaaatacagacagttaaacaacgttttggaattattggtagttctgaattattgaacagagccattgatatcgctgtgcaagtagctccaacagatctttctgtgcttataacaggcgaaagtggcgtaggaaaagaaaacttccctcaaataattcaccattattcacatcgaaaacacggtccgtacatcgccgtaaattgcggtgcaatacccgaaggcacaattgactcagagctttttggtcacgaaaaaggatcgtttacaggtgcgcttgccgaccgaaaaggatattttgaagttgccgatggtggaacaatatttttggatgaggttggcgaattaccactttctacacaagtgcggcttttaagggttctggaggctggagaatttatcaaagtaggttcttctaaaacgcaaaaaacaaatgttagagttgttgctgctacaaatataaatatgccgcaagcaactcgagaaggaaaatttagagaagatttattttaccgactcaacactgtgccaattgcagtacctgcgttacgcgacagaaaggaagatattgtattgctatttaggaagtttgcatccgattttgctgaaaaataccgtatgcctgcaataaaattatccgaaaatgcaaaagtattattaaccaattattactggaatggaaacgttcgtcagttaaaaaatattactgaacaaatatctgtaatagagcaacaaagagaaatttcatcggcactactgagcatttacctgccaaaagatgacaatgacagattacctgcattgttctcaaattctggctgcgaaaataaatccttcaatagcgaacgtgagattctttatcaagttctttttgatatgaaaaaagacatgaatgatttgaaaaaactggttcacgacataatgaatagtcaacaacccgaaattaaatctaccgaatcactctaccccaactcttatatagctcataatgagccgagattcaacacatcaaatacagaggttgagtatattccagaaacaaagttgagagaaactaaaatatataaagatattatagacgacgattcatttcaggaaacacaagattatcaagaaattgaaacctccaatccaccgatgtcgttggaagaaatggaaaaacaaatgataaaaagagctcttttgaaataccatggcaaaagaaaagctgctgcagatgaattagtgatttcggaacgaacactttatcgaaaaataaaagaatatggtattgaataagaaatatttatgaccaaaaataaaatgaaaaataatcgtttcaatgcagcttctgttttttttataatcattgcattaggctttgcctcatgtaccatttcctataaatttaacggttcgtcaattgattataccaaaacaaaaactcttgcaatatctgattttccaaataccgccgaacttatttatcctccactagcacaagaatttagtgaaaaattgcgtgacacctacactaagcagacaagattgaaactgctaaaaaaaggaggcgacatgaatattgaaggtgaaattgtgggctacgttttgactcctatggccattgccgccgattcatattctgccgaaactaagttgacaataacaattaaagtccgtttttcgaacaataaaaatcctgaagatgattttgaaaagacctattctgcataccagactttcgatagtagccgaatgctcagcgatgtacaagatgaattaatgaaaataatgattacagaaattgctgataatatttataatgacacagttgcaaaatggtagtctttttaattaagaattaagaattaagaattaagaattaagaattaagaattatgactgattgaagtatttttagcttttcataaaacgacaaatacaatttatcaaaacacattcaaataaccatacaaaaaggttcagaacaccttatatattattgatttcaaacctatatgactcaaaaagaatttattatactgataaagaaccctgaaaatataggtaatcaacatttatccgacctaaaggaaatgattgagcaatttccgtattttgcacctgcacgcattttgtatttaaaattattacaacaatcaaacagtttacattttccagtaaacttaaaatcagccgcaatatattgttctagtcgcagatggttgtattattatctatatcccgaaaaattaacttccaaagaaccatatcgccccgaaagaattggaaaatcggctggcgattatttcgacatgttggatgtagtagaaaatgctggtggtaatgcaaagcaaactttaaaaaacttggcagagcgactcaaattagctcgagtaatggttgttgaaacaggaagcaaaacctcaactattaacactcaaattatagaagacgaaaaaataattaaaccagaagtaaatttaccattagaaattaaaccagaaataagaccaattcaatccgattactttttaacagaagaacttgttattagtgaacaaaatgtcaaagaattagtttcaaaaaagaaatattccgatgcaattgttattttaaagcaattaaatttgaataatccaaaaaaaagtgtttactttgcagaccaaattagatttttggaaaaagttattgcaaactcaaaaaaataaatcatattatgtacgttcttcttactattttaattgtaattgcatcagtattgctaaccttattggtattagttcaaaactcaaaaggtggcggtttagcagcaggcttttcgtcttcaaaccaaattatgggtgttcgcaaaacaaccgattttcttgaaaaagcaacctggggattagtgatatttgttgtagtactttcaattgctacagttggtttcagaaatactgaacctacaaattctaacgaatcggcaattaagggacaaattcaaaatgccaaacaaactgagcctggcgtagtagcaccaaactttggcgaaaagccagaagctgctaaagcaccagctgcaccagtaaaaaaataattttgtagaaatatatcaaatagcgtatcaaattatttttgatacgctattttttttagcttacaaatgaaaaatcaatacgcttaagatattttaaaacttgatgaaacttggtgttttgtgctacacactggcaattattttcttgtcactaaacaccttgtgattatctaacacaaaaactcaacaaataacaaagtaaatctctgttaaatatcaaagatttagctaagaaagtttactacaacaatttacaaatttcaaataaataaaaaaaatgcttcaaatagacgactcaattataagcctagatttattggacgaatgttttgtatgcgatttagcaacctgtaaaggtgcttgttgcatcgaaggagatgatggcgcaccacttgaaattgaagaggtaaaaatcattgaaagcatcctacccttaatttgggccgacttaactcatgaatccaaagcagtaattcgccgccaaggagtttcatatattgattccgacaatgaacctgttacatcacttgtaaatggcgacgaatgtgtttttacatacacagatgaaaatggacaatgcaaatgtgcaattgagaaagcatttcgagaaggaaaaactgatttttacaaaccaatttcttgtcatttatatcccgtaaggctacaaaaatacaacgaatatattgcagttaattatcatcgttggagtgtttgtaaatgcgctcgcactttgggtggaaatttaaaagtacctgtatacatattccttaaggaaccactgatacgaaaatttggggagaattggtatacccagcttgaaatagcagatgccgaattaaaaaaacaaaaaactctatgacaaaccaaaatgtaaaggtagaaatcattaccattggcgatgaaattttaattggacagatagtggacaccaactcggcgtggatggcaaccgaactaaacaaagctggatttgaagtggcacaaataacttcggtgcacgataatgccaaacacattatagaggcattggatctagctcaaaatcgggcagatattattctttttacaggtggtattggtccaactaacgatgacattactaagcaaactttatgcgcatatttcaatacaaaattggtatttgacccctctgttttagaaaacattgaattattatttgccaatcgccccaattttgcaatgaatgatttgacccgagcacaagctatggtgcccgaaaactgcactcttattcaaaacgcagtaggaacagctccaatcacttggttcgaaaaaaacggaaaagtaattgtgtcgatgcctggagtaccatccgaaatgaaaagagccatgagcatggaaataataccacggcttcaaaacaagtttacaacagctgtcattttacataaaactgttcaggtctatggctttaccgaatcggcattagcaattaaaatatctgactgggaaaacaacttaccagaaaacatcttattggcttatctacccaatttaagtattgtaaaactacgactgagtggaatttcggaaaacatggttgaattagaattcattatgaatcaacagattgaccttttaagtcaactgcttggaaatacaattattgcttttgaagatataccattggaacaattgatagcaaataagcttattgaaaagaaccttaaaattgcaacagccgaaagttgtacgggtggaaatatagcacatcagtttacttcacttgccggaagctcagctttttttgaaggatcggtagttgcttactccaactcagtaaaagaaaatttattgcaagtttcatcaatcgatttagaagaaaatggagcagtaagtcaaattatagttgagcaaatggctcaaggagtacgcaaattattaaaagtagatgtttcattggctatttctggaattgctggcccaactggtgggactaacgaaaaacctgtcggaacagtctggatttcagcttgttcaaaagaaagtatcatttctaaagagtatcgttttggcaaacaaagaaacgaaaatatacttagagcaagccaagcagcattactcttattgaaagaaataatttgacataaaacactatttataagatacttaaatcacacatatcgaatttattcatattaaataaaatttatagctcaaaatgcttgcataattgaaaaacaaagtgtacttttgcaaactgtttttgagaaaaaaagtaaacaataaaaagatatagaaatgtcaaagatttgtcaaattaccggaaaaaaagcaatggtaggaaacaacgtttcacactctaaacgtcgtaccaaaagaacttttgaagtaaacttgtttacaaagaaattctattgggtagaacaagatacctggattagcttgaaagtttctgcaaatggtctacgtaccatcaataaagttggattagatgctgccattaaaaaagcgtcagataaaggttatttatacgcataatttaggagggaaaccacaatggcaaaaaaatcgaaagaagcaagagtccaagtaattttggaatgtaccgagcataaagatagcggtatggcaggtacatcgcgttacattactgtaaaaaacagaaaaaacacacccgcacgtatggagttgaaaaaatacaacccagttttgaaaaaagtaactgttcataaagaaattaaataatatttgaatcatggctaagaaagcggttgcatctctccaaaaaggagaaggacgttcgttcgcaaaagttatcaaaatggtgatttcaccaaaaactggtgcttatgtgttccaagaagaaattgtacacaacgataaagtaaaagattatttcgcaaaataaatttattacattatagtaaattaaaaaaatcctctcattgacaaaatgagaggatttttttattgctataaatcaaacaatataacattattaaaacgtcggaagtcaaaataattctataatggttttgtctgaattcatcaattacaaccaatagcagtaaatgctttgatatttcattttacaaacattggattatatgtttgtgagtcaagctttcagttaattaaaaatataacttaaaagatgcaaaaaggcgagttgccccgccttaaatgttttcacaacggaataatccttattgtgatttgcttcaaaaattgtactgcaaagatatatatttatttttactccacaacacttgttttatttaattttttaaattaactttatagccgattaaaaaaccatttaaaataagtgattatgaagaagatattaggtttggatttaggcacaaatagtattggttgggcactggtgaatgagggggagaacgagaatgagcaatcaacgataataaaagttggtgtaagggtaaatccattaacagtggacgaacaaacaaactttgaaaaaggaaaaagtataacaacaaatgcagatagaacattaaaacgttctggacgcagaaatctacagcgcttcaagcttagaaaagaaaacttaatagaaattctaactacaaacggctggataagctcagatactattctttcggaaaatggaaataaaaccacctttgagacttatcgtttgagggcgaaagctgtaacagaggaaattagtttagaagaatttgccagagttctattaatgattaatagcaaacgtggctataaaagcagtagaaaagcaaaatcgcaagacgaaggacagttgattgacggaatggaggttgcaaaaaacctctatgagaatgcaataacgccaggacagtttgtgctccaaatcttaaaagcaggcaagaaatacatacctgatttttatcgttcggatttacatgctgaattcgataaagtttttgacaaacaaataacttaccatcctgactttcttaatgaagaactaaaagaagaattgcgagctaaaaaacgtgatgctatttgggctatctgcgctaaaaaattcaaagaaaatggtttcgaattggtcggcacaaaaagaaaaggaaacactgccgaacagaaggtggaaaattacgtttggcgagcaaaagcactaaccgaaaaattagaattggaagaatttgtaatcgtgttacaacaaatcaactctcaaataaacagttccagtggttatcttgggtcgataagtgacagaagcaaggaactttatttcaacaaacaaacagttgggcaaaatttaatggctcaattagacgcaaacccacacacgaaattaaaaaatcaagtattttatcgtcaggattatttagacgagttcgaaaaactatggtcaacacaatctgtattccacaatcaacttactgctgaattaaaagaagaaattagagatgtagtgatattctaccaacgaaagcttaaaagtcagaaagggcttattagcatttgtgaattcgagaacagacaagtagaggttgaaattgaaggaaaaaagaaaacaaaaacggtaggcatgaaagtttgcccaaaatcgtcaccactattccaagagtttaaaatatggcaagtgcttaacaacatacaagttattgacaagtcagacacaaaacattttttagagcaagaagaaaaagaattactgtacgccgaactgagcataaaagacaaaatatcgaaaacagatgcactcaagttactttataaaaatccaaaagaactggatttaaactttaaagatattgagggtaacagaactcaagcagccttattcaaggtatatcaaagaataatagaattgagcggacatggcgaatatgatttcagcaaactacctgcatctgagacattggaaatagtacgttcaatttttagcggtcttaattacaacactgacattctcaatttcgattcatctttagagggaaaagcatttgagaatcaagcactataccaactatggcatttactatattcatttgaaggtgacgactctataagcggcaacgacaagctggttgcgaaactcactgagctatatggttttgaaaaagaatatgccaatatgcttgccaatataaacttccaagatgactatggcagtttgagtacaaaggctatgcgaaaaatacttccacatttaaaagaaggtttttcttatggtggtaatagcgaaagaccagaagaaccaagcgcatgtgagtatgccggttatcgacattcaaaaagttcgctaacccgagaggaacttgacaataaagtgctgaaagacaaattagaaattctacctaaaaatagcctacgcaatcctgtagtggaaaagattctgaaccaaatgattaatgtggtaaatgcgagcatagaagcgtatggtaaacctgatgaaataagaattgaattggctcgagaactaaaaaagagtgctaaagaaagagaagatgctactgcagccataagcaaaacaactgccgaacatgaagcacacagggtaattctacgcaaagaattcgggcttaccaatgttagccgaaacgacataattcgctacaagctatataaagaattagaatttaccggctacaaaaccttatattcaggaacttacatccctcaagaaaagctattcagcaaagaatttgatattgagcatatcataccgcaatctcgcttattcgacgattctttttcgaataaaacactggaactacgcagtataaatattgagaaaggtaatgacactgcaattgattttattttgaagaagtacaacgaagatgggaacacggcatttttaggcagaattggagaaatgtacaaagcgggaaaattatcgaaaaccaagtataataagcttaagatgaagggcgaagatattccgagcgattttataaatcgtgatctaagggacacccaatacatcgcaaagaaagccaaaaacatattggaagaacttgtaaaagaagtggtttcgactacaggatcagttacagaccgtttgcgtgaagattggcagttgattgacgttatgcaggagctgaattgggataaatatgaaaaacaaggtttgactgaagttatccaaaaccgcgatggacatagaattaaacgtattaaagactggacaaaacgaaacgaccatcggcaccatgccatggatgcattaacgattgcttttactaaacgaagtcatattcaatacctcaacaatttgaatgcgcgaagcgacaaagctggtagcatttatggcatcgaacaaaaagaactttacagagatgataaaggtaaactgcgttttagaatgcccttagagaactttagaagcgacgcaaaaaagcacttagagaatacgttagtatcaattaaagccagaaataaggttgccacaataaacataaatgtttcaaaaaaacaaaatggtgtaaataaaaaaatacaactaacaccacgcgggcaattacatttagaaaccgtatatgggagcataaaacaatatgtaactaaagaagaaaaggtaaatgctagcttaacaaaggaacaaatagagaaagtggcaaaaaaatcatatcgcgaagcacttttagcacgattagcagaatttgataacgatccaaaaaaagcatttactggcaaaaatagtttagacaaaaacccggtatttatagatgaggcacgtaccacaaaagtacctgaaaaaataaaaacggttacaacagaaacagtttacaccatacgcaaagatatatctcccgatttaaaaattgagaaagttattgatgttaacataagaaagattctcgatggcagacttaatgagtttggaggtgacagcaaaaaagcattcacaaatctggatgagaatccaatttggctaaacaaagaaaaaggtattgccattaaacgggttacaataacagggattagcaatgccgtatcgctccacgaaaaacgagataaagacggaaagttgatattagataaggatggaaataagcaacctatagactttgttaatacagggaacaatcaccacgttgctatttaccgtttgccagttttagataaagttgggctagctgtttacgatgaagaaaacaatcagaaatatgaattgcaagaaaatgtaatctcattctttgaagctaccacacgagtgaatcagggtttgcccattatagacaaagaatacagaaaatcggaaggatggcaatttctattcagtatgaaacagaatgaatactttgtttttccaaaaatagaaaaacgcgaaaaagtaaacgaagaaaccggtgaaataactgaagaagaaattatcactttcaatcctaaggaaatagatttgctgaacccagataattatcatttgattagtccaaatttatttagggtacagaaatttggttctttattatctggtttttggtttagacatcatttagaaactaaaattgacactgataaatctctaaagggaataacatacaaagttattcaaagcacaaaaaatttagaaccaattgtaaaagtacgcgttaaccatatcggtcaaatagttacagtgggtgaatattaaaacattatttattgctcactcgcttaataaatatgaagttataggtcataaaaacaacttctatggaaaagttaattgcaaatcaaagttaccatatcttcaatcacgccaatgggtttgaaaacgtatttaatgagcgtgaaaattatcgttatttcttggaaaagtataaggaatatattgatcctattgccgaaacgtactcttattgcctgatgcccaatcattttcatttggtggtgcggatgcgtaaacgggaggtaatagaggagattattagcagaaacaacttttccaaagttgaaaaaaactttggaaaagttgttagcaacgaagtgatagaaagatatttatccaagcagttttccaatctatttagtagttatacgcagtcatacaataaatacctgaaacgcagaggttcggtttttataaaaaactttaaacgcgatgcgattaaggacaaagagcattttctgaacgaaataatgtacacacaccgaaaccctattcatcatggttttcgaaccgaatataatgattgggaattttgctcctactacgatattgttaatggcaaaagtgaattggtggaagtggataaattgctaaaagtatttgaaggtaaagaccattttattgctttgcatagtgaatacttggaagactggaaatgtaaatttatttgaatcgttttttttgtacaccttttccaaagtttctttcagcttttccaaagtttctttcaacttttccaaagtttctttcaacattggaaaagctgaaaaagaagaaaacaaaataaatctaccaccatgattaaacgtaccctttattttggcaatccagcgtacttaagtttgcgcaattcgcaactggtcattcatttgcccgacgctaacggtatggacgacagaacaggtaacaacactgtacctatcgaagacattggaattgtggtgcttgacaacaagcaaataactatcaccactggacttatggaagctttactagcgaataatagcgcattgataacctgtgacagtagtagaatgccagtgggtttaatgcttccacttaacggaaatacaactcagagcgaacggtttcaagaccagattaatgcttcgctcccacttcaaaaacagctttggcaacaaaccattcagtgtaaaattgcaaatcaagcccaactgttgcaatcttcacagggtgtggtagtaaaaaacatgttggcttgggtaggcgaagtaagaagcggcgacagcgataatatggaagccagagctgcagcttattattggaaaaatatgtttcctaacattgataattttacaaggggacgtgaaggaatagcgcccaacaatttgctcaattacggttatgcaatattacgcgcagtggtggctcggtcgcttgtaggaagtggattattacccacatttggcatacatcatcacaacaaatacaatgcatattgtttggccgacgatataatggaaccttaccgaccgtttgtagataaactggtattagaaattattgccagtggcgatgacatttccgaactatctaaaaccataaaagccaaattattaggcataccagtattggacgttttcatcaacaatcaacggagtccgctaatgattgctgtgggtcaaaccaccgcttcacttgccaaatgttatgcaggtgaattgcgcaaaataacatatccaagttttattgactaattttccaaaaaatttaattgactactttttaaaagtttctttcaactttggaaaagttgtctattaaataaaaaaaaatgcaacgttttagcgaatatagaattatgtgggtattggtattgttcgacctgccaaccgaaaccaaaaaggagaagaaggcatataccgattttcgcaagagactggtaaacgatggttttaccatgtttcagttctctatctacttgcgccactgccccagccgcgaaaatgccgatgtgcatatcaaacgagtcaaaaacgccttacctgagtttggacaagtgggagttttgtgtattaccgacaaacaatttggacaaatggaactttttcaaggacgtaaaataaaatctgccaacgctccttgccaacaactggaattattttaaattgcaatattatattaatactagaaacaaaaaacccgctcaatgagcgggtttccaatttgataaacaacgattttttaatttgaatttttcgcttcaactcattgacattgatacaattacaaacaatcagttgtttatcaatgtcaaagatacaatttttgaaagcaaatcacaactttcaatgtatgaagccttgcttcaatttgttgtttatcaatgtcaaagatacaatttttgaaagcaaatcacaactatttttcagatgcattatttcttataaatgttgtttatcaaggtcaaagatacaatttttgaaagcaaatcacaactgcagtacttcgcggtgaagttctgcaaactttgtttatcaatgtcaaagatacaatttttgaaagcaaatcacaaccaaaatcgtccttcggttggtgctgatcgtgttgtttatcaatgtcaaagatacaatttttgaaagcaaatcacaacaatttaatggaaggaggcgcacaatgaaagttgtttatcaatgtcaaagatacaatttttgaaagcaaatcacaactgtggtggagctggggtattaagggcgtaagttgtttatcaatgtcaaagatacaatttttgaaagcaaatcacaaccaaaaattggttacaaatatacttgaccctgttgtttatcaatgtcaaagatacaatttttgaaagcaaatcacaactataaatgtcccacgaatgatttatcaatgt

SEQ ID NO: 2346 - DNA, 17086 bp, synthetic construct
  misc_feature 1..17086: note = Synthetic
  source 1..17086: mol_type = other DNA
atttcgactgcaaaattacaaataattctcaattctcaattcttaattcttaattttttattacctttgcaggaagaatttttaatatagacaaaagaatgatttcatttgcattgagtttagtagcgctaatattaggctacctcttctatggacgactggtggagaagattttccaccctgatgatcgtaagacgccagcagtggctaaggctgatggtttggattacattgtgcttccgaattggaaggttttcatgattcagtttctgaacattgcaggaacgggtcctatctttggtgccatcatgggagccaagtttggtcctgttgcctatttgtggattgtgtttggctgtatctttgcaggagccactcatgactatctgtcaggaatgctgtcgatgcgaaacgacggcgtcggcttacccgaattagtgggtaagtatctgggtgaaaaagtaaagactatcgcgctggttttcacggtgttattgcttctcatggtaggaactgttttcgtttattcgccagcagagatacttcattctttaggaggtgacaccttgatgtggatatgtattatctttgcctactatatcattgcaacgatgctgcctatcgacaagattatcggtaagatttatcccttgtttgccatctctcttttgtttatggctgcagccttgatgatagtcctgcttgttaaatggcctcagttgcctgagttgtggactcacctttataatatgggagcagaagcacagcccgagaaatggacggatgccatcttcccagccttgttcattaccattgcctgtggcgcaatcagtggttttcatgccacacaaagtcctctgatggcacgctgtgtgaagtcagagcggatgggacgccccattttttacggttcgatgattacggaaggtgtcgtagccttgatttgggctactgtagcctcttggttcttctatggaagtcctgctcccggctatgaactgattgccggtgctgataagggtttctatacctcggctcctgctgttgtcaaccttgtatgtaacgattggttgggtgttgtcggtgctgttttggctatgttaggcgtggtggcagctccgattaccagtggagatactgcattccgttccagtcgcttgattgtggcagagtggttgaaactcaatcagcgtcctatcgtaaaccgtttctatatctgtattccaatgtttgcagtttcaatagcaatgctgttctggcagattcagaatcctgacggctttaacacgatatggcagtatttcggatggtctaaccaggcgctgtcagtattcacactatggaccatcaccgtttatctggtgcagaaaaagaaaccattcatcatcacgcttattcccgccctgtttatgacaacggtatgtgccaccttcctctttgtctcaaagcaggcattccacctgcctctgtcggtaggctatcccttgggtggtgtatgtttagtggctgccattgtgtggttctgcgtgtggtatcgtaagtatcagaaaaatcatcaataattttttatagctatgaagaaagtatttgtattgttagtagttttggctacggcattgaccgctaatgcacagtttgaaaagggtaaggcttatcttggtgcatccctctctgggtttgacatcagcagccaggcaaagaaattccattttggagttaacgtaaaggcaggttatctgtttatggacaacctgatggctacggcgcaagtcggttatgaccatttggatgatactcccgatgcatttacattaggtgcaggagcccgttattatatcattcagaacggtctttatctgggtgcttctctgaagttccatcgttcggatggtgtcagcgacttccgtccaggtgtgcaggtgggctatgctttctttatcactcgtacggtgactatcgaacccgagctttacttcgacatctcaaccaagaagttcgagaattctgcctttggccttggcattggtgtcggtgtttatttgttcaaagaccaatataaattaaagaaataagcttatgttaagtgtagaagaattagttgaccgcctgatagacctttcctttgctgaggatattggtgatggcgaccataccacattatgctgtattcctgaggatgcaatgggcaagtcgcacctgctcatcaaggaagacggtattcttgccggtgttgaggtggcaaaggaagtgttccgtcgtttcgaccccgacatgaaggttgaggttctgattgaagatggtgcaaaggtgaagaagggcgatatagccatgattgttaccggtcgtgtacgttcgctgttgcagacggagcgcctgatgctgaacatcatgcagcgcatgagtggtattgccacgatgacgaatcgctatgtggagcgtctgaagggaacccatacccgaattttggacactcgcaagacgacaccgggaatgcgtatgctggagaagcaggctgtgaagattggaggtggcgtgaatcaccgcatcggtttgttcgatatgattctgttgaaagacaaccacatcgatttcgcaggtggtattgtgaatgccattgaccgctgccaccattatctgaaagagaaagggctcgacctgaagatagaaatagaggtacgctcatttgacgaactgcagcaggtgcttgaccacggaggcgttaatcgcatcatgctcgacaatttctccgtacccgatacgaagaaagccgtcgatatcatagcaggtcgctacgagacggagtcgagtgggggtattaccttcgataccatccgtgactatgcagaacagggtgtcgactttatttctgtaggtgctttgactcattccgtcaagggacttgatatgagtttcaaggcatgctgaacaggacactgtttgctgttggcttttggcttttggcttttggcgcttctgccaaatccaatgtgacttatcactcgccagtggattacaaaatcacactggcgggtaattttggtgagccacgtcccaatcactttcacggcggcttggacatcaagaccgataatgtggaaggcaaacatatctattcgataggcgacggctatgtgagccgactgaccgttggtatcagcggctttggcaatgccgtctatgtcacccatcctgaaggctataccagcatctattgtcatttgcagcgcttttcacccaaactggaacgtatggtgcatcgcacaggaaagcgcgacgaacagatagatttgcatttctctgcaaccgactttcccgtttctcaaggacagttgatagcgctgagcggtaacacaggtcatagtaccggtccgcatctccacttggagattcacgatacacgtacttgggacatgatggacccactcgatttccttgcaccttttgtcaacgactcagtggcacctcaggcccacagcgtgatggtctatcccatagagggcgagggtgtgttcaatggcggttccggaaagcagaccttcgggtttacgaacaaccgcattgagaaagagctgacagcctggggtaaggtgggcttcggtctttgggctgacgactatatgcagggggtgtataatcactacggcatccgtgaaaccatcctgcaggtcgatgggcgtgaagtgttccgcgccaatgtgggacgaatccccgtctatagcaaccgtcaggtgaatgcctggggcgactatgaccactggctgcataataagacgtggtatatgcgctcgtatatccccgaaggtgtcaccctgcctattcttcaagccgattcgcttggcggtgtggtagacttctctgaggagcgcccttatcagttgcgctatatcttgcgcgacttcatgggtaatgagtcacgatacgagtttaccgtcagaggtgagaagagtgctattgcgccccaaaaccggcaacggatgaatgccggttacgaccgtctgtcgctgatatcccttccgggaatgcaactcacgataccggcaggcatgatgcaaggtcgtatggagattcgtccgaaggtggagcagggcagtctgtcgccccgctacacatttgcacctcgtgcctgtccactgttcggttgggcagaactttgcatcgccattcctgaaggtgtggaacccagccgtctctatattgacagcggaggccacgatatgggaggcaccgtagaagggggctggatagtgacacgcatccgtgaactgggtgccagttatgaattgaaaaccaaaggaaaccatgaataagagaatctttttattatcggctgttagtacgatagtattttcagcctttgcctgcaccaactttattgtaggcaagaaagcgagtaccgacggttccgtgatttgcagctataatgctgactcctacggagcctatatgcctctttatcactatgctgccgccaagcaccagaagggcgacaaacgccagatttatgagtgggatacgaataagtatctcggtgagattgacgaggcattggaaacttataatgtagtgggtaatatcaacgagtggcaggtcactattggcgagactacctatggcggtcgcgaagagatggttgactctacgggtattatcgactacggttcgctgatttacatcgcccttcagcgttcgaagtcggcacgcgaggccatccaggtgatgacgtcgctggtggagaagtatggctattgctccgagggcgagaccttcacgatttgcgaccctcacgaggcttggattatggagatgcagggctgtggtcctgatcgcagcgtcagcaaggagcgagtggtctgggtggctcagcgcattcccgacgaagccatctgtgctcatgccaatcagagccgtatcggcaagttcgatatgaaggataagcagaacgtgctctattcgaagaatgttgttaagtttgcccgtcagaagggttggttcaacggcaaggacgaggacttcgcctggaagtgggcttatgcagctcccgatttctcaggtcgccgcatctgtgatgcccgtgcttggagtttcttcaatcgtcacaagaagggcatggaccgctatctgccttgggttcttggcattgagaaggatgccgaggatatgccgctatgggtagtgcccgataagaaggtgagcgtcgaggatgtgatgaatgcaatgcgcgatcacttcgagggtacgccgatggagattgactctacggatatcggcggcggtatctggcagatgccttatcgccccacgcctttgttctttaatgtggatggcaagaaatattttaacgagcgtcccgtatctacccagcagtcggctttcacgtttgtgtcgcagatgcgttcgtggctgcctcgtgaggtgggtggttgcttctggttcggcaacgacgatgccaacatgatagcctatgtgcccatctattgctcgatgacccgcaggcctgagtgcttcaatgctcccggggctgacgatatcacgttctccgacaagagtgcctactgggtgtgcaactgggtgagcaatatggtttatccccgttattcagtgatgttccccgacttgcagcaagtgcgcgattcgttgcagaaggcctatttcgcccagcagcctgccattgaggcgaaggcaaagaccatgtcggctgtggagatgcagcagtatctcaacgactacagtgtggctcaggctcagggtatgctggcgcgttggaagcagttggcaaccttcctgattgtgcgtcacaacgatatggctcgtcgccccgttgacgggcagggcaggttcaagcgtggcaaacacggcttgggtgctaccgttgagcgtccgggttatccgtcgccttatgctcgccgtttggtgaacgaggcaggtcagcgttaccttcacccttaggaagcagggatgataacagaaaaaagaagtggagctcaaacgagttccactttattgatgtcctgttccatttcgcagtagtggcaggtcagtatgccgtccaccacgtggaagtgggtttgcatcggttcgttgttggtgatgcatttgggattgttgcatttcacgatgccgcgtatctcgtcgggggtgcggacggttttcttctccaccacctcgaaatcgtggatgatgttgagcaccacgttgggcgaaaccaccgagagccgtgatatttcttcgtcggtaaaccatttgttctcaaccttgatgaatcctttcttcccgagtttcttcgaagggaagttatagccgatggtgacgggtgttcccaattctgccagtttcagcagctgtgccacctgataggttttctccgagggtatgtggtcaataacggtgccgttttcgatagcggcaaccagcatctgattcttgttcatcgtataatggttttatcgtttttaacttcgtctaaactgatgccgagcacgtcgcagaagatggcttcgcgggcaaagagtccgttgcctgcctgctggatgtagtaggcgtgaggattgtcgtcaacgtcgtaggctatctcgttgacgcgtggcagtgggtgcagaatcttcatgttgggcttagccagtcgcagcatgtcgttgttcaggatataaacgttcttgacgcgttcatattccatgaggtccgagaatcgttccttctgcacacgtgtcatatagaggatgtcggcgtcggcaatcactttctcgttgaatgcggtatgctcctggaatttgatgccgtgctctttgcaatacagtttgtattcgttgggcatagccagttccttgggcgctacaaagtggaatgtggggttgaagtggcgcatagccatcagcagcgagtgtacggtgcgcccgtatttcaagtcgcccaccaggtaaatattcagattgtcgagtgtgccctgcgtcttgtagatgctatacaggtcgagcatacactgtgacgggtgctggtgagctccgtcgccggcattgacgatgggcacgtcggtcacttccgaagcatactgtgcagcaccctcgatgaagtgtcgcatgacgatgacgtcggcatagttagccaccatcgatatggtatccttcagtgtctcgcccttggtgccgctggtgattttcgggtcggcaaatcctatgacgcgtgctcccagtcggttggcagcggtttcgaaactgagtcgtgttcgtgttgacggttcaaagaacaatgttgccaccactttgcctttcagcagttcgcggttggggtgttgttcaaactcgtgtgccatctcaatcatatagagaatcttctcgcgagtgaggtcggcgatggttacaaagtcatgcttttccatattgtgctttttgatttttccgactgcgaaattacaactaattgagcagaataccaaacgaattgcctatttttttttattgaccattgaccattgaccttttaaacttctcactatgaactatgaactatgaactatgaactcttcacttttcacttttcactattcactattacctgaaattgaccattgtctaacatcaatagttgaagttggcatcgatgacggtgttcaccaattcctgtccgtgagtatccgtcttgcccgttgcaagcagggctgcaccatagcttgccataatgctagtatcggtgatgtagtcatgtgtccagcgtttcttgctgccgaaccactccagcactttgttgacagcagcttttactccacccacaatgattttacaggggatggagccaatgacgctgaaacctgcaaatcctaaaagacgtcctgcgggtacacgcttaagggttgtctcgcctgcgtagtcctgcaagatgatggagcgggcacccttgttcttcttgatgctctcgataaacttcgggtgaaccatgttggcacaagagacgtagtcgggaatgaatttcatctcgaatttgtaggagttggcagcattataacaccaatatatcttgtcgcgattggcgacagactcgctgagcttttcgtcaaaggctttgcccttcttttctgcaaagtcttttatttccatattcttcggacactcatactcgttctgttccgggtagtccaccttttcgccggtagtagccaccagcgtcgtaccacggtgcaaggctatatatccgcgcaggtttccatagcgtgcatcgtcgacagcccacttgtcaggctggttctccaaaatgacgagagccttgccgcgcaggtcgcccattttcatgtcgggcttgaatttggccagcagtcctttattcagcaacttttctgtcaccatttggaccgtctctttggtcgtcgcctccatatccagcgtcgtgccgtcgtaattaataggtgctatttgtcccaaccagttcatcgtttcacgctggtgcttgttcttgccaatacttatatcgggagcctcacctttgattatcaggatgagtccttcgttcgggttgtccttcagcactttggcgatgtcgtccagagcatcaccgaaagctatggcacagtcaatcatggagtgatagatgaagttaccggtgttatgataacgggtgcgtatgtcgaaggctcttatgccattctcaaactgcgttttccaattatccatctgcgtcttggcaatggtaagcatccaaggattcttcaatccgaaggtaccagaatcatgcgtacccggtatcatcatcttgcacaccatggtttcgttattgatttcattcatccaagtctttgggttgtgaccaccgggagttttacctgctgcacgtctgccgatatttgccgacattgcttcagggttttctcccagctcttcatattttaagaattcatcaatacactcacgggccattttcttattgagcttactctcatcggtatcgccacgttggaaaacaacggtgcccatatattcttgttccggttccacatcttcgttggtagccagcagcgccaacacgccgtcttggaagacaaagcgaagagtatctacaacaagctgctggtcgtagctgccattatcgctgagtcgctccatgctctcctggtcgaaagtcacctctattcttcccaccttcatgttctgataggtctcataggtcagcatgcggtacacaccattcacggggaaatcctgatagcagtcacctttgtaatcatagtagttgtaggccatctccaccttaccgtctttcttgaattcaacgtcaaatgtggccaggtcaactccatctacatcgtcagcatcgcacgaccagatgcctatcagttcgtcaggcaccttctcttcatgcgtcaccttcgactccgtgttatcctcattaacacatgcagtatgcacggcaacagcaaaacaacccagcaaggctgttgccaaaacgtgaaaaatcttgtttgttctcataatccttattaatagtttgctatataaatccatcttatttatttggtatgcaaagatacgattaagcgagcaaaaaaacaaaaaaaacttgattattttgttataccgagcaaaaatatcttcgacaaagtcagaggtaaccagtttcacttgaccattgaccatttaaacttttgatgttcatatcgagcctgctctgaacttcttttatgaaggatgacccaaagatgatacgaagtaaacagctctttcccatactcttgccatactgttgagtaagcttaagagcagcttaggagcagcctaggagcagcttaggagcagcctaggagcaggcaaggagcaggctaaagtatggcaaggagcagattttcagtcatatccaattctataaaacgcaaaaagtccaccgttaaaggacgatggaccggaacctaatgttttcacaacggaataatccttattgtgatttgctaaaaattagtgctgcaaagataaaaaaagaaatatgtacttttgtagcaaaataactaaaaatacgatagattatgaagaaaattctaggtctagatttaggcacgaccagtataggatgggctcttgttaacgaaaaagagaatgacaacgagaaatcagagattatacgtcttggagtaagagttaatccgctaacagttgacgaaaaaacaaattttgaaaaaggcaagtctattactacaaatgcagatagacgcatgaagcgcagcatgcatcgcaatcttcagagatataagttgcgccgaaagaatcttgtagaatgccttttggcacatcatataattaaagatgatacacccttgttcgaattagggaataataccacattccaaacatatagagcaagagcaaaggccgtaactgaagagatttcgttagaagattttgctcgtgtcttattgatgataaataaaaaacgaggctataaaagcagtcgcaaggtgaaagatggtgaagaaggagaattgattgacggcatggagattgccaaaagactatatgatgaaaatttgactccaggtcaattgttgctagatttacataataaaggaaagagaaacagaccaacattctatcgctctgatttacaagcagaatttgataagatatgggaatttcagtcaactttctatcccaatattttgacggatgaatttaaatcatcaattcatggtttcaataagtctcagacttcaggtgctttctatggagttcatcaaatctcaactgctagaaataatggtaaagaagggtatgttcaggcattaatgtggcgaacagaagctttgaaacgccagttgggtatagaggaaattgcatacacattagcagacataaacggtgctattaacaactccagcaaacgtctggctatgataagtgatagaagcaaggaattgtattttaatcatttgacaataggtcagtatttgatgcagctactaaatgagaatcctaaccacagtctgacaaatatcatattctatcgtcaggactatatggacgagtttgaggcgatttgggaaaaacaagctcaatatcatccagaactcactcttgaactcaaaaaggagattcgggatatcatcattttctatcagcgcgatttgaagagttgtaaaaatttggtcggttattgtgagttagaacattctgaaagagaaataactattgatggtaaaacaaaaacaatcttgatgggttgtaaagtttgccccaagtcttcttttctgtttcaagatttcaagatatggcagatgctgaacaatctgcaggtttctgtagtaggtcgtcaacgtaaaaagattaagaaagacaagacgcaaccatctttgtttgatgacgtggaaactggagctttgaatagattcttgactcaagaagagaaagatattctctataacgaactttcaattaaagagaaaatgagtaagagggaggtgctgaaactcttgtttgataatagcaacagccttgatcttaattataaagaaattgaaggcaatcgcacaatggcaactctctttaaagcataccaagatattatcagtctaacaggaaatggtgaatacgattttgccaagatgtcctcgaaagaagtgctgacaataacaaccgagattttcaagggattgggttataaaactgattatttaacatttaatcctttactcgaagggaaatccttagaaaaacaaccttcctaccgattgtggcacctgctctactcatacacaggcgacaaatctgctacgggaaatgaagcactgatgaaaaaaattcaagaattgtgtggctttgaaaaagaatacgcaacaatccttgcaaatatatctttagctcttgactatggaagtttgagcgcgaaggctatccgaaagattttgccttacatgatgaaaggatatgaatatagcgaagcctgttcattggcaggttataagcattctgcccgttcactaactaaagatgaattagtaaataagaaatataaatcacatcttgatgaaatcagacgcaacagtttgcgtaaccctgtagttgaaaagatattgaatcagatgattaatgtcatcaatgaaataattaaaacttatgggaaaccagatgagataagaattgaaatggctcgtgaactgaaaaaaagtaaagaagaacgagaatttttggatgccgccataaggaagaatactgccgaaagcgagaaactacgtaaagaactcgaagaggagtttggaatacagcatgtaacaaagaatgatattcttcgatataagctatacaatgaactgaaaatgaatggctataagacgctttactcgaatacatatattccaagagaagaactctttagcaaacgtttcgatattgagcacattattccacagtcacgtctttttgacgactctttctcaaacaaaacgctcgaagttcgcgatataaacattgaaaagggcaataaaactgcctacgattatgtggctgagaaatatgacgaacaaggaattgtggattatgagagcagagtggaagaattatttagcaacaacgcaatttctcggactaagcgtaacaacctgttaatgaaggaggcagatatcccatccgactttttgaatcgagacttgcgtgactcacaatatatcgcgcgtaaggctcgtgaaatattagaagagttagtaccatttgtcgtaactactacaggctctgtgacaagcagactgcgtgaagattggcaattggtcaatattatgcaggaattgaactgggataaatacgacgctttaggactaacagagcattacaccgacaagaatggaaatatcgtaaagcgtattaaggactggaccaaacgcaacgaccatcgtcatcatgcaatggatgctctgactatagcttttaccaagcgtggtatcgttcaatatctaagcaatatgaatgctcgaagtgataagtcgggaagtatttatggtatagagcagaaagaacttcatcgcaacgaaaaagaccacaagttggtattcaacgctccaatgcctttggatgaattcagagcagaagccaagaaacatttgaaaagtattttagtatctatcaaagcaaagaacaaggttgtaactaagaacatcaatcgagcaaaaatgaaagatggtcgtcagcaaaaaattcagctgacacctcgtggtgccttgcataatgaaacagtttatggtaagattcgcaactacgaagcagaatatcggaaggtggatggcaagtttactgaagatgtcatccttcgtgtctgcaaccaaaggcagcgtgaagcattgctgagtcgcttgacagaatatgacaatgatccaaagaaagcatttacaggtaaaaatagcctggagaaaaatcccatttggttaaaggcagaccattcatatgctgtaccattgaaggtgaaactctataaaatcgttgatgtgtttactatcaagaaagccgttgataaagacctgaagatagacaaggttattgatttaaaaattcggtcaatcttacaggctcgtttaaatgagtataatggtgatgcaagtaaggctttcgcaaaccttgacgagaatccaatatggctaaatcaagaaaagggcatagctattaagagagtgaagattagagcaaaggtgtcgtcagaaacttcagtccccttgcatgttaagaaggacttattaggaaacatattaaaatcaagtgatggcattgctcttccaactgattatgttaatacagctagcaatcatcatgtagcaatattcattgatgcagaaggtaattggcatgagcatgtggtctcgttctacgaagctacggccagtgcgttgcttggactcccgataattgacaagaatttcaagagcgaagaaggctggaagttcttattctcaatgaagcaaaacgaatactttgtcttcccaaatgaaaagactggttttgtgccaacagaaattgatttgactgatccgaagaactatgctcagattagccccaatctatatcgggttcaaaagttctcgagttcattctacgttttcagaaatcatttggaaactaatgtagaagagattaaagaacaaaaaggaatgtcatggttctgggtcactagcataaagaaactacaaggagcggtaaaagttcgcattaatcatcttggcaatattgtttctataggagagtattagtgtatgataaaaaagactctatgttttagtcatcccgcttacctttcattaaaggatgcccaacttgtgatcaagttgcctgaggtggaaaaggcagacgcgctaactgaggattacaaaaatattaatgtgataacaagacccatagaggatattggaattgttatattggacaacaaacaaataactataacctctggggtgcttgaagacaaaatgaacgctttcgtgaccagttatctgcttcactaccattaaaaaaacaactttggcaacagactattcaatttaaattttggcaccaagcctcaactccccaatgctccaggccagcaactagaattattctagaaaaggagaaatccttcattatgatggaaatctcctttttcctcgtggcatttttctttttctaaattcatttacaactttctgattctcagtgttttttttgaatcgagatgtaaatgcctctgcaaagatactaattttttaagcaaatcacaacatcccctcgtgcgaggtgctgcagtcctacgatgtaaatgcctctgcaaagatactaatttttaagcaaatcacaactagcattgcgatactgaatgagccgtatcagatgtaaatgcctctgcaaagatactaatttttaagcaaatcacaaccggtgcgggggctttaaactaagatacaccgatgtaaatgcctctgcaaagatactaattttttgaaacgctgggacaggcctgtttcactcaatcgatttccagtgctacggggacgggtgagtgacatctgaagtctgatggaagaaggaaaataaaaaagttgctccaaaatttggaggtaataaaataattacctatctttgcagattatggagaagattgagaagatttggctgactgacgatgcggtttggattaggactgctgacggacgcgaggcatgcgagaagttcgccgactatcctcgtctaagatatgcaaccaaagaacaacgtgccaattatgaggctgatgagtacggactgcattgggaggacattgatgaagacttgtgttttgaagggttctttgataagcgggaaacgaatcaactctacaaagtctttatggctcacccagaattgaatgtctctgctatcgcacgccgcttgggaatttctcagagtctgatggcgcagtatatcagtggtaagaagaaggcgagcgatgcaagggtcacgctgattcttgatacagtacgtgaaataggacaggaattgattgcggtataatcaaacgcatcgtctacagaaacgctggtgtgaaacgctgggacagatatgatgtttcacttaatcgatttcctaatagtggtgtaagggcattgctgttttatcatgattgcaaaacaaattaggtcgctgtcatcggtgtcatcgtcatcggtgtcatcggtttctggttctcggacatcattcatttgtttttaatctgtaaagaaatctctggctataatctgatactcattaattcaaataatgagttgagttaactcgatttgtcgtttgagttaactcatttcatcaatcgagttaactcacggtttggggggctgaaatgacgagatggatttgtcaaaaaaaataccaaaaccgacttttgcgtcatgatgaaaaagtggcatctgataggcatgatcaaacgcatcgtcaacatgaaacgctgggacagcactgtttcacccaaacgaaatattttgcattttctgctcacttaatggtaccttttacctatcggttgaaggtactcacgttcgagaaatctcaaaaatattttgcattttctgctcactaaatcgtaccttttacctatcggttgaaggtactcacgttcgagaaatctcaaaaatattttggatttctgctcacttaatcgtacctttgacctggcggtcgaaggtacttccgttcgacaataaaaactaaaaaaaacattttttgttttgtattgtgctcacttaatcgtacctttgcaagcaaaacgaaacgagatggatataaaaactgctgaattttcgctgagcgctcccgtggtgagcatgtgcccagaggatacgaaaccggaatatgccttcatcggacggtcgaatgtgggcaagtcgagtcttatcaatatgctgacgaataacaggaaactggctaagacgtcggctacgccaggtaagacgctgctcatcaatcactttatcatcaacagggagtggtatctggtggatttgccaggctacggattcgccaagcggtcgaagacggaggtggcaaaactcgaccagatgattcgcggatatattctgcagcgcgaacagctggtgaacctgtttgtgctggtggacatccgactggagccgcagaagattgaccttgagttcatcgattggctcgggcagtcgggggtgccgttctcgattatctttaccaaagccgataagctgtcggcagccaaggctgcgcagaacgttgaggcgtataagaagacgctgcaggagacgtgggaggaactgccccccatattcgtcacttcggctgagaagaaacagggacgtgacgatgtgctgaactatattgaagaaattaattcttctttgaggtttgaggtttgagatttgagatttgaggtttgagatttatgatttgagaatatgaagacggagagtggatttgagaagatgaggaaaaggatagggatggtgatgggcccgctgtgtgccctgctgatttggctgatgcctattgaggatatttcggcatcggcacaccatatgttggccatcatgtcgctggtggctatctggtggattacggagccggtgcccatccccgtgacgtcgctgttaggtccgacgctg

SEQ ID NO: 2347 - DNA, 17066 bp, synthetic construct
  misc_feature 1..17066: note = Synthetic
  source 1..17066: mol_type = other DNA
tcggcagcgtcagatgtgtataagagacagtatttatactttgtttataaaaggtttgcaatattttcctaccctccatttaatcgttgaagggtaaacggaacgcaacatttttttttactctaaaacatactatttataagtaataataccgattttagggaaaaaagttgcactaaaatagtgttattcgttagctgtaggcaaacgccgtgtgagtgattataatatagttatcatatcatttataatagttatcatatatcctgccttcggttaacctgtaaattatccttctgcagcatttccttcgaatccccttcagtccttaatatacattgaactccaatgtcccgaagttattcttctcagccctgtatgcgtttctcacatgccctagtatttcctcttcgctcatcgtaggacttttccatccttcagtgaaatacccgatagccaggctctcatccactccccatttgcacatcagacaggccagcttaaagatgctctccgccctgttcccctctttccagtattccgggttattcttcttccagagagagtttataatattgataatgcttttgtccgacacctttctttctgcatggggttgtatcactttgccctgcgcccttacggtggggatataatgaaacgttaccggattaggattcatccatatgtcaggatcatagctgagatagtttctccttgccatatccttgcaggcgctatccttaccggccacgttgaatttgtccaatagttgtgtgtataagtccctgtgcctgtccgggtcggtattatcatgcagtatcagtgctttcaacccccttccgcctggagttacgaatacacataagacacatggagttcttatcagccagtttcgcagatctgtcatttcatcctgtgtccctatatggtcaaagtccattgccgtcacatttgaatacgatatcagatgcgtactgtcaatttctgaaaatgtaccgttataggctacggcaggcagtagtctggctttccagtactgcatttcattctccggttgtttccttatatgttctatggcctgtgccagggtatatttaccgtactgactgtcacacagcaccatgttaccatcacggatcatgcctgtaacccgtgagagtgtcggatagctcagattgtaccttgtatggttgattctatgtgctaatgtgatataactatccatgattgtccggcattatttcttttttatccatctgaggttccgggtggagttattggacatgtccccgtcaatatgttccacttccgtataaagctccgggttcatgttcggcaggaacgttcttgcaaccaggaagtccggataaaccttcttattatttatgatgatattttccctgttctttactttacgtgaatacaggccttcatacaaattacagaggatctccacgctttcatatatttccaatgcatacgctttctcaaaccatttgatggctatcttataatctacaggagctccatacatacctccaagatgtatcttccctattgtgaaagcagccggcccctcaccagagacagcgtgccgtagtaactccattcctttttcactatcctgagggcaacctttcccttccagatatatacacgccagattaatctttgctacaggtaccttgtctgcaatgctttccagcagattaatagtcttgtcaacatccggggttactaccagaccttccaggtagtacatggcgacattgttgatcccatccgccagtccctgcattgcggctttgttataccagaagaaagcattgtcaaagtttccttcgttttcataatcctgtgctagcaggtacatggtttccgcatcacctgccgctgcttttttaataattcttttttttcgttcttcatttttattcagttttagtatgccttccttatttagcgtacatgtataaggatttcagggttttcccaagacggtatttttttttaataaacatgtcaaggttatctgtggggttgacggttgtatatgtatatagtgagtaaaagagggcataactgtattgaacccgatgaggaattattgctaattcgtattctcaggtcggataacttttgaggcattttgaagctttgacggcttccttcgtcacctcccagatctgcatatccaatcatatgaaaaatgttttgaactgtacatgtccattcattatatgaggtctggagctctttataaacaggtttagtgtcataaatttataaaaacgctgttgtcatcacccctcatcctgataaatgatgaaagataataataaatcatgtttgaaataattataatgttaaagcaagcagaaaagtggtttcctgatttgggaactatggtttccgggcatctcctgatttatgttatttcagctaaagggaaccatgagcggattattcccggagtcattctgttttcaaccggactctgcattgaatggttgttgaaaacaggtctgtgcagcccacctatgacttatttacgaaaagtatggaaatccggacaggttattgaaacagataccgatggacgctatacaggagggaatgcgcaatatgtaatatttgtagaaacaactgaaaaccaatccggaagatatcttttaaattgtctgaatactaatatgaatagttatataaaatcaaaagaaaatgatgaataaaaacgataaaaaactgccgttcgaaaaagagatcaacggcagaaaaatgagatattgtggaatatataatatctgggtaaaccgtgaaggtacatatgtttatagggaatataaagacccagcctggaaccatgccttgcaaatccatacccgtctggatggaagcaaatacctggacacgaaaagccatggagaaatacctcttgatgaagctgtggccatctgtttcagtcctatgccccgggatggcaggaaatatataccggttcataaggataatgatccgggcaattgtcatgccttgaatcttgcatggaaacaggtcctgaagtattctccgaccgacaaggaaagaaagctggataacggactggtggtacggtcggatggtaccatacttgataaaaggaaaaaactgtttgtagtcacggtaattggtgacagcgatacggaccgactggtttctgtggatccttatgtatgctattatcgtaagaaccgttatggctctattgacgagagacgtgcgcgtgttgatgctcttatggcggaagccgaatttgtagccggtgataactccctgatgagcaggccgcgggtactgcataaggatcaggattacctgaattacaactcctccaatcttgaatgggcagaagaggacagtccggagtatcaggcttatatgtggcagaaaaaggaagatctggaccggttgaccattcaggagaatccgaatcatcccaatcctttaatgaaacctctacattaatgccagttataaaaaacatgtcttatggatgagaaggcaactatttcccggagagccgtggggaaacatattattgtcagactaccaatagtatcagtaggagttattataaataaaaataattatacatataaataccaacggaaatagtttatttgaaagacacttattgccagtttcggagtaagagagagtatccttgtcgaaatagcattttgatatcggagaggatcctataatggattactcggtatcttttctatatggtatataaagttgtaatagtctgggcagatcatgttaatagaattattgggaattatggataggatattaaatggtatgttaagattgactaagtattagaaatttatggacttaaaattatgtgaaatgtgattagaagaataccgattaagatgaggtgtataaaaaaagtaaatcaactttatttaatagattaaatgatcttagtttataaaaaaacagggaaacagactgtgtgcagtcgttttggcttttcctttttaatatgataggggctcaataatttatctaagcaggatagactcgatcctttttataaattctatgtcaataggtgtttttctccaatatgtaattattagtctgctttattctatctatcggttatatataggcaggattgtttgtttttataagtaatacaaaaaggcgaggcaaatgccccgcccttaatgttttcacaacggaataatccttattgtgatttgcttcaaattagtgatacaaagataggaaattattttcataatagtatttatttatagaaaaaaataatatatttggggtattgtaataaaactggtcaaatatgaaaaggattttaggattggatttaggctcaagtagtattgggtgggcattagtgaacgaggcggaaagcaagaatgaaaggtcgtcaattgttaagcttggtgtgagagttaatcctttgacagtagatgaatcgatcaactttgaaaaagggaagagtattacaaccaatgcagatagaacacttaagagaagtatgcgtcgcaatttgcatcgttacaaacttcgccgggaggctttaatagaggtgctgaaggaatgtaagtttataactgaagatacaatactttcggaaaatggtaatcgtacaacttttgagacatatcgtttgagggtaaaagcgctaacagaggaaatttcgttggaagagtttgcgcgtgtattgctcatgattaacaaaaaacgtggttataaaagtagtcggaaggcgggaggagcagaagaggacacgttgattgacggtatggatatagccaggaaactttatgatgccaatcttacccccggtgaattatgtctgcaacttctttctgcagggaaaaaggtattacctgatttttatcgttctgacttacagaatgaacttgacaggatttgggaaaaacaaaaagaatattatcctgggattcttactgctgcattgaaagaagagttgagaggtaaaaaacgtgatgctgtttgggccatttgtgccaatgcttttgtttggaaagaaacctatacagaatggaataatgaagaaagcaaaaacgaacaaatagaaaaggaacataagttggaaggtatttatagcaaacgaaaaagggatgaggcaaaaaaggaaaatttgcaatggagggtaagtggtttgaaagaaaagttatcattggaacaattggttattatattacaagaaataaacactcaaatcaataattcaagcggttatctaggtacaatcagtgatagaagtaaagaattgtactttaacaaacaaactgttggtcaatacctaatggatattttggataacaatcccaatgcaagtttacggaatattgtgttttatcgtcaggattatttggatgagtttaatgtgctttgggaaaaacaagcagaatttcataaagaattgacgggagaactaaaaaaagagatccgtgatattatcattttttatcagcgcaggttgaagagtcagaaaggattaatcagtttttgtgagtttgaaagtcgacagatagaagtaaagatagatggtaagagaaaaattagaacagtaggtaatcgggtgataccccgttcttctcccttgttccaagaattcaaaatatggcaaatactaaataatattgaagtaacagctgttggtaataagaataaacaaagaatgcagaatggttcaaatgaaccggacgatacggaacaattggagttgaacggcaggcgttatttgtatcaggaagaaaaagaattgcttgccaaagagctttttgttcgtgataaaatgacgaagttggatgttttaagattattatttgataatccagaagaattggacttgaattttaaaacgattgatggtaataagacgggatatctattttttcaagcatatagcaaaatgattgaaatgtctggtcatgagccagttgacttcaagaaacccattgagaaaatagttgagcaggtaaagtctgtttttgttcttcttaattggaataccgacattttgagttttgactcaaataaagagttggataaacaatcttattataaactttggcatttattgtattcttttgaaggtgacaatacgccaacaggaaacgggtgcctagttcaaaagataatggattcttatggtcttgggaaggagtttgcaaagattttggcaaatattacttttcaagaagattatggcagtctgagtgcaaaagccattcataagattttacctcatctgaaagaaggcaatcagtatgatgtagcttgcgagtatgctggatataggcattcaaaatcgtctttaaccaaagaagaaatagcaaacaaggtgttgaaagataagctagaggttcttcctaggaatagtttgcgcaatccagtggtggaaaagattctgaatcagatggtaaacgtaatcaacgcaattattgaggcttatgggagaccggatgaaatccgtgtcgaattggcacgtgaattgaaaaagaatgccaaagagagggagaagttaaccaagtccatagctgaaactacaaagacacatgaggcacataagaaacttttgcaagaggagttcggtttgaagaatgtaggccgctcggatatcttgcgttacaaactttataaggaattagagtcacgtggttataagactctttattccaatacctatattccaagagaaaagttgtttagtaaggaatttgatattgagcatattattccacaagcgcggctttttgatgacagcttttcaaataagacacttgaagcacgtaatgtaaatattgaaaaagggaataggacagcttacgattttgtgaaggaaaaatttggtgaaagtggaactgataatagtttagattgttatttgaataatatcgaagtattgtttgtctcagggaaaatatcgaaaactaaatatactaaattagaatacacagatttacagcgaaggtcttcaatgaattatagcaatgcgtataagatttagcatttcctaaacgcttctcattaatcattaattctataatattccgtatatatgtatcaacatctgatttattctctttcttctcaactttacttatcaaagtttgaggagtgaaactcttacctaaagctcttaattcaaatatcaagtttaaatatttctgcttctcttgagatacaatctttaaaagccattcgtagttagggtggcttctcttaggttcctctttattataattccataaactatccagaacagacaaacccaaagatttataagccctctccttcccttgagttattcgtatcattaatggatattcaccattagataacttcttagatttaaaacaaacaatacttacagtagcatccatataagataattatttattatcaagatatggtttacactacggtttacaccaacagtaaattatcctcataaattattagtccaaactaacaatgcgcaagacataccaaacgctaagccattaattataaataagttatatagcgaagctggtagctttcaaaggcgtcagcctttggaagacgcagattcataatcatgaggtccccggttcaatcccgggtcccgctacttgataagaataaggcatttgggaggcttccacttctgggtgcctttttcttttatacatcaattggtggcaggtgacgccataggtgacgctaaatgcaaaaaattagcccccgaaagtttatattcagcttccgggggctattctatttaatgctctatactcttattcccattcaatagtcgcattaggtttcggcgacatatcatagcaaacacgattcacattcttcacttctttcagaatacggtctgtgattttcatcaggataggccagtctaccggttcaatagtagctgtcatagcatctaccgtattgacagcgcggataatcaccggccaatcgaaagaacgggcattatcgcgtacaccaacagatttaaagtcaggcactacggtaaagtattgccatacctttttatccaggccggcaatctggaattcttcacgcaaaatggcgtcagactcacgtactgcttccagacgatcgcgtgtgatagcacccagacaacgtacacctaaaccaggaccggggaacggctgacggtaaaccatctcataaggcaaccccaactccagaccacaagcacgcacttcatccttgaacaactggcgcaagggctctacaagctggaacttaagatcttcaggcagaccgcctacattatgatgagatttcaccatcttggcagtcttcgttccgctctctacaatatccggataaatagtaccctgacctaagaaatcgataccatccagtttacgtgcttcttcttcgaacacacggataaactcaccaccgataatcttacgtttctgttcgggatcttccacacctgccaatttatccaggaagcggtctgttacatctacataaaccagatttgctttcaattggttgctgaatacttcaacaacatcttcagactcacctttacgcatcaagccgtgatttacgtgcacgcataccaaattttcaccgattgccttcaaaagtaaagcagctaccactgagctgtcaacaccacccgacaatgccagcaatactttcttatcacccacctgacgtctgatcagctcgatctggtcattgacaaagttcgccatattccagttagcttcagcctgacaagtatcaaatacgaaagactttatagcagccttaatagcctcgatatcatctgtaaatgccggaagcttcactgcgcaagtcgctttatcgtgaccggcagccataacaggaatccccatcgtataaatagacggattcacgtcaatagcaacaccgtcgatcacgttgttcagtccaccattgataataataccctttacgttgggcaatgctttcagttcttctactgtgatgtcgtgaggataaatctcactataaactcctaatgcacggatggcgcgcgccaataccgtattctcgtgactacccaagtcaaggataacaatcatgtcctgtttcatctgattttggttcttttaagttattatattgtataaatttgactttaacttcaattagtctgcaaatataaagattttaaaagacgctgcaatgtcttgattcccaaagtttcatttcaaattaaatcagctaccacatttatttatcacagcaaccgcctcggacactttccgaacattctcttttatgctttcagtcgcatcacaaaccgacttccttttcccagttcactttctactgtcagcgtaccgccatgcgcttccacaaagtctctcgaaatagacaaaccgagtccgctgccctgaacttttgttccgggaacacggaagtaacggtcgaaaatactcttgtggtaacggggatcgatgcctttaccgaaatcctgaacgtacaggtcgatcatatctccttcctgcctggcaccaatcacgacacgcccgttttctttagaataacgaatcgcattgctgagcaaattagtcaatacccaagctatcttttcactatcgacaaagagcttgccgattttctcttccgggtactctacttctatctgaatattgaacttatccgcttgtacctgattagctttaatcgcatattctatcagttcaatgggcttcgttatcttcggcattaattgcagcttgcctgcctctacctgagtcatattcagcaattcgcccgtaatgctcaacaggcgttcgctattttccttgatgcttttggacaactgttcctgttcatcattcagctcaccgacacgtttatcttccaatagctgcagactcatcatgatagccgcaatcggagttttcaattcgtgtgaaatggtcgaaataaatgtagtcttggcagaatccagttccttgaattccgttatattcttcagcagaatgacatcccctaatttgctgggttcatccttccctgcatccgtatttatgataggaatataggaagccttgaaataactctctttatcatcggcatatatctttaacggctctttctgatctcccggcgtcaccagttcacgaatcagccggcgaagcagatcattcttcaaagacaattcttccgcagatttacgtatgacattacctcttttcagattcagcacgttcagtgcttcctcattaataaacaaaatctcacgatccatattcagaccgattatcggatcgtcgatactgttcacgatggcctcaatgaatttcttggcagaaagaatatccgctaacgtacttgcccgatactcggccagacgttccgccatacggttgaaactctcggcgacttcccgaaactcctgattatttctcatatccagccgttcttcataattatgattggctatttcaagaatcccttgtttcagttccttgatgggtttactgattgttcggggcaaccaatacagcaatgtcaatccggtcaatatacaaataccgccggtaacggaaatccacaacagagcgcgttccaatgccggcatagcggcaggactgtcaggttctgtggcagtcagcaactgaaggttcacaacagaaagtgttaccagcaaaataatcattcccgccagcatcccgatgccgagaatcagttttgttttaatattcatatcgttcatacggttaatattatgcaagtataatcaaatctacattagcttgtgacaaattattcaaaaactttcgatatccgagtatggagcaaatggcatgaggaaatctcagattaggagttcccatgcagacagaagatatttgcttgtcccgacaaactttgacaatactccccagaatatccttcgactgcacctggatgacctctccgcccagttctgccaccagtttaaaatgattcagcagataacgctggctggccagatcaatccggtccatactctccctcggagtctgcacatagagagcaacgaaagtcgtattatatcgtgttgccagacgtgccgccttccggataatcctcctgggtgttttctcatgactactgatacaagccatgaacttctcatgcctgattccgaccgagacacccatcacaacctcattctccaccttcttctccacccggagcgccacttccttcagagccagttcccgcagttgaaggatattctcggtccggaagaaattatccagcgctgtctgaatcttttccggacggtatatctttcctgctttcagacgcgagatcagttcttccgctgtcaagtcgatattcaccacttcatccgcttcctgaagcacactgtccggcacccgttctttcacctcgatccctgtaatctcctgcacttcttcattcacactctcgatatgctggatattgattgcggaaatcacattaatcccctcatccaacagagtcatcacatcctgccaacgtttctcgttcaaactgccttccacattggtgtgtgccagttcgtccacaatcacaatctcgggatgaaggcggataatggcgtccacatccatttcctccaactcttttcctttatagaaaattttacgtcgggggatcacaggcagcccctgcatcagagcctccgttccggcacgcccgtgagtttcaatatagccgacttgtacatccaccccattctccagtagttcatgagcctcctgaagcatacggtaagacttccctacaccggctatcatgccgatatagattttaaacttgcctcgatgagacttcttgatcagatccaaaaaatgttgtacactctgttctctatccatatccatttcattaattgctgtttataaactatttcaacccgtagtaatcatcacgatcaccacgggtttctgcataataaaaattcatgagtttatatctatggtcttaaagttacgccaaaaaccaaaaaagcatcttcaacacatggattccatatagcctgtgcaaatatcggcaatgaaaacttatcattaatttttatctctgtcattccttttaaagctacattagtcacggcgaagccactattcgtgtacataccctccgccttatacggtactgcgccgcaagttacatttaaatcgacatttttcacactgaaaggatagttcagttccagataggaggaataattctgtttcagttctccgctatcattcagcttcttgtcttttccggcaaacatcgtataccacgctacggacaggggaaacttctctacgggcaacgtataagccaatcccgcctcaaaatgatgtcccgtctcgtggctcttaaaattaaaatatttatatgccccttcaccttcccaccacaaatcggcaaccgtcagcgtaggtcccgcctcaccaaacttataggcaagagtcagatccagttctttattccctccactgaaattagtagatccccatgcggtaacagaaaaattatcgagcccaaaccccagcgtgggttgaaaagccgcacctccaccctgatacattccccgccagacataggaactgacaatatctccctgcacagtaaattcctgtgcttttgcatccgttatacccgatacgcatacagttgccgtaaccaatgctcctacaacaatcttcttactaaaaaaactcttcatatttatctttttattttatgtttctaaaaaagagcagcgtcctgtccagccctgtttatttgaaccgcaataaataactaaaacgattcggacaggcacgccgcccagtgtttggttatttattctcttcaagtgctatattcagcttcagcacatttattttctccgttccgaaaattccgagtaaaggcttctccacactttgatcaacgatttctttcacttggttttcagtcaggccacgtgcctgtgccactctctttatctgcacgtatgcacattgcggagtaatattggggtcgaggccggaggcactcgccgttaccatctccgccggaacatctttacggctcagataaggatgatgtacaaggaacgtatcgatacgcgcttccacttcagccagatattcgggattcgtgggtcctttgttgctaccggacgaactagaagcatcataaccgtctccggcacacgaaggacgtccccagaaataaatatcttttgtaaacatctgaccgacattggccgcacccaccacttttccatccagtgtggcaacttcagcatttcccttattaggtcctgccacttgtgcaaacaaccacaaaataagaatatagaatacggagaaaaagacacagaaaacaagagttatctttagtgatttaaataaagttttcatcgctattgttttttaattaaaagaataaacctactaataaatcaatcagtttaattccgataaacggagcaatcacaccacctacaccgtaaatcagcagattccggcgaagcaaagcacttgcacctatcggcttgtactgaacgccacgcaaagccaacggaatcaagatcggaataataatcgcattgaagatgactgccgaaaggatcgcactctcaggactatgcaactgcatgatattcaacgccgccagttcggggatagccaccataaacaaggcggggacaatggcaaaatatttagccacatcgttggcgatagagaaagtagtcagtgttccacgggtcatcagcaactgcttaccgatttccacaatctcgatcagtttggtaggatcattatccagatctaccatattgccggcttcctttgcagcctgcgtaccactgttcattgctactccgacattcgcctgagccaaagcgggagcatcattcgtaccgtcccccatcattgccaccagtttgccggactgttgttccttcttgatatattccattttatcttccggcttcgcttcggcaataaaatcatcgacacctgccttttctgcaatatatttggcagtcagcgggttatcaccggtcaccatcactgtcttcactcccattttgcgcaagcgttcgaaacgttcctgaatacccggtttgatgatatcctgcaattcgataacacccgtcactttccgattaacacataccaccaacggcgtaccaccattgcttgaaatagcagcgatcaccttttccacttcttcggggaatttatttccggcagtttccacaatcttacggatagcatcaaaagcccctttacgaatctgagttccgtccggcaaatcgacacccgagcatttggtttcggctgtaaacttaatcattcgcgcgcctgtcgtattcaagctgcgcatacggatacctgattcacgtcccagttctacgattgatttgccttccggagtttcatcggacagagaagaaagcagacagttttctacaaaagcgtgcagatcaatgcccggcgcagtgtgaaaatgggtagctttacgattaccgatggtgatagttccggtcttatccagcaacaaggtatcaatatcgccggcagtttccactgccttacccgattttgttatcacattcgcacgtagtgcacggtccataccggcaataccgatagcggaaagaagtcctccgattgttgtcggaatcagacacacaaacaaagaaataagtgaagcaatggtaatgacagtattgctgtaatcggcaaacggttttaacgtcacacacacaatgacaaagacaagtgtaaaaccagccagcagaatagtcagtgctatctcattcggagttttctgacgagacgcaccttccaccagtgcaatcattttatccagaaaactttctcccggttgggtggtcaccattacttttatatgatcggacaatactttcgtacctcccgtcactgagcttttatcgccgcccgcctcccggatcaccggagcagactcacctgtaatcgcactttcatcgatagaggccaatccttcgattatttccccatcggacggaatcacgtctccggcttcacagacaaacacatctcctttctttagttgtgaagaacttacagtcactatttgattaccttccacctttttggcaggtgtctcttcccgtgttttacgcaggctgtcggcttgcgcttttccccgtgcttcggcaatcgcttcggcaaaattggcaaacagcagtgtaataaacagaatgataaacacagctatgttgtaggcaaacgaaccctgagagggattgatgatggagtaaagtgtcacaaacaacatgaccactgtagccacctctaccgtatacatgatcgggttctttatcatcagtcgcgggtttagcttcacgaatgattgtttcaggctttctataacttgctccttttgaaacaaagaagctgatttcatatttttcatatcttctctaattcagaattacaaacttaaatgttcggcaattgtactcaaagcgtgtaccgggaagaaggacagagcagccacaatgaagataacgacaaacgtcattattccgaaagtcagcgtatcagtcttcagtgttccggcactctcgggaatgaacttcttctgagccagcaggccggcaatggcaacttgtccgataataggcaggaatcggctaagaataagtacaataccacaggtccagttccagaaataagtattatctcccagtccttcaaagccggaaccattgttagcggcacaagatgtatactcataaagctgctcactcaagccgtggaatccaagattgttcagccaaccgccctcgctttccacaaagtcaggatgatgtacatatatataacttgagattgctgtgaacactaatatgacaaatggatgaagcagtgctactatcgtagctattttcatttcacgggcttctactttctttccgagaaattccggtgtgcgacctaccatcaaaccgctgataaataccgcgataataatgaacgtataataattcatccaacctacgcctacaccgccgaaccaagtattaatctgcatattcagcatctccatcataccggacaacggcatagtagaatcatgcataccattcacagaaccattggaagtaacagtagtcacaatgctccaaagtgctgtagctccggcacccaaacgaacttccttaccttccatcgcaccgttatcctgcgcaattcccagttcatcgatacggggatttccacccatttcctgactgacattgatacagacgcctaccaggaaagcaaagagcatcactccgaaaatactataagccagtttctttctacgagtataaaaccctaatgcaagtaccattgccatcggaataatcaagatagaccagcactccaccatattggtaagataagtcggattttccaacggatgagaagagttcacaccaaagtaaccacctccattcgttcctaattgtttaatgggcacaatggcagccgcaggtccttgcgaaaccatctgttcctgtccttcgagggtagttaccttcatttttccgtcgaatcccatcggggttccctgaagaatcaggataaaacctacaatcaaagaaagcggtaacaggatacgggtacaactcaacaccagaaaatgccagaagttaccgattgtttttgttgtcttggcagccatactcttcattataccagccatagcagccataccggttgcagcggtaataaactggaagagcataatgacaaacaattgtgtgaagtaagtcaatccgctttcgccactatagtgctgcaagttacagttgaccataaaactgatacaggtattaaaagcctgatccggcgtttggggaccgttgccatccggatttaaaggtaaccatccttgcgaaaccagcaataccattccccatacgaaccaaaatgcattcaatatcaataatgctttcaggaactgtttccagttcatttcttctttagggtcaa

SEQ ID NO: 2348 - DNA, 17041 bp, synthetic construct
  variation 16246..16247: note = n is a, c, g, or t
  variation 14382..14383: note = n is a, c, g, or t
  misc_feature 1..17041: note = Synthetic
  source 1..17041: mol_type = other DNA
cttataatatgaccactgtcaacattgtgaacaagcgcttttacttttccgtgcaaatcgatgctgaacttagtgagtatagctttgcatactacctaaacggacagcctctaaatgccgtgacgattgccgagcatgtggtatgtggagatgcctatatcatttcaggacagtctaatgcagcgacaacaggcctctcttctacggatgcgactactctgaacagtacttacggtccgggaagcacttatggcaagtacagcagaaccgttgaagtatatcatagaacaagctggggagtttccagcgtaggcggagatctggcctggaatgtaggtgcctggggcttaccgatacaatataagatccaggaaacatacggaatcccgacctgtattatcaatggcgctgtcggaagcacttcgattgaataccatgtaccgatgccagcttttccaaatgacttttttttcaatcctgtacatgaccctttatatactgattttgaaaactcaggggcaactcccggttgctttggcaggatgaacacaagggtctactattcggggcttgaaaataacatcaagggtattttttggtggcagggagatggaggtccaaaaacaacttataattacattgatcatttcactcctttgtataatttatggacaacctggtatcctggcttcaatcgtttttatgaaattcagattccgtcttttgtagggcaaggaactgatccttcgttaatcagaatacaaagtgaataccaacgaaaaatgggaacgattttcccgaagacaacagtcatgtcagccaatggaatcaaataccacatgcctggtgaagagatccatcaccaggcggccggttacctggctatggctgaccgtctctttgccttgctggaaaaggacatctatggaaaaacaacaaacatcaatgacctcacgcctcccgatattgtgtcagcgactattacgggaaccagcgtatccttacggtttacccaggacatcaacctgaataccgccattggggataatatatacgatattctgtctgtgataaaattcaacaatgagctttctgcatttcccgttacagttaccaaatctaatcctgctatatcaggccagtatctgacctttgacgtgaattcggcatcaggtatatcaaaagtaagctatgcagggtatattcccaatacaacagcagccaacatcgacaatgtgggttgctatatcaggaattcgaaaaacgtcggtgctctgtccttccataacttccccgtaactcctacgggcccggagatgagagccatgatggcaaatgaagaagaggtaaatcagattgaagcttcggaaaggcttgaaatcagtatctatccaaacccggtcaacaataggctcactattacctctgggaatagggctgttacgcgcttcataataactgatctgacgggcaggctggtgtgggaacatcagaatatatcgggacaaaaggactttgatttatcacatcttcaaacgggtatttacctgatctctgtggatgtcaatgaagaaacgcacacttccaaactggtaaaaatcaatcattaataatttttaaaactcttttcttatgacttataaacttctgatcaggactatctttatgatagtcctgatcaatccaacaacaacaactgctcaatgtaatgatttcattaccgttgatggtaaaaaactcaaatgcggaggaaatgatttttttgcagttgtagctaattactgggtcgaatattcacgcggtcctataaccaatactacgaattttacttatccaaatttttttccttcacgatgtcatacctatttcccaagcaatactcgttcgccctttatatcgactaatgccaaggctgatagcgctatccggagagacctcagggaaatgaaagcaatgggattcaatgccattcgggtatatggctgcggataccaggatactattgtaactaccaattgggatggtagtgtttatgtaaacatcccatttacagaccccaaccatactcaattgtcgttagacattgccggaagcgtattacgatcagcgaaagctgtcggactaaaagttatctggctggcaggggataatgcgcttggtaaggacgccacctctttagacctggcatttcaggcaggctataccaattacctgaaggaatttggtcgccggtttggaaatgatccgactttattagccgtcgatttcttcaatgagcccgttcctacttccaacgcctattggtcaaaaaccaaagcctgccaaaaaacaaaggaatggaatgacgccttaaaacaatattccaatgcactgagtacaattggcctatgggaaatcggaagcgctttctggtgggacccaaatttattgaatgttgatttcgtttctttgcacaattatcctttaacaagaaaagggaatcaaataaccagtctcactgatgctatcaatcgcattaaatccgattactggtggtataaaaacaatgtgacgcttccctggatgatcggagagtccggtatgagcgcacacttacttaacccaaatacattagatacaatcaatgacaatggcccttatgcggggacattacaggatcagaaaacatttttgcacgaaacactcaatacagcacgtgattgtggcgccacaggctattgctggtgggaatattctgacggagatgtaggaggatatacgggatcgcacaacggatcattttttggtttggtttatgcaagtgatccgtcatctcccattgtacgaaaaccggccgcccaggagattgccaactttaatcccacaggaaccggtacggcaacacaacctcctaattattataactactttggcaatacaagcggcacacccatgacaggttacgtatatgacaacaacaataatccaattaaagatgccataatcgaattaatcgattctgttccggggcaaaagcgccgctatcaaactacttattcagatgccagtggatcgtatatgttttatactggcgcttatatatttagaatgtcggcaaccgcggcagaaggtaacgttatttacagaactaacaattacttttttttatacgcggtcttcaaaacgttttacgtagataaacttgtcagaccttcagctactagtttagcctattcaaatagttcggtatcatctgtcaatgttaattcctatgccaactcctatgctaccttcacaaattatcaaatcaactccagtaatttcaaaacaacggcaggaagctacatcaatttacagcccggcttcgcagcaacctccaataccaattttaatgctcatatcggtccttattatcacgactgtggctctttcgctttcaggaaaaataatgcggaacatgaatcggaaaccactgatatgcctatagaaaaaactgaaagcgaagacgcaaaaaagccgcctttgcgtttaagctctaacagcatcttcccaaatccaggcaccgggaattatgagcttcgtatggctaaagagggcgactatcaggtcgaggtttataacatgcagggcgcaaaagtaagatcggaatattttacaggtaacaaccataaaatagacctacagaacgaagcaaatggcatttacctgttcacggttaagaacaaaaacgaactcttagaaagcgtgaaaattgtaaaggaataaattcaatgaattccagaaagcgacattcacaaacaaaaagagcagccaaccagctgctctttttgtttaacacacaacatacctgctacaagcccgatagcgccaggatcaacgtatagaaggcaaatacaaaggcggtaatgatagcgccggcgccaaaggccgtaccaatgatggaaaataccaggttgatggttccgttcttgtttttgtgatagcgcctcaggccctgtgtgccaaatacgacggcaataatacccatcacgaggccagcaatgaacaataaggcaaagacatactccgaggttgccacaatgacgctaatagcgaggatattgagcaccaggccaacgatgcccaggataaagctcaccagtgctacggaatccagggaattgccgccaccatcatcataagccaggcatttgcgctccatgttatcggcaatgtattttctaaaggcctctcttttcaagactttcgcttcaaatcctttttgccctgcatcagtttttttctccttgcccggtgctggcgccgctttctttgttgctgaagagctcatgcctaaagcggttttatccatatccgtaccggtatggacaaatgtagccacctcttctttcgatgacagatctgcttttccggcaaggtctgcttttccggcaggcatctcatctttggctgctactaccgcatccggctgtgcatgctcctgtacagtcgctttgcccggcttatgcttatgactcacataatttcccgctgtgtactttcgggagctgaaggaacggttactgccgcagctggcagacagtatggctactaaagccaggaataaaggaaacacaaatgtaaattttctcataaggatcgtcttaaagttagatacctaaatgtagcggattcctcccaaataaaaaagtccccacgacagatcgtgaggacttctataaatgcggataaggctatcctaagtattgttgcaacaatttgctcctggagctgtgacgcaggcgacggatcgctttttctttgatctggcgcacacgctcacgggtgaggtcgaacttgtcaccgatctcttccagcgttaaaccatggttgaggccgatgccgaagaacagcttcactacatctcgctctctttccgtcaaggtggataaagcgcggtctatctctttggataaagattccatgatcaggcccgaatccgctttcaaggaatcgtggtttaccaacacgtccagcagagagctttcttcgccgttggcaaacggtgcgtccatgctcacatgacgaccggaaactttcatggtatcggatactttatcgatcggcaggtccagtaattcggccagctcctcggcgcttggttcgcgctcgtattcctgctccagtttcgaatacgctttgttgatcttatttaaagaacctacctggttcaacggtaagcgcacaatacgcgactgctcggccaaagcctgcaggattgattgacggatccaccatactgcataagagatgaatttgaaaccacgggtttcgtcgaaacggcgggccgctttgatcaaacctaaatttccttcattgatcagatccggtaagcttaaaccctggttctggtattgtttggccaccgacaccacgaaacgaaggttggcacgggtcagtttttccaaagcatcctgatctccatccttgattttcttggcgagcacaacttcttcctctgccgtgattaattcctccctcccaatttcctgtaagtacttatctaaagatgcgctttcgcggttggtgatggatttggtgatttttaactgcctcatgatgtgatattgggatttataagcctacaaaggtacgaaaaaaaggcaattttcccaactttgtattctattgattattaaatgattatattttcgcgctgtttttaacatatttgttcacctctgtagaaaagaaatccgccgcttcaatctcttaccacgtaagccttacaggccaagagcataataggccctgatgccgttcgggtacacgccttcaatcagcacgccacccgttttgttttccagcacatctttgatgtctttcaggccattgatctttttcttgtcaaccgacgtaatgataaagccttctttgatgctggcgcctgcgagcttgcccggctccagtttcgagatcctgacgcctccgctgatattgtagcggctgatgtcttccgggcttaattcttcaaatacggcgccaagtgagttcacggaagccctcattacttcaggctttttaatgatgcccgtggtgttgtccttgtttttcaatactaccgggatgatcacttctttttcattcctcatcaccgttacgttaatcttgtcgcttggcctgtacttgccgatctgctcaaggaattcggaggtgcttcctacggccaccccttccacggtcgtcaccacatcgccctgtttaatgcctgcttcctcagcagcgccattggcagtgataccgttgatgtacacgcctttcaggtgtttcagctgtttctcggcagcaaagcgcgagtcgatgtcctggatgctcagccccataaaggcacgctgcacgttgccgtattctaccaggtcggccactactttttttacgatgttgacagggatggcaaatgagtaaccctggtaagaaccgttgttggaagcaatagcggtgttgataccgaccaggtcgccgttggtatcaaccaatgcaccgccactgtttccggggttcacggccgcatcggtctgtatgaacgactcgataggcgccagtgaaccggcagccccgctgtgatcgaggatattgatgttgcggcctttggcgctcacaattccggctgtcaccgtagagttaaggttaaagggatttcctactgccagcacccactcccctactttcacaccgtcggagttgccgtaggcgatgtaaggcagctctttttcgcggatcttcaataaggccaggtcggtcgtaggatcagtgccgatcacttcgccggtgtagctccgcttatcgttcaaaacgacttcgatctttgtggcgccggctaccacgtgattattggtaacgatgtagccatcgttgctgatgatgacaccgctgccgctgccctgcatcacattaggctggcgctgccttccgaaaaacagctcctggaaaggatcgtaagccaggttcttattctctacaatagttttgatatgcaccactgcgttcagggacttttctgccgaagcaacaaagtcgggagcattggctaccgaagcgccgtggtaggaagccagctgcgccggtggagcagcgtatggattatagcttaaggaggtattgcctgacgattgattgatataataattaccaaccaaagcaaatgcaccgccaacaaggccgatgcataccgatgagatgatttttttcatagtatttggtccgttttgtttgtgtttgttgtgtaacatatgtttactgaaatctgacagtataacgcgaatttaaatatgaagttatcgtttccctgaggcttttaacaatacttaacctgggccccttttaaggctgtgaaatgttaaattatttcatcaaaaaaacgttaacaactggtgttcagagggtttataaaaagccctttatatttttaaagcagcccggttgcaaagcaaaaaatgcgtaatttcatgtcctgaatcttcatgaaatttaagtataaaataccgccctttgtgtttggcgtatcagtgggtttactggccggtgttgcatttttcatatttaagatcgacgattacatcaaaaagatcaacaagccttcgatcgacaacatcaagattgtggagcaaacggtaaaggaagattccggcgacgataaaaaatcgcggaaggaagacgggaatgacaggcaaaagcacaagccaagcatcaacaccaaacattctcccaacatcaattacaatgaagtggacgaacttctgaaggaagaagaagcgatcaaagttgcccaggaagaattgctttctgtgaaaaacatcaaagtgatcaacctcgatgtgcgcagccggaaagacacgctcaccggccaactggcgggtgtaacgagttccgattatccgaacatgttctttgtggagttctggaaaacaccgctcaactccaaaggctaccgcatgacgcgcaaccgcgtgatcctctacggcctgtcggatttcagcagcattaccatctataaggtggacgacaactactatctcaaaaacgatgacctcgtttataaaatctctgcaggtaccgagttcaagccgatggaaccggtgaacgacagcgaactgcttgcacgcatcaattaaatcattttttattcatgcagctcacgtgttacaaataccagggtacaggaaatgattttgtactcatcgacaaccgcgaaaaaacagtatccttaaacactgaacaagtccgcctgctctgcgaccggcgcttcggcattggcgcggacggcctgatgctgctggagctggagccgggcatcgatttcaagatggtatactttaacagcgacgggcgcgaaagcagcatgtgcggaaatggcggacgctgcattacggcctttgccaagcacctgggcatcattgggtcggaagcacggttcctggcggtagacggcctgcacgaagcgaagatttccgatgagcaggtatcgctgaaaatgaacgacgtgcgccagctggaagtgggcgacgatttcttttacctgaacaccggctccccgcactacgtgaaattcgtgaaggacctcgatggcctcgatgtgtacgaagagggccggaagatccgctacagcctacgcttcaaggaagaaggcacgaatgtgaactttgcagagcgccgcgaaggcgagctcttcgtgcgcacctacgagcgcggcgtggaagacgaaacctactcctgcggcacgggtgttaccgcagtggcactggtggccggctacaaaggctggagcaccgacaagcacagctgccgcatcaaaaccccgggcgggcttcttaacgtgaggtttgagaaggtcctcgaatccaccttttacaacatctggctcgaaggccccgccacctttgtgtttaagacggaaatcgaggtgaaggatgaagccgggaactgatccggcacataagcccaaggcctagttgcagctgccgagcccgttcttgatgccataggcgatgaggtcggaaaggcttttgaggcctgttttcagatagatattggttttatgaaactccaccgtgcgctcggcgatccggagcatatgccctatttgcttattggaattgccctggcaggccaggcgaagcacctccacctcgcgggatgaaagcacataggtgttctcaaaattctctaaggaatgcttattgagccgcgcggccagttcggtcgaaaggtcgtaacagttgccgttttctttgactttataaatggcctctaccagcacctccacatcgcatcctttcgggatgaagccatgcgcgcctttttcgaaatacatggccacaatggaagggttgaattccatgctcaccatgatgacccgcgggtcggggaagcgctgcctcagcacctccagggtttgggtgccggtcatcacaggcatctggatatcgagcagcaccacatctgcctgccggctgttgagtgttttcagaagctcactgccgttggcagcctcgccgatgacgctaagccccggatcaaactttaaaagtgaaataattccctgacggaacatcgcatgatcgtccgctattacaattcttatttgttcatccacaatcgacagctgctaaagagagagtactccattcacacaactaaagtaaagatatgccgaaaattcaacctgcggtttaccacaggttgagtagcacggaacagtagctgctgatgactctaatcatcatccgggcaactccatatgaatccaggggcttagtatcaaggtgcacacctaaggttatccataggtgctattgtattgaaattataatatatttggagcaagcaacatatactctaaaagaacattcccccgaatgagaaaacgaaagtatacgaaaataaaaaagcccccgttaaaagtcgagggcaacttgatgtttacacaacggaaaaatccttattgtgatttgctttcggatcaaatgtataataaaaaacaattatggcaaaaaaaattttaggattagaccttggaacaacctccatcggtttcgcaaaagtcattgaaggcaaacagcctgaggattcgtctattgaaaagatcggggttcgtgtgaatccattaacgactgatgagcaaactaattttgaaaaaggaaaaccggtttcggctaatgccgaaagaacgttgaaacgtggggcaagacgaaacctggatcgctatcagctcagaagagacaacctgattgaggttctgaaaaaaaacaagatcattgatgatgattcagttcttgctgaggatggaaaaaatactacccactccacctatgctctcagagctttggctgcttcacataaaatagacctggatgcatttgcacgcgttcttcttgccattaacaaaaaacggggatataaaagtagtagaaaagccaaaaatgaagatgaaggacaaattattgacggaatggagattgccaagcgcttatatgaagaaaaactgactccgggacagctggcttaccagctattgaaaaatggaaaaaaataccttcctgacttctatcgctccgatctacatgctgaactggataaggtatgggattttcaaaaacaatttcacccggatattttaaccaatgaattcaaaaagcacctggaaggcaaaggtcaaagggccacatcggctgctttttggggttggcataaatttaacactgccgaaaacaaagctaaaaaccgtgaagaaaagaaattgcaagcctatgaatggcgcagtatggccacaagcaagcaactaagcaaggaggaagtcgcccatgtcattacggatattaataatgatttgaataagtccagtgggtatttaggggcaatcagcgatagaagcaaagaacttttttttaataagcaaactgttggtcaatacctgtacaagcaattacagaaaaatcctcatacccgcctaaaaggacaagtattctacaggcaggactacatggatgaatttgaacaaatatgggaaacccaagccaactattaccctgaattaaccaaggagctaaaatccgagatcagggacatttgcattttttatcagcggaaacttaaatcacaaaaaggcctgatcagtttttgtgaatttgaatcgcgtgaaatagaaactcaaaaaaacgggcagacggcaaaacgaaaaatcgggctacgggtcagccctaaatcgtcaccgttgttccaggagtttaagatttggcaggtgttacacaaccttgagttcagaaacaaaaacacaaaagaacgctatacccctgatcaggaagccaaacaaaaactatttgatgaactcaacatcaaagggaatctcaaatcgacaacagctcttaaacttttaggccataagccaaaagaatgggaagctaattatgatactcttgaaggaaaccgtaccaataaagcactatacgatgcttatctgaaaatacttgaactggaaggctacgatgaagatctttttaaactcatctcaaacgacgatattgatgtttccctgattgaaaagcctgctgctgagatcaaagccatgatctccactatttttgattcacttggcatagataaagccattttagattttgatgctgagaaagatggaaaagaatttgaaaaacaagcatcatatcagctatggcatttattgctctcttatgaagaagatgattcggcgagtggaaatgaaaagctttatgaattactcaagatcaaattcggttttaagaaagagcatagtcaggttctcgcccagatagcactcagcgctgattatggcaaccttagtgcaaaagccatgcgaaagatctacccttacatcagggaagcctcgtacgacaaagcctgcttgcaagcgggatataatcactcggcggcatcccttaccaaagagcagattgagaacagaccattgaagcccagactggagctattgaagaaaaacagccttagaaatcctgtggtcgagaagatccttaatcaaatggtaaacgttgtcaacacactcattgaagaggagaacataaaaaacagagctctggggctgccagaggattttcattttgatgaaatccggatagagctggctcgggatctgaaaaagaacgctaaggaacgggcagaattatctgcaaacatgagcgactcgaaacggaaacatgaagacatctcgaaagtcctgataaaagaatttggcattccaaatccaacgcgaaatgacgttatccgatataagctataccaagaactaaagaacaatgggtataaagatttatacactaatacttatatccccaaagaaattttattcagtaagcaaattgatgtagatcacatcatccctcaaatgaaattgtttgacgatagtttttcaaataaaacggtcgttttcaaaaaagacaatcttgataaaggcaataagacagcgattgactatatagaaagcaagtatggcagtaaagcagtaattgaatttattgaaaggatctcacatttgttcgaactcgggaaaaagaatccggaggaaggaatctcaaaagcaaaatttcaaaagctacaaaaaaaggaaactgagattggagagggatttattgaaagggatttacgagacagccagtatattgccaaaaaagcaaaaaatatgcttctcgaaatttgccaccgtgtcgtttcaacgagcggtcaaatcacgaatcggctgcgcgaagattgggacctggtaaatatcatgcaggaaataaacatatcgaaataccgcgctcttggcttaacagaaatgatcgagaaaaaagacggaggaaaaaaagagcgcattatcgactggagtaagcgtaacgatcaccggcatcacgcaatggatgctttaaccattgcttttaccaaacatagccacatccaataccttaatcacctgaatgcccggaaaaacgaggctcataaaatgcatgccgtcatagctgctatagaaataaatgaaacagaactgatatcggatgattcaggcagcaaaaagcgtaaattcaaatccccaattcccaatttccgtgcgttagcaaaggaacacctggaaagcgtattggtttctcataaggcaaaaaacaaagttgttacaaaaaacaaaaataggataaaaaataaggccggagaattggttaaaacagaactaacaccacgagggcagttacacaaagaaacggtatatggaaaataccgctattatgaaagcaaagaagaaaaagtaggcccaaagttcgatgaagccacgatttctatggttgctaatcctgtacacaaagaattattacttcaacgtttagttgcaaacggcaacgacccaaaaaaagcattctccggcaagaatgcattaagcaagaatccgatttatgtggatgaagctgcggaagaatcggtacctgaaaaagttaagctaatatggtttgaggaagattattctatccgaaaagatgtttctccagaaaatttcaaagatgaaaaaacaattgaaaagataatagacggtgccgttaagaatatactgaaaggcaggctttctaaatacaacaataatcccaaagaggcatttagcgacctggataaaaatccgatctggctaaatgaacaaaaaggaatttcgatcaagagagtgcgaatcagcggcgtgaaaaacgcggagccattgcatttcaagaaagaccacctgggtaaagatattttagataaggacggtaagcctattccggtagattttgtaagcacaggaaataatcaccacgtcgcgatttataaagacagcgatggcaatttgcaggaaagggtcgtttccctgttcgatgccgttcaattaataaacgcaaaacaaccggttatagacaaacaatataatcagggattaggatggcaatttctatttaccatgaagcaaaatgaatatttcatcttccctaatgaaaagcaaaattttaacccgaatgaaattaatttattggacccggtaaatgcaaaactaatcagcccaaatttattcagagtacaaaaaatcgcaacaaaaaactatttctttagacatcatttagaaacaactgtagaagaaaaaaaagaactcagagacattgcctataaaccccagctaggattaaacgcaatttccaacattgtaaaagttcgaataaaccacattgggcaaatcgtgaagattggtgaatattaatagccccatggtttaaaccggaaagttgaaaaacgtgcaatataaagcagacatattgattcctgaggttacttaccacatttataaccgggccaacgggaatgagcgtctgtttatgtctactgagaatnntattgcttaatgcccaatcattttcatattctgatccggatcaaaagggaagaggaactgcgtgccctggaagcttttccaaagtttgaaactttggaaaagctgctaagcaagcagttctcaaactttttcagcgcttatacccaggctttcaacaaacactacaagcgcaaaggcagcttgttcatgaaaaactttaaacgcaaagctgtcagggatgaggcatacctcaaaaagctggttcgttatattcatcataaccccgttgaggccaggctttgcgccaagcccgaagattggaaacactcatcctacgcgttgcttcttaatggcaaaacatcgcttcctgaacgggatgagctcatccggtggttcggcgacctggataatttcatctactgtcactatgcatcgcctgatataagcggcataaatccctgaaagctcatgatcaaaaaaaccatctacttcggcaaccccgcctacttgcgcctcaaggataagcaactccgcattgagagcctgacagagggagaggccaaaacggcaagcatcgctattgaagacatcggcattctggtcatcgatcatccacagatcacgatcaccagcggactgatacagctgttgcaggaagagaatgtggccctgatcacctgcgattaccggcatatgccgcaaagcctgctattgcctattgaggggaataaaatacaacaggaacgctatgaagctcagatccaggccagcgagcccttaaaaaaacaactctgggcccagaccgtcacacaaaaaataaaaaaccaggcagctgttttaaacaaactgcaaatcaatgcggattacctggtcccgctgcatcgcaacgtcaaaagcggcgatagcgataactgcgaggcaacagccgccgccttttactggcaacatatttttgccaaccatctttccgggttcaggcgcgttccaagaacccagggggtcgacgctccgcccccacctgcgcctaacaatttcttaaattatggttacagcatcttacggggcacgatggcccggagccttgtttgcgccggcctgctgcccacgcttggtatttttcaccggaaccgctacaatgcctattgcctggccgatgacctgatggagccttaccggccttatgtggatgcaatcgttcacgggatgattaccgactatggcctggtggaagagctgaccagggaacataaagccacgctgctcaggatcccgacactggatgtgaacatggaaggagaaaaaagccctctgatgatagccacccaacgtactgccgtaagcctcgtcaagtgctttatgggcgagcaacggaaattaatctacccggaattatgagtatcagttcagaacgtttaaacgcctacagggttatgtggacattagtgatgtacgatctgccgacggaaacaaagaaagaccgaaagctggctgccaggttccgaaaagagctcatgcaggatgggttcagcatgtttcagttcagcatgtacgtaagacacagcgccagttccgaaaatgcggatgtacacaagaggcgcgtcaaaaacatgcttccggaacatggaaaagtgggtattttacaaattacagataagcaattcgggcagatggagatcttctttggcaaaaaagctcaggaccttcccgatattcctcaacagctggagcttttctaacgtttttaactggttagaaaacaaaaaatccggcactcagtccggattttagcttgacaacaagtagttttttcattcaaaaaatacgctgaaaccattgattttgttgtgtttttcgacctatatgttgttgtcaataggtcaaagnntaggtcaaagatcagaatttgaaagcaaatcacaacatggaaacgccttcggctcttgatgagctggttgttgtcaataggtcaaagatcagaatttgaaagcaaatcacaacgctggttaaatcactcagcaagctctcgccgttgttgtcaataggtcaaagatcagaatttgaaagcaaatcacaacagtaccacagcgatcaaggtagctcaaccagttgttgtcaataggtcaaagatcagaatttgaaagcaaatcacaaccgtaatctgtagggccatctgagttaaatggttgttgtcaataggtcaaagatcagaatttgaaagcaaatcacaactagcatctctggtcgtcaatatcaggatgcgttgttgtcaataggtcaaagatcagaatttgaaagcaaatcacaacatcaaagctgttatgcgaaacaattccttagttgttgtcaataggtcaaagatcagaatttgaaagcaaatcacaacaaaaccaccaccaggtaaaaccatcaaatcgttgttgtcaataggtcaaagatcagaatttgaaagcaaatcacaaccacttcaatgttttgtttttccatttacgcgttgttgtcaataggtcaaagatcagaatttgaaagcaaatcacaacgtctggaagaatacagatccggcatctgccgttgttgtcaataggtcaaagatcagaatttgaaagcaaatcacaacacccggactatgaaataaaattccgcttcagttgttgtcaataggtcaaagatcagaatttgaaa

SEQ ID NO: 2349 - DNA, 17014 bp, synthetic construct
  source 1..17014: mol_type = other DNA
  misc_feature 1..17014: note = Synthetic
aatttcgacattcagaacatggtcgcgcaccagttccaccgcgacacctacaacgaaaaacgcgaactgatagagagcgagaccgccgagtccatacgatatgacaccataacgggcaaatggatatgctacagttatttccaccgcagcataaacggcaagaacgaggtgctgacaaaaaagaacgtcgggaccattgaccttggcctcgtgcccgacgacttcaaccagaagtcgaagcccatcgagacgatgaactccattgaactctacaagcacatacagcacgaaaagatgcgcggaagcaaaaacgtcatcggcgcacagatagaactaaaccagaggctgttcaatccgctggcaatcatcatcatgacgattatagccgtggccgtctcgtcacgcaaaacgcgtggcggcatcggcatgcaccttgccataggcatcagtctggcgttcgccttcgtggtctttatgaaaatcaccaccgtctttgcaaccaacggcaacctgcctcccgtctgggccatactgctgccgcagttggtgttcggcgtggcatcggtgttccttgtgcgcaacgcaccaaaataaaccccattcactctcaacgcaatgacaatccaagagatagaagaacagattatcgacgagttctcggcattcgaggactggcttgacaaatacgcctacatcatcgacctcggacgcgaatgtcccatgattgacgagaaagacaaaaccgagaacaaccttataaaaggctgccagtcgcgcgtgtggcttgcctgccagcgcgacgacgaaggaaggctccattttcgcgccgacagcgacgccgtaatcaccaaaggcatcatcagcctgctaatccgcgctttcgacggccagaccgccgacgacattctcgcctccgacgtgcatttcatcgacgagataggcctcaaggaacacctctcccccacccgttccaatggtcttaccgccatgctgaaacaaataaagatgtacgccatcgcctattctgtaaagcaatgaaactgcccttcctcaaacacaaagacccgatgccacagaacaaagaagcgctcaaagaggccattgtcaacactttgcgcaacatctacgaccccgagatacccgtcaacatctacgaccttgggcttatctacaacatcgacatcgacgacgaatacaacgtcaaaatcctcatgacgatgacggcgcccgactgcccggaagcagaatacatgttccaagaggtccgctcgatggtgaaagtcatagagggcgtgaaaaacgtggaagtagaactgacttttaacccgccatgggactacgttaatttgagcgacgaggtaaaactcgaactggggctgatgtaatccctaatagtaaaaactatgcgaccaaaccgtatattccgcatccgcgaaaaacgcatcaagccattccttcagaacgaagggctgtcggtgggtcgcatggtgtggttgcgattgcgacgcaaccgtatggccatgacgagcctcggcgtcatcgtggccttcgcgctaatagccattctcggctatctcgttacgcccgattccacgccctactgcaaccagcagtatctcgaattggcaacaatgaagccaatgagccgtgccacgttcctctgcgtcgagcaaggcggcacgccgccagccccacgccactcgctgctgcaccgcatggctttcggagagccactgccctacacagccatacccatctacaaccatcaatggcaaggcgacacactcatagccgagacctatacaggctccacgcccaacgacggcgagccgttgcgctaccaccgcagccaggtggtcaagatagaacgtcgcacattcgtctttggcaccgacggctacgggcgcgacgtgctgagccagataatgataggcggacgcgtcagcctctccgtggggttcattgccatagccatagcactgctcataggcatcacactcggagcccttgccggctactatggcggatgggttgacaacctcatcatgtggctcatcaacgtagtgtggtccatacccacggtgctgctcgtcatagccatcaccttcgccctcggcaaaggcttctggcaggtattcatagccgtgggactcacaatatgggttgacgtggcgcgtgttgttcgcggacaggtgctttcgctcaaagagaaagaatttgtcgaggcctcgcgagcgttaggctacagcgaccttcgcaccatcttccgccacatactgcccaataccgtaggggcgataatagtcattgcggcatctaattttgccaccgccatactgctcgaggcgggattgagtttcctcggcataggcgtgcagccgcccatgccctcgtggggcagcatggtgaaggagaactatggctacatactgctcgacagcgcctatctcgccttcattccaggcatagccataatgttgctcgtcctcgcctttatgctactcggcagcggtctgcgcgacgccttagacataaagcgcacggacaaataaatcccatcccgttttaataaaaaagtccaccgtgaaaggacgatggacaaggacctaatgttttcacaacggaataatccttattgtgatttgctaaaaattagtgttgcaaaaatacactctttcttcatactgacaaaatttttctttacttttgcaaaaaataatcctttttcttgcatgtcaactacgttatagaacactcaaaacatatcattgctcgcatacaccctaaaaaatccccaaaaaataaaaccataaagaacaaagccaacatattatgaaacgaatcataggtcttgacctcggcaccacaagcatcggctgggctgttgtagatgaaaaagagaacgacaacgagaaatccgccattgtaaaactcggagtgcgagtaaatccgcttaccgttgacgagcaatccaattttgagaaaggaaaagccatcacaaccaacgccgaccgaagaatgaaacgcagtatgcggcgcaatgcacaacgtttcaaactacgtcgcgagcgtcttatcaaaaccttgctcgaatatggcatcgtacatcccgacacacctctctacgaggcagggccacgcaccacgttccagacgcttcgcaaccgtgccaaggctgctaccgaggaaatctcgctcgaagattttgcccgcgtactgctcatgattaatggcaagcgtggctacaaaagcagtcgaaaactcaacgatgccgacgaaggggcaatcatcgacggtatggatgtggccaaagaactgcacgaccgccgtatcacgccaggccagtaccttctcgaactcttcaatgccaacaatcgacgcaagcccgatttctatcgttccgacctgcaagacgagttcgaccgcatctgggcaacgcaatcagcctattaccccaatattctgacatcgcagttcaaacaggcgctcaatggtttgtcgctgaaacaaagcgccgacgccttcaaaaacacctacgacattcttacagcacaaaacagcggcaaagaggcatacgggcagtatctccgctggcgcaccgatgcccttgccaaacaaatagacatcgagcaacttgcctatgtgctatgcaacctaaatggtgccatcaacaatgccggcaactatctcggcatgataggcgaccgcagcaaggaactcgctttcaaaggcatcaccataggtcagaaactgataaacatcattgacgagaatcccaatgaaagccttaaaaatattgttttctaccgtcaagactatatcaacgaatttgataccctttgggcaaaacaatcctcgtttcatcccgaactgaccaaggaactgcgcaacaagattcgcaacgagattatctttttccaacgcccgctcaaaagttgcaaaaaccttatcaatctctgcgaacttgaacaaaccaccaaggaaatcaccaccaaagaaggtaaaacaaagaccgtaaccatcggctatcgtgcctgtcccaaatcatctcctcttttccaagagttcaaaatatggcaacgcctcaatgatgttcaagtcattgtcaaaggttccaatgcccgccgttcaaagaaacagcaagcactggtttccaatcccgacgagtttccacgctacctcaccatcgatgagaaaaacatcctgcacgacgaactcgtcattcgtagcaaaatgacaaaagccgaagccataaaactgcttttcggtaaccaaagcgaactcgacctcaacttccccacccttgaaggcaactacaccattgccgaccttttcaacgcctgcgccgaaattgtcaacctaacgggccacgatgccatagacacaaagcgactacccgccaaagacgcaatagcagcaattcgagaaatattcacctccaatggctggaaatctgacttcttgacgtttaatcccactctggagaaaaaagaatttgaaaatcagccgtcttatcgcctatggcatctgctctactcctatgctggcgacaattctcgcacaggcaacgatgctctcattcgccacatctccgaaatgtgccaactgcccggagaatatgccaaggtctttgccaacatcaactttgcccccgactacggcaacctcagtgccaaagccatgcggaacatactgcctcacatgattcaaggcatggggtatagcgaggcctgcgacgccgcaggttacaatcattcaaaacgctcgctaaccaaagaagagttagaagccaagaattatgccgaccatatcgacattctgcctcgcaacagcctacgcaaccccgttgttgagaaaatcctcaaccaaatgattaacgtagtcaacgaactggttgccacctatggtcgtcccgacgaaattcgcattgagatgtctcgctcgttgaagcaaaaccagacagagcgtgataaggcaatcaaagacattgccaccaacacccgcgagagcgagcgtatcagccagatactgaaaaccgaattccacattgcatatccatcacgaaacgacattatacgctaccgactctacgaagaactaaaagccaatggctacaaaactctctattccaacacctacatacctcgcgagaaaatattcagcaaagagttcgacattgagcatataattccgcaatcacgatgttttgacgattcgttctctaacaagaccattgagtcccgtgctgtaaacattgctaaaggcaacatgaccgcctatgattatgttgcatcaacacaaggcgaagaaggtgcgaaagcatttcatgaccatattatttcgctgttcaaggataaagttttgtcaaaatccaagacagaaaaactacttataacagaagacaaaataccaaatggatttataaatcgcgaattgagggactcgcaatatattgcccgaaaggctcgcgaaatactcgaatcaatggtacccgacgtagtatccaccattggttccatcacaagccgcctgcgtgaagactggcaactggtcaatgtcatgcaagaattaaacctgcccaaataccaagcactcggactgaccgaggatcgcaccgataaagagggccacacacgcaccattatcaaggactggagcaagcgcaacgaccaccgtcatcacgccatggacgcactcaccattgctttcaccaagcgcagcataatccagtatttaaacaatctcaatgcccgcagcgacaaaaacagcatcatcaacaatatcgaaaccgaagaactctatcgcaatagcaaggacaaactacttttcaacccgcctatgcctctcgacgaatttcgtgccgaggcaaaacgccacctcgaagacatcctcgtttccatcaaggccaaaaacaaagtagtaacgcctaatatcaacaaggcgaaaaagcgcaatggcaatcagcacaaagtacaacttactccacgcggcgctctgcatcaagaaaccgtctatggaaagattcttcaatacgaaaccgaggaggtaaaggttagcggcaaaatgaccgaggaagtgatactgtgtgtctgcaaccgccgctatcgcgaagcactattgcaacgcctcaacagcaacggtggcgatgccaagaaagcatttacgggcaaaaacgcactcgaaaaagcacctatctacatagatatggcacacagcgagaaagtgcccgaaaaggtcaaaaccatgaaactcgtgccagttatgaccactacaaccgccgttggtcccgacctaaaagttgacaaagtcattgatgctggaatacgacgaatcttgcaacaacgccttgccgaatatggcggcgatgcaaaaaaagcatttgttgacctcgaccgcagccccatctggcaaaacaaagaaaaaggcattgccatcaagcgcgtaaaaatctttgcccatctaaccgtcgatgtggcactccctatcagggaaaaacgcgatattgcaggccgattgatgcgtgacatagagggaggcaacatcccaaccgattttgtcaagactggcagcaaccatcatgttgccattttcaaagatgccaatggcgaatggcaggaacacattgtgtcattctacgaagccactgcaacagtcctgctcggacttcccattgtcgataaagaataccgcaaagccgatgggtggcagttccttttctcgatgaagcaaaacgaatatttcgttttccctaacgagaaaacaggattcaacccatcagagattgatttgctcgaccctaaaaactacgcattgattagccccaacctattccgtgtgcagaaattcacaagcggaaacttctatttcaggcatcaccttgaaacaaatgttgaagacaactataaactaaaagacaccacatggaaaagtattagaagtctaaagaatttaaatggtattgtcaaagtccgagtaaaccatatcggccaaattgttgccgttggcgaatactaacgctatgataaagaagaccctctgctttaccaatcctgcatatctctcattaagagatgggcagttgcttattcgcattaaagaggactctgccgacgatgccgaaacctcggcaaccacaatggagacctcccgccccatcgaggacatcggcatcgtggtgctggcacaccgccagataaccatcacatcgggagcaatggcggcactgctcgacaacaactgcgccatcgttacctgcgacagccacagcatgcccacaggcctgctgctgcccttggcaggcaattccatccaaagcgagcgtttccaagaccaaatcaatgcctcgctccctctgcgcaagcaactgtggcaacaaaccgtgcagtacaaaatccgcaaccaagtagccatactgcagcacaataccaccgccgagactggatgcatgacggaatgggctgccgccgtgcgcagcggcgaccccgacaacatcgagggacgtgcggcacactactactggcagcacctgttcgactttgtcgaggattttgcccgcgaccgcagcggcataccgcccaacgccatgctcaactacggctatgccatactgcgtgccgtggtggcacgggcattggtgtcgagcggcatgctccccactctcggcatccaccaccacaaccgctacaacgcctactgccttgccgacgacatcatggaaccctaccgcccctacgttgaccaactcgtcttcgacctcgtgcagcagtacggacttgccgaagaactgaccaaagaaatcaaaaagcagttgctcaccattcccacgctcgacgtggtaatagacggcaaacgcagtccgctgatggtaggcgtttcgcagaccacggcatcactctaccgctgtttctgtggcgagcagcgccgcatagcctacccattgttatgagccgtttcagcgaataccgtgtcatgtggctcatagtgcttttcgacctccccaccgagaccaaacgcgacatccgagcctacaccatgtttcgcaaaaacctgatacgcgacggtttcaccatgttccaattctcctcctatattcgccactgcgccagcatggagaatgccgaggtccacaaacgccgagtccgcgcctacctcccaccacatggcaaagtaggcatgctctgcctcaccgacaagcagtttggcgatatggaactctatttcagcaagaaacccgaaccgcccaatgcgccgggacagcagttagaactgttttaacccaaaattaggaaagggaaattcctctgaacgatggaatttccctttcattttgcataagttttttttcgtcacttttctttgcaagtcattcgtgataaggcacttaaaccatataagttgtttatcaactatgcaaaggtactaattttcaagcaaatcacaacatgtcgctacgggtgtagtcggtcaaggcggttgtttatcaactatgcaaaggtactaattttcaagcaaatcacaacattcttggtactcctttttttgttccttcagttgtttatcaactatgcaaaggtactaattttcaagcaaatcacaacgccttattatgatgatactcaggttgaagggttgtttatcaactatgcaaaggtactaattttcaagcaaatcacaacgatggtgtccaggttgatttgtttatgtttgttgtttatcaactatgcaaaggtactaattttcaagcaaatcacaacgtgatgaacatggtttagtaatgggcattagttgtttatcaactatgcaaaggtactaattttcaagcaaatcacaacggttctcgttatcgtcctaatgatgttcttgttgtttatcaactatgcaaaggtactaattttcaagcaaatcacaacaagcagccttttggttttcataggtgctgtgttgtttatcaactatgcaaaggtactaattttcaagcaaatcacaactatccgttgcggcgtaaacttgcagatttggttgtttatcaactatgcaaaggtactaattttcaagcaaatcacaacttggccttgcactggtcaaagaagtcggcagttgtttatcaactatgcaaaggtactaattttcaagcaaatcacaacttgattgattgtatagcactcgccatagcagttgtttatcaactatgcaaaggtactaattttcaagcaaatcacaacttcttcggcttcttttactttctttgtaagttgtttatcaactatgcaaaggtactaattttcaagcaaatcacaactaggtctcgtaatccgagagcgtgcccttgttgtttatcaactatgcaaaggtactaattttcaagcaaatcacaactatcgttttgttaggttcttcagttttaggttgtttatcaactatgcaaaggtactaattttcaagcaaatcacaaccaagtcctcgcccattgctgccgttagtcggttgtttatcaactatgcaaaggtactaattttcaagcaaatcacaactgatggcggggacgagatgcgcgcggagtgttgtttatcaactatgcaaaggtactaattttcaagcaaatcacaacttctttcaagttcgtctaaataaacatcttgttgtttatcaactatgcaaaggtactaattttcaagcaaatcacaaccgtcttaacgcagaaagtcgcggtgctgttgttgtttatcaactatgcaaaggtactaattttcaagcaaatcacaacctgctgcaggtctcaataagaacttgcttgcgttgtttatcaactatgcaaaggtactaattttcaagcaaatcacaacaggttaagacggggctcattaatgatattagttgtttatcaactatgcaaaggtactaattttcaagcaaatcacaacaggatcggctattgagtattcaagactcaagttgtttatcaactatgcaaaggtactaattttcaagcaaatcacaactgccaactgcagagggtaagacaaagtaaagttgtttatcaactatgcaaaggtactaattttcaagcaaatcacaacatattttcgttattgaaaaaataattataagttgtttatcaactatgcaaaggtactaattttcaagcaaatcacaactgcactgatggacaggacaggttctgcctcgttgtttatcaactatgcaaaggtactaattttcaagcaaatcacaacaaatggcggtgcatggtcttatagacgctgtgttgtttatcaactatgcaaaggtactaattttcaagcaaatcacaacttgatgaaaagaaagtcgcactgtgtgccgttgtttatcaactatgcaaaggtactaattttcaagcaaatcacaactgacgcatatgtatatatgcagtctgccggttgtttatcaactatgcaaaggtactaattttcaagcaaatcacaacaacgctgccgttattcaagttgcgagacagttgtttatcaactatgcaaaggtactaattttcaagcaaatcacaaccatttaccatttgacatcaagaacttaccgttgtttatcaactatgcaaaggtactaattttcaagcaaatcacaacataatcaggctattgctattgctggtcttagttgtttatcaactatgcaaaggtactaattttcaagcaaatcacaactacctctccgtgatgatataaaggaacttcgttgtttatcaactatgcaaaggtactaattttcaagcaaatcacaacgctgcctgctcggtagccagtcagttggccgttgtttatcaactatgcaaaggtactaattttcaagcaaatcacaactcgccgctggctttcttctccttggtggttgttgtttatcaactatgcaaaggtactaattttcaagcaaatcacaacgcaatggggctctcataaaatcatttattagttgtttatcaactatgcaaaggtactaattttcaagcaaatcacaactaattcacataaagttcaaccaaaaaattaagttgtttatcaactatgcaaaggtactaattttcaagcaaatcacaacaagcggctggctttaatcctgatttgctttgttgtttatcaactatgcaaaggtactaattttctttttccgcaataataaaacttttgttggtggatttttaatgtaattttttcgctttccattgctatattcacatcttaaatatgtgacaaaaaatctttatttgatgtggcacgaaaaaaatttgcaccattaaaataaacttggtactattgcaccaaatttctatgccatgctaaacctaaaaaagactaaaaaaagactgattatcagcttcaaaaacttaaacgatgatttaagaattctgttccgagacacctatcccgacggatataaagaatacatccagaaagcctacaagccagacggagaacctctttttgtggtcccgctcgaaacagaggacacctcttatcttattaaattcgacgtgaaggttgacaccctgcacgccgaagatatagagaaggagatgtttgacatcgacgacaaagccggtgacgacgatttcacacctatggctgacgagatggacaaggacgacgatatgtcgggcaaccataccgagcgggtgctgaaccacggaagttacgacagccttatggacgagatgacctccgacggcaagaaaaagaaagcgtcgaacaactttgacgatatacgcaacgagttgaaagaggagtttggctccgacgacgacgatgttgacgaatatcgcgacagttataccgatgacggcgatgatgacgatgaagaagagcccactgccgaagaccttgccgagatagacgaggagtttctgtcagacattgacgagcccaagtctgccaaaggcggcaagaaaggtacaaagaaggctgccgccgagaagtctgccacaaagacaaagaaggccgcagcagacaaaaagcccgccgcaaagaaaaccgcgacaaagaaaaaataaatcgtaaaactgccgagacactttcttatagcgtctcacacaaacatagaacaaaagaaggcggctgtccgttcggacagccgcctttcttactgactgattgaaacattatttctcgggcatggtttcgagagccgccacgagatagtcgtagaatttctgcacgctggcgatgttggcacgctcgtcggggctgtggggatagttgagcgtaggaccgaaggaaatcatctccatgtcgggataaacgccgcccaacagaccgcactccagaccggcatggatagccatgaccttgggctcggtgttgaagaggcgcttgtaggtctccttcatcgacttgaggaggccgctctgcatattgggcttccagccaggataggcgccgctgagggtgcactgtccgccagccatctcggcgaggcacaccagacgctcggcgagcaactccttggcggtatcgacgctgctgcgcagcagagccttgacggtgaatgtgccgttctcggtggtcatgctggcgaggttgagcgaggtctcgacgaggttttccatctcgctgctcatacgctgtacgccgttgggggcaaccatcacgaggttgatgagtttctgcgtgtcggcactggtgatgacctttgcgggcatatcgacagcctcatgcttcatgaagaaatcgggctcgacggaggcgagttccttcttaacccatgctgccactttgtcgaactcgtcggcaatgcacttggcatgctctttaggcatggcgaggacagcattagcatcgcgaggaatggcgttgcggagtccgccgccctcgacgctcacaaggcggatgccacattcggcgacccagcgcagatgacggaagagaatcttattggcgttgtcgcggccggtgttgatttccataccgctgtgaccgccttgcagaccgccgatggtgaggcgcatggcgcaatagtcggcaggagcagcctcggtggcataggggatggcgagggtggcgtcgataccgccagcgcaacccacatagagttcgccttcggtctcggagtcgaggttgagcagatagtcgcccttgagcacgccgctcttaaggccgaaagcaccggtcatgcccgtttcctcgtcggtggtgaaaagagcctccagcggaccatgcttgatggtcttggactccaggacagccatggcagcagccacgcccagaccgtcatcagcgccgagggtagtgtcgcaggcatagacccattcgcccttaatctgggtctcgatggggtctttcaggaagtcgtgcaccttgccagcgcgagcctgaggaaccatgtccatgtgggcttgcagcaccacggccttacggttttccatgccaggggtggcaggtttacgcattatgatattgccagtctcatcgacatgacattctatgccgcgctcggcagcccattttacgaggaattcgcgcaccacctcttcgtgtttcgacggacgggggcaacgagtaagcaggtagaaattctcccacactgccttgggttcaaggtctctgattgtcataggtttattgttttattggtttgacattatacttttgttcaggaaatgcgaagatacgtttttttattcttttatgcaaacgctatatgctacaacgctgatttaccgagcataaaagaaatgccgcactgcaagacacaggcggattggcaaaggcgggactaagaaatgacgatgaaaaactcgctattgatgcagatagcggtaggtgacgtcctcgatgacgcccaacaacacgacgaaaaacgactctatctcgccagccatgcgctgcaagcgcgatggcataggccacggagcgttctcccactgcgacgacaacggattttcgctgtcggaatagtcgtagtagttcacatctatcaactccgaggcaaggtttttccatgcttcggctttgcgctgttcaagaatgtcgcaagggtcggaaggcgtttccaactccacgatggatttatagatggactgctgcgtagccctggcttcggtcccatggagaacaaggaccttgtcgccagcctgcaaggccgaatagacttgctgtgtcatgctgccgaaataccacgacgcatcgacgacatagtattccaaattgaccatatcgtcggtatagtagtagataggcatgacgggctggggcgagccgtcgccgtcgggagcgtcatcgcgtgggaaatcgatgcgcgcaaggtttatcttctgacattcgttgagtgccgcaaccaactggtagccctgcagataagtacggaatacaagaaatgcgtattcgtctaagggataatcgtcgtcgagggtgaattcctgtcgtttagcggccatagcgttttagtttttatcaccctttgaacgagtcctgctggtcgaagtcgggacggcagacatcgcttgacgacaactcctgaagccagccgttgtagaagccaaggctgtcgaaatggcgcaccacacggtcatattcgtcggcagtgagcgtccgctgcagattgggcggcagagtggcaccctttggcggaaaatactgcgccatgacggagatatggatatttgacggcatattgtcggcaagccagtcgagcaccttgatgctgttgtccacctcgccaggcagaacaagatggcgcacgataagcccacggaaagccatgccacgctcgtcacacaacagtcccgaccctttctgccgagccatctcctttagagcctcggcagcacgctgcggatagtcggcagcattagaaagacgcgcggcaagcgaggagtccatgtacttgaaatcgggcagatagacatcgacataaggctccatgcggcgcaacgtagcaatatcgtcgtagccgttgctgttatataccaccgtaggattgtagccatcgcggcgcaaggcctcgactatctcgggcacactgtcggcataatgcgtggggctgacaaggccaagcacattctcgcactgcggcagcaggctctctatgcgctccacaacctcacgcaaagaatggtagaacacgcgcgaggattcgacctcggcgcgacttatatcgagattctggcaatagcaacactgcagattgcaatgcgagaaaaacacgttgcacacgcctttctcgccacaaagaggaggctcctcgccaggatgtatgcacaccgacgcaacctctggctctattcccgcatggcagaaacccatacgcgacacacggtccacaccgcagtgacgagggcaacacgaacaacctttttccatcgttttcacgggtgcaaaggtaagcgtttttttcgatagaaaccttttttttgctatctttgcattcgcaaacaaacaaaaccgaccaataaataaaattaccttttactatgaaaaaagtcatcagcacacccaacgcacctgcggccataggcccttacagccaggccattctcagcggcaacacgctctatatctcgggacaagtgcctatcgttcccgccactggcaaactcattgaaggcgacattacggcacaaaccgagcaggtgatgaagaatatcaaggccattctcgacgaggctggtttcaccttccaagacgtggtgaaaagcacctgcctgctggtctctatggactatttcaagcccatgaacgaggtttatgccaaatactaccccaccgacagccccgcacgcgctgctttcgctgtgcaggcactgcctatgggcgcactggtagagattgagactatcgccgtcaaaggctgatgccgaaataaaaccatcggacaacagttagtaaaaatgatataggactaatgcgggtattagtcctatatctttataagtagatgggcaaaattagttcacataatatgctcgcggagagagtaaatcgcaatacccccacacaaaattggtttgaggaataacacacaagggctctcggagagagccactctcaaatgcagattaatcttgactgcctacacattaaaacaaacatacataccatgcttgaagttggaacaaaagcccctcatttcgaaggttatgacgagaatggcaacatcgtgaaactgaccgatttcgccaacaagaaactcgtgctgtatttctatcccaaggacagcacccctggctgcaccgccgaggcttgcgacctgcgcgacaactaccagcgtttccttgcgctgggctacgaggttctgggcgtgagccgcgactcgcaggcttcgcatcagcgttttatagccaaatacgaactgcctttccaccttatctccgaccccgaatgtgctattctaaaagcatacgaggcatgggggctgaagaaaaactacggcaaggaaacgatgggcacactgcgcaccacctacgtcattgacgagcaaggcatcataatagacgccattgcaaaagtagatacgaaaaaccatagtgcccagttgctcaaatagcatttgccgtgtcacacctaataataacatcgcgtctggggcgtcttatgggacgtatgcctcacaaaatctttctcaataacacttttgtaggcattatgaatattccctctgtcaaaatagagttgccagaggggcaatacacattgaccatacagcatgccctacccgtcttatcggtgacgcaacaggtggctgtgaaaaacggcacagagacccatgtggatttctatagccgtgaacgctggtgggacatattgttttctatcgacctgctgctttgcgtcatcaaactatttgtcaccctaccgtcgccatggggttggatttacgagatactgaccaatggctttttcgtggcctggctcatatacgaatggtcgatacgcaaacgctattacaagatagacctctacgagacagccgacacaacggcacgatagaaaaggcgcagcgaatagaggcaaaacacaacgggtcgtcagtt

SEQ ID NO: 2350 - DNA, 16998 bp, synthetic construct
  source 1..16998: mol_type = other DNA
  misc_feature 1..16998: note = Synthetic
ttttcgttttgaacatttgatattatgttctttacaaccttgttagttcccaaaaattctgtagtcttatattttagtataagtggggcagtatattggagttttctatcataattcactaaaatataatctaaccacccctttgaaagagattccccttgaaaagaaacacttactttattatttacattcctaatgctgttagtcacttttctaattattttatcatttggatgtgccccagcattagtaataacaggcaaaaatataatagtatctatcaaaacattattgtaattaaatacaaatgatgtagtagtctcactttgagcagctggcttatattcaataattgccggcttaatcaagttgttattctcatcaaccaaaggcgtctttatatctaatggatattcctcaattttattatttgagaattgtttcccgagccacagtcttccactttcaaaaatattaactaattcttgctttgatagaaagaaatctcttgtagaaattgcacttgtgtcggcaacaagattctgatttgaagaagaactaattcttttcttttctccaatagaatcattaaatgttacaaaataataatattggtcagaatatgggtgaagattaaagctccatgtgtcctcttctttattaaaattccaagtgtttccaccttccccataaaaaatcacataacccccttgagaaaaattattattgggatcatgcacgtagatagaattctccaataaatcggaatgtgtgcaaagagaactatttgtagaaattggtcttcctccattcccataaatagaaaggtttgaagagttaatttgcgatgcaggaactcccattgcaataaaatcattataggttaacttatataacccagaagaagaaatggaaaacttataccaatcaccatgagctaaaactgaagaatcaggataactaatagactgagcatataatccactactcaatgtcataagacatataataagcgatttaatgatgtttttcttttgcataacttgaaatatattcaataaaaataatccagcaccaatataaacataaaaattaaatttttattgttgagctaaaaacaaaagaagaaaagaatatgataaataattttgggcaaaatgaccattttgtgcatattttgtaacataaagtacaataattctgtataatgggataaaattctatacataagaaataaattaattgtctattttgtgcttgaaaaacaatggttaagagaattgaaagtaaatttttaatccgtatattattaatcatttgtaattttttcgtaatattgccaattgaatttatacactattaaggataaataaacaaactgataatgaaaaaaatcatactatttacactgatagcatttatggctttagttggagaattaaaggcacaagaccctcatttttctcaattctatgctaatccactatatgttaatcctgcacttgctggttcaaccgtatgcccaagactgggattttctgtaagagatcagtggccaagtttgggtgcatttcaaacagcaactgtttcatacgatcaatatgtggatttcttaagtggaggtattggtgcaataatcttaggcgataaggcaggtgatgctttccgttcaacttctttttcattaatgtattcacttagactaaaattaacaagaaaaatcaacatgaaccttgctcttcaagcttcggtagctaacagaagtttggactttcaaggacttacttttgccgatatgattgatcctcgttatggttttatttattcaactcaagcccaacttccaccaagtttaagcaatacatatgcagactttgctgctggaacagttgtttatggcgataactggtatggaggtgcagcttttgctcatttaactcaaccagatgatggatttgtttcctacaatagactaccaatgaaagtaactattcatggagggatgaagttaaatattagtagagacaaaagaagaacaaatgctttctttggagctccaataatttctccaaatgtaatttataatatgcaaggaaaattccatgacttaaactacggtctatatttagattggtcaccatttattgtaggtgcttggttccgtcaagggtttaataatccagatgcttttgtttttatggcaggagttcaacatggtatgtttaagataggatatagttatgatataaccgtatcttcgctttcaaatgtatcaggaggagcacatgaaatttcacttggaatacaatttgattgcccagaaaagcgtaagaagttaaaatcaatagattgtccatctttttaaaagataattgtaacaaaaaatactaaaattgagtatataaggaagtaaacacgaaaaataaatagtaaaaatatattttgtatgaaaaaaaatgcattcaaaaagattttatttagcatagcaatagtagccctactatttggatgtaaagggaagaaagaagcttctttcaccacaggctggaactatgacgaccctgaatggggaggttttgaatcagcaaagcctaatgatcaattagaacctaatggaatggtatttgtagaagggggaacttttgttatgggacaaacaacagataatgttcgcaaagaatgggataaccaacctcgtagagcaacagtgtcatctttctatatggacgaatgtgaagtatcaaatttagattacagagagtatttatattggctacaaagagcttatggcaatgactatccagaatatgtaaagaaagctttgccagatacacttgtttggagatcaaaattagcattaaacgaagcctatgtagagaactatttccgtcatcctaactatgcagactttccagttgttggagtttcttggttacaagcagttgagtatgcaaattggagaacagaccgcgttaatgaaagaatattggttgaaaatggatacttagaattagacttagatgctcaaggagacaacacttttaatactgatgcttattatgctggattatacgaaggtttagttttggaagaaaaagaaaacttagacccaagttctgaaggagtaagaaaaatcaagatagaagacgggcttttattaccaaagtttcgtttgccaaccgaagcagaatgggaattttctgcttatgcactaattggaaacagcttcgatgaaagaattgttgaaagaagaatttatccatggaatggttaccaagtaagaactgacgacaagaaatattatggagaaatgttagccaacttcaagcgtactaagggtgatgctatgggtactgcaggagctttgaatgaccattgggaatacacagcaccagttgctttctatttccctaacgattatggcttatataatatggcaggaaacgttgcagaatggtgtttggatgtttatcgtccttcaacaaatcaagatgcagaagacattaatcctttccgtggaaacgtatatacaactaaggtattagatgctgatggaatgatttcagaaaaagactctttaggaagaattagctatagagaagtaaccgttgctgaaaatattaaccgtacaaactacaaacaagccgataatattaactatcttgacggagatcttcgttcacagctaacagaccaatggaagaaagaacaatcagaagatgaggatatgatagtttatgaagatgatcctgatgcaatgccagtttctgaaacaaatgcaatgtatgagtatggagtttcttcactaattactgacaaggtaagagttattaagggtggctcatggagagatagagcctactacctaagtccaggacaaagaagattcttagatcaagcaaagagtactgaatggataggtttccgttgtgcaatggaccaagttggctcaaaaagtatatactaatacataataaaatatgataatgagtctcatcttttaggtgagactttttttatatcaatttttttcttaatttcgcaagctcgaatgataaagaagtacgaacaaattatagctgatcttaagaccaagaacctttctccaatctatgtattgactggagacgagcctttctatattgatgcattggcagaacaatttgactccttagttttagacgaaacagagaaagatttcaatcaacaagtgctttacggaagagatattacgattgatgatattctctccaacgcaaaacaatacccaatgatgtcagattataggttgattttggttcgtgaggcacaagatattgagaaagaggactggacaaaatttgattcctattttaataatcctgtcccaacgtcaatcatcgtaatctgctataagtataaatcaataaataaagcattcttaaagaaggttgaaaaggcaggtgtagtttttgaaagcaagaaactctatgacaacaacatacctcaatggacaattaattatgctaagtcaattggcttaaagataaattcttatggctcacagcttattgccgactatttgggaaataatttagagaaaattgcaaatgagctatccaaactaaagctaaatctcaaggaaaatgaggaaataacaataaatctcattgaagaatatattggaataagtaaggattttaatgtttttgaactgcagaaggcattaacttcaagggatatacttactgcaaacagaataataaactatttcgaagcaaatccaaaggaaaacccaatccaaaggataatgcctgctctattgtcctacttcacaaagattattattgcagcacaagtaaaggacaaaaccccagataatatttcaaaagctattggagtcaataaattctacctaaatgaatacttaacagccatcaacagctttagcttagataaattattcaatataatatcactaattagggagtatgacctcaagtccaaaggattggatgttgctccaaatctttcaaacggcgacttgttaaaagaattagtatataaaataactcattagcacccccaacaaaaaaacaattagaaaaatcaatttcacccatgaataaacaaaccctacttctcctattcacatttctttccctctcattagtttctttttcccaaacaggaatgattaaaggctttgtatatgataaaaaatcaggtgagccaattctctttgctaacgtaagccttcaaaagactaattatggctcaacaaccgacgataatggatatttcgtaataaataaggttccaaaaggggagtattcacttagggtaagctttatgggctttgaagaacaattcgttcctgttcaaatccttgctggaggaatgctatctttacgaattgaattagaacctgtctcaacaatgcttcaagctgtagagattaatgccgataggcttgctgcaaggacagaaagtcaagtttcggttgagaaaatcacaccaagagaaataacacaaatgccttcaattggaggaagtgccgatctggctcaatatatgcaagtattaccaggggttatcttcaccggcgaccaaggaggacagctttacataagagggggctcagcaatacaaaacaaagtactcttagatggaatgataatctataatccttttcactccattggacttttctcagtttttgaaacagacataatcagaaatgcagacatattcactggtggctttggagcaaaatatggtggagccctttcatccatcatggacatctcaacaagagaaggaaataaaaaagaaacccacggcaagataggagcaagcacctttggagcaaacataatggttgaaggaccaataatcaaacaagacccttcaaaagaggtatcgctatcctatctcctaactgccaaaaactcctacctatccaaaacctcccaatcaatctattcctacattgatggctcactaccctacgacttcttagacatttacggaaagcttacccttagtggatacaacggttcaaagataaacctctttggttttaacttcaccgataaagtaaatcaatataaatccatagccaattttgactggacaaatagaggatttggtgcaaatttcctactcctaccaggcaacacaacagccctaattgaaggaatattagcctattccgactacacaataaatatggatgaaaccacaactaacaccgcaaggtcaagcaatattggaggattcaatgcaggactaacagcaacaaatttctttggagaaaacaaactaatatatggatttgaaatgattggctcaacaaccaacaccagcctaacccaatcagattccctaactaccacctccacccataacaccaactactcaaccgaaatgggagcctatatcctcttcaaaggaatatgggaaaaattcctctacgaaccaagcttcagaataaactactatggttcactaagcaaaggctcacccgaaccacgccttgccctaaaatataacctcacagaccgaatccgcctaaaaggagcagcaggaacctattcccaaatattcatcgacacaaaaccaagctacgacatagtaaacctcttcacagggtacctaaccatagacccagaaatgatgaatatagtcagcaactaccgaaacgaagaaataacctcctatctccaaacctccaaccactacatatttggagcagagtttgacctaacccaacgaataagcctaaatgccgaagcctactacaaaaccatgaaaggactaatatcccttaatagatacaaactatttgaagacgaccaagaacatagctcagcaggaacaagcccacagccagaacacctcaagaaagactatgcagttgaaaatggcaaagcctatggagtagatttcagtgcaaaatatgacgatggaagactctatgtttggacagtctattcactcggaaaagtagtaagagaagatgagcttatagagtacgcaccacactacgacagaagacacaacatcaacgtattgctatcctaccaattaggactctcacgctcatgggaaataagcctaagatggaactatggaagcggattcccattcaccccaaacaaaggaggacaagaactattggacttccaatcaggcataaactacgactatatatttgccaatggcaccctacaaatgctacttggcgactacaactccaaacgcctaccagaatatcaccgattagacctatccataaagaaacgctttgaaataaaacacacaatcttagaactaaacctaagcataaccaacctctacgaccgcaacaacctattctatcaagacagaatattagggcaaagagtagaccagttgccaataatgccaagcttcggactcaattggagcttctaattgttagcttttttttgtcagaattaggattcttgggattacaggattaattggatttttgttgtgtgggatttcttgctgaggcaagcggcaagccgatgagtaatcccacacgttattactataaggactttcaatcctttacaacagctaaacaactaaacctttcaacccctaaaccccaatttaaaagttaaaaattaaaatttgcaattctcaaaataaagtattgactaatcaagaaaaatttcgtatatttgcaaatacaaaatcttaagaataagtctgtagagatttaatacaaaattccccaataaagtttattaaaaaaagatgcacatcttttaccccgaaagatgtgcatcttttggtatgaaagatgtgcatctttcgagaattatctccttgttttaaaaatttataataaggttttgtgaaaatatatccttgttttgtaaaaatatctccttgttttattttgctgaaacaaggttttatttcacctattaatttttacttcataaagaattcttttccccatatttaggactcgtaaacttgttgactttcctttatatttttctaattctatattcataattttctttcaatttttaataattgagggttttgatacacttaaattttgtaactaattgattgatagctttcatacactattacaccccccttagtatagtgtaatggtgtaataagtttaataggttcagacttgcactaagacaagtttgcttagtgccaagtctaaactcttgatttattaaaaatattttatagctattttgtttgactgttgggaattctactcttactaattatcaattgatataaaaaaacgaaagtggaatataaaactccacttccgctttaaatgttttcacaacggaataatccttattgtgaattgctttaagtttgttcggcaaagatagaaaaaaaaactatacttgcaaattattttgaaaaaatttgaagatataaaaatatatttatacctttgaacattgaaataactaacgaataattacataattattatgaaaaagatattaggattagacttaggaactaacagtattggctgggctttagttaaggaagctgaaaatgaaaatgaaaaatcttcaataattaaacttggtgttagagttattcagtatgataattttgtaagtactgaaacagggaaagattctatggatcccataaaagattttttaggaggaaagggggtgtcagcaaatgctggtaggacaaaaaaacgttcagcaagaagaaacctacaaagatataagcttaggagagaaaacctaatacagatacttaaagataataatataattaacgataatactatacttgcagaaacaagtaatttctctacttttgaaacatataaacttagagctaaggcagctaatgataagattagcttagaagagttggctagagtgttgttaatgattaataagaagagaggctataagagttcaagaaaacttaaaggtcaagatgagggagagttggtggacggaatggatattgcaaaggaattatataataatgatatgacaccaggtgagtatatgcttggcgtattgagtagaggaaagaaaagcaaacctgagttttatacatctgaccttaaacaagagttgcaaaggatatgggaaacacaaaaacaatactatcctgagatactaaccgatgaattcaaaaatcaaattataggcaagagtaaaaccaacacatcaaagatatttttagctaaatatggaatctatacatccgaaaataaaggaaaggataaaaaggtagaagcttatcaatggagggttgaagcattaagcaaaaaagttgaaaaggatgttttggcttttgttattagtgatttaaatggaataattaataatacaagtggttatcttggtgcaattagtgatagaagcaaggaactatattttaataagcttacaataggacaatacttaatgaatggattcaatgataatcctcattttagtgtaaagaataaggtattttatagacaagactatttagatgaatttgaaaagatatgggaaacacaaaagacatatcataaagaattgacaaatgagcttaagaaagagataagagatataataatattctatcaaagaagattaaagagtcagaaaggattaatcaactattgcgaatttgaaaatgaaaagattgaaatagaagttgagggcaaaaaaaagaatatcacaattggctctaaggtgtgtcctaaatcatcacctttatttcaagaatttaagatatggcagatacttaataatcttatagtaaaagatgataaaaaaatgaaagaggattagagcaagaagaaaaagagatattatttaaggagttaaaccttaaaaataaactttcaaaatctgaagtccttaagctattatttgagaatcataataagttagatttaaactataaggaaattgaaggcaatagaactttcaatggcttatttaatgcttttgctcaaattgttgaaatgagtggtcatggtgagtatgattttaataagatgaatactgaccaaatattagatattgtaaggactgtattcacgtctttaggaataagggtagatattcttaattttgatacagatatagatggtgatgagtttgaaaaacaacctataatgaagttatggcatttgctttattcttttgagggagataattcaaaaacaggaactgaaaatcttttaaagaaactcaataaagaatatggttttgaaaaagattatggtaaagttattgctaatattagctttcaagatgattatggtagtttaagttcaaaagcaattaaaaaaatcttacctcatctaaaagaaggtaatggtttcgatgttgcttgtttattggcaggttataggcattcaaaaagctctttaactaaagaagagttagagaataaagaattaaaagataagcttgaattattgcctaagaacagtttgcgtaacccagtagttgaaaagatactaaaccaaatggtaaatgtggttaatcaagtaatagatacttatggtaaaccaacagaaataagaattgagttagcaagggatttgaaaaacaatgctgaggaaagaaaaaatatgaccgaagcaataagtcgaactaccaaagaacatgaagaatatcgagatataattaaaaaagaatttggttttttaagtgttagcaagaatgatttaattaggtataaactatatttagagttaaaagaaaatggttttaagactctatattctaatacttatatccctcgagaaaaaatattcgataagaattttgacatagaacatattattcctaaagctaagctatttgatgattctttttctaataaaacattagagcttagaactgcaaacatagaaaaaagcgaaatgacagcttatgactacgttaagaataaatattcagaagaaggactaaaagattacttaaatagaatagatttactttataaatcaaaggctatttcagaaacaaagtataaaaagttgaagatgcaagcttctgaaataccttctgactttattgatagagaccttagagattcacaatatattgctaaaaaagctcgccaaattcttcttgaaatatctaaagaagttgtttctacctcaggacaaattactgatagattaagaaaggattggcaattggtagatattatgaaggaattaaattgggataagtacgataagttgggaatgacagagatagttgagaataaagattcagagagaatatataggataaaggattggactaagagaaatgaccatcgccaccatgctatggatgccctaacaatagcctttacaaaacataactatatcaattatcttaataatctaaatgcaagagctgataaatcaagtaatgcttatgcaatagagcaaaaagaattatatagagattctcatggtaatttgaaattcatacctccaatgcctttaaatgattttagggtgcaggctaaacaacaacttgaggatattttagtatcaattaaggctaagaataaagttgttacaaggaatattaatacaactaagcaaaagggaggaacaaataaaaagcttcaacttacaccaagagggcaattgcatcttgaaacaatttatggagaattaaaacaatatgtaactaaggaagaaaagataggctcaagctttaatgaagaaaagataaatatggtagctaagaaatcatatagagaagctttattaaggcgattaagagaaaatgacaacgatacaaagaaggcatttactggcaagaattcattagataagaatcctttgtttattgatgctttacaaaccttcaaagtgcctgaaaaagttaagttagttgaatttgaaacaggatatacaattcgtaaggaaatatcccctgatttaaaaatagataaagttattgatgtaggcattagaagaaagcttgaagagagattaaagaaatatgataataaccctaagaaagcattttcaaacttagaggaagatcctatttggcttaatgaagagaaaggtattcaaataaaaagtgtaaagataaggggagttagtaatgcagtgccactaagaagtaaaagagataataaaggcgaattaatcttagataaagacggaaatactcaaaaagtagattttgtaaatacaggtaataaccaccatgttgctatttacaaagatgaaaaagataatttacaagaaaatgtaatcactttctttgaagcaactgcaagagcaaacgctgacattccaattattgataaatcttataatcatgataaaggatggcagttcctattcacaatgaaacaaaatgaatactttgtatttccaaatgaagaaacaggctttaatccaaaagaaatagacctactaaacccaattaattactcattgattagtcctaatttatatagagtacaaaagttatcaacgaaaaattatatgttcaatcatcatttagagactactgctgtgaatggagatatgcttaaaacaaaaaaacaattgtcaggagtaacatatagatttatccaaagcttaccttatattaaagatattgtaaaagtaagagttaatcacattggacatattgttggagtaggagagtattaatatagttatatgattaaacgcacgctatactttggttctggggcttatctaagtgttaaagatagtcagttggttgtgcaattagcagaagatataaccaatactaagaaaacaatgcctattgaagatattggtgtagttatattggataatcctcaaattactattactcaaagggtgttagttcaattacttgaaaataatgttgcacttataacatgcaatcaatttcatcatccaataggacttcaattatgcttggatagtaatactttgcagagtgaaagatttcaaactcaaattaatgcttctgagagtttaagaaagaatctttggcaacaaacaatcgttagtaagatttataatcaagcaatggtgttgaaagagtttgatgttccaataaggaatatgattacatggtcaaactctgttttgagtggagacagtaagaatcatgaagcaagagcagctgcctattattggaagaacttattggaatgtcatgataattttaaaagagaacgttttggggaatatccaaataatttcttcaattatgcctatgcaatactaagagccataactgctcgttctttggttgcttctggattgttgccaactcttggaattcatcataagaatagatataattcctattgtttggcagatgatataatggagccttatcgaccatttgcagataaattaattattgatattattggaaaatatccacaagaagaaactttaacaactcaaatcaaacaagaaatcttaaagctacctattattgatgttgagataaataaaaaaacaagcccattgcaaattgctatgcaagaaacaacttcatcgcttgctcaatgttttaattcaacaagaagaaaaataaaatatccaatttttggaacatagatttaatgcttataaaataatgtgggttttagtactatttgatttgccgactgaaacaaaagcagataggaagaattatgcaaattttagaaaagaattattaaaagatggctttactatgtttcagttttccatatatttgcgtcattgtccatcaaaagaaaatgcagatgttcatatagcaagagttaaaaggctattgcctcattatggcagtgtaggaattctttgtataaccgataagcaatttggcaatatggaaatcttttttggaaaacaacccaaagagaaccttaatgttgttcaacaattggaaatgttttaagaataattaactgtaaattaacgtaaattaactattggggattccccaaaaactatatgaaaattaatttttcttctaaaaagagagcaaaaaataaaagtttaggaattataaaaccctaaacttttatcctttaattgagtttgaatgatgatttaataaatcctaaacacttttctaattgtctcaaatacatttgcttaaagcaccctctgttgttgctgtaaagcaaagatacaaacttaaaagcaattcacaacattcaggctaatataaacaaacctacatacgttgttgctgtaaagcaaagatacaaacttaaaagcaattcacaactattgcctattcctactaaagcaacgtttggttgttgctgtaaagcaaagatacaaacttaaaagcaattcacaacagaaggtactttgggactttacccacaagagttgttgctgtaaagcaaagatacaaacttaaaagcaattcacaacccttgctatctgtgctttatttaaaccttggttgttgctgtaaagcaaagatacaaacttaaaagcaattcacaactatagcgaactatttaaggacgacggaggagttgttgctgtaaagcaaagatacaaacttaaaagcaattcacaactataataaattgatttatctcctctaacttgttgttgctgtaaagcaaagatacaaacttaaaagcaattcacaactcaggaatagctccattatacttttgccaagttgttgctgtaaagcaaagatacaaacttaaaagcaattcacaacgcaaaacaattatgtaaatagtgggcaaatgttgttgctgtaaagcaaagatacaaacttaaaagcaattcacaactgtcgttatgttaggattgaaaacaagaaagttgttgctgtaaagcaaagatacaaacttaaaagcaattcacaactacgaagggagttatgacacaaccacaaagttgttgctgtaaagcaaagatacaaacttaaaagcaattcacaactgtcgttatgttaggattgaaaacaagaaagttgttgctgtaaagcaaagatacaaacttaaaagcaattcacaacttgtgcaggtttttgaatataagtcgcaaagttgttgctgtaaagcaaagatacaaacttaaaagcaattcacaacagtaaaggcagtaatttatttgatggaattgttgttgctgtaaagcaaagatacaaacttaaaagcaattcacaactcctcacactctgattttatttttgccgccgttgttgctgtaaagcaaagatacaaacttaaaagcaattcacaacatggggagtattctctcgccctgcctgctggttgttgctgtaaagcaaagatacaaacttaaaagcaattcacaacccttattaatagatagattaaatacagtctgttgttgctgtaaagcaaagatacaaacttaaaagcaattcacaactaaaatacatcggtgacatatcgacaagttgttgttgctgtaaagcaaagatacaaacttaaaagcaattcacaacgacactgttgcatttagaaaaggcacatctgttgttgctgtaaagcaaagatacaaacttaaaagcaattcacaactttcgccactgcaatagcattagcaaaatagttgttgctgtaaagcaaagatacaaacttaaaagcaattcacaacctttttctgtgcggttggctttcttttttgttgttgctgtaaagcaaagatacaaacttaaaagcaattcacaacgaagaggtcaaagccaaaagcccagccattgttgttgctgtaaagcaaagatacaaacttaaaagcaattcacaacaaaatatcatggggtttgctgatgctttagttgttgctgtaaagcaaagatacaaacttaaaagcaattcacaacacttatgcagaggctattaaatgctatagagttgttgctgtaaagcaaagatacaaacttaaaaacaaacttatccatcaatctataattatgaatggagaacaaaaggaaatacagataggtttttcagcaagaggcataaggcatcttgaacacgacggttttcctaacttaacttataaatctctattaatgccaatattggatgaagtcgttaaggttgctgtatatgttggaactgatattaatggtgacatagagaacaacccaatggttaacctatatcattattttaaagtaatattattaggagaaaaatggtacttaaatgtaagagaattaaaggatggcaaatttcttttatactctttaacacaaagaaaagaaggtaaataatccatcacatgtttctctatcggaaagcagctgaaattataaaccttcttttcatttgcaaagatacaacataaaacacaaaaagtcaagtaaaagcaaataaatatgaatccaagccaatttaaacaggttttaatctgtatttgaacagcatttaaatgctttttaaattggtcagggttcataatttacttttttagttgacttttcttctaaattgttgtatatttgcatttgaaaagagtggttaacaacagctctcctattgtgaaggagcagatatgagttaattgctcttttctcttttagagttgttgctgtaaagcaaagatacaaacttaaaagcaattcacagctagattgtgaatgagtttactcccgtcgtgcgggatttccgactcccgcactattttactataaggatttttaatccgatatttgtttcattaacaagaataacatatccttataataacaacgtgcgggagtataaatcccgcacgaccaaaggatttttgtttaattgtttagttgtttaattgtttagttgttgttgcacacgtcgtgcgggatttccgactcccgcactattttactataaggatttttaatccgatatttgtttcattaacaagaataacatatccttataataacaacgtgcgggagtataaatcccgcacgaccaaaaatcctataaatctctaaatcctgtaaatcctgattcagacaatcatctcaacgcctcaacgaataaacaaaaaaagga

SEQ ID NO: 2351 - DNA, 16873 bp, synthetic construct
  misc_feature 1..16873: note = Synthetic
  source 1..16873: mol_type = other DNA
aaggaatttcatattctgtggccaaattttttccgccttcttttccaaaaatgtagtatttactatcaggaagttcggcaggagtgaagtagctcatattttcaaccaatcctaaaattttggcgttcagttgtgcctggccaaacattgcgatacctttttttgcatctgccagcgccacatcctgcggggtggtaacaattacaacgcccgtaacctgtaccaattgcattagtgtaagatgaatatcaccggttcccggcggcatatccaccaccagataatccaggtctccccagtttacatcggtaataaattgcctgattgcgctgcttgccattgggccacgccaaaccacagccttgctttcgtcaactaacaacccaatactcaacagttttatcccaaatcgttccaacggttctatcatgggtttcccgtcaacatcgcgcatcattggcctttcgccacgcacgccaaacataatggggacgctcggcccgtaaatatcagcgtccatcaggccaacttttgctcctttttgcgataaagcgagcgctaaattggcggcaacagtgcttttgcccacgccgcctttcccgcttattacggtaatgatattcttcacacccggtagcgtagtgccagcgttgggggggcgggtgcttgttgtgttgctggtaaagccaaccttaaccaccgcgtccttactcaccattgttttgattgctttcatgcaatcatccttcattttgtctttgagcgggcaagccggcgtagttaattcaatattgaaggaaatgtagtatttttcgataaccaggtctttaatcatacccagcgacacgaggtcttcatgcaaatcgggttcctgtactgtacttaatgcctgtaaaacttgttcttgcgtcatgctaattagttcatggttcatagttcatgggttggcaactgctgcaatttgcatttaaacagatgatatgtattcaaacagttgaggagtgcaacgcccgcccgaaaggacggccactacctgctcttcagttcgttacatataatcaatccataaacttctaaaccttatgttaaattcaatgataaactacaaagttaaacactcttaaccctattttgttgtcttatttagaaatgtgtttataaatttggcgctgtgataagattaatcgtttgttttacaatattttttgtgggttttgtcagtctcgcaaaggcgcaatttgaggcggcgcgcgatagtgtggtacaattatttggcgtggtgatgacggctgacagccttgacggcattcctgcggtaagcattactgtaagaggatcgcgccggggaaccgtttcgaacaacgacggcgtgttttcaattgccgttttaaagggagatgaaatcgaatttagccacgttagctataaaacaaaaattacgaggataccacgcaacctcgaaggtacccaatacagcattgtgcaattaatggtgcgggatacaacctatctgcccgtagcaattattcgtccgaggccaacgaaagagcaatttgcccgcgactttgtgaatgtgaaagtagctgaagatgaaatggagattctgcgcaaggcgaatacccgcgaaatgcaggccgcggtgatgcagcgcacattttatgacggtcgcgaactgaccaatcgccagcttgaccaagtgtaccaacgcgcgcgataccaggggcaactaccccctatgaatattttcaaccctgcagcgtgggccgaatttatcaatgcctggaaacggggcgattttcgacgaaaataatcaggaatttaacggctcaccatgatgggcggaacctgtaacgcggcgataataaagcgagagcatatttaagcgatctgacaaacggccatctgaatcatttcaaaaaatgaattggcaaagctacgaacaggaacaacattaagtggtatttcaatatcacggcgtatccttcataaaatggtgtaccactcaccgcccgaaccacgctattcaccgattaaatggagctttacacaataaaacctttgccgatagcgaatccgggggctatttttacataaaatttataaaaatgagtgacaatcaatttaattctggatattataataaacttgaaaaagcaacaaccgaaacttcttcatcgcagcaaccgccgcagttgaatccgaagccatcgcaaaaccatatttggattggaggaatactgctgattattgggattgtgattttactgaaaataatgggagttgtaatacccgaatatttggtttcgtggcaaatgctaatgatagtgattggtatttttgtgggcattcgtaaagattttcagggcgctacctgggcgatattaataatgatcggtacgctgtttctgataaatgaattttttgtttttggcgaactgcgccgctatatacttccaattattttgattggatctggattgtttttcatcttccgtccccgaaagtcgtataattatgttgagtataatgcggcagggcaatcttacgaaactccgttgcccagaggcgtgaatcctaccaacgaggattttatagatacaacttcgatttttggcggcaccaaaaaaaaggtttttagcaaggctttcagaggtggagatatggtgaatatttttggtggtagcgaaatagatcttacgcaagccgatataaatggaacagcagtaattgatgttaccacactttttggcggcgctactttgctggtgccctctaactggaacgttgtaagtaatgcggttgccatcctcggagaagtgaaagataaacgggcaatgaccaatataccagagaatagtaataaaacgctgataattaaaggtaccgtgatttttggcggagtggatgtgaagagtttttaaccagccagattgtgaaatcaagataagtataacaatcagtttttacctttaaccgtcccggtgcgagctcgggacggttaaaagccaagaaaatgcagccctctttataaatattttttacatgagccgaaatacttttttcagatcattttgcaacgataaccgtcaaatccaaaattaattatggccgtttcgcctctttctgctcgtcgttttttactgtcgctgggtggcgcatggctgggtttgcttttggcgcaatattttttactgagcaatcttaatttttcgttccaggttgccattattgacagccttatcagcaacacgctattgcttctggcggcatttttaattctgaatatcacgcggtattacctgccaacaacaacctcccagtatattggtgttattgctgtgtgtgctgtggtttgcgggctttggctttgggttatcaatagctttttgaaaatctattttggcgaatcgaaagtgtatctcgattttcttcacaattcgctggtgataaggtatagcatctcttttttgatgctggtgattgtcacaatcacgtcggtgctctggtacaactgggttgaacaaaagaagatagataaacgcaaatcagatgccgaaaggctatcaaaagaggccgaactttttaaattgcggcatcagttgcagccgcattttttgtttaacagcttaaactccatcaatgcgcttatagggattaatccgcagcaggcgcgcaaaatggttttgcagttatcagattttcttcgaggcacgcttaaaaaagaagaatctcagatggtttcgctggttgaagaagttggatacctaaacctatacctcgaaattgaaaaagtacgtttcggcaataggctggtaactgatattgttttaccggatgattgtaaagaaatgctcattccggctctgctgttacaaccggttgttgaaaatgcaattaaatttggactgtacgacacaaccggtgatgctgttatcaaaattcactgcaaaaaagacgatgacggcctgttgattatggtgagtaatccgcatgaccctgaaacctccctaccgatgaagggaaccggctttgggttgtcatctattaaaagaagattatatttactgtttgcgagaaatgatttgttgacagcctcaagcagcgataacacatttgaaacggttattagaataccacagtaaattagcacaatactaagcgaacgaaagtcgaaaacgatagactattagcaaaatccacgatctttaaaagacaaccaaatgaataaagtagtaattattgatgacgaatttttagcccgcagcatggttaaggagtacctgctgaaacatccgcaatttgaagtagttgccgagtgtggcgatgggtttgaagggttaaaagccattcaggaacacgaacccgacctgctttttctcgacattcaaatgccgaagatcagcggctttgaaatgctcgaacttgttgatgagccgccgtcggtaatttttgccacagcatttgatgaatacgccattaaggcttttgatgcgcacgcaatagactatttgttgaagccatttgaccaggaaagatttgacagggcgattgtgaagtttttagcccagcgccggggtgataacgctgccacaaaagatctcttaaatgatatacaactcccaaatataaacagcaggattgtagtgaagaatggaagtaaaataaaaattattcccgttcaggaagtgctttatcttgaagcggcagacgattttgtaaagatttttaccaaagatggctactacctgaagaataaaaccatggcgttctttgaatcttttttgccgcaggacatgtttgtacgcagtcaccgctcttacattgtgaacattggagaaatcacccgcattgatccctacgaaaaagatggacatgtggcagttttaaaaaatggcaccaaagtaaacgtcagtcgcaatgggtataccaggctgagggaggttctgggattgtaatcgtttgccgttgcaaagactcctaagcattattttaaaaatttaacttgctgtatataaaaaaaacgtcacctttaagaaaatttaaaaaattaaatcatgggtaaatttattgtttctactcgcaccaacggcgaattgcagttcaaactacaggcaggaaacgggcaaaccattttaagcagcgaaggctattcttcaaaatctgcttgccaaaacggaattgattctgtaaaaacgaattctcaggatgattcgaaattcgacaaacttacagcttccaacgggaagccttattttgtattaaaagccggaaatggtcaggttattggcaccagccaaatgtacgccgacgaagcaggaagggataatggtatttcatccgtacaagaaaatgcaaaagacgccgaagtggttgaagagtagcattcttttctgctaaatttagttttgacgggtaagttttgcttacccgtttttgattttcatccttttaaaaaatctgaacgtaaatctcgttacgccacttcctgcatctcaaccagcttcttgtaaaatccgttttggctaatcagttcttcgtgtgtgccgcgctcaactatttttcctttttgcaacacaataatctcgtcggcgtggcgaatagtgctaagccggtgtgcaattacaataacagtgcggttttgcatcatgttgttgatggcatcctgcaccaatcgttcgctttcagtgtcgagggatgatgtggcttcgtctaaaatcaagatgggcggatttttcaaaacagcccgcgcgatggtaagtctttgtttttctccgccgctgagtttgttgccacggtctccgatattggtatcatacttatcctccttttgtatgatgaaattgtgagcgttggcaatttttgcggctccaatcacttcttcgtttgtagcttcgctattccctaacgcaatgttgttggcaatagagtcattaaacaatataggctcttgcgttacaacgctcattaagttacgtaccgagtgcagagagtaatccttgatgtttactccgtcaatcagcacttctccacccgttacatcatgaaagcgcggtacaaggtcggccagtgttgactttccagcacccgaagagcccaccagcgctaccgtatttcctttctcaatgattagattaatgtcatccaaaatcaccgcatcatcataagcaaagcgaacatttctaaactcgattgtgctattaaaactctctaattttttaccatcagggttgtcgtcaacggtaacaggtgtgtgtaatacttcctcaattctgttaatggctgcagaacctttgttcaaattgctgaatgaagtggacagtgtttttaccgggttgatcaaggtgtaaaacatcgtgagataagcaagaaaggcggcaggctccatgtccagttgatttgaaagtatttgccggccaccaaaaaaaacgatgccaataaaaacgagcacacctaaaaactcagatactggtgaggctgcgtctctgcgcctgataatcttgttttttgcgcgaagcaatccgtcattaaaaaagctaaaacgctctcttaaaaccgattcaatattgaaggctttaattaccctcaggccgtttagggtttcatcaagcaccgataaagtttctccctgttttatggcagcatcgttggaatccttttttaaagcttttgaaatcctacccaaaataaatccaatcacgggaatggtaataagtattccagtggtaagaatggggctaacccaaaacaacgccactaatgtaataataatcgttataggatcgcgaaaccagccttcaagagcaccaactactgagccttcaacttccgaaacatcattagtaatgcggctgatgagatcgccttttcttttttcgttaaaatatccgatgggcagggttagtattttctcgtacaagtccgaccggagcctgtttgtaatctgatttttgagcggatttaaaatgtacaaggaaaggtaggtgaatagattcttgaaaaacaccgcaacaatcatcaccaggcaggtaacagccaataaagcggttgacgacattcttgaagccgatatgagcctcatcaaatggttcttcatctgtcccagcagatcagtttttgagatatcggcatcaataaccgcagaattttgcccgttaaagattacatctaaaaaggggtacagtaaagcgaagctgaaaagtgaaaatacgattgcgaggattgttacaacaatataaagcgctactttctttttgtaatgccccaggtagaaaaatattctggaatatttcttcatttgaattgataggtgtaaacgtgcaaaaataactatttttacagttcacaaatgataagattatgcaggagagtaaacgacagaagcaggtagccggtttgttgaatgaagaaataaatacaattttccaaaagttgggattgaacatgataaatggcggtatggtttcaatatctgacgtgaaggtgactcccgatcttttagaggcgaggttttacgtcagtttcttccaggtgaacgatactgacgaggcgttgaaaaagattgaagaccggcatcatgaaattaaaagagagttggctgcgtcggtgaggcatcagctacgaaatattcctgttttgaaattcttctcagatgatactctcaaccacgttttcaggatggaagaattgtttaaaaagattaacgaagaaaaggataacaaagcataagagggtgcggaagctaccggcaaccacgatgctcacacaataaatataatgcactttttatttgcatggcgatatttcagggctaaaaaatccaccaatgtaattaacatcattgcatggatatgcattactgcaattgtggtgggaacagccgcattaattttagtgttgagcgttttcaatggttttgaaggacttgttaaatctctttattcatctttttatcccgatatcagaattggtgcaaaatccggaaaagttattaccctaagccacgagcagttgcaaaaactcaggcaagtgaaaggtatcaaaagcttctcgctcgttgttgaagaaaagggcattttgcagattgatgagaaccagtcgctggtatatttgaagggggttgacagcaattacgaaaacacaacctctgttgccaaacatattgatgacggccagtatgatattggaacagccacacagcccaaacttattgttggtgcaggaatagagggtactttaggaataagagcggctcacagccttttccccctcacaatccatattcctcgccgaagtggttcggagcaaattgatccgatgcgtgatattgccagcgataccattcatacttctgccgcatttatgattcagcaggattttgacaatacatacgcaatcactcatcttagttttttgaaagacgcaatgcaactgaatcctgatgaatttacagcagttgaagttgctgtaaatgatccgtcaaaaaccgatgatataaaaaatgagatagtaaagctttttaatcataattaccttgttcaaaacaggtacgagcaaaaccaaagcctgtactccgtaatgaacatggagcgctgggttttctatgccattctatgcctgatacttgttgttgccgcatttaacatggtaggtgcgttgaccatgttggttctcgaaaagcaaaaggacattagcatattaaacgcgctgggggccgacagaaactttattctgcgtatttttctaaacgaaggatttctattggcgatcattggcggcacaattggaatgttgctggcattaggcatggtgatgattcaacaacagttccatgtaatccctttaacgggagggtcttttctgataaactacttccctgttgaattacgactggccgattttatattggttaccgttaccgtaattgtcatcgcgttcattgcatcatttgtacccgcgctaaaagcatcccgacaggaattttcgttgcgggcagaatagttactacctttgcgccttcaatttttaaacattatgatcaggctgatagtaaccgatttggatggctctctcttaaacgataacaaagaaatttcagaagatttctgggaggtggaaaaggctttacatgaaaacggaattaccttttctgtggcaagcggcaggccattgcataatattgtaatggagtttgatgcgataaaggaaagaacctattttattagcgataacggaagttacattgtttatcgcgatgaagaattgctggttttgccgcttagcaaagaaattattaacgagtttgtagcggtatcaagagggatagaaaaggtttatcctgttctatgcagcaagcacatggctttcttggaagatgacgatgaagaacttttgaacgtagccctgcaatactaccaggaatatgagattgtagaacggcttgaagatgtaacggaaccggtgttaaaaatttcaatgtgcgactttggagatccgcataccaacagttatccgcattttaaaaagtacgagaacgattataaagtggcagtcgccggcacgcgctggctggatattacgggctttgatgccgacaaaggcaaagccgtgaaacgactgcaacaaaagcttggcattagctatgatgaaacgatggtttttggcgactaccttaacgatctgcaattaatgaaagcaggtaaatacagctttgcgatgaagaatgctcaacccgaaattattaaagcggcgaattttgtaacaacgtttgataataatgaggacggagttgtaaaaacgattaaatctttcttgcccggtatttttacccagtcgtaagtaattttctccccggaggtttttgcatatttgatcatgcagaagcaaatcaccgcgaaagttgggtttgtatagtgccgctatctgatacttggttatgcgggaaatgcgttgtatttttaggcaaaggttgcaaaaagaaaggcgacgacttgcgccgccttaaatgttttcacaacggaataatccttattgtgaattgctttcaagtttgaatgtgaaaatagaaaatcttttgtactttccaaattatttagctaaaaatctaacttttatgaataaaaaaatattaggactggacctgggaacgaactcgattgggtgggcgtatgtaaccgagggtgaaactcaaaacgaatctgaaataaaacagattggagtgcgggtgaatcctttgacggtggatgaacaaaccaatttcgaaaaaggaaaacctattacaacaaacgccgatagaacattgaaacgtggtgcaagacgcacattagaccgctatcaattaagaagagaagaacttagaaaaatactgcttcaacatagtatcattactcaaaatacccttctgtcagaagatggaaaaggtactacattttctacctgggaatacagatccaaagcagctaacgaaaaaataaccttagaagcttttgccagagtgctttttgccatcaacaagaaacgtggctataaaagcagccgtaaagccaaaaatgaagaagatggaaaagcagttgacggaatgggtttggctaaaaagctatacgacgaaaaaattacacccgggcagctggtttttcaacgattaatggaaggaaaaaagaatgtgccggatttttaccgctctgatttacaggcagagtttgacaaggtgtcgagttttcaaaagcaattttatcctgaaatattaacagatgagctttatcaagccttgaaaaaccaaggaaaagagaatacaaggaaaagaattttagcaattgcaaaagtttatacagctgatatcaaagaattggaagacagcctgaagaatgtgaacaccattaaacttcatgcccgagatcaaaaaaaattgcaagcttacaaatggaggagtgatgctgtgagcaagcaattggagaaggaacagatggcttatgtactaacagaaatcaataataacctcaataattccagtggttatttgggtgctatctctgacagaagcaaggaattatatttcaaccaccaaaccgtagggcagtatttataccagcaacttttgacaaataggcacacgaagcttaaaaatcaggttttttaccgtcaggattatttagatgagtttgaaaaaatatggacgacacaagcatcttttcatccgcaactgaccgaagcacttaaagaggaaattcgggatattattatcttctaccaacgtaaattaaaatcccaaaaaggattgattagcttttgtgaatttgaaagcaaagaaattgatgtttcgacaggctcaacatccaaaaagaaaaccgttggaatgcgggtaactccaaagtcttctcctttgtttcaagaatttaagatttggcagaatctcaataatgtgttggttcgcaaaaaaggtagcaaaaaaagggttgttaagtcgcagcaacaaccagaacttttcgaaactgaacaagagattttcaatttaagtggtgaagcaaaacaggcaatctttgacgaattaaatatcaaaggcaatttgtcatccgcagctatcatttccatattaggatacaaacctacagattgggaaatgaactatacccaattggaaggtaaccgaaccaatcaggttttgtataatgcttatttgaaaattttggagcaagaaggctataatgaagatttgctaaagctttcagataaagatgagatagacgtgaaagagcttaaaacacctgctgctgaaatcaggcaaatggtaaaagctatttttgaagtcctagaaattaataccgacatcttagtattcaatccagaattagaaggcaaagattttgaaaatcaagcttcctatcaactatggcatttgctttactcagcagaagacgatactaaaaaatatagccatgaagacattcagctttatggcaatgataatatcggattgaaaaaacaattgtgtgctaaatttggtttcaagcccgatcatactaagatattggccaatgtggtttttcaggatgattatggcagtctttctactaaagcgatgcgaaaaatttatccttacatcaaagaaagtaaatacagcgatgcttgtgaactggcaggttatcgtcattctaaaaactcccatacaagggaagaattagctagcagaaccttaaagccaaaacttgatttgcttaagaaaaattcgttgcgaaatccggtggtggagaaaattctcaaccagatggtgaatgtggtgaatacaatcattgataaagaaaatgatgttcttgaaaaggagagaaaagaacccaatttccaatttgatgaaatacgaattgaattggctcgtgagctgaaaaagaatgctaaagaaagagccgaaatgaccaccaatatcaacgctgctaaatcggcacatgacagtattgtaaaacttttacaaactgaatttggagtacccaacccaacccggaacgatatcattcgctataaactctacgaagaactaaagaacaccggctacaaagatttatataccaacacctatattccaagagacattctgtttagcaagcaaattgacattgagcatatcattcctcagtctcgcttgttcgacgatagcttctccaacaaaacggtggtttaccgaaccgacaatttagctaagggcaaccttactgcttatgatttcattgcacaaaaaggagcggatgcattgaaagcctacgaagagcgggttgaaaatttatttaagcaaaaggaaaacggaatctctaaagcgaaatacaaaaaattgttgatgcctgaaagcgaaataggagatggatttattgaacgggatttgcgcgaaacccaatacatcgctaaaaaggcaaaagaaatgcttttcgaaattacccgctcggttgtttctacttccggtcaaattaccgaccgcttgcgtgaagattgggatttggtaaacattatgaaagaactgaacctgcctaagtaccgggcattgggtttaaccgaaatggaagaacgcaaatacggacagcaggtagaagtaataaaggactggacgaaacgcaacgaccaccgacaccatgctatggatgcactgaccattgcatttaccaaacatggctatatccaatatctcaactacctgaatgcccggaagaacgaacggcataaactgcatggaaacattattgccatcgaaacaaaagaaacggaaatgcaaatagatgaccagggaaacagaaagcgggttttcaaactacccatcaaaaatttccgacaaatagccaaagagcatttggaaaatgtaattgtatcgcacaaggcaaaaaataaggtggttaccaaaaacaagaataaagtaagaggctcaaataaagtacaagaagctttaactcctcgtggacaattgcacaaagaaaccgtgtatggcagataccaattttacgagcagaaagaagaaaaagtcagcggtaaatttgataaagaaacgattaagaaagtaagcaatccactttttaaacaactcttgttgcaacgcttagaagaaaacggcaatgaccctaaaaaagcatttactggaaaaaacaccttggagaaaaatccaatttacttaaatgtagaaaaaacggaagtagtacctgaaaaagtgaaattggtttggctagaagaagatttttccatcagaaaagatgtaacgcccgatttaaaaattgacaaggtaatagacaaagctgtgagaacagttttggaagatcgtttgaaagactttggtggcgatgctaaaaaggcatttgttgatttagacaaaaaccccatctggctcaacaaagaaaaaggcatcagcatcaaacgtgttaccatatcaggggtaagcaatgcagtggctttaaacaataagaaagaccatcacgggaaagaaattttagatgccaaggggaaacctacggctgttgattttgtacaaaccggcagcaaccaccacgtagcagtgtaccgagatgagcatggcaatttgcaggaaaatgtagtttctttctttgataccgtagagcgtgttaatcagggtttgccgattattgataagacatacaaactaagcgaaggctggcagtttctatttagcatgaaacaaaatgaactctttgtcttcccgaatgaaaaaacaggatttaaccctaatgaaatagatttattcgactcaaataataaaaaattgattagcccgaatctgtttagggtgcagaaattttcaaaagtaacatacggtaattccgcagttagagaatatgtttttagacatcatttagaaactactgttgatgataagaaagaattgaaagaatttacctataaaaatattaaaagtttaggatactttgaaggaataataaaagtccgtaccaatcatttgggcgatattattggggtcggagaatattaaggaaaactcactcctcgaaagttctaaaacattggaggagtatattaaaataaataacgatgctccagttcgaaactttctaccacatctacaaccacgccaatggcgatgacaacctgtttcgggagcagaagaactatccatttttcatggagaaataccatcagcatattgacccgattgccgaaaccatcgcctggtgcctgatgccgaaccatttccatctgctggtaaaaattagaagcgaggaggaggtgttcgataatttatcaacaaacttttctaaagtttcgaactttagaaaagttgttgatataaaagaagacgatttaaaacgaaaactcctcagcaagcagttcgctaattttttcagcagctatacgcaggctttcaacaaggtgtataacagacggggttctttattcatcaagaattttaaaagaaaagaagttgaggatgaaagctatctccgaaacctgattctttacattcatctgaacccgataaaacatggctttgtaaaacttatcaacgattggagtcctacatcttatcatacgttccctatcgagaggcctgcatatctgacaagcttgtattctgatgagcaggagtacctgcaacaacaccaggaaaagcaacaggtgtttaaagaatatcaaactatagagcatgatttaaaataagcctatgatcaaacgaaccctttactttggcaatccagcttatctgaaaacaaagaatgaacaattgattgtggagttgacggctaccgacgaagtgaaaacagccgcaattgaagatattggggtattgattttagaccatcagcaaataaccatcacccatgccgtaatagccaaactgctggccaacaacgtagcgttgattacctgcgatgagcggcatcatcctaccggcatgttactgaacctagatggacataccttgcagagccaacggtttcagtatcagttagaagcttctatgccattgaaaaaacaactttggcaacaaacggtgatggccaaaattgtaaaccaggccaacctactggcattgtacaggattcaaaataaaacgttggtaaatctggtaagcaaagtaaagagtggggatgctgacaactgtgaggctcaggccgcggcttactattggaaaaatgtattcccacttttccccaactttaaacgattccgggaaggagatccacccaacaatctgctcaattatggatatgctgttctgcgggcagtggtagcccgaagtttggttggctccggcttattgcctacgctgggcatctttcaccgcaaccagtataatgcctattgtctggccgatgatatgatggagccttaccggccttatgtggataagacggtgtatgacattgttagaaacaatggacattttttggaaatcacccctgtaatgaagcaacagcttttaggcattccggcaatggacgtagtgatagatgaagaaaaaagtcccctgatgaatgctgtgcaacgtaccactgccagcctggcaaaatgctttgaggggaaaagccgtaaacttttgtttccggaattgtctacctcttttggatagaccatgaattttgaacgattaaatgcgtaccgaattatgtgggtgatagtaatgttcgatttgcccaataatacaaaagccgagaataagcggtacacccggtttcggaaacagattctggacgatggattttctatgttccagttcagcatgtatatccggcattgttccagccgcgaaaatgccgaagtgcatatcaaacggataaaaaacattcttccggtaaaaggtcatatcggaattttgtgtattaccgataaacaatttggtcaaatggaaatctttaacgggaaagatctgaccgagataccccagccagcgcaacaattagaattgttctaaatgccggaataggaataaaaaaacgggaaattgtcccgtttttttatactgttgacatcctaaaatcctttgttgtggcggctttgagcaaatcgtgatgtcaaagaccaaagatcataaaaacttgaaagcaattcacaactatctactctaaaaggaatttttaaaccgcagaataaaacatcagtgagtgaagtatggctaatggttgacgataataatttacttataatacctcgcggtgttgttaacaacaaaaattattacaaaatatggcaggctttttaacggccaaggcggttacaactttcgccgtaaccgccttgccttactacatgcgggtcgtaacccgcacgccacaaatatacaaaaatgtcgttagaaacaaaaagggtgcatcccaaattttcgcatttaaaaaatgggtaattttagagaacaaaacccattagatatgacaaagca

SEQ ID NO: 2352 - DNA, 16860 bp, synthetic construct
  source 1..16860: mol_type = other DNA
  misc_feature 1..16860: note = Synthetic
agggtcggcatcgaggttacgggcgcgaagtgtaagcttttgcttggcgtagaaggggtttacccaaaagaaaccgttctccttaactgttccctcgtacttaccaaagaacaccattactcgtgcctcgttgggctcaatctgcataaaacctccccagaatatacagtttaggacaaatagcactcccagtccaatgcccgatagggtagccattagcggggtgatgcttgatgtgctaaccaatttaatgaataggaatacgatgccaaatagtagtagaaagttgaagattagcattaggattccgttcagttttaatcctttgaagggttcttcttgtgttttcatactcttttttgaattagtgatattaaaatgatatcacaaatatatcacattgaatttgtataatcccaaaaaaagccagaaaattttctggcttttttaaagatgttaatgcaacctgttgctagttaatacgattcattatcctttggataacttcgtccgagacctcaggcgctttttcatcaatttccttcagaagattttggaatttatccagaggttttgtcaggctgtgtaaatcgtaaatttcgtcaatctgatgatcttgaaaactctggaagttccataggatttgagtaaaagttttattcataggcattttactgttgatttacttttttattggttgccaacagtagaacgactacaacagcctgatattgtaaacttgttaaaatatttacagggttggttttgtgtaaaccaaaaagcttttaaaaacagttgtttgtgagattgacttagcgttatattgaggaacatttgtgctttctgtaaaacaatttttcaaacatcaataaaaaggaagcccaaggctgccgcacgagtcccctcgtgtggttttcctatcttttattgccacacgagaggactcgtgcggcagcaatgtgacgagatgaaaatctgtcattgataacgaagcgaggccacgatttagcagcgaaactaaatctattttaattagttggtcagtagtgttagtttttgttttctcttagaaaattgaacctactttgctaggcaaatatttcgctcctccataatttttcgcatatttatcagtgcgtagcgcatacgaccaagggccgtgttgatgcttacattggtttgctcggcaatctccttaaagctaagccctgcgtagtgtctcagcataacaacctccttctggtcgtcgggaagactatcaaccaagtctctcacctccgaaagtatttgctcgtacacaatatgctcctccacgttcttgtcggagaaacggggcgagttaaagatatccacaggcgtactttcattcgataccgtattaagctgtttttcgcgcctaaaatggtcaattattaggttgtgggcaattcgcatcacccacgacacaaaacgtccgttatcggtgtatttccctttctgtagcgattggattaccttaacaaaagtatcctgaaaaatatcctcagctaaagtatggttcttcacaagaagaacaatgtaaccaaatactcttttgcgatgcctacggataagggtgtcaattgcctgctgattgcccgaaatgaactgctctacaagctcattatcggtttgatgctttgtgctcaaatccatctccttacttattgattagttgggtagatgtgattctataggcaatcgatttaaaggttagtgtttgtattcgttaacattttctgtgccaaataagcgaaaaaaaacaaatccgccaaaaaaatatgataaaaatgtttgttgtagtttgattatgtgatttttatggatttttatattgccaacttgaaaacttactaatgggttaaacgcaaatctttacctacatttgtgggttaattttatacgaaatgcagaatcagaatgtaatctccataaagggcgctagggttcataatttaaagaatgtaagcgtcgatatacctcgaaataagcttattgtaatatcaggcctttctggctccggtaaatcttcgttagcattcgatacgctttatgccgaggggcaaaggcgatatgtcgagagcctgtcggcatatgcccgccagtttctggggagaatttccaaacctgaggtcgatttaatctcgggaatccctcccgccattgccattgagcagaaggtaaatactcagaaccctcggtcgacggttggaacatcaaccgaaatatacgactacatcaaattgctttatgcccgaattgggcgcacctattcgccgatttcgggcattgaggtgaccaagcacagcgttaccgatgtggtaaatttcatcgcctcgtttcccgagggtaccaagcagatgcttttaactcccataaatattagggagaaggaaacagttgagcagcgcctaaccatactggccaacgagggctttacacgtattgaggtgggtgaccagattcagcgtatcgatagcaacgaaactcgtcagctgctctccatatccaaagcaaaacttaggctggtggtggataggttctcggtttcgcacgacgacgatttcttgagccgttgcgccgattcggtgcaaactgcttttgccgagggcaatggggtgtgcgtattggcaactttcgaaggggatacacggaaggaggaagttttctcaaatcggtttgaagctgacggaattacgtttgaggaaccaaccgagcatctgttcagcttcaacaatccgcttggtgcctgcccccgatgcgagggatacggtaaggttattgggatagatgaggcgctggtggtgcccgataagggtttatcgatatacgaagatgccattgcctgctggaaaggtgagaccatgagcgagtacaagaagctattcatctcggtggccgaaaggtttggcttccccattcacaagccattttatcaactcacgcaggagcaaagggatttgctttggcgtggtggcgaaggttttgttggattggacgatttctttgcacacctcgagagtaaaaagtacaagattcagtacagggtgatgctgtcgcgttacactggcaaaactttgtgccccgagtgtaaggggcaacgcctgcgcaaggaagcaacatacattaaggtttctggtgtgaatcttcctcagctggttgatttgcccattaccaagctacacgatttttttcaagatattacccttacggagcatgagcaaaaggtggctaagcgaattcttaccgagattaggaatagaatatcgtatcttctaaatgtgggcttgggctacctaacgcttaaccgcttgtcgtctacattatcgggcggcgaatcgcagcgtatcaatctggcaacctcgttggggtcgagcctggtgggctcgctgtatattctcgatgagccaagcattgggctgcatccgcgcgatacgcatttgcttattgatgtgcttaataatctgcgcgatttgggaaatacggtggtggtggtggagcacgacgaggagataattcgcgctgccgattacataattgatattggcccgttagctggtcgtcatggtggcgaggtggtttttgagggaaccccaaaggctatgctaaaatcggggcaaaccctcactgccaaatatcttaatggtgatgagattattgcaccagtaaccgcaccacgcaaatggagtaattttattagagtaaagggagcgcgcgagaataatcttaaaaatatcgatgtgcaatttccgcttaacagcatggtggtggtaacgggggttagcggctcgggaaaatcatcattggtaaaggggattctatacccttcgttggccaagaagatatcgggagtaggcgataaacctggggagtgcgacggtattgatggtgatatacatctgctgaaaggggttgagatggtggaccaaaatccaattggccgttcgtctcgctcaaatcctgtgacatacattaaggcctacgatgagattcgtaagctcttctcggagcaaccctacgccactaggagtggctacaagccatccttcttctcgttcaacgtggagggaggccgatgcgaagagtgccagggcgaggggattattaaggttgagatgcagttcatggctgatgtgacgcttacctgtgagtcgtgcggaggcaagcgctttaaggaggacgtgctggaggttcgctaccgcgataagaatatatacgatgtgctggatatgaccgtaaatcaggccattgagttctttggtgaggataaggataaaacggctaccaaggtggtaaatcgattaaaaccattgcaggatgtggggcttgggtacattaagctggggcaatcgtcgagcacgttgagcgggggcgagagccagcgcgtaaagctagcattctttctgcagaaggaacaggccacccagcatcagctgttcattttcgatgagcccaccacgggccttcattttcacgatatcaagaagttactcgagtcgttcgatgcgctggttaaaaaaggccatagccttattgtggttgagcataaccttgaggttataaaaaatgccgattggattgtcgacctgggccccgaagggggcgagggtggaggtaatctcgtttttgctggtacacccaacgatattattggttgcaaagagagtctaacgggtcagtttttagtggggaaggtgtagggttataacccattttactgaaatcattcccacgtttatccctattcagagcaatctatttatttggcaaccatatgttctaacctactttattagggataagcatccctggtgtagcgtttttttcctgctgtatctttattgcattgcgataaagatacagtaaaatcaactcatacgtattgttaagacccttattgccagatttctagtttatgcgttttattctctttttccaattttcaactatatttctcttcgggtgaaagaatagatttaagtatttgttggattttattaaggttttcaataaatttagcaagccaacttacggatcaattaatggcttgttaagttgtgcttttgaggtaaacagttccttctacattctagataatatacttaggcaaactggttccatccaattgcactcggcaatttgtctgctaaaaaaccctaaagtttaaaccaatatactgcctctcaaaaatgttttctaagtctctaactttattttttaaagtattactagttttatgtggttttggtgctactgcacagtacgatgaacagttgaagaacgatcggtcatactatttcaatattcctccacaaccaaagcaaaaacagttctacttaaggctaggttcgggtattgcaacgtactataaatcggatcacaggtatatgcagaattttagaattccgctttcgttccaattagaggtggaaagcaataagtttcccttttcatttgttgcaaacaccaatttattaacgcaattctacctcgatgactttgtttttgctccaagtgctgctacggttagcctaaagtactccctggcatatcttctcaataagccttcaaaattcgatttttttgttctggggggtgccggtggatggtatgcttaccttaccgatattgagtatgctcaggttaaggcctatacctacaaaagcgaaaccgattttggtataggtgttacaggagggggtgggctgtcgtatcgctatttcgatttcgactttggcctgcagtacatgtatttttatggtaaggctcacttcattgccggttatttcgatccgcagaacttttacatcgggtcgcaccaattacattttacagtaagttataagttctggattaataaggccaggtataagtgcccatcgtatcgcaaatttgcctcgagatgaaaaagataaccctactactggcaagcctaattgtatttgcaatgttactttttgtggcttgtgagcgcgattatcccgttcctatcgatgtgtttgaggaggaagtgcttgatgacccttaccaaataccaacctccgatattgccaatggtaatgagctatttgttaacaacgatagaattaggccaaccgacgatggataccacatcaagggaactgtgtttgccaactccaaatcgggacttatttcagttaccagcggcgatttttatgtagatattgacaatactaccagcaagagcaacgctatgagcattgatggttatggtacatttgagtttcctcaggctggtattatgcagcatttcgaccccgaaaccgcacagggtagctttgtgtactacaatacgggatctttttttaaaagccaagagggaaaggatgattaccccataaccgacgatttttactacttccactacgagaaggatactagcaaatccgataagtctggcacctctagcaaggatagtacccgaacccgtaagatgaagaactccaagtttaagtttcgggagttctacatggatgtgtccgatccacaggtttttattctaggcgattacgaaaccaaaaccaacgtttacaaagatctttggatgggcttttcggccaatcatcttttcgaatttgatccctaccattacagcgataggctcgatgaggtggctggtgggatggggttttacccaatgaatggtaacttttacatggccggaaaaattcccattaagaagtatcaggtaaaaatcgacgggaaatcgaccatcaataccgattttggaaccgggggtgagctcgacttcttcgagaattgcgtggaggaaggccagtttcagatgagtgccaatggcgatttattcgccgatagtaagcttattagcatctttaaaaaggagtataagttggctaagggaactttacaggccgagttttcatcaagtggtgcagctttacgaatggctggcgagtacaacaacaattacctaaaggatattcttggcgatcaggcctcaaagtatctagggtcaatggagaatgagggacgaatgtatattaggctttccgatgatattgacgacttcttagtttttgtagagcagggattctcgctaaacgtgctaaactttggcgatttgaaatgtatggagagcgtagttaaatgcaccaaggatgagtttgaaatccacggtattgttaatctaccctacaatattggcgatgttgaggtggtgggcttagttgagagtaacggaaattttagcttaaaaggctcaacccaggttcagctgcagctaaccagcgatttgagttttgagtcggacattgatctaaccattagtcaggatggtattagcatcatgggtaacctcgatttgccctacggcattggaaatatcgatgtggagggaaacttaacaaaagatggcattctgcttaagggaacggtcgatagccatgtgattgttacagagggtttgtcgttacccattagcctacaggcaattttcgatagtaacatgggcgcatcgttttcgggtagcgccgtgcttccttttggtgttgcctccattgaggtgcttggcgagctgcactacgatcatcttttgctcgaggggcagtttgcagggcagctcgagtttttgaataccgatttgctaagcacccattttggagcaaaaattctggtgtccgataatatctccgaatccggaattttcctcaatggaggtcttacccttcctcaagggtttggttatgttgatgttgagggcgagatttcggcaaacgatttatttctacaggggcatttccacggggaaattccctttaacgatttgttggcagttgatttaacggtatctagctctgtacgcgatggaattacttttcttggtaacctcgatatcaactgcatagctagtgccagcgcctctatatatggccatatatattggaacgatgtatacctggagggacgctttgccgctggggtaaatataaatgtgtgtggtattgatgttgatgcagggggagaccttacggttaaggcaggtcttaactatggcgtagagctcacgggaggcgttaagtttccatttggcctgggcgatgctaggctaagcgccagtttgcagcgtaatggtactttggccgccagtggtaggtttacctctggggtaaaaattagggatatcaccctgccggttttcgacctgcggtttaacggaagttcaaattctggactttccgtttcgggtgctgtggatgtgggctttggcattgggaaaattaacctggcatcgggcagcataagccgcagcggttttaggtttgttggtggcgatagcgatatgttctcgctaaactttggcataactaaagtcgattttggatgtgaggttaccatcagcaacaacgatatgggcttcgatttttcagttgtatcggcctctgtcgattgggacgaccattccattgaggtttgttgtctagggatatgcctaggattaccttaataattagttttttcgtttgatattatatggaactattccgatatggtaaaccattccatcggagtatatcatttggcgaggtttttatagacatctctaaaaaaagtatatattcgcttttacaacaaattgctaattgctatgagaattttgtgtttggttatcatatcaacacttgttaccctttcagggttttcgcaggagttgaaaaaaatatcaaaaaaggacagaaagtcaactgttgtagaagagtattatgtaattaaaaaggacagggacgtaaagcagggtgagtacaaaaagatgtatgaggatggacgacttattgaaacagggttttacaagaaaaacctaaaagatagcctttgggtattttttgccaagaatggaatagacacattaaattcaggtacgtacaaggatggtaggcagattggcccatgggtaataaacgacagcgatggcgagttgaactatgtttacaattttaccacaaaaaagatttgcaggtataactggcgaagtaagcctaacaagtttaaagtgttaaccaatgatggttgggaagatatgaccatcgacagcccacctctgatgctcgatggcagcgatccactcgaaattattgctcgcaacatacgctacccaatgagagcctggaagggtggcattgatggtgaggtgctagttacatttattgtcgatagcactggccgaatgagtgatattagcctaaagaaaatggtcgatcccgacttggataaggaagccctgcgaatttttaaagccgttgattttaactggcacccagcccaattagacgagaaatatattaccgtaaggtacacattgcccgttacgtttttgcttaggaaataggttctcttgttgtcagaactactctttggttgccgctacagcagtgcccatatttttgctaaacagtacgctaacctaaactgttgagtttgggggcgaataatatattcattaaaaatatcaaagcccggtatgcgtaaatggcatattgggcttttttgtttgttttcgatataatctgctcaaatatagaggtgttaagcatcgtaaaaattttgaatgctttggaataattgttaagtttgaaagcattataagttgtacagaaaaataaggtgcaaatttacgatagaatttaaaggtagggtaaaatatctaggttagatattgtttagtggggtagctgtatagtttaatcaatgttgcgttgagttgctgagattttatgaaataaaatacccccgtattgtaagacgagggcggcttaaatgttttattcgccctttgtattatttaattaggtgcttatgaaacatttaaagctagtttaaacgaaaacgacatctaaacaagttagatgccgctttaaatgttttcacaacggaataatccttattgtgaattgcttcaagattgtactgcaaatataaaactctaaaacctaaaacgcaataggctatgaaaaaaatattgggattggatttgggaactgcttcaataggctgggctctggttaatgaagccgaatatgacaatgaaataaattcaataattaaagctggagttagagttaaccctctttccagtgatgatcaatcaaattttgaagaagggaaaagcataacgcttaatgccgaaagaactctgaaaagaagtgcacgaagaaaccttcaacgatacaaacttcgacgtgatgaactcataaaaattcttgaagaagctggtataattgattcaaatttgcctctaaccgaagaaggaaattttagcacatttaaaacttacgagaatagagcgcttgctgcaactgagcgaattgatttgtatgaatttgccaaagttcttttaatgattaacaagaagagaggatacaaaagcagtaggaaggttcagaatcaggatgagggacaacttattgatggaatgggtgtcgcaataaagctttatgaggaaggtattaccccaggacactttgtttatagcatacttaaagccggaaaaaaaataattccagatttttacagatccgatctaagagatgaatttgaaagaatttggaatttccaggctgaatactatccagatatccttactgaagaatttaaagagttggtttttggaaagagcttaaaagaaacatcatttcattttcgcgaaaagtttggactatatacagctgataataaagggaaagataaacggttgcagaaatatagatggaggtgtgaatgcgttgaacagcagatgcctattgatgtggtagcagcagttttttgtgatgtgaactcaaacattaatgcttcaagtggatatttgggtgcaattagtgatagaagtaaggaactatacttcaataagcaaacaattggacagtacctgtgggggcagattcaaaacaactcccatatgcgactaaaagggcaagttttctataggcaggattatcttgatgagtttgaggtaatctgggagcagcaagctaagcaccatccaaaacttactaacgaacttaaatcagtagttcgagatgtcgtaatattctatcaacgtcgtttaaagtcacagaaggcactattaagtttttgtgagtttgaaagcaaagaggtagtgctttctgctgatgggaaaatgaagaaaataacctttggagcaagggtttgcccaaaatcatcaccaattttccaagtttttaaaatatggagtattcttaacaatattgaggtaaaagatttagaaagtaaaacaaggtttaaattagaaattgaacaaaagcaactactgtttgatgagctgaactacctccccaagttatctgctaaagatgcattaaaactactctttgataagcactcaagtagttttgaacttaattacaaagatttggagggcaacagaaccaatgctgcaattcttgaaaaactttatgagattgtaaatctctcaggacacgaaattacaggctattctaagcttaatagtgccaacaaagttgttgctataatggaaatccttagctcgttgggggtaaatagtaatatcttagattttaaccctctgctggaaggtgaagactttcaaaagcagccattatatttattgtggcatttactgtattcgtacgagggggataattctaaaactggtaatgatagtttacttcaagcgcttaaagacaagtatggttttagttcggattttgccgtacttctctcaaacataagttttagcgatgattattccgacctaagttcaaaggcaattcgaaaaatattacctcatctaatggatggtttaacttacgataaagcctgtttatatgctggttacaaccattcaaaatcattaactgccgatgagagtaaaaatcggactttagagccaatgctcgagttgctgcctaaaaacagcttgcggaatccagtagtagaaaaaatccttaatcagatggtaaatttgattaatggtgttgttaacgagtatggtaaacccgatgaaattcgtattgaactagcacgagaacttaaaaagagcgccgatgagaggaaaagaatgacagaagcaatcaataaatctaagagtgagcatgaggagtatcgagaaattctgactaaggaatttggacttagatatgtgagcagaaacgatctaattcgttataaactatacaaagagttagaatttaatggctacaaaacactttacacaaatacctacatttcgcaagacaagcttttctctaaagagtttgatattgagcatataattccccaagcaaggttgtttgatgattcgttttcaaataaaaccctcgaggttcgctcagcaaatatagagaaaggcgatgctactgcctacgattatgtttataacaaatatggagaagagggattagtgcggtataaaagtgtaatagacgatctttatcgaaaggacaaaatctctagaactaaaagaacaaagttgttaatgacaggcgatgagattcctaacgattttatagaaagggatcttagggattcgcagtatattgcaaagaaagcaaagcaaatgcttgagaaggttttcagaacagtaacaactacaactggaagcattacagataaacttcgagaggattggcagctcataaatgtgatgcaggagttaaactgggagagatacaatgtacttggcctaacctactacgaggccaacaacgagggcaaaccattaccaagaataagtggctggagtaagcgagacgatcacaggcatcacacaatggatgcaattactgttgcattcactaaacgaagtcacatacagtatcttaataatatgaatgcccggagcgatcgttctagcagtatttatggtattgagaagaaggaactttttagggacgataaaggtaagctacgttttaaaccacctatgcccctagaaacattaagggccgaagtgaaaagacaccttgagcatacattggtatccattaaagccaaaaacaaggtagttacaaccaatgttaacaaaaccaaaaaaagaaaaggacataatacccaaatagctcttacccctagaggacaattgcatttggaaacagtttacggcaaaattaataggtacaaaactacgaaagtaaaagttggtggtagtttcaattacgaaacaatacagggagttgctaataaaaagcatagggaggctttgttgaaaaggttatccgattttgacaacgacactaagaaggcctttacagggaagaatagccctgagaaaaacccaatttatattgatgagcaccattcggcacaattaccaagcagagtgaaaatggttgaatttgaaaatgtttacaccatacgcaaggaggtttcacccgatcttaatattgacaaagttattgatgtgaaagtgaaggataggcttaaagaaaggctctctgagtatggaggtgattctaaaaaagcatttaccaacttagatgaaaaccccatttggctgaatgagagcaaaggaataaaaataaaaagggttaccattagtggtattagtaatgccgaagccttgcatgagaaacgtaacaagtatggagaattggtcctcgacgagaatggatatcctattcccgtggattttgtgaatacagggaataatcatcatgttgcaatttatgccgattcaaaaggcgattggcatgaaaaggttgtatcgctatacgaagcggttgtaagagcaaatcaaggtttaccagcagttgataaactttacaatagccacgagggttggagttttcaatttagcatgaagcagaatgagtactttatttttcccaatgagagccaaggcttttatccaaaagagattgatctcttaaatcaagataactattctacaattagcccaaacctttttcgggttcaaaaatttacgaataaagactatttttttagacaccatttggaaactactgtacaaaggcgcgatagcaagggtaagcctattgacgaaaaaccattgaaaggtgttataagcaaaaggataaattctttaagtgcactaaggggtgtagttaaggtgcgtattaaccatcttggaattattgttcaggttggtgagtactagttttattgattccgggcgcgacttatacttcgacaggctctgtaatcgtcgcagtcggaggaatatgcaaggtataagttttaaaattaaaatatggaagaaatcaacggatttttcgacgacgatgggaataaggataaccctaacctattgccaaaacctcaactttgcctatcgtgcaaaagcaatgaggatgagggctgggaggagaacctgctttgccaaatgaatcgatgggatcaacgcaatagtctggattttaagtgttgttcttatcaacttgcgagataggtttattaatactgatggggtgaatccttgctgcagcacatattcaccccgtcagtaagaactaaagcacaagctatgatttttgaacaaggccacctataccatatatttaatcagggcaataaccgccagcgcatcttctttagcagggagaactatctgttctttttggataaggtgaaaaaacacgttttgccctacgccgatatactggcctggtgcctaatgcctaaccattttcattttatggtctatattaaccacttggatttgcctttggttgatcgtagcctaaaggcccatagctcgagtgcgacttcaagtcccgcctggactaataccagcagtaaatcgcatttgcctcaggttactcaaggcttgacttcaagtcaaaccttgagtagtgaaaagaagcaaccattaaactactcaattggcgttatgctccgttcgtatactcgagccattaatttacaggagaaccgcagtggaacactcttccgtcaacaaacaaaagccaactgtttaacacgagtcgacaagatatccaaagtatggtatcagtcgcagggtgtaacccaaataaatatcgattatcccgaccatcaatacccaaatatctgcttcaactatatcaacctaaaccctgtgaaagataagctggttaagcgctgcgaggactgggagttctcctcgtatcccgatattatagggcttcgcaagggcaaattgataagcagggagaggattgcagcgtttgggctgaaactaatttagtgtagtcggagtgcgacgattactgagcctgtcgaagtataagtcgcgccccatctttatatcccaaacccctttacctatgataaaacgtaccctttatttcggcaacccagcttacctcagtatgaaggataggcagctggtggtgcataaggaagtaacaagtccgggcgagactttgagtcgcactcggactgatatttctaccattcccatcgaggatataggcgtagttctactcgataactcgcaaattaccctaactcacccgttgctaaatgcattgttagaaaataacaccgctgttattacctgtaaccagaggcatatgccatcgggtatgctgttgccactggagggcaatacgctgcaaagcgagaggtatgcaagccaaataaatgccagtgtacctcttaaaaagcagctatggcagcaaaccgtgcaagccaaaatagccaatcaggcagctgtgcttagggaacaaggtgttgatattgagcctatgcgctattttcagcgaagcgttcgtagtggcgatcccgataactacgaggggcgtgcggctgcatactactggaaaaacttgtttgacggggtagtggatggcgagtttacccgcggacgatttgaggacgaccccaacaacctcttaaactatggttatgctgtgctaagggcagttattgctcgaagtctggtgggttctggacttttgcccacgctgggtattcatcacaggaacaagtacaatgcattttgcctggccgatgatattatggagccttatcgcccttatgttgataggttggtattatcaattcttaatgattttgatgatgtgagcacgctaaccactgagctaaaggcaaggttactggtaattcctgcgctagatgttgaaatagatggcaaaagcagcccgcttatggtggcctctcagcgaacaacagcatcgctaaacgagtgcttcgagggtgttagccgtaagttgctttatccagttattctataactacttaagggttgactgtatgctgagcgaatagttaacctttgagttaaaaaagtatactctgagtaatatccaataaagctatgtccacaaccaaccgattaaatcagtatagagttatgtgggtacttgtatttttcgatcttcccaccgaaaccaagaaggataggaagatttatgcacagtttcgaaaacagattttaaaggatggtttcaccatgtttcagttctcaatatacacccgttgctgccctagccgcgagaatgccgaggtgcatataaaacgggtaaaatcgttattgccacctagaggcgatattggcatattgtgcattaccgataagcaatttggcagcatggagctatttaggtcaaccaaacccataaaagctagccccgatcctcaacagttgcagctgttttaggtttgcaatctagtccgagtgctacgattactgagcctctcgaagtataagtcgcgcccggactagttagctgtaaaaacaaaaatccccccaaaatcaattggagggatttactattgaacacattttttatttctaaaatttgacttaacgaattgtgatacaattttttgacctatggtatgttgtgttcaataagtcaaaga

SEQ ID NO: 2353 - DNA, 16777 bp, synthetic construct
  source 1..16777: mol_type = other DNA
  misc_feature 1..16777: note = Synthetic
ggaatggatccgcgaactgaactttcaactgggaatgtaggttacgtaatttgcaatataaagacagccaaagaagtgaaggttggcgataccatcacgcacgtgaaaaatggttgtacccaacgaatagatggttttcaggaggttaagccaatggtttttgcaggggtttatccaattgaaagtgatgattacgaagatctgcgggcagctattgagaaacttcaactcaacgatgcatcgcttaccttcgagccggaatcgtcgctcgcccttgggtttggctttcgttgtggtttcctcgggctgttgcacatggaaattattcaggaacgtctcgaccgtgagttcgatatgaatgtaattaccacggttcccaatgttgagtatattatccggacaaaaaagggcgaggagtttaccatttacaacccgtcgggtatgccaaatgcaatgaccgttgaggaaattgatgaaccatatatcagggcgcaaattattactcgcacagagtacattggcccaattatgaccctttgcctcgacaaacgcggaattcttataaaacaaacatatattagtgctgatcgggctgaactttcgttcgatttgccgctggcagaaattgttttcgacttttacgataaattgaagagcatttcaaaagggtatgcttctttcgattatcaccttattgggcataagccagcccggcttgttaagcttgatatattgctgaatagtgaaccagtcgatgcgctttcatctcttattcatttcgataatgccgaacgttttggccgtcgtatgtgtgaaaagctaaaagaacttatcccgcgccagcaattcgatgtggcgattcaggcggctattggggcaaaaattattgcccgcgaaacagttaaggctgtacgcaaagatgttacagccaagtgttatgggggcgatattacccgaaaacgcaagttgctcgaaaagcaaaaggccggaaaaaaacgtatgaagcaagtagggaacgttgaagtgccgcaaaaagctttcctcgcagtacttaaacttgactaaacatccgaatcatgatataaaaagtaccccggctgtaattaaactgtcggggtacttttttcagaatgtttgtttcctttagctattcgtttgtctcatctcatttttcaatgcactgaattttgtttgtttttcgtagcttttttcctcgtttttcgtatcggtgtcgatatagaagaacttaatgctacttgtaagatcaattgcgtattgttctaactcttctgcacttgccgacatttcttcggcagttgaggcgttcgattgtatattgttgtttatttcaaacactgcttgagtaatttgtttggcacttaacccttgttcgttgctcgcaacgctgattgatgaaatcaattcagtagttttttccatcaacggaatactgtcgttcattttttggcttgcttgttctgcaattactgctgcggtttgtgaaatcgatccgatttctccagctgctactttactgcgttctgccaggtttcttacttcgttggcaactactgcaaaacctcttccctgttctccggcacgtgccgcttcaactgccgcattcaatgctaaaatattggtctgaaaagatatgtcatcgataatttttattttctgggtaatgattttcagcattccgatagctttttgcgctgcttcgttaccttcaataaccgattggttggctttgtaagcaatctctcgggtttgttcagcattattgctgttgtggttgatggtttctgtcatctcttccatcgatgatgaaatttcttcaatagaaacagcttcctgattggttcctgatgataagttctctgaagttgaacgaagcagcgtgctggcaatacttacctgatttgatgtgttcgttatgttcccaattacttcagaaagactgcctgataatttttcgagagattgggctaatatacccaactcgtctttgcgttggatggcattaacgtcgatttgtatgtttaattgcccattcgataagttctcaatatttttcaatgattgttgtaatggtttgtgtatcattctggaaacgatatagattaaacttcctgagactgtcagtccaaaagttaacgatacgaaactcggataggcatcaggatatgcgttggatattcgggtacttataaccactataaaaatgtttatagcccacagagttccgattgagaacaaaatactttttttgaacagtatttttaaaatagtaatggcaaacggtacgccaactcctaagactattaggagatcttttacaactggattcatctcttttctctttattattgtttcaaattaaaatagggaaatacgtttcattattttcgatttttttcagcgcctgatcgaaatcttcaaaaaactggctttttaagatcccgccgataaacccgctttggttcatttgtgcgtgtattgtaggatcgtcgctcatggtaacacctaggatcttgaggttgtacccaaattcttgtgccgtttttacaagtttaattccatcaattccgggtaaaattctatccatcaaaaccaaatcgggttttactgtctcaatgagtttcagaaactgaaccccatcgttggcttcgccgatgacctcaacatcatttcgttttgagaacaaaaatttcatggcattgatgaatgcctgattgtcgtcgataataatgattttgtatttcctgttttccatacctaactaaaccaatacaaatgtatgtatggctgattggtatgttgtaagggtatttgagtgttttatttcagggaaattcactgtttcttaccaagggaaaacccttgtgtgcctttccggttgaacttgatagaaaattataggtttataagatgattctttatcgagtaaaggacaagggcgaccgaattttgtgttcctgttttttgcatcagatgtgctttatgtccttctactgttttggggctgatgaatagtttgtcggcaatttcctggtttgagcaggcttggcaaagcagctcaagtacttggtattctcgtggcgatatgtcaagcttctcggctaatgctttacctgtggggttatcgttcttttttagaataatgttcattaaaagttcctgagagaaaaaattgtttcctttcgatacttcagttatggcttgtagcaagtcttctgttcctgaatctttgaggatgaacccttttactcctaattctatcatttttagataatggccttgatcggcatgcatagatagtacaagaatattgaggtttggcttaagcttaagggcaaattgggtcgcttcgaacccattgactttgggcatgtcaatatccattaacactacgtcaggcgttacagcttttattttttcgatgaattctgaaccattcgacgattcttctattacttcaaaaccttcttttttgctcaacgcaaatttgatcccctcacggaaaagcttgtgatcgtcgacaataaaaactgtaataggcttcatgttttttacaatgactaatatgtaacaagatacacattcattttaaaaccgcttcccggcgaggtgataatttctgtgtagcctccaagtttttcgatccggctttttaaattgaataggccaatcccatttttgtgtttttgtacttcatggtaatcaaagccttcgccattatcagtatactttagatatattttttcagtttcctgagttaatgtaatgtcgattgttgttgcatgagagtgttttaatgtgttgtttattagttctgtgatgattcgaaaaaaggcaatctcaatttctggtttacatcgttcggtaatattcgaactgaagttaatgtcgatctttttagaatattttagtttatcaacaaatgattcaacggccttagtcagtccaagattttcaagaatataggggcttaagttgttcgaaatttccttaaccgatgtaatcgattccgctaatgtgtcgtttattcgcttttttatttcagggtcgtcggggctggaatagtacatctcgagatgtatttttaaggtcgaaagcagaggtccaagaccgtcatgcagttctttagaaaagagtgaatgttccttctcttctgcatttatcgccattagataactggctttttctaagtttagtttttcggtattgtcccgaatcaaaaacataatcgccctttcattattgtaagtaattatacttcttgtgcagtcgaaataacgcaaaatgccgttatcttgtttgtagcttatgttgttactgcatccttccgattcaattttttttccagttttttttgaaattattcattaattctgagggtagtattgctgttttgtctttttcagaagcgtaggtattatctattccagccagctttgtaaatgcttcattataatcgataatttctccctgagtatttgctatcacaatggcttcggtactttgttcaaaaatgttcctgaaattcctctcgctgttaactagttgttcctcatagttttttctcgattctacttctttactaagcgttgatgcaacttggtttagatgctctttttgaatatttaatgtctcaatggtgtggattagattcttatacatatatcgtaatgagaatgaagtgattgatacgattaaaatgatgatcagtgttttggtgataatcaaattaagcaaattggaatcaacatttatgcctgtgccattttcgataatgccatttgaatagagaaagaaacttgtgaatatagctatcactgtgagtacaagcgcgattatcgttcgcttgaaatccagaaaaatggaagtaattattgacgatgacataagccaaatgaatccaggaccagaaaaaccactttcaaaaaggtctatcattgccaaggaaaacattccaagtatcatcacccctgttctgatgttgtaacttactcttttgcgtaataaaactacggttaaaaacatgacatatattccagcatgtgaaagccagagatataataggttttgggcgctaagtctgataaacgatgaaaccaacactggaaatgctgctacagcaccaacaacaagggctatatttataaggttttcccgtattttttgaatatgctcgtatgaaagctttttatcctgaatcataatactgaatctttccgttggaatattcaacaaactaaggatttttaagcaactttccacaagtacaaacatcattttttaacggtgaaaagagattttttttggtttgttcccttttgatctgtggaggctttcgcttgcaatatattatgctttcatattctgtgtgttatgaccgtgttgccgggcacaagtgaattaatatttgtcaggataagtgttgttttaattgtacattgtttttaatagccaactgctggttttcgttttgaagtatttatctcgggcgctttcgatggccgaagtgctcatttcatcttcaaaaatgttgaccaggaaatcggcttcaaccaatatttgaaagtcgatgccgtcaattttggtgtaggtatgatgattcccaaccaaaaagcacacgcgctcaatcaattcgggtgaagcgccaagttgttgcaacatttcgcgggcaatgggtggaccttcaatttcttggtacttcccaatgcacgaaccatactttagttccgaaaccggaattccaatgtcgtgcaaaatggctgcaacttcggtaatttcctgtatttctgcattcagattttcattcttagcaatcaatgatgcaaaactgtgcaccttcagcgcgtggttgattcttcggacgtccgctccaaagtattcaatcattttcgagagggtttgggcaacaagcattgctacagtaacttaggtttcgcaacaggcttgggcgatttcaccaccaaaatgcgcgctacggcatctgtgttattagacaagcaatgtacaatgtttttgggactttccaccaagttgtcggttgcaactcgtaccgtttcttcgccaatcaacacatctgcttcaccttcgagaatgtagaaaaacacatcgacaggagtaatgtgtggtttcaatgcctgaccgggctgtaaggtcatgtgcatgacttgtgcattgtcgtgatcgtaaagccttcgcacatccacttgatgtgggttttggtgtgcttctactgtttttgctgacttgataatcatgataattgattttggattaacgatttatgattaaatattttgaggttattgcagataaattgccgccaaatcattgatcttctgaatggaatttatcgaatcgaattcggtttcggcatgggtttccacttcggcaaattgggttaagagttcatgttgctcatcggtgctaaacacttgatcggccatacggaacaaaatgttattctctttagcaatatggttctgtagcaattttgcatagccggtcatgttttcataaatggtttgcaacgctccatcagttccagcacgtaaggttgtaattccttcgctaatgcctttcacgaaggcacgtccttgcacatgttcgtgcaacatcacggccacaggaccctgctcgggagagaaccctttttcgcccatgagcgggaatagcaaatcttcttctttggcatggtgcaggccgtcggcaaatttgcgtatcaggttcaccaccaattcaaagtgatcggtattggtactcattttttcaaccatggccaacatcacatcggttagcttgagaatgaacacgtggtcgtgttcaaggttttgtgtcgctgtattcattttattattaattggcaagttgtaaagcttttggaaaaagaatattgttttcgaggtgaacatgcgtatgcaagtcatcttcaaactcttcgagcaatttgaaggctaccttgtatgtgttgcacccgtcggcaggcacggcgtacccttttgttatttcgtttattttgtccatggcacctccggcaaattcatgctcgccgttcatacgcgaaatttcaacgttgatggttgtttttgctcccggagtgttgtttttcatcacctctttaatggctgggaaaagcacttcttcttcctgtttcaaatgctggagcaattcgcggttaatttcgaagaacaacgaagcaacttcttttaattcaggatgattgtcgccatgcacatcggcaattttctgggtgtagaataccaattcgggcaaggttttcaacacatatttatggtgcgtatttacaatgtaatcggccaaaaaggcaatgtcccagtttttgaagtcgtgttgaaaagtgggagtgcttagctcaagctccttaatttcaactgataatttctctgtatctacatttttttcattgcaggccaactcaagcgacttgtttccaccgcagcagaaatcgatgcctgcacttttaaagatagccgcagcgcggtaatcatcggcaacaatttgccctatcgtcttgtttatcaatgcttctgttgtcatcctctttttttacattaattacggatacaaaggtatgaattatttattaaaagacaaaaaggtcttcttgttattttttaaagaaatgttttaactttgcaagcacaaggaaaaaaggagaacggagaacgggaaaagggaaaacaatagaaggcaattgttttcaatcgctttccattgccttcaatcgctttcaaccatttacaattgtcataaaattcaaaaacgattactttgtgcctaagtgttcaaaattgaaaacaacatgttcaacaaagagacagaatacgcattacgaagcttggtttacattcaatatcagaatgacagacaactaaaaccgggcatcgaagagatttcgaaagagattgaagcgccgcaagcctatgtggccaaaattttgcaacgtatggttcgtttgggctttgtcaattcaataaaaggcaaaggtgggggctttcttttcgatgaatcagtatctgaactgaccttaaaggaactgattttggctaccgagggcggcactatattaaatggttgcgggtttggaatgaagcattgcaactccgataatccgtgcccgttacacgatcagtatggccctattcgcgatgccatcaacaaactggtgagcgaagaaactattcaaagtttggcacgcaaagaaaatgccgccttcaaagtggtgctgtagttactgaaatttttttgacaagaaagaataatgagtatcaggtttgtaacaaacgaagaactgtataatcaggtaattgaacctcttgctaatgcagcgtcatttgtgtggattggtactgccgacattaaagatcttcatgtcaggcaccatggtggggtaaagtcttttttggcggttctcgacaccctggctcaaaagaaagtatcaattcgattgttgcacgccaaagaccccgggccgaatttcaggcgcagtttcgacagttatcccttgctgtggaaaagtatggagcggcagctttgtccgagggtgcatttcaaacacataattgttgatgggaaaatagcatacactggttcagccaatcttaccggtgcaggtttgggaatgaaaggggtgaatacacgaaactttgaagctggttttgttgtgaatgacgggcttgttgtagagcaaattatggctcagttcgacgaggtttggatgggtaaattctgcaaaacatgtcaacgtaaggcatactgcagcgacccaatcctgtaatttgttttagatttcaatcccttggtagcttatatgtttgcagcaacaaaaaaacgagtatttttaacacaataaaataaaaacgtatggattttgcagaactggtaaagaaacgtcagagcgatagaaaatatgcagccactccagttgatgctaccaaaatagcgcaatgcatagagtctgcaaggttatcaccttcgtcgaacaattcgcagccatggaagtttattgtgattgatgagcccgtgctgattgagcaggttgcgcagtgtgccgacagtttgggaatgaacaagtttacccatcaggctccggttatggtggctgtagtaattgagcgccagaacctgctttccacggcggggagccttgttcagcaaaaagattactcgttaatcgatgttggaatagccgttaaccagttttgtcttcaggcagccgatttggggcttggcacctgcattataggttggttcgacgagaagaaactaaaaaagctgcttggcgtaccccgttcacttcgccttccgttgttaatttcgttaggccattccgaggcttcaacgcgcgcaaaagtacgcaaacccaccgaaaagatgagtagccgcaaccgctattaacttgctatatgttgaataatgtagcgtattgacaatcaatacagctgaagaaattatttttttgataattaaaaagggaaataatttttttcaatcaatgtttttattatttttaagggtcaatggttttgataatcaatagcaaaaccccgctgtattattgtatttgcccaacatgccatttacagtcgctacatacagttacgacggagccgtgattcgccccccaatgcgttgtgattcattgcccgttttcctcaccaatcctgttgatgtgtttaagaagagatgtaatggtatttcgctgtacgaaattccttataggcacctgtgcaccataacggaaggggtgctaatctctataatattgataagaaatacgttgactaaggaaagttgggatggtaacgcacaaatagacaactattgggcaaaaaggaaaaatgaaacaaaaaaggcgacccgcaaaggccaccttgaatgttttcacaacggaataatccttattgtgaattgctttcaattgtgcatcaaacttataaataataactaataaagacaacataccatgaaaaaaattttaggacttgatttaggaaccaacagtataggttgggcactggtaaatgaagctgaaaacgataacgaaaaatcgtcaataattaaacttggtgtacgcgtaaatcctctgacggttgatgaattgaccaattttgagaaagggaaaagtattactactaatgctgatcgtacgcttaagcgcagtatgcgccgaaaccttcagcggtataaacttcgaaaggaaaaccttataaatattctgaagcagaatggatggatcagtgatcaaactattctctctgaacatggcaataaaacaacatttgaaacttatcggttgagagcgaaagctgcgatagaggaagttactttggaagaattttcccgtattcttttaatgattaatagaaaacgtggttacaaaagtagccgaaaggccaaatcgaccgacgaaggtcaactaattgacggaatggagatcgccaagaagctctatcacgagaacttaacacccgggcaactagttcttgaattggttaaagcaggaaagaaatattcccctgacttttaccgttctgacctacagtctgaatttgatcggatttgggattttcagaagcaattttatcccgaggtattgaccgatgaatttaagaaacaacttgctggaaaaggaaagcaaaacactactaagatattccttgcaaaatatggaatttatacagccgcaaacaagggtgctaataagaaactcgaagcaacccagtggcgagttgatgctttatcgaaacaactttcgaaagaagaattggcttttgtcatcagcgatttaaatgggaatgtaaacaattcaagcggttatcttggagcaatcagcgaccggagcaaagagctctattttaacaaacagacagttgggcaatacctaatggaacagcttgcacaaaacccacatgctcgtttaaagagtcaggtgttttaccgtcaggattatctcgatgagtttaatgccctttgggaaacgcaagcaaaattccataacgaactaacgccagaattgaaaggtgaaatccgcgatgtgattattttctttcaacgtcgcctgaaaagccaaaaaggattaataagtttttgtgaattcgaaagaaagcaaatagaggttgaggttgaaggcaaaaagaaattgaaaaccattggaatgaaggtttgtcccaagtcatcaccactttttcaagagtttaagatttggcaaatattgaataatattcaagtgaatgacaaagaatcacatgccaaacgttttttggagcaagaagaaaaagaaatgctttttttagaactttcgattagagagaaacttaccaaagccgatgcacttaagattcttttcaaaaaccacaaagaattagacttaaattacaaagacattgaagggaatagaacccaagctgcgttatttaatgcttacaacgacatttttgaattaagtggacacgataagattgatttttcgaaatgctcggccaatgaaattgttaattcggttaaagaagttttcactgctcttgggattaattctgaaattctctttttcaattcgcttatcgaaggcgataaattcgataaacaaccaatttatcaattgtggcatttgctttattcattcgaaggcgacaattcaaatagtggacaagataagctgattgaaacattatcatctcgctatggatttgaaaaggagtttgcaaagcgaattgccagcattacatttcagcccgattatggcagtttaagtaccaaagcaatccggaaaatacttccttatatgagagagggaaatgaatatagtgtggcttgcgttcatgctggttataaccattctaaaagctcgttgaccaaagaggaattggataaaaaggtgctgaaagataaactggatattttacccaagaacagtctgcgaaacccagtggttgaaaagatattgaaccagatgatcaatgtggtaaatgctgttaatgagtcgtatggcaaacccgatgaaatcagaattgaattggcgcgtgaattaaaaaagagtgctaaagaacgtgaagaattgactactgcgattaatcaaaccaccgctgagcacgataaataccgtctggaacttcagaagaattttggattgtcgcatgtgagccgaaacgacattatacgctacaagctttatcttgagctggaacctttcggatttaaaacactttattctcaaacctatatttcgccagacaaattatttagtggtgactttgatattgaacacattattccacaatcgcgattgttcgatgattctttttcaaataaaacattggaaacaagaagcatcaatttggaaaagggaaatgatacggcaattgagtttattgaaaagaagtatgggaaagaagaattggctaattacattgcacatattgaggggttgtttaaaaacaatcctacgaaacaaggaaaactgaaaaagcttaagatgaagggtgatgaaattcctgatgactttattagtcgtgatttaagagatacccaatacattgccaagaaagccaaatcaatattggaagaatttgtccgcgatgtagtctctacatctggttctattacagaccgactacgtgaagattggcagttaattaatgtgatgcaggaattaaactggtacaaatacgataaactaggcttaacggaaaccattattggcagggatggacaagaaattccgagaataaaagattggacaaaacgaaacgatcatcgtcaccatgctatggatgccttaaccatagcttttaccaaacgtagtcatattcaatatttgaacaacctgaatgcccgaagcgacaaggctggaagtatttatggaattgaacagaaagaacttgagcgagatagcaaagggaagctaaggtttaaagcaccaatggctgattttcgttcagaagccaaaagacatcttgaaaacaccttaatttcgattaaggcaaagaataaagtgaccacaatcaacattaatacgaccaagaaaaagggaggaacgaacaaaaagaaacaacttacgccaagggggcagctccatgaccaaactgtgtatggctctaacccttggagtagaattgaactttcaagtaaaatctcaaaaaatgaaatagataatatttgttcagataatttaaaagtttatataaaagagcatattaagcaaaggggtagcattgcaaaagcatttacggaagaagaattgctgaaattgagatataacaacaaacctttacgagaagtagaaataaatattccgtgctatacacaaagaatcgatattataaagttttttacagattcacaaagaacagtttcttcaaaaattaagaacttaaaaagtgttttagatataaaaatcagagaaatattaaataatcgactagatgaatatggcggtgattttatgaaagcattttcagatttggagacaaatccaatttggctgaacaaagaaaaagggatttcaattaaacgagtaaccataaccggcatcagcaatgcccaggcgttgcacgacaaaaaagataaagatggcaagctgatattagacaacgaagggaagccacaaccagtcgattttgtcaacacgggcaataatcaccatgtggcagtatatcgcgatgagaaagggaatttgcaggaaaatgtagtttccttctttgaggcaaccgaacgggtcaatcaaggattatcggttatcgacaaagagtataaaaagaaagaaggttgggaattcctattcagcatgaaacagaacgagtattttgtttttcctagaacagaaaaaaaggacaaggtacatgaagaaacgggtgaaatatatcaaatagaggaaacagtttttaatcctaaagagattgatctacttgatcctgataattacaaattgattagtcccaatcttttcaaagttcagacaatttccaaggtgatgtatgggaatagtgtaattagagattacaagttcaggaatcatcttgaaaccacagttaaagatgttaaagaattgagagacctagcattcaagcaatataaaactttagctttttgtgatgaaattgtaaaagttcgggtcaatcatattggacaaattgtaactgttggagaatattaaaccatgcacccccttcagcccgataccagctatcatatctttaaccatggaggtttcacccgcgggtgaaacctctgaaataaaataaaatgaagagaaaatgacagccgttaattatcgaataaaaattgaacccgaaaagttctatcatatttggaaccggggaaacaatcgcgaaaacctgttttatacagcggctaattacgagtatttccttcggttatacgatcagttcctcgacccggttgccgaaacgtatgcgttttgcttgttgccaaaccattttcatttgctgattcgtacgaagcccgtattggtttcacccacggtattggtttcacccacgggtgaaaccaataagaaatcaaatccggtaagccttgcttttcaacgtttctttacagcctattctcaggctatcaatattcaggaacgtcgcacgggtagtttatttcaaaaaccatttaaacgcttggaagttacctcggcccgtcaactggccaatctggtgcattatatccataccaatccgcaaaaacatggaattatcgacgatttcaggcattatccttggagcagttacgaacgggtgctgcgtgacagaccatcgaaactgaaaaaagaggaggtcttgcaatggtttaacgacaaaaccaactatgtaaactatcattcccggtcaatcgatctggataaaataaaagaaataatgatcgaataaccagaggtttcacccgcgggtgaaacctctaaataaggaaaacatgattaaacgtaccctctactttggaaaccccgcctatctgcacaaaaacctgatgcagttaaaggtgattaaccccgacgataatagtgagttaggttctgttccgttggaagatattggcgtggtactgctcgatcatccgcaaataaccctaacacacgcgttgatggctgctttgcttgaaaggaatgttgccctgattagttgcgacgagaaacaccttcccgttggcttaatgctcccgctcgatggcaatacgattcaaaccgaacgtttccgttcgcaaatagatgcctcggaaccattgaaaaaaaacctgtgggcgcaaaccgtaaaggcaaagattgaaaaccaggccgaagtgttgcgtcgtgcgggtatcgacaataaacgcttgcttgccctggtgcccttgattcaaagtggcgatcccgacaatgttgaagggcgtgcagcatcggtttactggaaattgttgttcgaagaccttccttttgtgcgcgatcggtttgggttgatgcccaatgcacacctgaactacggctatgccatattgcgcgccattgttgcgcgggcgttggtaggcagtggtttgttgcctaccttgggtatacaccatagcaacaaatacaacgcctattgtttggccgacgatgtgatggaaccttaccgtccgtttgttgattggatggtgtataacatgctgcaaaacgaagagattaccggcgacgatatttcgaaagagcataaagcaaagctgctcggtattgcaaccgttgatgttcagattgatggaaagaaaagtccgttgatggtgggtttgccgcgtacaaccaactcgctggttgaatgtttcgacggaagccgccgtaagattatttatcctgagtttttgtgagtgaaccacaacgtacacgaaggtttgtcacaaagaacacaacgtaaacagttgaagacaattcgaaacaatagaaagcggttggaagcaatagaaggcaatagaaagcaattgaaggcagtagtggatagttgtttataatcaaattgtcaattttcaatcgtcaattttcaattaaaaaatgtcgttcgatgcactaaatcaatatcgcattatgtgggtacttgtgtttttcgatctgccgaccgaaaccaaagtgcagcaaaaggctgcggcccgtttccgcaaaaacttgctggaagacggtttctcgatgttccaattctcgatttatctgcgcaactgtcccagccgcgagaatgccgaagtacatgttaagcgtgttaagaacatgttgcccgaatatgggcacgtgggcatgctcaccatcaccgacaaacagtttgggatgatggaactattcttcagtaaaaaagcgatagagaaaccccaaacggtgcagcagctcgaattgttttagaaaatgttcgaaaaaccgacagaaaataggataagtaaacaggagagtataaaaacaaaaaacggggtataagccccgttttttacattcaaaagtcttcgataacaatttgatttgttgttttttgcaagcaataggttgtcaaagaccgatataaaaatacaatttgaaagcaattcacaacctatttatagacttaaaaaagtatataggggttgtcaaagaccgatataaaaatacaatttgaaagcaattcacaaccatgaatgaactcgacactaacaagctcgagttgtcaaagaccgatataaaaatacaatttgaaagcaattcacaacatattgacaccaatggtgttcaacacatcggttgtcaaagaccgatataaaaatacaatttgaaagc

SEQ ID NO: 2354 - DNA, 16732 bp, synthetic construct
  variation 9284: note = n is a, c, g, or t
  variation 12272: note = n is a, c, g, or t
  variation 13211: note = n is a, c, g, or t
  variation 13188: note = n is a, c, g, or t
  variation 9582: note = n is a, c, g, or t
  variation 9328: note = n is a, c, g, or t
  variation 13870: note = n is a, c, g, or t
  variation 9278: note = n is a, c, g, or t
  variation 2421: note = n is a, c, g, or t
  variation 7839: note = n is a, c, g, or t
  variation 7410: note = n is a, c, g, or t
  variation 10965: note = n is a, c, g, or t
  variation 9712: note = n is a, c, g, or t
  variation 1651: note = n is a, c, g, or t
  variation 9287: note = n is a, c, g, or t
  variation 13303: note = n is a, c, g, or t
  variation 3130: note = n is a, c, g, or t
  variation 10064: note = n is a, c, g, or t
  variation 9273: note = n is a, c, g, or t
  variation 6141: note = n is a, c, g, or t
  variation 13186: note = n is a, c, g, or t
  variation 10097: note = n is a, c, g, or t
  variation 10178: note = n is a, c, g, or t
  variation 10043: note = n is a, c, g, or t
  variation 7833: note = n is a, c, g, or t
  variation 4753: note = n is a, c, g, or t
  variation 10918: note = n is a, c, g, or t
  variation 12255: note = n is a, c, g, or t
  variation 11549: note = n is a, c, g, or t
  variation 7433: note = n is a, c, g, or t
  variation 13909: note = n is a, c, g, or t
  variation 7829: note = n is a, c, g, or t
  variation 7376: note = n is a, c, g, or t
  variation 6089: note = n is a, c, g, or t
  variation 1644: note = n is a, c, g, or t
  variation 9724: note = n is a, c, g, or t
  variation 9579: note = n is a, c, g, or t
  variation 7866: note = n is a, c, g, or t
  variation 9957: note = n is a, c, g, or t
  variation 14010: note = n is a, c, g, or t
  variation 10160: note = n is a, c, g, or t
  variation 7389: note = n is a, c, g, or t
  variation 7857: note = n is a, c, g, or t
  variation 10111: note = n is a, c, g, or t
  variation 7365: note = n is a, c, g, or t
  variation 9576: note = n is a, c, g, or t
  variation 7846..7847: note = n is a, c, g, or t
  variation 1659: note = n is a, c, g, or t
  variation 10967: note = n is a, c, g, or t
  variation 1667: note = n is a, c, g, or t
  variation 9967: note = n is a, c, g, or t
  variation 9677: note = n is a, c, g, or t
  variation 13215: note = n is a, c, g, or t
  variation 10941..10942: note = n is a, c, g, or t
  variation 10139: note = n is a, c, g, or t
  source 1..16732: mol_type = other DNA
  variation 10024: note = n is a, c, g, or t
  variation 3093: note = n is a, c, g, or t
  variation 9325: note = n is a, c, g, or t
  variation 13947: note = n is a, c, g, or t
  variation 1685: note = n is a, c, g, or t
  variation 13937: note = n is a, c, g, or t
  variation 10987: note = n is a, c, g, or t
  variation 4751: note = n is a, c, g, or t
  variation 3112: note = n is a, c, g, or t
  variation 9524..9525: note = n is a, c, g, or t
  variation 10066: note = n is a, c, g, or t
  variation 6113: note = n is a, c, g, or t
  variation 12308: note = n is a, c, g, or t
  variation 1647: note = n is a, c, g, or t
  variation 10052: note = n is a, c, g, or t
  variation 9242: note = n is a, c, g, or t
  variation 13109: note = n is a, c, g, or t
  variation 10974: note = n is a, c, g, or t
  variation 10990: note = n is a, c, g, or t
  variation 4759: note = n is a, c, g, or t
  variation 7426: note = n is a, c, g, or t
  variation 9683..9684: note = n is a, c, g, or t
  variation 10046: note = n is a, c, g, or t
  variation 14020: note = n is a, c, g, or t
  variation 12332: note = n is a, c, g, or t
  variation 6098: note = n is a, c, g, or t
  variation 9565: note = n is a, c, g, or t
  variation 1679: note = n is a, c, g, or t
  variation 4771: note = n is a, c, g, or t
  variation 10951..10952: note = n is a, c, g, or t
  variation 13886: note = n is a, c, g, or t
  misc_feature 1..16732: note = Synthetic
  variation 13197..13198: note = n is a, c, g, or t
  variation 6162: note = n is a, c, g, or t
  variation 13285: note = n is a, c, g, or t
  variation 10102: note = n is a, c, g, or t
  variation 13207..13208: note = n is a, c, g, or t
  variation 7864: note = n is a, c, g, or t
  variation 2477: note = n is a, c, g, or t
  variation 12251: note = n is a, c, g, or t
  variation 3132: note = n is a, c, g, or t
  variation 13103: note = n is a, c, g, or t
  variation 10971: note = n is a, c, g, or t
  variation 10127: note = n is a, c, g, or t
  variation 7853..7854: note = n is a, c, g, or t
  variation 2453: note = n is a, c, g, or t
  variation 6134: note = n is a, c, g, or t
  variation 9290: note = n is a, c, g, or t
  variation 11542: note = n is a, c, g, or t
  variation 7062: note = n is a, c, g, or t
  variation 7859: note = n is a, c, g, or t
ggcaagcgcatcgacaccaaggcagacagctccaagcgcgtgttctacaccgctggcggacgcaaagtgagcgaagggaacggcatcaagcccgacgtggaagtcaagcacgacaccttggcaaacatcgtcttctacctctccaacgacgacgtgctgattgactggggcacacgctacttccagagccaccccaccatcccacccgtcaaggacttcgtcatcaccgatgccgactacgacaccttcaagcagatggtcaaggacagcggcttcacctacgaccgcctcagcgaaaagcgactgaaagacctgaaagagaccgcacgatttgagggctattacgacgacgccaaagacgccttcgacgcattggaacagaaactcgtccacgacctcgaccgagagatggaccgcaaggagaaagacatccgcaaactcatggcaaacgagattgtgcgacgctactactaccaggcaggcaccgtcgaagaaatgctcaaagacgacgaagacctgcaacgcgccctcgacgtgctcaacaacgaaagcgaatacaacaaaatcatcggaaaatgagtttacgcaacaaccgcgccaccaagctgaaccgctacatgatgttcggcatgttcttcctcggcatcatcgtgctgggatgcgtcttcgccttcctctacctttcctacaacaagaccgacaaccccttcgtgcagcagccacaggaagaaggcatggcagacagcataatcctcctcgtcaacgacagcacgctcgtgaaagaataaagcaccccatggcagccatcccatgccagccgtcagccgcccagcacaccccaagggcaaaaggtcatgcaatgtgcaaggccttcatcctgttgtgcctcttaccattcgcactccacaccccgctgaacgcccagtgccccaccgagaacactgccttcaaagcaggcgaacgcctcacctacgacctctacttcaactggaaattcatctgggtgaaatgcggagccgcccactacaccatgcgctcagccaactatcaaggcaagaacgccctgcgcaacgatctcctcttcaccagcaacaagcggtgcgacgctgtcttcaccatgcgcgacaccctcatctcctacatcacctcacaactcgtgccgctctacttccgcaaaggctcactcgaaggcaaacactacaccgtcgatgaagtgtggtacacctaccccaaaggcaaaagccacgtaaagcagcactacctcaaccgccacggtgagtggtctgaacaccaccacgagagcgacgaatgcaactacgacatgctctccatcctcgccctcgcccgcaccttctcccccaaagactacaagcccggccaccgcatccacttcccgatggcgaccggcaagaaagtggaggaacagaccctcatctatcgtggcaagaaagactggaaagccaacgacgggaagacctaccactgcctcatcttctccctgctcgactacgaagagaagaccaaggaaaaggaacttctccgattctacgtaaccgacacctcacgccacatgcccgtccgcatcgacttctacctgaagttcggcacagccaaggcctacctgtcgaaagccaactgaaaaanacncccncccaaacnccccattntacaccccaaanatctangtccccgacatcgaccaatcggagtccccgacatcgactgaccgatgtcggggactccgattttgagggggtgaaagcatataagcaagttcaacaattcctgaatagagaaaaagaagcatcacgatatattctgtatatcatactcctcaggggagcaaggaaacattgagaatacaaataaactcattaacccaaaggatgaatataagactgccacagacaagagaattgtatcaatttgggctaaaataaaacgaagaacaaaaagaaaattggattttaacacaccaaatgaagtcttttccaaacattatatataactttgctgacaacttacgcttgccagttggctatatagctacagaattagggatagagacacatatccatccgctgaagaaaataatcttatcagctgacaaggttacagatataatatttgggtaatgaaaagaactaccgatatagttgcaaacagcttgtcgatgtttgatgtaatcaaaaggtctattgacaaaaacataaaaggagtttatggcactgcttcttttgatgacgatgggcgcatgctctcttttaatgagcaggtagctattgtcacacattatttgatgctacaagacagtggacattttggcgagaagtatgcagataagggaagggatattctacaactttggtatgaatttctattgggagaaaagattcggaaagcatcgggagattgtgtggntgaggatattttttatggtagcttttttgacnatgtaacaaatgcaccatttcgtncaccagaaaatccttcatttagatttatagatttgtttgcaggaatcgggggcttccgcattgcaatgcaggattgtggaggggaatgcgtgtactcttctgaatgggatgagaatgctcagaaaacatattaccacaatttcggcgaagttccatttggagacattacactggagtttaacaaacaattcatacctgatggttttgatgtgttatgtgcaggttttccttgtcaggcgttttcgattgcggggtatcgaaagggatttgaggacacgagaggaactctattctttgatgtggctgaaattatacgtcgcaaacggcccaaagcggtatatttggaaaacgtgaaaaatttatacacccacgacgcaggaaatacgttccgaatcatccaatcttctttggagggtttgggatacattgtttatcataaagtcatgaatgcaatggaatatgccaatgtcccacaaaatcgtgagcgcatttttattgtgtgctttgaccccctgcaagtgccaaaccacatggacttttgtttcccggataaagaaccattggaaaggacaatacatgattgtatagactatagtaaccgagaaaaaaaactttnctatggtaacagcatgacncatatcgatgaaattcgngnaggagtcacgtctaaagacactatttatcaatggagacggcagtatgttagagaaaacaaaagcaatgtatgtccgactcttaccgctaacatgggtacaggaggacataatgtcccacttatattaaccgatgacggaatacgtaaattgtctccccaagagtgccttaactttcagggctaccccgaaggttacacattccctacaaacattgctgattctgcaaaatataaacaggctggcaattctgttgttgtacctttaatccgtaaagtatgcaaaaagatcattacaacaatctccaaaagttcttagaagaatggcaaagtaacacgaaatatcttgatatgctgaggctgatggcacaactcagcaagttgttttctgacaatgaagtaccttatcttgattatagattggcagaaaaccttttttgccgatactacaaagcatctaatgatgcacgttcttgtatggcatatgatgctcgcatagcaggagtcggcataggtatcaagactttcatactgaataagaacaatcagtcgactgaaaagatagccgaatttaacaagttgaaaaaacaccttgacggtttgacaggaaaagacctcgcacgcacactgggagagtttaggaatgaccgaatgcgcatagccaacaatacgtttgatgtgtcagaaacacaatatcatatagtgggtcgcaaggaaaggatgcttcgtgtgtttaattgtccatacgatgaagtcgatgtggaacatattcatttaataaaagacgacaccatttctgtctgcttccatgacgagaaaaacttttatgctttcaacaagagcaaaagcgtattgatgaagcgttttgaagtacctaccaatgattttgtagatgtggaggttgatatattagatgaccctcttgaattattggaaagttttttcttgcaacataataaagatttggtaaaagcgaagaaacgggttgctggcatcgattatgtaatgttacctttatattcaacaagaaacaataatgtcccagaaaagtcggggcttaaccaatggaatgcagctggtagaaaaaggcatcctgacgaggtatatataccaattcctaaagatattcatcgctattatcccacattctttcccaaccacgatacgccttttgtcctgtatctgcccgatggtaaggttttgtctgctaaaatttgtcaatcagatggaaaggctttgatgtctaatcccaataaggacttaggacaatggattctcagaaaaatattgaagaaaaaagaaggtgaacttgttacgatagatgacttgaacagatatggttttgatagtgtttgtgtagagaatttgcattcagtgaatggaaatggtaaacaggaatatcgaatctcttttgcaacattagacgggtcatatactaatttcatcaatgattaacaaccatgtataacacaaatatacactcgctcattgggtgtcattcctgaatagaaagcaagttctgccattattgtggcaaagtgttaaaaaagagttcggtacaataccgaactctttctattagataatcctaactttgggataatcagtttaacaataggcancncctctngtcgtaacctantgtaagatatgaaatggctgtaccgtaatttagttcttacggtacagtccctctatatcatcagttatcaaatgaagcgttctaagcctacgcaccaagaatcaagagtcatactcctgccaagacttgatttgcaagtcttccatgcccatttggcagaaagcctcgatgaaggcagatgccaagcgagcgttggtgatgagcggaatgttatggtcgatagcaccacgacggatacggtagccgttggtcagctcacgcttcgtgtggttcttcggaatgttgacaatgaggtcgaacttgtggtcggcaatcatctgcatcacgttgggcttgtcgcagccttcctcgtcgggccatgcaacggcagtagccttcacgttgttgtcgttgaggaacttggctgtgccctcgcttgcgcagatggtgtagcccttgttcacaagtgcgcgagctgcgtcaagcatggctaccttctctttcgtgccaccagaggaaatcatgatagccttttccttcgatggaatcttgtaacccgtggcgatgagagagttgagcaatgcctcttcgtaggtgtcgcccatacagcccacctcgcccgtagagctcatatccacacccagcactgggtcggcgttctgcagacgggcaaaggagaactggctggctttcacgcccatgcggtcgatgtcgaactcgctcttgcttggcttctcgtatggagcatccagcatgatgcgtgtagccgtgtcgatgaagttgcgcttgagcaccttgctgacgaatgggaacgaacgtgaggcacggaggttgcactcgatgaccttcacatcgcgacccttagccaagtactgaatgttgaacggacctgagatgttcagttccttcgcaatggcgcggctgattttcttaatttgacgaattgtggcgaagctgatttgctgggcagggaacaccatcgtggcatcgcctgagtgtacaccggcaaactcaacgtgctcggagatagcgtactcaaccacctcaccgttcttagccacagcgtcgaactccacctcgttggtctcctgcatgaactgagagataaccacaggatactccttgctgacctcgcttgccatctggaggaaacgctccagctcttcgtagtcgtagcacacgttcatcgctgcaccagagagcacgtaagaaggacgcacgagcacggggaagcccacacgctccacgaatgccttcacgtcgtccatgctggtcagcgcgctccactgcggctggtcgatgccgagctggtcaagcatggcagagaacttgttgcggntctccgcanggtcaatgctgacanggctggtgccgaggattggcncgctctnacgatagagcttcattgccangttgttaggaatctgaccgcccactgagacaatcacgccgcgaggattctccaagtctatcacgtcaagcacacgctcgaaagacagctcatcgaagtagaggcggtcgcacatgtcgtagtcggttgacaccgtttccgggttatagttaatcatgatgctcttataacccaactttctggcggttgtgatggcgttcacagaacaccagtcgaactctacggacgaaccgatgcggtaagcacctgagccgagcaccaccaccgacttctcgtgagcgtagtagttcacgtcgtaaccttccacggcataagtcatgtaaagatagttcgtcaaatctggatgctcacttgccactgtcggaatgcgcttcacggcaggcaggatgcccagcttcttgcggtgagcacgcacagcgaggttttcacgctccatgttgtcggcagctgccttgcgcacgaagcgtgcaatctggaagtcagagaagccgtaaatcttagcctgacgcatcacgtcagcaggaatatcctctacagcgttgtaagtctccaacttatgcttataatcaacgatattcttcagacgctcgatgaaccaagggtcaatctttgtcagctcacagatgcggtcaatcgtgtagccctcctccagagcctgagcaatcgcgaagatgcgcaggtcggtaggattctccagttcctcgtccaggttatcaaatttcgtgtggtcgttgcccacaaagccgtgcataccctgaccaatcatacggagacccttctgaatcagttcttcgaacgtgcgaccgatagacataatttcgcccaccgacttcatgctcgaaccaatcttacggctcacacccacaaacttcgtcaagtcccaacgtggaatcttgcaaancagatagtcgagcgaaggagctacgtatgccgagttcgtcgtacccatctcaccaatttggtcgagcgtgtaacccaacgcaatcttggcagccacgaatgccaacggataacccgtagcctttgatgccaaagccgaagaacggctcagacgcgcgttaatctcaatgatgcggtagtcgttcgtctgagcattgaacgcaaactggatgttgcactcacccacaatgttcaggtgacgcacacacttgatggtgatatcctgcaacatcttcacctgctcctcggtcagcgaacaagtagnagccaccacgntactctcgcccgngtggatgcccagcggatcgangttctccatcgaagcnaccgtgnagcagtggtcgttcgcatcgcggatacactcaaactcaatctccttccagcccttcaagctctcctccaccagcacctggggagcgaacgtaaaggcagactcagcaacctgcttgaacgtctcctcgtcgggacaaacacccgaacccaagccgcccaatgcataggcagaacgaatcatgatggggtagccgatgcgacgcgccgtggcaatggcatcctccatcgtctcacaagcttggctcacaggcactttcaagtccaccttgttcagctccttcacgaagaggtcgcggtcctccgtgttcatgatagcctccacactcgtgcccagcacttccacgccatactccttcaggatgcccttctggaacagctccgtgccacagttcagcnctgnctgtcnaccaaannccaagnngangncgtcngnacgctccttcttgatgatttcggtaacaaaaaaggtattgacgggcaagaaataaaccttgtctgcaataccttcactcgtttgaatggttgccacattcggattcaccagcaccgaccggatgccttcttcccgaagcgccttaagcgcttgactaccagagtagtcgaactcacctgcttgtccaatcttcaaggctccagagcctaagacaagcaccttcttcagttgcttcttcatgcttatatattaaatattgtggaacatatccctttcaaatctcacacttccaaatcggctacaaaggtacgactttttcatcacccacacacaaacatccaccacttttttcatcaaccgccccacattcacacaaaacgacacccaatcgccacatccgctttcaggtgtgccacacatcccacaaaaacaatgaccaattgtcacattcccaacatcctccgaactgttcaaagccaaaaatcacgccactcttttgccgcgtcaaaataatatagtacatttgcaacgaaaacctattatacacaaagcctaacccatggcaaaaccaatcctcctcatgctgatgttcctcgcaagcatcgtgacaaaagcccaaagtgccgaagccctttacgaccaaggcaaacagctatacgacgaaaagaaatacgaactcgccatcaagaaacttctgcctgccgcacaaaaaggtcacaagaaagcacagtaccgcctcggtcgctgctacgacaaaggccacggaacgtccgaagacaaccagaaagccttccaatggtactccaaatctgccgcacaaggatatcacaaggcgcaataccagctcggtcgttgctacaagaaaggcaaaggagccacgaaagacaaaaacaaagccttccgttacttctccaaagcagccaaccaaggtaatgccaacgcccaattcgcccttggcaaatgctacttcgagggcaaaggcacacctcaagacaaagccaaggctaagaccctattcctcaaagccatcaacaacaaaaaagacggtgcggaaattttgaaagacctccgcaccgatgctgctgctggcgatgaagatgctatcgccatcaaaaaacttattggaaagtgactggcgaacaccgccaaccactcaattatgcactaacgtgccaatctcctctccttccatcaccttcttcaagttgccgagcacatccatgttgaacacataaatcggcaaatcattctgcatgcacatcgccgtagccgtaatgtccatcaccttcaatccctgcgcaatcacctccgcatacgtgatgtcatgatacttcgtcgccgtcgggtctttctctgggtcagccgtatagacaccntctacacgtgtgcccttcagcatcacatccncctcnatctcnatnccncgcagcgacgaacccgtatccgtcgtgaagtaagnagnccccgtgccagcactcatgatgaccacttcgccacgttccatcgcctcaatcgccttccacttactataaaactcacctatcggctccatcctgatagccgtcaagacacggttcttctgcccgatagcacccaacgcactcgacaacgccagcgaattgatgaccgtggcacacatacccatctggtcacccttnnccctgtcgaagcccttaccagcaccactcaatccacggangatgttgcccncancgntgacaatgccaatctgcacccccatctccgcaatctccttaatctgccgagcatactcattcagccgctccacattgatgccctgtttctgctcnccagcnnagctctcgcccgaaagcttcagcaatanacgcctaaattntgccataacctaataatttattgattccgccacaaaagtaatacattttcagagaacaggcaaaagaaagcagagaaaaggatgccccatcccaaagaaccacaaaaaagcccccgttaaaggacgagagcggaacctaaatgttttcacaacggaataatccttattgtgaattgctacaaattagtggtgcaaatataaagttttttcaccaaaccaccaaatatctcacnaagaaaccanaactttgtagcaataattatcagaaataaagccatgaagaagatattaggacttganttgggcacaaccagtattngangggcanttgtaaatgaancngaacacagtgaagaaaaatccaacatcatcnaactnggtgtaagngttgtgccactaacantcgatgaacaangcaattttgaaaaagggaaangcattacaacaaatgcanacagaagcctcaaaaaaagtatgaggcggaatttacaacgctataaactccgtcgtacaaatctaattgaatgcttaaaagagaatcgtatcatcacagatgagaccatattcagcgaacaaggcaacttcacaaccttccaaacatatcgcaatagggcaaaggctgcaacagaagaaatttctttagaagaatttgcgagagtattgctgatgctcaacaaaaagcgaggatataaaagcaaccgcaaaaccacctctgacgagggcacactgattgacggaatgtctatcgcacaagaattgtacgaaaacaacataaccccaggagaatatgtatatgctttgttaaaaagtgagaagaaatacgtccccgatttttaccgttctgatttagagatagaattgaatcgtatatgggacgcgcaaaagccatatcatggcgacatcctaaccgacgactttaaggttcagatacaaggacgttctaaaacaaacaccacgaagatatttctcgccaaatatggcatctataccgcagaaaacaaagagaaagacaaaaggcgtcaagcgtacaaatggcgtgtggaagccctacaatctcaacttacacgggaaaaacttgctttcgtcattgcagaagtaaatggagccatcaataactcgagtggctatcttggtgccattagcaatagaagcaaagaactctacttcaatcagcagaccgtcggtcaatatctnatggttcaactacaaaagaatcnncatttcagnnttaagaacaaganantttntcntcaggactatttngangaatttgaaaagatttgggaatgccaaactctatatcatcccgaactcactccagatttgaaaaaagaaattagagacatcatcattttctatcaacgccctttgaaaagccaaaaggggatgctggacatttgcgagtttgagaacaggacaatagaaatggagatagaaggtaagaaaaaactaaaaacggtcgggttaaaggtctgccccaaagcatctccgcttttccaagagttcaagatttggcaaatacttaacaatcttgaagtcacagacactcgcacctttgagcaccgaagacttgagcaggaagaaaaagaacttctttttgaaaaactgaccgtaaaagaaaaactgtcaaagtccgatattctaaaagttctctatgggaagacaaaagaccttgacctaaattacaaagaggttggaggcaactataccatggccgctatttggcaggcttgcctcaaaatcgtagccatgacaggacatgatgaatgcgatgccacgaaattgaaagccgcagaaataaaaagaattgtaagagcngtgtttnatgatcttggatacaaaacagacttccttctttttcgtccagaattggaggggaaagacttttacgaacaaccctcttacaaattgtggcatctgctttactcttacgaaggagacaattctaaaactggaacagagaaactaattgagaaaatcacggctctgacaggattagaaaaggaatacgcatctattctttccaatatcacattcaaagacgactatggcaatttgagtgccaaagccatccgaaagattcttcccttcatgaaagaaggaaacgaatatagtcttgcttgtgaatatgctggctacagacactccaaaagttctctgacaaaggaggaaatagagaacaaagcacttgttgaccatttagaattattgccacgcaatagtctccgcaatcctgttgtggaaaagattttgaatcagatgataaatgtggtaaatgagattactgcgacatacggaaaaccagatgagataagaattgaattggcaagagaactaaagaaaagtgccaaagagcgcgaacagctaaccgatgccatcaacaaggcaaacacacaatatgaaaaatataaagaaatccttgaaaaagagtttggaatcccacatgtaagtcgtaacgacattcttcgctatcgtctctatctggaactgaaagaaaatggatttaagactctttatacagacacgnatancccccaagaaaaattantcagcaaagaatttgatattgaacacattattcctnaagcaagactctttgacgattctntctcaaacaaaacattagaaaagcgtgatgccaacattgagaaaagcaattctacagcctatgattatgttctgtccaaatacgaaaaacaaggagcagaaaaatataagacaaaaatcgatgacttatataaaagtggtgttatctgcaaagccaaacacgacaagctgctaatgaccgaatcagacattccagaaggattcattgacagagacttgcgcaactctcaatacatcgccaaaaaggcacgagagattttaggacaaatggtgaaattcgttgtcccgacaactggctctatcactgaccgcttacgcgaagactggcagttggtcgatgtgatgcaggaattgaactgggacaaatacgacaaattaggtctaaccgagacatacctcgataaagacgggcgagaaatctacaaaattaccgattggacaaaacgcaacgaccatcgccatcatgccatggatgcactcaccatagcatttaccactcacgccatcattcaatatctgaacaacctgaatgcaaggagcgacaaatcaagcagcatctacggtattgaaaaatcatgcctatatcgcgacaaacatgggaaactacgcttcaatcctcccatgccacttgaagaactacgccaagcagccaagtccgcattggaaaatatcctcgtgtccattaaagcgaaaaacaaggtgatgacacagaatgtcaacaaatcaaaaaccaaagaaggatacaaaaagaaaatacaacttacaccacgcngacagntgcataatgaaaccatttatggcaacacaaaacggtatacaacaaaagaggtgaaagtcggtgccagcatgacaaangnactcattgnnaaagtcacnnaanaganataccgcgaagccttgcttgctcggttggcaacttttggaggagattcaaaaaaagctttcacaggcagnaactcattagacaagaancctatctatttgaacgagcaccaaacagaatgcgtgcccaacaaagtgaaaatcgtcgaactcgaaacaatatacccaatccgaaaagccattgacaaggatttgaaaatagagaaagtgattgatgccggcattcgcaaaattcttgaacagagattgaaagaatatggcggagatgccacgaaagccttctccaaccttgacgagaatcccatttggctgaacaaagaagcaggcatcagcatcaagcgagtaaaaatcacgggcatagccaatgccacacctctccgagagaaaaaagaccatcatgggaatttcatcctcgacaaagaagggaaacgccagcccgttgactttgtcaatacaggaaacaaccatcatgtggccattttccgtgatgaaaacggaggattacaagaacatttggtttcattctatgaagcaaccgcaagagtctctcttgggctgcctgttgtcgataaagaatataagcaatcggaaggatggacattcctcttcaccatgaaacagaacgaatacttcatcttccccaataaagagacaggntttgacccacaagagnttgacttgatgaatcctgacaantacgaagaaataagcaagaatttgtatngagtacaaangcttagttccaaatactattgctttaggcatcatttggaaacaatgataaatgacaacaatantcttaaaggnttaacttggcttagaatcacatctttctctggtttagaaggaatcatcaaagtccgcatcaatcacatcgggcaaatcattcatgtaggagaatactaaaatgataaagaagaccctctactttggcaatcctgcctatctgtcgatgaacaaggcgcaactggtcatacagattccagaagtgcaggcaaatgacacgctgacacctgagtttaagaagatgaatgagcgcaccatcccgatagaagacatcgggatggtggtgctcgaccacaagcgcatcacgattacctctggagctatagaatgtctgctggagaataattgcgccctcatcacgtgcgacagccgcagcatgcccacaggattgatgttgccattagaggggaacaccctacagagcgagcgattccgccatcaaatagactcatcccttccactcaaaaagcaactgtggcaacaaacggtgaaatacaagattatgaaccaagagaatgtcttatccatgtatggaagaacgaacacgcagtgcatgaaggtgtggtggagcgaagtgaaaagcggcgacacagagaatgtggaagctaaagcggctgcctactattggaaatacatctttcccgacattcccaatttcacgcgcggcagagaacttgccccacccaacaacctgctcaattacggctatgccatcctgcgcgcggtcattgcccgtgcattggtgggcagcggtctcatccccaccctcggcatccatcaccataatcgttacaacgcctattgtttagctgatgacatcatggaaccgtatcgtccatttgtggatgaactggttatacaaatcatgaaaaatgtaaacgactactccgaattgacacgagaactcaaagccatgctactgaaaattcccgtgctcgacgtacaaatagaagggaaacgttaccctctgatgattgcagcaggcatcacaaccgcatcattagccaaatgtttcagcggagaatcgagacaaatcaaataccccgaaagactataatccatgtttttcgacttcacccgtttctgcgaatatagagttatgtggatacttgttttctttgatttgcccacggaaaccaagaaagacaagaaagcctacacggactttcgcaagaatctgcaacgagatgggttcaccatgttccaattctccatttatgtacgccattgtgccagcaaggaaaacatggaggttcacatgaagcgtgttcgctcatttctcccagaattcggcaaagtagggatgctctccatcacagacagacaatttggagacattgaaatcttctatgggaagaaaagcgtagagcccaaagcaccaggtcagcagttggaactgttttaacccccttgtttgtattgtaaaaatatatcacgggaaacgtcaaaccgtcccttttgcaaactcgacgttacaacaaagcaaatgaattgtaacccagcagaaacagggaaactctttctttcgaaagagtttccctgtttcatattacactttttcctaaatggaattgcatcataaacatctgtcatatagcctaatacaaagaatgtagtgtatatgatattgcaaagatactaatttgtaagcaattcacaactgctgtaaatatgctatatttgcgttactaagtgtatatgatattgcaaagatactaatttgtaagcaattcacaactcaaatgacaatgacccgttcttgaaagaagtgtatatgatattgcaaagatactaatttgtaagcaattcacaacagaagaaactatacatactcccggcgatgaagtgtatatgatattgcaaagatactaatttgtaagcaattcacaactacttcacgtgtggccgcctttgtagccaagtgtatatgatattgcaaagatactaatttgtaagcaattcacaactttcagcacgtcggcttcgctgcgacggaagtgtatatgatattgcaaagatactaatttgtaagcaattcacaactttagaacacctgcggtccgcatcaccatgagtgtatatgatattgcaaagatactaatttgtaagcaattcacaacagcatgctaattgctggcgagttgacggggagtgtatatgatattgcaaagatactaatttgtaagcaattcacaacatcctcagtatcatcctcacaatcgtggaagtgtatatgatattgcaaagatactaatttgtaagcaattcacaacctgaaaacgatgcttgcctccaagacgcggagtgtatatgatattgcaaagatactaatttgtaagcaattcacaaccgtgtcatccatgcactacacggacaaggaagtgtatatgatattgcaaagatactaatttgtaagcaattcacaacaaactcgctgatgagtcgctgggaattgcagtgtatatgatattgcaaagatactaatttgtaagcaattcacaacagagagagctggagtgtggtctgacaccttagtgtatatgatattgcaaagatactaatttgtaagcaattcacaacacgtgacacgcccaaaggaattgtcatccagtgtatatgatattgcaaagatactaatttgtaagcaattcacaactgcttgcatgttgtcaaagccacaaatcatagtgtatatgatattgcaaagatactaatttgtaagcaattcacaac

SEQ ID NO: 2355 - DNA, 16722 bp, synthetic construct
  misc_feature 1..16722: note = Synthetic
  source 1..16722: mol_type = other DNA
aggcaatgtcaccgccaatagcatcaagaccgacaaggagtccaaggtaggcttcaccatcgcccctaatgtcggctggtacttcgctgacaacttccttgcaggtgcaaggctcggcatcggctttgacaagaacaccactccgggagctcttgccgacaccaagaagtcaagcttcacctgggctctccagccgtatgcccgttatcgtttcgccgagtggcgcagcttcggtctgtggagcgaggtcaatgccggtatcggacgcactaccggcaagactgaggtcggcaacatctctactgacaacaatcctgtgcttgcgtggggtatccatgtgctgcctgtgctgacatattctgtcaacgagcacctcagccttgagacttcgctgaacttcctgaccctcggctacgaaggggcatacaccaagaacgatgacaaaacttatgaggagaatgcgtcttcattcgccttcggtgccagcgccaacgatgtcatcggggccatcggacaggtgaagataggattcacctacaggttctaaaaactttaggagcagtctgagtcgacaaaaatgatggttttttcaaacgggttttccggatagactcagacgctccttgctatgaattgctcgaggccgtcccttcttgggggcggctttttgtgtgcttagcctcgcgtgtggggcgtatctgctgccccgctttctgtcagtttaggctccgcgtccagatggaactgcctgcaaggtggttcaaggcggcgtccggtacagaaaagggggtgttttctgtaccgcgatggtcttttggtggctccggtacagaaagaggggtgttttctgtacgggacgttttgcagggcacgctcgtcaaacttgtcatgcagtcagtgggaaaagtgaatcgatttcgtattggctaagagcaaggagacggcggatttgtccgttggaggagcggaactcgcgccgcagtctgacggcgagatccagtttttgctgacggctgaggtctttaaggagcattgctccgtattcttttttgaggatcgctgccagttgattgtagagctcaggatctgtgaggaactctccgtcaccgagttcgcttgcgatctcggtgtatgcctccacatttttactgaccagagagaagtagtggtgagcatcgcggaacatcgccatacctgtttttattgagcagaatgatgatgggcagatatggccgtcaatgactttccaatgctccggaaggtccggatcccgtccgcgaaacatgagcctgcgctggccggaatggatttcagcatagagtcggtctgtcgggaaattctggaagtagtagcgtcctgtaccccatgggtagctgaatggagtgtgcgaggggtcggcaacgtagccgttgcggttggtgtagactatgttgtttctcagagattgcaagttatcgatgggcttcagtgacggggttatgttttttatcaaggggaacggttttatcatcctcttgcgtatgagattccagaagttgaggatttgttctttgtctgccgaaattacgaaatggaagtggttgcccatgatttcaaatgcgagtaacgtgacaccggtgctggcctgggcttgcgccaccatattcatggcgagggtaaattcttctttggtgctgaaaatcagcggtgtttctttgccggaagtgtagacgtgccaatacggtccgccggagagaaaagtcgcgttgcagaacctttcccgttctttgaagtttttcatcattttctgaaagttttaatggtgcagcctgctccgctgaggctgctccgagtgcaaatatggtacagaagaatcagatttgcaaatctttcgttttgaccttgttttctcgcggcggctagagtctcgcttggggattgtcgggttgtggtgcctcgcttggcctcgcgcctcgcggttgccgtacagcagagggccgttttctgtacgggacggctatattgagggctaccgtacagaaagagggctgtttcctgtacgggacgacagtggggatgctgattatgacaaaaaactgcctgaagccgcagggcctcaagcagagaaaaaaggtaccgacagaaactacttggtcacgaccacgatgacggcgacatctttctttccggagagtttcaaggcccccttggaccccggcttgtagacattcattgaagctatggattctggtttgatcttcgtcaaagcatccttgtcacacttcttgccgtcgacgatatagaccgtagtcgaggacaacaccgtcacctccgcattggaataattcttcccattgatattggactccgtgtccttgtcttcaacgcggaaaccctcgaccacaccggaagatttaatgacttttatcttctgcccgtcggtgcggatcacgtgaatccttacggcctcatcggccgtattgcttttggccacagtcaccttgtagtcgctcaccgtcttgccgacaagctggctgccgtcgaacttgaccacctgctccccattgatgatgtacttgtcaagcgtatccgcaggggcggcattcaggctcaatgcgcatactgcgctcaaaataaatgttagcatagtaatttgatttttaatttgttaccgctacggcacatcttcatgcgcgccactgaaaatgccgccgggcaagcaacacaacttattatttcattgctgtgatagagatagctcccccttcacggttcatgacataggagcatcggctcccgtcattcatctcggccgtcaggatgatgcgccctccatccggagtcgccgtgacgaactttacattgtccgtgtcaaggctcatgatctgctggattccttcggccatttcaagcccgttgaagtcacactggctgggccttagtgtcacgatcagtgccagcgatgccgccgccgcgagcatcagcccccagactacaggtctgcgcctgcgggattccgacctgcgcacgatcctgtcgaacgcggctgcggattcatcggaaagatatgccttctcgagttccgccaatgtcctgttgtcctgtttcatatcatcgttcctttaatatttctttcatcttgcgcctcgcctttgagagcagggcctttatcacggacttgtccttgccggtattcgcggacatctcatccagcgaccagcccgcctcctcgcgcaatcttgtatattccagctcggatggtgtcagactcgagtacatttctttctgaagcacagcagcatcctgaacatcaacactttccgttgcagacaaaccgccagggaggacatctccggcaatgggcttcgtctcaaggtgccgtctgcgatagtgcgagacgcagatgtttttcgtaatcttgacaagcagcgccttggcattacggaccgggtagcctttttcggaaaggttccagaaagcgagcagagcctcctgaaccaggtcctcctcatcgatggccagatccgctgcccggcagaaacgcctcgccagcgccttaagcctgccgctgcagtcccgtgctatatgtccgaattcctgttctgtcatttgtttttgaagcgccttcctaaacactcctcatctgtaagtcgcagaaacgccgcgaaagttaacgaagtttgtcgcaattgtcaaaagcggtatcgtcaattgtcggaaaggacagcaagtccaccttttccaaagagaagcagttcgcaaacgaccggtagccaatcttttctacggaggcaggaagatgaagttcggtgagctttgtgcagcgcgcgaacgcgaagtccccaatctccttcaacccggcaggaagctctatcctttcgagattcttgcatccggaaaaagtcctgtcatgtattactgtcatattgtttaggaatatcaatgtctttatgccctcacaacaagtaaaggcgacccttcctatgacacgtaccggctccggaatcaccgaaaccgatactttcgtgcaatcccagaaagcccactctcctatcgtgacgaggctgtccggcaacgctttcagctcaagtttcctgtccatattgaaagcactgtttccgatttcccttacagacgggggcatctcgacagaggtaagattctcgcaggtgttgaacgctcttttgcggatggcagtcagaccttccggcaatatgacctttcggatatgcttgttcatttcgaaggccatctccccgatgacctttacagaacgcagctccggagagaggttgaaatccacgatagactcctttccgagccatttcacaagacaagggccgtccggactgtcttggatgacataatgttctccggccgtcatcagcgacggaaccatcaacatagacaatagtataatcactcttaacatatttacaatcaatatatctatatggttaagaccaccgtcaggacaagctctcttcccctcaacgcatattcataagtgaatgtgttgacggaatcatagacagtgtagctgtactccctctcatcgagtgcattcctcagatccagagacaatttccaggccttatgtttccaggagacaccgaaatcgagcagagtcatcgtcttgtagacgtcatcagtgagctgtttcctatttatctcagatgacgcactgaaaatcagggattgcacgggggacagccggagggagatgtcatgacttcttgaaatgtaacttcttgtcgtccctttatactcggacgctgtccggctgagatcccccgagtaattgaattccagccagtccagaggacgggaagataccgacggagagattaccatgctgtctcccgcataatccatcattttcccgttttgcatcgtactgccttcattatgcatatacgagccgcccaatgacactttggtccttatcgccgcaaactgcttggtcacgccggcctgcgtcatgatgctgcttgacatgttcgggaaaagcacctgactgttcaggatgccgccgctgtccactgcgtccgatgaaagaaggttcctccaattacggatatagacaaagtcggcattcacgaaccactgactcatcggtatcttgaaatcataatgcgcgctggccgtaaggtacttactgtccgaggcagtgccgttagccgacatcaaagtcgtcctgtcaacctggataggagcggtcaggaaatccagtacatctccgatatttctggaatacgacagctctgtccgtaccgtggagagcgcgctgatcttccaattgagatacagttccgggcaaacggaaacataaccattgattttagggccgctccaaagcgcatcacccctgaccggtacttcggcccgcaacacaaaatgctgaatgctaaactcatattgaggggagaacgaaaaaacggtcttcgtcagatgtatatcgttactcccacagactgtgccgccgtcctgcctttctgttttcagccggtcggactgaacattgaacagcagcggtacatatatcctgttgtggcgctttttccacgtggcggaaagcgtgttcttcgaactgaacgtctttccggaaaccgactgcaagatatcggtgtcatctgaagatatcttcaatgaatatgacggagaagcggagtattccgtatcggaggacacgctccaaagcagcccgacgcttcgccacctcgtgctgaagtcacctccgaaatccatgctgctcagggattgtgactgtgacgacatccggccgttgagcaccaccggcactgcggagcgggtaaactccatatttccgtgtaatcttccattgatgaagcagttatcggagtttttctggtactccagagtggcccaagggctctgcatccttgtgctcggagaggtcatctgcgacattgtaatcccgccaccgtcgtcatagtataggcctttgaatgagtatgaataatcgccctttgacgagccatagccgacattaccttttattgtcgaagtcttgccgactttatggatggcattgactgtcacggctatatctgacgggcttatatacctgccggctttcatcggcggatgcgatgaagataattctcccgccaattttcggacggcatccccgtcattgtccgatttcaggaaatccttgccttcgtccaaagcgaagccgtcgatgtttccgacatttaccgatgctatcacctgtgtcctcgggcggaacagcattgctgaaccctttgccgaatacagcaggtagtctccatacccggcggatgcttcataggatccgacaggttttatcttggccttgtcgttgaggcttatattgatcgccacatcatcggagaaagtgtctttgtcaatcgccgcctccttatgattgtccagaacctgaacagaattcacgtacgatgccgggattccggaagtcgcaatgttgtacttgccgccaagcagattcatcccttcaatgtaaaaaccggatatgtcttttccgagatactttatgcgtccggactcctcgacatcgattcccgggagccttttcagagcatctttgagtgtgtagtccgaccgtgtggtgtatgcggagacggcataagagagtgtgtcgcccctctgatgaatcgccggagctcggacgacagcctctttaatgccgatcttcttctctttcagagagaagttgcatgccgcagcggaaacggacgacaatgccacagaagatgtctcatagccaagacaagacaccgagacgacggcgtcaccattccgctcaacagaaagcgagtaccggcccttgtcgtccgatgtcgtgtaaccgagaatcgatgaagaagactctgctttcacaatggctcccgggaccggtttcccggcagtgtcgagaattttgccgcttatcacgttttgagcaaacgcgaccgttgagacggcagcaaacaaggcgcagaggaacatgcgccgtattgcgcatttcataatcagttcaagtttactctgttacttcagctcaagcggcacatatccgccggcacgcaggcgcagcgggactccgttgatgcttattgacttgctgccgtcatcgtatttgtgaatggacatctcgctgatcgactccggcggcagattccccatcgggtcagactcgaacagattcttcgccttgacgaatttgtctcttatcgtagtgattgtgttcttgtcgcaaaccggtgcaatggatgtgctcccgttgcgtatgatgatggcctcgaacttgttggctccatctgaatcttccgcttccaggatcagccccggcagcccggacaatttccagggcccataggatgcggggatatcctgactgtaccatgctatccatttcctcccgccatattcacattccgctttgcggcatcgatatccgcatatggtcttttccccctctgacaaagtccacttcttcgcattcaaatcttccgtgtacgaatagcggtccggagttattaccccgtaaacagtcattttcccggcaggctcgttctgcaatattgcctgatcaaaatattgctctttcttctcctcccgcagtctgaaggcctcgacatcttcttccgaggccccggcactctttgcggagtccagctggaatgtggaataatccgtgaacttggccgacctgctccctatctggaggattgtcgaatatacatctttccgccccttgtcatcaatagtgcaatattcatacacgcactctatatccgccgtctgcactgacggcccgccgatgccaggcatcgctgcaacgactgcagaaacaatcatagaaaacattttcatcgttttctatcatggtcgcagaaatcgatgaaaagtaaacggaatttacaacaagttttccttgcgcgcgtaagtgtcggtctccgggtctgttaccccaatctcgcggagtttgagagtgttggatgtcaatgtgagcagctccgagcgctgcggctttttcgcatgctttttgaattccgaggctgtctttttggtaagcatgtttccgaacatcttaggaaagccctccggttgttccagcacttcagagcggatggatttcgcatcgtaaatctgggtcagcacaccgtcttcgtaagaccattttccgctgcatgagaccatcattttgactgtggctttctgtccgtttccgtcatccatcgacatttccatgacggttgcattgcggaagacaccatccgctgaaagtttaagtgtgtcggataacgtcatctctgtcccgttctcggaagcggaattgacctgaacccaaacgcccgtcatctcttgacccttgaggctgcatgccaaagacagacaaagcaaaaataccagtagctttctcatcataatgattttttgcaaggtatgtaaaatattgcagattgccaaaagtgaatttttagcggtaacttattaatgagaacagtatttcaagtccggcagccatagggcgatgatgccgatgagggggagcaggctgctgatgcggaagatgaactcgatgcttgtcctgtccgcgagccagccgaaaaacgccgagccgagtccgccgatgccgaacatcagcccgaagaacacccctgagatcatgccgaccctgtccggcaggagttccgtggcgtagacgatgatggaagggaaggccgaggctaggatgaagccggtgactacggccatgacgatggtccagccgagggagagatgcggcatcgccagtgcaaacggcgcagctccgaggatggagatgaggatgatgcgcttgcgcccgaacctgtcaccgagcgcccctcctatgaccgtccccgcggcgaaggctgccagatatgcgaagaggcagagctgcgcgtgcttgactccgagcgcgaacttgtccataaggaagaaagtgaagtagctggtcattgaggcggcgaagaagtacttggagaatagaaggatgacaagtatcacgagggccctgcggatgaggtgggcgggaagcggccgctccctgatggtggagctccgtgtccctctggtctcggcgagcttgcggctgtaccatttgccgactacaaggagcagtaggacagccgctatggccgcgagggcgaaccagctgattgccccctggccgtgcggaagcactatcgccgcggctaggagcgggcctatggcgttgcctccgttacctccgacctggaagatggactgtgccaggctcttgcgtccgccggatgccaactgggccgcacgtgaggcttccggatggaagacagatgaaccgagaccgaccaggcccacggaaaggagtatcagcgcgagggtgtcgctcatggagagcagcaggagcccgcagagggtgaaacacattccggtggagagggagtagggtttggggttgcggtcggcatacaggcccgtgaaaggctgcaggatggaggatgtcatctggaagaccagggttatcaggcctatctgcgtgaatgtgaacccgaacttctccttgagtatcgggtagacggccgggatgaccgattggatcatgtcgttcagcagatgggagatgctgattatcagcagtatcccgaaggctgtattgtttatgggattgattgcgcggctgtccgtgccgctttgctggctggctgtcttcattttgttgtccccctttcaggtgcgcaaagatactcctttccaggcgtattacaatgcagagaagcgtgtttccctccgttccgtgtgtgccaggcggctttccgtgcttgggcttgacttcgtgtgcgtggggcggagttgccccctagaacatgcgggctgatatggaaaagagcgaacccgaaggtccgctctaaatgtttacacaacggaataatccttattgtgaattgcttcttttgttccgcaaaattaacaatatccagattaattacaataaatattgttagttttgtagaaaaacaaccactcatatatgaaaaaagtattggggcttgacctcggaacgacaagtataggatgggccatggtcaatcaggccgaatcaggcgatgagcgctcgtccataataatgacaggtgtcagagtgaatcctctcacgactgatgagaaggacagtttcgagaaaggcaaggctataaccaccaacgccgaccgtcgccgtaggcgcggcatgcgcaggaatctccagcgatacaaacttcgtagggaacatctcttgtctgtgctcaggcgcgaggggtggataagtgaagatactgtcctgtccgagcagggtgcaggttccacatatcagacattccgtttgagggcggaggctccgtcaagggagattaccatggatgaattgtcccgtgtgttgctgatgatcaatcgcaagcgcggatacaagagtaaccgcaaggcggataaaggggaggaaggacaccttatcgacggcatgtccgtggcccgggaactttatgatgatggtctgaccccgggggagtattcgctcaggctccttgaaagcgggaaaagcgcactgcctgagtattatcgctctgacttggtcgcggagtttgagagaatctggtccgtgcagagttcatggtggcctgatatcctgacggaggacttcaagaagagcatagaagctgacgggaggaacggtgtttccaagaaattcctgggtcgatactcgatatatactgctgacaataagggcaaagacaagaaaaagactgctcttgaatggcgggtcaaggctttgagcgagatgctggacaaggagactctggcttatgtcatagctgatgtcaagggcgctatccagagttcaagcggatatctcggggagataagcgacaggagcaaggaactgtttttcgatgatgtcactgtcggccagtatctatggcggcatatcgagcaggacccgaactacagcacgcgcaacaaggttttctacaggcaggattatcttgatgagtttgagcgtatatgggagtgtcagaagcgcttccatcctgagatgacggacgcgctcaagacggagatccgtgatgtggtgatattctaccagaggcgtctgaagtctcagaaaaacctgatcagtttctgcgagttcgagcatagggatatcgttgttgaggagggcggggtgcgtaaagtcaaaacatgcggatgccgtgtggccccgcgctcatctctgctttttcaggaattcaagatatggtctgtgctgaacaacgtgactttgacggacagggctaccggtgagtgtctccagttatcggctgaagacaggaaaaaactcgcggatttccttgcggtcaatgacaagatcacggttccggaaatgctccggctgctcgggcgtgcttcacgtggttacgatgtgaactacaaagagatacagggtaacctgacgatgtcggcgctgtatcggaagtttctggaggtggtttcggcatccggccatggtgaatatgatcttcgcaaactgtcgtattccggggcgtataaactgctgtgtgaagtcttctccgccttgggatttggcactgactacctgacttttgacgcttctcttcccaaagaagagtacgagcggcagcccatgttcaaattgtggcatctcctgtattcttatgagggggacaactccaagaccggagacgaaagtcttatagggaaagtgtccgaaatctgcaagatgccccttgagtatgcgcggatcatcgcctcggtgaagctgcttgatgattatgcttcgctcagccacaaggcaatgcgcaagattcttccgcatctgaaggatggctgcacttacgatgaggcatgtgcaagggccgggtataaccattcctcatcagttaccaaggaggaaaatgaggcccgggaacttaaggacaggctggagattctcccgaagggggcgctgcgcaaccctgtggtggagaagatcctcaatcagatggtcaatgtggtgaacaccgtcttggatgaatatggcaggccggatgaaatccatatagagatgtcaagggagctgaagcagaacgccaagcagcgggagcaggcgacccaaagcattgccgacaacacgaaacgtgatgagggtattgtgaaaatccttcagacagaattccatctgccgtatgtgagcaagagagacatcctgcgttataggctttacgatgaattgaaaagcaacggatacaggaccttgtactccaatcagtacattcctaaggacctcttgttctccccgtccatagacattgagcatatcatccctcaggcattgctgttcgatgattcctattccaacaagacattggagttcggcgatgtcaaccgagacaaaggcaaggagacggcgcttgactatgtgtcaaggaaatatggcccggcggaattggatgcatacaggcttcgtgtcattgatctttgttctcaaggggtgatttcggctcgcaaacgcgaccgcctgctcatgaagcagagcgagattccgtcggattttgtcaaccgcgacctcacgaattctcagtacatagcgagaaaatcggtggaaatgctcggcgagattgtccgtgatgtgatgccgaccaccggaagcatcacggctcttctgcgtgagcagtggcagctcgtcgatgtgatgaaagagctcaacctgcctaaatacaggcaggcgggcaagacattcaccgtcaccaagtctgacgggcagagtctggagaagatcagcgacgactggaccaagaggaacgaccaccgccaccacgcgatggatgcgctcacgatagcgttcacgaggcgctctcacatcaaggtgctcaacactctgaatgctcttccgggttctgaggatctggctctcaaggaggctgtcacgatgcgcctgccgaatcacaaatggattttcgccccacctatgccgctcggtgagttgcgcgccgcgttcaagtcggccctggagtccaccctcgtgtcaatcaaagccaagaacaaggtcgcgaccagaaatgtcaacaagtcaaaggttaaggatcggactatcgcggtggagacattgactccgcgcgggcaattgcataaggagcaggtctatggccgccgcatggtgtacgagacgtttgatgtgacagtcggaggcaagatggatgctgcaatggttgcctcagtggcatccaaggcggagagggaggcattggcgaggcgactggaagcgttcggcggtgatcccaagaaggcgtttaccggtaagaactctcttgacaagaaccctctgtatgtggatgccttgcagtccgttaccattcctgtcaaggtcaagtgcgtgaggatgaaggatgtgtatagcatccgcaaagagatagggccggatttgagtgtggacaaggtggtggatggacgtgtccgtaagcttcttgaggcgcggctggcggagtatggaggtgatccaaagaaggctttcgtgaatctggaggagaagccgatctgggtggacgaggcgcgtgggataaaactcaagcgggtaaccatagccgagaacttcgacctttgcgcaatccgggataaacgtgacaaagacggcaatcttgtcctcgatgccgccggcaatacaatcccgaatgattttgtcaacccgcgcaataatcatcatgtagcgatttatgaggatgcggagggcaattatcaggagcaggtggttacgcttctggaggctcttgcgcgtaagactgccggtctgccagtggtggacaaagacttccataaggatcttggctggaagttcgtattcagcctgaagctcaatgagatgttcgtgttcccgaatcctaagaccggcttcatccctgccgatgtggatctgatggatccggccaattatgcgcaaatcagtcctaatctgtttagggtgcagaagttgagctgtagggattattgtttcagacatcacttggagactgcgcttgataatgtcacggagttgcgggatgtgacctggaagcgggtaacgaatcttgcgaatctaagaggcgtcgtcaaggtccgcatcgaccatatcgggcgcatagtcgcagtgggggagtattgatatggtaaagcgcacattgtatttcggcaatccggcttacctgtccttgtctaaccgacagctggtggtggagaagccttcggacggtgacctcccgttcggagatgcgcccctgcggcggaccatcccgatagaggacataggtgtggtcgtgatagacaaccgtcaggttacggtaacctccgccttgatgtctgcactcctggataacaatgccgcggtcatcacttgcgacgagaagtccatgcctgccggactgctgctgccattggagtcgaatacggtgcagagcgagcgtttcagaagtcagattgatgcgtccctgcctctcaaaaagcagctttggcagcagacggtgcagagcaagatttccaatcaggctgcggtgctgaaatatgtttccggggaggatgcccgcaatatgatcatctggtccgggcaggtgaggagcggggacagtgagaacatggaggggcgggcggcggctttctactggaagaacattttcccggaacttcctttctttgtgcgtggccgctatgacggagctccgaacaatctgctcaattacggctatgcgattcttcgcgccgtgattgccagggctctggtgtccagcggattgcttcctacgcttgggatacatcattgcaaccgttacaatgcgttctgccttgcggatgatgtgatggagccttatcgcccttatgtcgaccggcttgtggtggatattatggctgacggcaatacctgcccgcagctgacgcgggaaaccaaggccaggctgttggagattccggtgatggatgtcgtgattgacggcaggcggagtccgttgatgattgccgcgagccagaccacggcatcgctcgcgaagtgtttcggaggagagttgaggaaggtagtgtatccggagatgtagcaggtgtccagactcagcgaatatcgtgttatgtgggtgcttgtgtttttcgatcttccgacagagaccaagaaggagcgcaaggcggcggccacttttcgcaaggagttgatgggcaacggcttcacgatgttccagttctccatttacatccggcaatgtccttctgtggagaatgccggggtgcatgtccggagggtcaagagcctgcttccggaatatggcaaggtcggcgtgatgtgcataacggacaagcagttttccacaatggaactttttatcggacggaagaatgcggaactgccatccatagagcagcagttggagctgttctgacggtcggcagcgatccattggctctcaaggtgaatacggcaagggtcaagatagcgttgccggagttaaactggttataaacaacagaaactccgcagaatctgcggagtttactgaattctactacagtagataaacctttgtcaataaggttattacccgaattgtggtgttgtgacctgtgacaaagatacaaaaagaaagcaattcacaacaacctcgcaatatttaagtgcaatccaacgggtgttgtgacctgtgacaaagatacaaaaagaaagcaattcacaactatctcaaagactgaacctactcgaacgaaggtgttgtgacctgtgacaaagatacaaaaagaaagcaattcacaacataggcgaaggagataccgccgcgcctgccgggtgttgtgacctgtgacaaagatacaaaaagaaagcaattcacaaccctcggaataacggataacgcaaatcgtgtggtgttgtgacctgtgacaaagatacaaaaagaaagcaattcacaactacgcaatgatgactacgcgtttgatgaacggtgttgtgacctgtgacaaagatacaaaaagaaagcaattcacaaccgttaaggacttcaaaaaattcattaaccaggtgttgtgacctgtgacaaagatacaaaaagaaagcaattcacaactgtgcaacttcgtcgattacaagtcagggggtgttgtgacctgtgacaaagatacaaaaagaaagcaattcacaacataatgtagattttttaaaaatgtttataaggtgttgtgacctgtgacaaagatacaaaaagaaagcaattcacaacaggaaactacccgtatatcgtaaatacttaggtgttgtgacctgtgacaaagatacaaaaagaaagcaattcacaacctgctccttgtgttttgctactccttgagtggtgttgtgacctgtgacaaagatacaaaaagaaagcaattcacaactgcggtcttgatgatttctatctctctataggtgttgtgacctgtgacaaagatacaaaaagaaagcaattcacaactatggcttgtggcgtgttggccccttgttggtgttgtgacctgtgacaaagatacaaaaagaaagcaattcacaactagctcgtctaaaattgcttcgacagtgtggtgttgtgacctgtgacaaagatacaaaaattcatgacaggtcaggaaagcaccttgcgtggtaatccaggcctgccgtttttgtgtgcttcgcgtatgaggcgggacttctttttgtacggggacagatttttctgtttcttatctcttttgaagtttctttattgcccggcaccccgg

SEQ ID NO: 2356 - DNA, 16697 bp, synthetic construct
  misc_feature 1..16697: note = Synthetic
  variation 16258..16259: note = n is a, c, g, or t
  source 1..16697: mol_type = other DNA
aattcgtcaaaagaagaagtatagactttctggaatggtgtggtagcctgctctacaacggctatttttttgtctgaggaaatatttctttcctttaatttctctaccaggttcgccagattccctttggacatatagaagacaagcgtatcgctggtttgtgcgagctcgtcccagtgactgtctgacacgatttcagatgtgtaatacgttaaaaaacgtaccgaagtggcataccctcttgcggtaaggggcatacctgcgcaagccgctgcgccgagtgcagccgtaatcccgggaactatttcataggaaatctggtgctttttcagcaccttcagttcatccagaatattggaaaaaacagaaacatctcctcctttcagccggacaacagttttgccttcctttgcatggttcaccatcaggatgttaatcagcgactgtggtgtcgaagcctttttgctgcattcttttcctacatagataatttcggtatttggcgcagcgtgttcccgcagaatctgtggacttacgaggcggtcgcacagaataacattggcttttgcgatcagttttgcagcctttaaggtcaggagatcagggtctcccggtccggctccaatcagatatacttttggtgaaattgttttgtccatgccttttgtttttgcttttttcctgaaaaaacagatacgaaaatgcccgtttttactgttcccgtacaagtgttttctgctcatttttaacttttcaagcagcaaatataatttatttttatataaagtctatcaaattagtagaatttagaatcaaaaaaaatgaattttatttcataaaggatgtcagggtagcctccagcatgctgtttctggttttctcgcgtacgttgatcagttcgtgacgaagataacaggcagcttcatcaacacagtcgtcacaaggctcatagaaattgattgatacacaaggtgtcagggcaattggcccatcaaaaatgcggtagatatcggcaagtgaaatttcgtccggagatttaacgagataatatcctccctgcggaccttttttgctgttgacgaaatagactcttttaagttccaaaagaatctgttccagaaattttttagggatattctcgtcctttgcaatcactgctgtaggaaggaaaccctgattataatttcttgccagccgtaccatggctttcagcgcatatttgcatcttttggacatcataattgctgcaaggtaggtaatttatttggatatgggaaatatcaaccagattaaaaaagttcataaaaaatccccctttttcaggaggattctatactgttcaaaaagatttgctcttagcgttcgcagagaacaattcctttgttatgattaaattcaataactccgctttttacttcgaaggaatagacagaatttttgtcatgttctttgttgaaaaacttagcatacggctccgcaacagtactggtgaacaatttcactttcccgtttaccagagacgaaacaatagcagcgtggtctttcataatctgaaaatcgccgtttttacccgggagaagcacagaatccacttcaccgtcaaagactactgtttcgggggttaatatcttaatattcatttcgttagattttaagatttcagacttcagatttcagacattaaagtctcatgtctaaaatctgatatcttgtgtctaagtatattatgcgttttcagcaagcattttttctccggcttcaatggcttcttcgattgtacctttcaggttgaaagcagcttcaggaagatggtcgagctcgccatcgataatcatgttgaatcctttgatggtgtctttgatatccaccagtgcacccggaataccggtaaactgttctgcaacatggaaaggctgagaaaggaatctctgcacctttcttgcacggtacacaacctgcttgtcttcttcagaaagttcttccatccccagaatagcaatgatatcctgaagtgctttatatctctggaggatttcttttacccgctgtgcagtatcataatgttcgttacccaaaatttccggagtaaggattctggaagtggatgccagaggatctactgccggataaataccgagcgaagcaatttttctgtccagtacggtagtagcatcaaggtgggcaaaggtagtagccggtgccgggtctgtaaggtcatccgcaggtacataaattgcctgaacagaagtaatggatccgtttttagtagaggtaattctttcctgcattgctcccatttcagatgccagtgtcggctggtatccaacggcagacggcatacgtccgagaagtgcagacacttcggaacctgcctgagtaaaacggaagatattgtctacaaaaaacagtacatctcttccctgccctgcgccatctccgtctcggaaatattcagctacggttagtccggaaagggcaactcttgctcttgctcccggcggttcgttcatctgtccgaatacgaaagtacatttggagtctttcatcagttcgagatcaactttggaaagatcccatcccccttcttccatagagtgcatgaaaccttctccatatttaataatgccggactcgagcatttctcttaaaaggtcatttccttctctggttctttcacccacacctgcaaatacagaaagaccaccgtgtccttttgcaatattgttgatcagttcctggatcagtacggtttttcctacacctgcacccccaaacaaaccgattttacctccttttgcataaggttcgataaggtcaatcactttaataccggtaaagagaacttcagcagaagtagagagctgattgaatttcggagcttctctgtggatcggcaaaccgtgatctttggatacttcaggaagaccgtcgattgcgttacctactacattaaacagacgtccgtacacgttttcgccggtaggcatggtaatctgtctgccgttgcaaataacctcgtgacctctttcgagaccgtcggtagcatccatagcgatacatctaacagaatcttcaccgatatgctgttctacttccagcactactttttctccgttgctacgggtaatttccaaagcatcatagattttcggaagctcctctacatcagagaaaaccacatcgataaccggaccgataatttgtgaaatttttccttttattgggtttgccattactaaaatttttctttggcgcaaatataataattcttgtctaaactgcaattgcctgactaaaagtttttcatcatctttgcggtcaaatatttaagtcttggaagtattcagagaatttaaagattacaacggcacagaaccgctcgcattatccctcggaatgtttgacggcgtacataagggacatcagagtatccttcaggaaatcaacagaatagccgatcaaaaaggactaaaatcttccatactcaccttctggcctcatccgcgactggtattcaatcccgatgccggactgaagctgctgaatacacttgacgaaaaaacagaattgctcggaaaatttggtatacaacttcttttcctcaaaaattttgacgaagaattccgcaatatgtatggtgcagacttcatcaaggaaattctggcgggcaaacttcatgtcagatatctgattatcggccacgatcatgttttcggaaaaaaccgcagcggaaatttcaaactccttcaggaaatgggacccgaatatggttttgaagcggaacagatggaagtcgtcaacctgcacaacaacaatatctcctctaccaaaatcagaaatgccctttctgaagggagaattgaagatgctaatgaaatgctcggctatcattatcccgtttccggaacggtgatacacggtgccaaaatcgggcgtaccctcggatttcccacagccaacattctgactgatccccagaaacttctcccgaaaaaaggcgcatatattgtggatgttgttctgggcggccagaaatatcagggaatgctcagtgtggggaccaatcctaccgttgacggaacatcactaagtgtggaagttcatattctggattttgacaaagacatttatggtcagcctattaccgtgcaattccgaaaatttcttcacgacgaaatcaaattccaaaacctcggaaaacttattgaacgcctggaagaagaccgtacactgacgcgcagatttttcgtcgccaactgacagacagatccggtgtgcaccgatagatgctataaaatacaggggtttttctctcctgtttttttgccttaaatttgcaccgaattttaatgttaaagagaatatcatgatgaactaccacaccagaaaatggatcaaacctgaagatctgaaccccaaccattcccttttcggaggcagactgctgcagtggattgacgaagaagcggcgctctatgccatcattcagctcgaaaaccagagaacagttaccaaatatatgtccgaaatcaactttatcagctctgcaaaacagggagatattatcgaaatcggcatcgaagccactcatttcggaaacacatccatcaccttgcgctgtgaagtaagaaacaaaatgacccatcagtccatcattaccgtggataaaattgtgatggtagcactggatgccagcggacatccgacacgacacggaaaaacacatgtggaatacgttaccgaccggctgagcggagaaaattacgaagcataacttttaaaaccctccggaatttcagtgaaaataagtatcaaaaatatggtctgcgaacgctgcctggcttctgtcaggaagatttttgacgatatgagcattgaagtttcggatgtggttctgggcgaagtcagcctttctgagcctcttactgatcagcaaaagaaaattcttgaaaaacatctttctgaaagcggtttcgagctattggaagaggtttcagaaaaacagattgagaaaatcaaaaatctgattgtcagcaagatttcgacattggatattgaagaaaattttaagctgtcggaatacatttcccaacacattcacaaagaatacagcgggctttccaaacttttttcgcagttcgaaaacacaacactggagcaatacttcatcctccagaaaattgaaaaagtaaaagaactgctgacatacaacgagcataccctttcggaaatttcggttatgctcggttacaaaaccgtccagcatctttcgtcacaattccggaaaaccacaggattctcaccttccgaatttcgcaggctgaaaaacaaaaaccgacttccgctggataaaatcaagtcttaatttccataatattacaagtctgttccttatttatataaaatttttccattcgatttcacgaaatttgtgaacatctaaaaagaaatcatggaaaaaaaatatcacgttgaaggaatgagctgcgacggctgccgcaaaaaaatatcagaaaacctgaacaatattcccggaatttccgctaaagtaaatctggaaaaccaaacggcagaaatttcttctgacggaaacattgatcttgaaaccctgaacaacaccttgaaaaaggccggaaattaccacttgactgatcctgaagcaacgataaaccaggattttgtaaaaccacaggatcgtgtttccccaagttccgtctactactgcccaatggaatgcgaaggcgacaaagtctattttcagcagggcaaacgctgtccggtatgcaatatgtatcttgttccgattgaggaaaaagcagatcatcagtccaaaccgcaggcttattcccaaaccaacctgccaccggacttcaaacatcagacaggaaaatatttctgtccgatgttttgtgaaggcgacaaagtgtatgacaaacccggcaactgccctgtatgccacatgcatctcgaaaaaataacaccggaacttataggaaacgccaatcattctggcatgtcagcgatgcatgatcacgaaatgaaaatggacatgaaatccggaatgaaaatggatggccacaaccatcaggaaatgatgaatcagcattcaggtaaatattactgcccaatgtattgcgaaggcgacaaagtctacgacaccaatgtcggatgccccgtttgcggaatggatcttgtgaaaatcccagaaaagaagacatctttatggacctgccctatgcatcccgaaattgtagaagaccatcccggaagctgccccatttgcggaatggatctcattcccatggcttcaaaaaaaggagaacatgacgatgatacctaccggattctcagacgaaaatttattacagcactgatttttaccgttcccgttctcgtcctctcgatgggcggcatgtggatcgactggcctttttctgaaaaaaccggtggatggatacagttcatcctgtcactacccgtaatattctatgcaggatggtttttgttgaaacgcggctggatatcctttaagacctggaatctcaatatgttttcactgattgcactgggtgctgcagcggcgttcctctttagtctggtctccctgatataccctgaaatacttccacacgaatttatacacaacggcaaaattccgctttattttgagtcggtctgcgtgattctgacactggtgatcatggggcagatgctggaagccaaagcacatcagaaaactggtaaagccatcgaagaactcatgaacctctcgcccgacaccgccaatctgatcattgacggacaggaaaagaaagtccccctttctgctgttaaagtcggagatctgttacgcgtgaaggcaggcgaaaaaattccggtagacggaaaaattaccgaagggagttccagtatagacgaaagttccatcaccggagagccattgcctgtggaaaaaaatcccgatgacgccgttacttccggaaccatcaataaaaacggatcttttgtgatgaaagcagagaaagtgggtgacgaaaccctgctctcacaaatcatccggatggtgaatgaagccagcagaagcaaagcacccatccagaaacttgctgaccggatttccggtatttttgtacccgttgtcatcggaatttcgatattgacctttgttctctggtactttttcggaggtgaaaaccgtatgatatatgcttttgtcaatgctgttgccgtactgattgtagcctgtccttgtgccctcggactggccacaccaatgagtatgaccgtaggaatcggaaaaggtgccaaaaacggcatcctcatcaaaaacgccgatgcactcgaactgatgcacaaaaccaatgtcctgataaccgacaaaaccggaacactgacagaaggaaaaccaagcctcgaaaatatagtgccggccaatggcaatgatgaaaataccatactccagatagctgcctcactgaaccagaattctgatcatcctctttctgaggcacttcttaaagttttcaaggaaaagaaaaaagacttcctgaaaaccagccagttcgagaatatcagcggaaaaggaatacaggcagtaattgacggcaaaagcacacttctcggaaatgccgcactgctggaaagccaccacgtcaacattcctgatcccatccggaagcagtctgatgaaatgcagcagcaggccaaaactgtttcctatctggcacaggacggaaaaatactgggatttctcgcttatcatgacaagataaaagatacttcaaaaaaagctgttgactatcttcaggcacatcatatcgaagtcatcatgatgaccggagacaacgaacatactgccaaagccgttgccgaagaactcggaatcggacattatgtcgcagggtgcatgccggaagataagatgaaagagataaaaaaactccagcaggaagggaaaactgtcgccatggccggcgacgggattaatgatgctccggcacttgcacaggccaatattggcattgcaatgggtaccggttcggatgcggcgattgaaagttcggaaatcacacttgtaaaaggcgatatcctgggaattgtgaaagcccgtatcctgagtgaaaaactgctgaaaaacattaaggaaaacttgttttttgcatttatttacaatacattgggtatccctgttgccgccggtcttttgtatccgtttttcggaattcttctgagcccgatgattgcagcagcggccatgagtttcagttcggtgtccgtcatcctgaattcactccgactgaaccatgtcaaaatagatgttgaatcctgatcacttattttatgtatcagataatacgatttcattgataatttgtatataagaaaagtgctaattgtataatatttgctgtgcaaagaccgaatttaaaagttttattatgtcagaattaatattgatccgccacggacagtcccagtggaatctggaaaacaaatttaccggctggaaggatgtggatcttaccgaaaaaggaattgaagaagcccaccgcgctgcaaaagaaattgcaggaaaagatattgacgaagccttcacttccgaccttacaagagcacagcatacgctgaaaattattattgacgacaaccatctgagaattcccgtaaccaaagacaaagccctgaacgaaagatgctatggcagtcttgaaggactgaacaaggcagaaacggcaaaaaaatatggcgatgaacaggtacatatctggagaagatcctacgatgtggcacctccagaaggtgaaagcctgaaaatgacttacgaaagggtaattccttattatatgaaccatattcttcctgaactcctcaagggcagaaacatcctgatcgtcgcacacggaaacagtctgagatccctgattatgtacttggaacgcatgacacccgaccaaattctgaaacgtgaacttgctaccggcgatcctttcatttaccacatcggacagaatattctggaagagatgaaagcagaaaaagattttgccgccctaaaacccgaagaaaaaagccaggtatgaccgcttataaagaaagaacgcttctggaagatctggcgggtgccgacttttcaaaagttcttgacaaatatgccgaggaagagattatccgtaatattgcccctcagctggatacattgattgacaaagatttcgggcgtctcacccttattctgtacaaaattgacgttgatgaaaaccgaatccgcaaagcattaagtcatgctgacaaagatatcagttccggacagattcttgcccgactgattgtcgaccggcagaaacagaaatacgaattgagaaaacaattcagctgattaaaaatcagaaccgcaatgttctgatttttttgtaaaatgaagccgtctcacccttgaggcggtttttttttgcttaaggttattggcagtatggtcatttgtttttcaaatgaacacgtgaaacaaccaaaaataaaaggtataaaaaaaggcgagttgccccgccttgaatgttttgttcataattatttgttgtttttaaaagaattcacgaaacatttattaataaaaaagccccgaagatagtcgaggcactaaatgttttcacaacggaataatccttattgtgaattgctttcgtttacaaatgtacaaaattgattttcatcataaaagtaaaattgtatgatttttattattaattttataaaaatgattacaaaaaacaataataatgagcgtaaaaaggattttaggattggatctcgggacaaattctgttgtgctaaaagaagaacataaatggtatcggataaaaataaaaagcaattcacaacttactaatttcaaggagcatagtaactatttatccgataccgattcaaagataatgttttttttaagataaattagtaagagtttttatattttttaaaattaactatatttgttcataaaacaatgataatcaatatgaaaagaaacatacttggtctggatctgggaacaacttccataggattcgcccatataattgaaagttctacggctgaagattctcaaattattcaaatcggtgttcgtgttaatcctttaacaacggatgagcaaaccaactttgaaaaaggaaagcccgtttctataaatgcggacagaacactaaaacgtggtgcaagaagaatgttggatcgttatcagcaaaggcgcgaacatcttattgacactttaatcaaagcgaatatcatcactaaagaaacgattcttgccgaagatggcaaaagcaccacttttgagacctggcgtttgcgtgcaaaatccgttaccgaaaaaattgaaaaaacagaattagctcgtgttttcctcgctatcaataagaagcgtggatacaaaagcagtcgtaaagccaaaaatgaggaggaaggtcaattaattgatggaatggcgattgccaaacgattgtacgaagaaaatcttacacccggacagttggtttatcagttattgaaagaagataaaaaattaattcctgatttttatcgttccgatttacaaagtgaatttgacaaagtttggaattttcaaaaacagttttatcctgaaattcttacagacgaattttatttggatttaaaaggaaaaggacagagagcaacttctgctatattttggacaaaatatggtttcaacactgcagaaaacaaaggtaatcgggaagaaaagaaacttcaagcatataaatggcggagtgaagcggtttccttagaattgacaaaagaggaagtagcgtatgtactaacagaaatcaacagcaatcttgctaattcgagtggttatcttggagctatttccgatcgaagcaaagaactgtatttcaataaagaaacagttgggcaaaatttgtacagacaattgcaacttaatccgcatacgagactgaaagatcaggtgttttatcgtcaggattatcaggatgaatttgaggcaatttggaaggaacaatccaaacatcatccggaacttacggatgaattgaaatcagagatccgtgatattactgttttttatcagcgcaaattaaaatcacaaaagggtttggtaagtttttgtgaatttgaaagcaaggaaattgaaattgagaagaacggaaaaatcacgaaaaaaacaataggtttaaaagtggctccaaaatcttcgcctttgtttcaggaatttaaaatctggcaggttttgaataatgttttagtccgcaaaaaaggcagtaagaagagaacggtaaaaaaagaatctcaaccaacattgtttgaggaagaaaaagaagtttttgcttttgatctggaaacaaaacaaaaattgtttgaagaattaaaccttaaaggaaatctaaaagctagtaaaatcatcgagatattaggtcataaaccatcagaatgggaaatcaactatgccgaactggaaggaaatcgcaccaataaagcattgtacgatgcctatctgaaaatattagaatttgaaggttatgacgaagatttattgaaattacaaggcaaagatgatattaatgtttcggagctgaaagccagtgcctgtgagattaaagatatggtaaaacatatttttgaagtattgcatattaatacagaaattttagattttaatgccgaattggaagggaaagattttgaaaagcaaccatcatatcagttgtggcatcttttatattcttacgaaggcgacgattctccaagtggaaacgaaaaactttatgaactattagaaaagaaatttggattcaaaaaagaacatggacagattttggcgaatgtgactttgtcagatgattacggaaatctttcgactaaagcgatgaggagaatatatccgcacatcaaagagcaaacgtatgataaagctgctgcacttgctggttacaagcattctgcgtcttcattaacgaaagaagaaattgaaaatcgcccgttaaaagacaagctggaattgctgaaaaagaacagtttacgaaatccggtagtggaaaaaattctcaatcaattggtaaacgttgtgaatacactaatcgaaaaaaataaagccattgatcctgatttccattttgatgaaatacgtgttgaattagctcgtgaattaaagaaaaatgccaaagagcgtgcagaaatgacgaccaatattaatgctgcaaaaattgcacacgataaaattttcaaacttttgcaaacagagtttggcgtcaaaaacccgaccagaaatgatattattcgatataaattgtacgaggaattgaagaataatggctacaaagatttatatacgaacacttatattcctcgcgaaattttgttcagtaagcaaattgacattgaccatattattccgcaggcaaaactatttgacgatagcttttccaacaagaccgtaattttccgacaaactaatctggataaagggaacaaaacagcttttgattatattgaaagtaagtttggagaagaaaaactggaagaatttaaactcagaattgaagcattatatcaatccggacaaaaaagtaaggaagaaggaatcagcaaagccaaatatcaaaaactgttgaaaaaggaatctgaaattggcgaaggttttattgaaagagatttacgcgacagtcaatatattgccaaaaaagcaagaaatcttttatatgaaatttgtagagttgtgacagcaacatccggaagcgttaccgacagattgcgtgaagattggggcttggtaaatatcatgcaggaactcaattttgaaaaattcaagtcattgggactgacggaaatggtggagaaaaaagacggaactttcaaagaacgaattgttgactggagcaaacgaaacgatcatcgtcatcatgcaatggatgctttaacggtggcatttaccaaaaaaagttttattcagtacttgaataatttgaacgccagaagaagtaatcaatttaacgaaggtattcgtaatacggaagatcaaaaatcaattgaaacttccaatctgaagatttctacgcgtgatgtaatgggcatcgaacaaaaagaactacatcgggatgaagaaggaaaactaaggttcaatttaccaattaccaatttccggaaaatagccaaagaacatttggagaatgttttggtttcacacaaggcaaaaaacaaagtcgttacgaagaacaagaataaaatcaaatctaaaaacggtgaaagagtaaaagttgaactaacaccaagaggacaattgcataaggaaaccatctatggaaaatatcaatattatgtaaataaagaagagagaatcggcgcgaaattcaataaagaaacgattgaaaaagtttcaaatccggtttataaaaaactactcttgcaaagattatccgaaaatggaaacgatccaaaaaaagcatttggaggtaaaaatgctttcagtaaaaatccaatttatttggatgaaaataaaaaggaaatcatgcctgagacggttaaattaacatggttggaagaagattattccatccgaaaagatgttacgcccgaaaattttaaagatatcaaaaccattgaaaaagttttggatgcgaaagtcaaacaaattttgcttgatcgattgaaagaatttggaggaaatcccaaattagcattttcagatttagataaaaacccgatctggcttaacaaatccaagggcatttctattaagagagtaactatttccggtgttaaaaatgtggaatcactccacttcaaaaatgaccatttaggaaatgatattttagatgaacaaggaaataaaatccgaagttcatttgtcagtaccggaaataaccatcacgttgccatctatcgggatgaaaaaggaaatttacaggataaaattgtatctctgtttgatgctgtacaattagtaaatgcgggtgaacaaattatagacaaacaatacaatcaaggtttagggtggcagtttctttttacgatgaaacagaatgaatattttgtatttccaaatgaaaaaacaggatttaatcctaatgaaatagatttattagacccaaaaaataaaaaacagattagcccgaatttgtttagggtgcagaaattatccaaagtagaatatggtaattcatctgtaagagaatatgtttttagacaccatttagaaacgacagtagatgaaaagaaagaactcaaagaaattacttttaagaatattaaaagtttgggataccttaaaaatgctcaaaaagtccgcattaatcatttaggagatattataagtgttggagaaaattaaaagcataaaaacatgtcacacaaattaaaaataaccttagaaggctcagaacccaaaatatacagaacggttatcgttccagagaaatttacgtttgacgacttacattatgtcatacaatgcgtgatgaattgggaaaacgcacacctttatcaattcaacttgggaagaccttattccagcgattccattaaattaaaagatgaagaagatgatttcttttttccaaatagatataaacaatatgatgcagaagaaacctatttatcatattttttcaacggatttaccaagaaaatgacctatacttacgattttggagatgactggacgcatattatcactgttcttaaaaaatcagaggaagaagtgctgtatccaaaatgtatcaaaggtgaaaacgcagcacccatcgaagattgcggcggaatttgggggttttatgaaattttggaagctattgataaaaaaagaaaaaccgctgaagataaagaaatgctcgaatggtacggaatcccgaacgggaaaaaatatgaggatatctacggtttcagtctggatgaggtaaatgaacgtttaacggatttctttgtaaataacaatatctgaaatcctccattcaaatagaaagtcttaagtctctgagcaaaaaaagtgggcagaaaaagtctataaatagaaatttttaaaaaagatgaatcataaaattctgaaaaaaatctccgaaaacgattaactcaaaaccacgaaacaagaaatgatcacccgctccatctacatcggcaatccggcttatctcaagctgaaagacgagcaaatgtacattatggagcccgaatccggaatgatgaaaggaaaagtggcggtggaagatttggggcttctcatgctggatcactggcaagttaccgtttcgcatcaactcattcaaaaactgatgaaaaacaatgtggtggtcatcagttgcgacgatgtgcatcttccgcatggcatgatgcttcccatctatgggcacaccgaacattccgaccgcgtgaaagaccagctggaagccagcgaaccactgaaaaaacaactctggaaacaaactgttgaatacaaaatcgacaaccagaccgaagtgctgaagcgcttaggaaattattttgagcccatgccgttttaccgtcagcaagtaaaaagcggcgacattaccaatatggagggcattgcagcacagcattactggaaatatctcatcagtctggattttctgcgggagcggtacggcgatccgcccaaccatttttttaatttcggatatgcagtactgcggagcatggtggcaagagccatagtggagaccggtctgttgccggttctgggaatttttcacaaaaacaaatacaatccgtactgtcttgccgacgatttaatggaaccctaccggccttttgtggatttgctggtgatgcagtggctcaacctccatcccgagaccgaggatctcgacaaagaattcaaggcgcacatcctcaggattgccacttcggatgttcgtatagatggtaaaacccggccgttgatggtagcagtaaggattacggcttcatcgctctataaatgttataccggagaaaaaagactgattgcttatcccgaaatgatatgataccaatttctgattgtatgatgtgggcgtgccccaatgtttcccctccgctgcttccatcgccgaaacaaagggtcggtctgcacctgcaatctttttccccaaggctttttcccttcagaaaaaggatttccggctccgccctcacgcggaagcggtgtccgttgtcctgcgggaaattaaccgttcggcgccaacctggtttaaaggataaaattgcttcaatccgtttttcatggcggggnntttcatccattgttcatccgatatggaacaggaacgttttaatgcttaccggattatgtgggtactggttttatatgatttgcctaccgagacaaaagccaaccgccgcgatgccacgctgtttcgcaagcgcctggaggatgacgggtttacgctgtttcagttttccatctatgtgcgtcactgtcccagccgggaaaatgccgaagtccatatcaaaagagtcaagaacatgcttcctaaagcagggaaagtagccattatgtgcataacggacaagcagttcggggatatcgagatcttttttgccaggaatcgggaagagcctccgcagatgtggcaacagctggaacttttctgatttttccgattctgttcaatgaaaaaatccactgaaaatcagtggattaaattttgaggttgtgttatatctcaaag

SEQ ID NO: 2357 - DNA, 16639 bp, synthetic construct
  misc_feature 1..16639: note = Synthetic
  source 1..16639: mol_type = other DNA
tgaaaaccaaggagtttactgtagtaaatgactgttttcaaaacgagtataacgaaaaaatcggacattatggacagacactaattaacaatgttcccatttctataattaagttggttagttttattacctccttcatcaaactgcatccatattccctcttttaaatcaagattgtatttgccttcaatttgttttgttccactttcgtaaaaacaagtccacattccctgttttttgttatctttatacccaccctcgcatgcttttgtacccgattcgtaatattcagtccaaataccagtcttttgagcttttacataatttccttcgctcgattttttaccgctttcaaaatattctatccacttcccttcttcttttccattatcataagaacctgaagattttggcttaccgttctcatcgaaatacgaaaaagctccgttaagtttacctgccgaatagttttcgtcggattttctgttaccgttttcgtaccactgcatactgttgcccgattttaaacctgctgaataaaatccttctgattcttttttcccacttgcataccaaaatgttgcttttcctgtttgtaaaccatctttaaaagtttcctccgacattgcttttgcatcattataccatgttaaaaatttgccatcttttttatcatctgtataatttccttcaaactttttttgttgattatcgtaccactcagtccaatttccttctttattcccatttttaaatgaaccctccatttttttctgaccattttcgaaccattcagtatatataccgtcggccattccttttgcataattaacctcaagcattttttgtccattattgtagtatgttttgaaaatgccatctttatttccattaataatatttccttcggtttttatttgactgttttcgtaccattctttatattccccttcctgaacaccattattccatgtttcaactgactttttttggcggttctgataccagctttgaattagcccttcttttttaccattaatataattgcccgaaaaagcttcgcggccatcttcgtaccacgatttgctttcaccattaagtttacaatcaacattattttcctgagcttttttctgaccgttctcgtagtaccatatccaaagtccatcgtgcttttcgcctaatgcagtgccttctaaacttatttttccatttggaaaattttcgattacagttttataaacattatcatttgttgcaacaccttttacatcaaaagttttccaattaccctctctcctgtcattaacatacttaccttgttgcataatttttccgttttcgtaataaatagtagcatcgccatttaatttaccatcattacaaattccttcaaaatatttttgactattatcgtaccactcaatttgacttccaacttttttgctattttcgtaatttacttctaattttttattaccattactgtaatatgttattaactttccgtttaattcccctgcattataaaatgcttcgctttgctttttaccattcgaataccattcggtccatgcactatcttttttcccacctttcatatttccttctgatattttctcaccattttcgtaccagcttgtccataaaccttctgcaactccattattgtatttttcccgaaattttaattgagaattttcgtaccaccaaaacaattcaccatcttttttgttgttaacataagattgtaattcctgtttttcgccattcgaataaaattttacaattgtattataatcagtttcttttacaactttaccattagaatcgtattcgaaccacttcccatcacgataattcgataacattttgcctgaaatctttaattgtccattatcgtaatactcaacccaactgccatttaaagtatcattattccattttttttctgatgcttttttaccattctcaaaccaggaaacctcttttccgtttttcttgttttcataataatttgactgatgttttaacactttactttcataatactcgttccagctatcatgttttcttccgtcttttaaagttccctccgatttttttaaatctttgctataccattcataaacagtttcataatttttatccttactaattttaccataagcatcccattcaacccatttgccaattttgcgaccatttttatatgttccttgctctttaatttgtccataagggtaataataagttcctgttccattaaatttagcatctttataagtagcttcaaatattttaaacccatcttcgtcatattcagtccatgatttttcgggaataccttttttaaaatagccctcgtattttttttgtccattagaatatttgccaatgcaaatgcctgtatatgcttctccagatgaaattaaataaaatatattattatccctttcttcgagttgctcaaggctaacatcctgacaaaatccccataatggaaaaaatactaatattaaaattattatatttctcataaacagcaaattaaataaaataatatgttaaacaaatataattaaagtattttgtgaaacaataaaaaatataatttatttattaattttaattaactttactttttatagcatacaagccatttgtgagaaaatttgaacgaaatttaattattttatttatattatttattgcttttgcatatattacaaaacatttttcaggaaatttatttaataatcctttaagttttgtaattttagacaaagacaataatttgctgaatgcaaaaattgccagcgatggacaatggagatttcccgaaataaaagaagtaccgcttaaatttaaaattgcaattacaactttcgaagacaaaagattttatcttcataacggagttgatatatatgctttatcaagggcattatatttaaacattaaacacaacaagataattagtggtggcagtacaattacaatgcaaattgcaagattatcgcaaaaaaataaaccccgaacaatatttcaaaaaacccgcgaaatatttttagcttggctcatcgaaatttattattctaaagatgaaattctttcgctttattcatcgaatgctccttatggtggaaacgtagtaggcttgcaagcggcatcgtggcgatattttgggcgtatgccaaatgaactttcgtgggccgaaagttgtatgcttgctgttttaccgaatagcccgtcactagtacatattggcaaaaacagaaatgctctgaaacacaaaagagatgtgcttttaaatagattatttatgttgggctatattaataaagaaacctcgaatttatcgaaagaagaattaattcctgataagccaaatgattttccacaggaagcacctcaccttttagacagaataatgaaagaatcaaataacaacatgcataatattgttaaaactacaatttccgaaaaacttcaaaatcacgcatatttagtattagaaagatacaaaccaaatttaattggcaatggtattaacaacgctgctgcaataattatggaagttgaaacaggtaaagtactcgcttatattggaaattacaataatttagacgacacaaaagatggctgtcaggttgatattattaatgcaccaagaagcacaggaagtattctaaaacctgttctttatgcttcaatgttaagttcaggagaaattttacccaacacgcttgttcctgatattccaattcagattggaagttactcgcctaagaattatagcagaggatacgacggagcagtgccagcaaatagagcattagcaaaatcattaaatattccggctgtaaaaatgttacaaagttatggagtgcaacgacttatttttatgcttcaaaagcttggtttaacaacaataacacgttccgaaaatgattacggattatccttaattttaggaggttgcgaagcaaaacttttcgaagttgccgggatgtatgcttcaatggcaagaatattaaatcattataacgataacaataaatactcgaaaaatgatattcatctaccaatattcaaatttcaaaaaataaataacaaagtacaaaatgataaaagttcatttattaatgcctctgccatttggttcacttttcaggcaatgctcgatgttgaccgtccacccgaagaaagcaactggcaaatgttttcgtcgggacgaaaaatagcatggaaaacaggaacaagttttggttttcgcgatggatgggcaattggaattaatccaaaatatgttgttggcgtttgggtgggcaatgcagatggtgaaggtcgccccgaacttaccggaataaaaaccgcagcacctgtattattcgatttatttagtttattacctaatgaaaacgagtggtttaacaaaccaacttcaaatatggtaaaagcaaatatctgtaaaaagagcggttatctaacatcagatatttgcgacgacaccgaagaaatgttaattcctgcaaatggtattaattttaaaaaatgcccttatcacaaacttattcatttagataaaaccgaaaaatttcaggttaataccgattgcgaagaaccttcgcaaattattaataaatcgtggtttgtgctacctccaacaattgaatattattttaaaagcaaaaacaattattataaaacactacccccatttagagtagattgcaaagagaaacttatcacaaaccctaataaagttatggaaataatttatccgaaaaatctcacacaaatttatatcccaaaagaacttgacggcaaacccggaagtgcagtttttgaagtagcccatcgtaaatcggatattgttatttattggtatatagataaaaaatttatttgcgaaacaaaagatttacatcaggcagctttaaatccattgccaggaaagcacattttaactttaactgacgaaaacggtgaaacattatctataaaatttgaagtgttagataaagaaaaaaaataacatatcgggacttctaaaaattgctttttctttgttatgcttatttttcaaaattactcacattttaattttattttcaaggtgttcgtgagatcgcttcgctaagttctcatttacaacagtaaactacggttttaaaatcttgtccgtctcgaaaaatctaatttttagaatcccctctaaagtttaaaaacgaaattttattataacaattttgaattaaaaaatgaagtttataactctgattatgtgtaatatacagcactatctaaagtagataatctaaagtagataatattaaaaaaaattgtatctttgattacgaacaaacaaaaaaaagcgagagtcacctcccgctttaaatgttttcacaacggaataatccttattgtgatttgctcattttgttttgcaaaaataaatatttttttttaaattgcaaaactttttaaaataatttacaatatgaaaaaaatattaggattggatttgggaactaactctattgggtgggcgttggtaaatgaagctgataatgaaagagaaaaatcatctattattaagataggggtaagagtaaatcctttaactgttgacgaacaacaaaattttgaaaagggcaaaagcattacaactaacgctgacaggactcttaaaagaagtatgcgaaggaatctacaacgctttaaacttcgtaaagaaaaccttattgaaattttgaaaaaacaaaaattcataaatgatgaaactattttatcagagaacggtaataaatcaacattcgagacatacaatttaagagcaaaatctgcaactgaagaaattactttagaacaatttgcaagagttctgttaatgattaataaaaaacgaggatataaaagcagtagaaaagcaaaatcacaagatgaaggacagttaattgatggaatggaaattgccaaaaaattatacaatgacaatttaactccaggacaatttgtttttcagatattaaaagaaggcaaaaaatacattcccgatttttacagatcagatttacaagcagaatttgataaaatttggagttttcaaaaacaatttaatcctgatattttaacagaagaatttaataaacaaataattggtaaaggcaaagtaaatactacaaaaatatttttagcaaaatatggcatatacacaattgacaataaaggcgcagataaaaaatcacaagcttataattggcgggttgaagctttaacaaatcaactaacaaaagaggaattagcatttgttattagtgatttaaatggaatcatcagcaattcaagtggttatttgggctcaataagcgatagaagtaaagagttgtattttaacaaacaaactgtcggccagtatttaattgcccaacttaaagaaaatccacatactcagttaaaaaaccaagtgttttatcgtcaggattatttagatgaattcaatactatttgggaaactcaagcaaaatttcacaaagagctaactaacgaattaaaagaagaaattcgtgatattattattttttatcaacgaaaattaaaaagccaaaaaggattaattagtttttgtgaatttgaaagcaaacaaattgaaattaacattgatggaaagaaaaaattaaaaacggttggttcaaaagtttgtccaaaatcatcgccattatttcaggtatttaaaatttggcaaatattaaacaatatacaagtaattgaaaaatctactggtaaatctaaatttttagaacaagatgaaaaagagattctgtttaaagaattaaattttaaagataaaatttcaaaaaccgatgctttaaaaattctttacaaaaactataaagagttagattttaatttcaaagaaaatatagaaggaaatagaacacaagctactttcttaaaagcttttcaaagcattattgaattaagtggacatgaggtatctgatttttcaaaaataaaaactgatgaaattttggaaatagttacacctatttttgaaggattcggtttcaacactaatctattacagtttaactctaatttaaaaggtaaagattttgaaaaacaagcagtatatcaattatggcatttgttatattcttttgaaggtgataattcaaatactggaaatgaaaaattaattcaaaaaatttctgaattatatggttttgaaagagaatacgctattatcattgccaacataagctttcaaccagattatggcagtctaagcacaaaagctattcgtaaaatacttccacatttaaaagaaggaattgaatttagtctggcttgtgaatacgctggatacagacattcaaaaaattcattaaccaaagaagaaaaaaataaaaaaatattaaaagacaaaatcgatattttacctaaaaatagtttacgaaatcctgtagttgaaaaaatattaaatcaaatgattaatgtggttaatgctaccattgaaacatacggaaaacctgatgaaataagaattgaattagcacgtgaacttaaaaaaagtgcgaaagaaagagaagatttaacaaatgcaataaataagtcaactctcgaccatgagaaatataaagcattactccaaaaagaatttggtttatctaatgtaagcagaaacgatatcatacgttataaactttatttagagttagaacataatggatttcacacgctttattcgaacacttatatagaaccgaataagctatttagcaaggaatttgatattgaacacattattcctcaatcacgattatttgatgattctttttctaacaaaacaattgaaagcagaagtgcaaatattgaaaaaggaaacgaaactgcatttgactacgtttcaaataaaaatggtgaagtcgggttaaaagattatttaaaaaacattgaagatttatttaataacggtaaaatttcaaaaacaaagtacaataaacttaagatgaaaggcgatgaaataccaagcgattttattgctcgtgacttaagagacacgcaatacatttcaaaaaaagcgaaatctattttggaagatttagttaaagatgttgtttctacaggtggttcaattacagatagattaagagaagattggcagttaattgatattatgaaagaacttaattgggataaatatgacaaacttggtcttacggaagttattgaaaataacgatgggcataaaattaatagaataaaagattggacaaaacgaaacgaccatcgccatcatgcaatggatgcacttacaatagcatttactaaaagaagctatattcaatatttaaataatttgaacgctcgaagtgataaatcaggcagtatttatggaatagaacaaaaggaactttatcgcgataaaaacaataaacttcgttttaaaccacctattccattagatgattttagagcagaagcaaaaaaacaattagaaaacacattggtttctataaaagctaaaaataaagtagctacaataaatattaataatactaaaaagcaaggtggggaaaataagaagaaacaactaacccctcgcggtcaactacatttagaaaccatttatggcagtattcaacaatatgtaacaaaagaagaaaaagtgggtgcaaactttaataaagaattaatcgaaaaagtagctaataaaaaatgtcgcgaagctttattaaaacgattaattgaatttgataacgaccctaaaaaagcgtttacccgaaaaaatagtttgaataaaaatcctttatacattgatactattaaaacatataaagttcccgaaaaggttaaaacagtaacaacagaaacaatatacactattcgaaaagatattaatccagatttaaaaattgataaagtagttgataaaaaaataaagaatattttagagttacgacttaaagaatttaatggtgatgctaaaaaagcattttcaaatttagacgaaaagccaatatggcttaacaaagaaaaaggtatttctattaaacgtgttacaataacaggaattagtaatgccattgctttgcatgataaaaaagataaagaaggaaatttcattttagataatcaagggaaaaagcaagcagtagattttgtaaataccggaaacaatcatcatgttgctatttataaagatgaaaaaggcaatttacaagaaaatgttataacattttacgaagcagttgagcgtgtaaaccaaggcataccaattattgataaaacatataaacaaaatgaagggtggcaatttttgtttagcatgaaacaaaatgaatactttgtatttcctaatgagaaaacaggatttaactccaacgaaatagatttattaaatcctgaaaattatcatttaataagtcctaatttgtttagagtacaaaaaattgcaacaaaggattatttttttagacatcatttagaaacaaatgttgaaaatattactactacaaaagatttaacatggaaaagacttggaataaatggaattattaatattttgaaagttcgaataaatcatatcggtcaaattgtatcagttggtgaatattagaagtttaaatttagcgctcaattaattttatccatgaaaataatttatggaaataccacacgaaccctcaaaatactatcatatttataaccactcaaatggtttcaataatatttcaatatcaaaaatgtagcaataaaaatatttttacattatacattttgtatattacattgtgtatagttatatttgaataaaaagataaatgctggtattgtttttcaaacaataaatgaaataacaactgacaatgaagctgtttattttcagtaccgaaatttaataacaacatcgcaatggaacttgctaaaggcaattgccatcgaaaaaaaattagcacagccctatgcacaaaattttatttttaaatataacttaggaaactctgcaaatgtaaaaagagtaatagagtcattgttagaaaaagaactaatttattacaacacagcaattgagaatccttattttgaggtgtccgataaatttttaatgtatttgataacaaacaaataaaattatacattttgtataatacattttgtataattttaaatatttttgaaataaatttaaaataaaaatgcacaaaccttcaaaacattatcacatttatacagcaaacgggataaatttccgcatttcatgaatacaaaaaggtatagaggtataaggtataaaggtataaaggcattaggaagagcgggttataccctatacccttataccttttacctgaaacccaaatgtaataatttaacccgtgcaaagtatataatcacgctaatggtttcgaaaatatttttaaaagcgaagaagaattgagcgggtgttgagagatggtgataaaactttccgaaagtttgccaagccaaaagccgggctaactttcggaaagttgaatattaaaatctttaatttcgccattatataatttaaactaattttatccatgaaaatcaaaagtattattttgttttttcatggataattttatatatttgcaaaatgatacagagattagaattacaaacattaactaatttattaaaactaaatcctgttgtggcattgctgggtaacaggcaaataggcaaaaccacacttgccagactatactcagataaggcaaaaaaagaaacattatatctggatatggaattagatagccattttaaccgtttgcaaaacgatgccgaaagttatttattaaaaaataaacataaacttataataattgatgaagtgcagcgaatgccaaaactttttgctttgttacgggcattagttgatattgatagaaaacctgcacgttttttattattgggttcatcgtcaccaaatttaattaaaggagtatcggaatcattagcaggaagaattgcatatcttgatttgggaggaataaaccttatagaagcaaaaaaaagtaaaatatcacaagatacattatggcttaaaggtggctttccaactgcattaaatttaaaacaaaactctgcagtttataactggtatgccaacttaataaaatcgtacaccgaaaaagacataaaagaattgtttggcgttgatttttcgtcggtaacaattcgcaatttctggagtatgcttgcgcataacaacggtaatatttggaacaaagaaaactacgccaaatcgttaggcgttacagctccaacagttggccgatatttagaatatatggaaggagcatttctaataacacgacttctgccatggcataacaattcaaaaaaaagattagtaaaagcacctaaaatatacattcgcgatacaggtattttgcatactttaattaaaacaaaagatatggacgatttattcggacatccatgcgtaggtgcatcgtgggaaggatttgttattgaacaaataagacaattaaaacccgaaaatttagatttatacttttatcgcacccatcagggaacagaagccgatttagtattagtaaaaggtataaagccagttgcatgtattgaaataaaattatcaaacgcaccacaaattagcaaagggtttttacaatcaattactgatttaaaaacaaagaacaattttttaattatgccagcaggcgacaattatcaatcaaaagaaaaaataaatatttgtaatttatcagattttttgagcatatatttaaaaaacataaaataattatccatgaaattcaaaagtattattttcgattttcatggataaataattattaacagaatatttaattatgctattaaagtaaaaaattatggacgtaccgctcaaaccgtcgaaatattatcacatttataaccatgcaaatgggtttgaaaatatttttatatctgatgaaaattaccgtttttttttagtaaagtttaatctttacatttcgcatattgcagacactctggcttattgcctgatgccaaatcattttcatttattaataaaaattaaaaacgaagaagaattgagtggggtgttgagtggtaaaaaccctcaaggtttaaccgagccaaagccgttgcaaaaccttgagggtttaggggtgatttataataaattaataagccagcaatttagtaatcttttcaactcttatactaaatcatttaacaaagtatataaccgcagaggcagtctttttgttcccaattttaaacgaaaagaaattacttcgcaggaatatttacagcaggttgttatttatattcacaataatcctgttaagcatggctttacaactaacccaacacaatggaaattttcatcatacaatgacattattaacaataaagagacttttgttttaaaagaatatgtagtttcattgtttgataacttagaaaactttaaatatttacatactaaaaaagcaaacctgacgaacgatttaagattagaaaaataaaaaactttcgaaaatgattaaacgaactctttattttggaaatccggcttaccttaatttaaaagatgagcaaatgattgttcatttagccgaaacagaaaaccagtcagcagcaatacttgatggttttacagagtataaaaaagaatcaaaagcaacaatacctgttgaagatattggcatagttgttttagacaacaaacaaataacaattacacaaggacttattgaatcgttactcgaaaacaatgttgcattaataacatgtaacagtaaacatttacctgtaggattattgttaccacttagcggaaacactattcaaagcgaacgattcagagcacaaattgatgctaccgagccattaaaaaaacaactttgggctcaaactgcaagtcagaaaataaaaaaccaggcagcattattagagagtattggtataaataacagttatttaattccattatataaaaatgtaaatagcggcgataccaataattgcgaagcaactgctgcattttattactggcagcatattttctcggatttcgatttaaaaaattttgaaaaaagcgaagaaagttcagataataataatgaagctgttaacaccgacgaagaaaataatttaaaattcaaacgcttacgcgaaggcaatcctccaaataattatttaaattatggttatgctattttacgaggaactatggcccgaagtatagtatgtgcaggattattgccaacacttggtatttttcatcataacagatataatgcttattgtttagccgacgatttaatggaaccataccgcccatatattgataaagttgtgttgaatgttataaaagaacatggcttaaaagaagatttaacaaaagaaataaaagcaatgcttttaacaataccggcaatagatgtaataatgttcgacgaaaaaagtcctttgttaattgcaacacaacgaactgcaaatagtttggtaaaatgttttaacggagagcaaagaaaattggtttatcctgaatttttgtaactcgtcattgcgaggcactaaacaatctaattattaatttaactttaaaaaaatatcgaataatgaataacgaatatcgaataatgaagtaaaagaaaacttcgtagaaattgttaagtaacgtgcatgaaataagctcctacggcgttgctataaaagattttaaatcctcacatactttagtatgctgcagtttaaaatttttatgcgccttgtaggaacttatttcctacacattactaaattaaataattacaaaattaataagtacataaacaatgtgttatgacaataaataccgaacgtttaaatgcctatagagttatgtggacattagttatgtacgacctgccaaccgaaacaaaaaaagagcgacgaactgctgcaatgtttcggaaagatttaatgaaagatggttttacaatgtttcagttcagtatgtatttaagacatagcccgagtgccgagaatgctgatgttcataaaaaaagagtaaaagcaagtttacccgaatatggaaaagtgggtatattgcaaataaccgacaagcaatttggtatgatggaaatatattacggacaaaaacttgctcaacgacccgacacaccacaacaattagaattattttagtaacgtgcattaaataagctcctactgcgttgctataaaagattttaaatcctcacatactttagtatgctgcggtttaaaatttttatgcgccttgtaggaacttatttactacacattacttaatgtcatgttgagcgaagtcgaaacatctatttataaatattgtcataaattttgagaataagtataaagcgaaaatgatatattttattttttgtatcacaaataaaatagaattaaaaaatccgagatattctcggatttttatatgataaacaagcaatttttttattgataaaaacaactacaaccattagttttattggtattacaacaatatatgttgtttatcaatatgtcaaagatacaaaatgaaagcaaatcacaacaattagaaaggcaattaaaatacgtagggagttgtttatcaatatgtcaaagatacaaaatgaaagcaaatcacaacacacttatattaaagaccgtaaagctttaagttgtttatcaatatgtcaaagatacaaaatgaaagcaaatcacaacaccaccaactttacccgctgttgttataatgttgtttatcaatatgtcaaagatacaaaatgaaagcaaatcacaacgctttgtttttgctgtattaaactttttaagttgtttatcaatatgtcaaagatacaaaatgaaagcaaatcacaacatattcgcctttaagttgccctgtcgcttggttgtttatcaatatgtcaaagatacaaaatgaaagcaaatcacaacagagcgagagcaatgcacagcaacggcgctgttgtttatcaatatgtcaaagatacaaaatgaaagcaaatcacaacaagccaaaggttattcaaacgagtttattggttgtttatcaatatgtcaaagatacaaaatgaaagcaaatcacaacatcaataacaacgtgatgtggatttgttgggttgtttatcaatatgtcaaagatacaaaatgaaagcaaatcacaacgacaaaaacctctaatggcttggttttcttgttgtttatcaatatgtcaaagatacaaaatgaaagcaaatcacaacggcataagtacttctgtttaaattaaatctgttgtttatcaatatgtcaaagatacaaaatgaaagcaaatcacaactgaagttagattaaaaaacgaaaaggatttgttgtttatcaatatgtcaaagatacaaaatgaaagcaaatcacaacgcactattgcaatgacagccctaactgtttgttgtttatcaatatgtcaaagatacaaaatgaaagcaaatcacaacggagagcaatagtgtgcacaacttccttgagttgtttatcaatatgtcaaagatacaaaatgaaagcaaatcacaaccatatacacttctggaaatattgtatctttgttgtttatcaatatgtcaaagatacaaaatgaaagcaaatcacaacttaatggaagatagtgaagggaatttatatgttgtttatcaatatgtcaaagatacaaaatgaaagcaaatcacaactatggtgcaaatgttattaaacttcttttagttgtttatcaatatgtcaaagatacaaaatgaaagcaaatcacaaccatagtaatatcaagtcgcaagaaaaactagttgtttatcaatatgtcaaagatacaaaatgaaagcaaatcacaacttatttaatatctggtttattttcgttgttgttgtttatcaatatgtcaaagatacaaaatgaaagcaaatcacaactttgtgcgaacttttacctctgttgtgaaggttgtttatcaatatgtcaaagatacaaaatgaaagcaaatcacaacatctgatagcggtttatttatgactgatttgttgtttatcaatatgtcaaagatacaaaatgaaagcaaatcacaacttgttattcgatgttgtaacgtgtccccaagttgtttatcaatatgtcaaagatacaaaatgaaagcaaatcacaactgttttggcttgattttcaatatacaacaagttgtttatcaatatgtcaaagatacaaaatgaaagcaaatcacaacagtcattagttgcgatattatatattaaaagttgtttatcaatatgtcaaagatacaaaatgaaagcaaatcacaactaagctgaatattacacaaatcgttacgtagttgtttatcaatatgtcaaagatacaaaatgaaagcaaatcacaacaaagagccgtaaagtatttttaatggctgtgttgtttatcaatatgtcaaagatacaaaatgaaagcaaatcacaactacaatgggttcacataattttgcacccgagttgtttatcaatatgtcaaagatacaaaatgaaagcaaatcacaacccatgaaatgctcacgcttcattccaatgcgttg

SEQ ID NO: 2358 - DNA, 16639 bp, synthetic construct
  source 1..16639: mol_type = other DNA
  misc_feature 1..16639: note = Synthetic
tgaatcttccagtggtgccatcatcctctctttcaaactttattgtatccattgaatgatttttaattcctacaaaagtaggataaattttcatcctcaaaaatttgcgttttgctcagtctatacagaaattgggcgagaggaaacgatttttttctgaactttttttgccctaattttacccaaaatttagttttgcaagatgtatttagtttttgataccgaaactacaggcttaccccaaaattttgatgcaccgatttccgattcttccaactggccgagaatggtgcagctcgcttggcaaatccacgatgaaaacggcaaacttatagacaaccaagacttcattatcaagcccgaaggctacgatataccgtttaatgtctcgcaaatacacgggattacgaccagtattgccaatgaaattggtgatgacttggagaccgtcctcaagcactttgctgaggcggttgagaagtgtaaattcggtgtggggcagaacattgattttgattataagattgtaggagcagaattttaccgaaaaggaattgctgataagttgcaagccctcccaaaagccgatactatgtggcttggtacgcagtttaccgcgattcctcaagggaatacaggcaggctcaagcccccaaaactcgaggaactctatgagaagctctatggttttaagtttgatgaagcccacaatgccgcagccgatgtaaatgctacggcacaagtattctttgagatgcttaggcgggggattatcagtgcggctgatctcggtgtggaggagagtgttatttcacatttccaaagcctgcataccgagcccataaagcctttccctatcgttatccgaagccagatagcagaatttaacaagagaaaacagggtgcttcccaaaccgcacaggagatggatttggggagttatttcaattttcataatcacagtattttttcctccctccaggcctctacccaccattccgatatggtaaataaagccttgaagaatgattttcctgctgtggggatggtagattttggcaatttgatgggtgcctttaagtttgttaatgaagtcgagaaagccaatggagatttaaagaaaaagcatcaggaattcatagataatcatccagatgaaacccctccaccgctaaaacagctcattcccattatcggatgtgagttttatatctcagacagaccagaacaaaagcagtttaccaaagatgaccccgaccgcaggacgaatgtagtcctccttgccaagaatttccgagggtataagaatattgcaaaactctccagccttgggtttgttaatggtttttacttcggtgtacctcgggtttcaaaagaatggattcttcagcataaggaagatgtaattgccctttcttcggggcttaatggcgatatacccaatgctgttttagaatacggagagaccaaaggcgagcaagtattcaaatggtggaaggatgcttttggagaggacttctatgtacagatccaaaaccacggcttggccgaagaagagtatctgaatgatatcctcctccgctgggcagagaaatatgatgtgaaagttctggctcagaatgagacttattatacctccaaagaggatgcacacatacaggaaattttattttgtataaaagacggtgaaaagctctccactcctgttggtagaggctttggtaagaggaaaggcttaccctcaaaagactacgatatgaaagaccgtgaggagataaagcgggcgtttagccattatcccaccgcttttaaggcgtatgaggactttctcaaaaagtttgagccttatgccttgaagagagaggttctcctccccaagtttgagattcctgagcagtttcagtccaaagaagatgaaaaagacggaggcaagcgaggagaaaatgctttcctaagacatcttacctacgaaggagccaagagaagatatgaggaaatcaccgatgagattcgagagaggttagactttgagctggaaatcatcgctaatacaggctatcctgggtacttcctcattgtgcaggacttttgtaatgaagcccgcaatatgggcgtatgggtaggtcctggtcgaggttcggcagcaggctcggcagtggcatactgtattggaattacgaatgtagatcctattaaatacgacctcctctttgagcgttttctcaatcctgagagaatctcaatgcccgatatagatatagactttgatgatgaagggagagacaagattattaaatgggtagtagaaaagtatggcaagatgaatgtggcacagattattacctattctgttctcggtggtaagtcggcaattaccgatgctggtcgtgttcttgaatattccattccagatacgaaaggcattgcgaaactcgtgcctccagcaccagggatgaatatcgctaaggcattcaaaaaatatgaaaagctccctccagaagataaaatactggtagatgagatgaaaaccatcttagacaataagaaagatgcacgattcccagtgctctctgctgctcagaagatggagggatgcattagaaatacgggaatacatgcctgcggggttatcattactccagaagatatttccaacctcgtccctattaccactgcggctaaggattccgatgtgctggtctctcaatttgataattcagtagctgaagcagcaggacttttaaagatggatttcctcgggcttagaactttatccattatccgtgatgcgattaaactcattaaagataattatgatatagatataaatccagatgagatttcactggaagatgagaagacttatcagctctttcaagagggtaggacaatagggattttccaatacgaaagtgtgggaatgcaaaagtatatgcgggagctgaaacccaccgtatttgccgaccttattgcgatgaatgccctctaccgaccaggtccaatcaagtatatcccaaactttatcaacagaaaacacggcatagaagagattgtgtatgaccttcccgaaaccgaagagtatttaaaggaaacctacggaattacggtttatcaagagcaagtaatgctactctctcagaagctggcaaactttacaaaaggtgaagccgatacactcagaaaggcaatggggaaaaagcagatagatgtcctcaataaaatgtatcccaagtttatagaaggaggaaagaagaacaatctgaatgaggaaaaactcgagaagatttggaacgactggaaagcctttgcagaatacgcctttaataagtctcactccacctgttatgcctatattgcctatcaaacagcctatctgaaagcaaattatcctgcggaatatatggcaagtgtgatgacgcataacctgaataacacaaagcaaatcacaatgtttatggaggactgcaaagcgatgggggtagatgtactcgggccagatgtaaacgaaagtcagtatgagttttccgtaaatgataaggggcagattcgctttggtctgggagcaatcaagggaataggtgagggaccgagcgaaattatcgtagagacccgccagcaaggtaagtttaaagatatatatgacttctttgaacgcataccagcctctcagattaataaaagagtggtggagagtttagtggtagcaggagcttttgatgaggtagatgaataccaccgtgcgcagtacttccaagaagataatgcgaatagaaccaccatagaaagactccttaaatacggacaatccttccaagaaagcagaaatgaaatggaaaactccctctttgcagactttgctgaagaggtacagatagagcaacccaagatagcacctgctccagaatggcaaaatatgcacaaactcaatcgtgagaaggagattatcggcttttacctttcatctcatccgttagatgagtttaaatatcagtatcaattcattcaaggattgctaagtaaaaaggaagtggtagaaactaaaaatacagatgatgagctcctcaacaaagctcagccagcatacaatgaaagccaggaagaagcagatgataccctcacagatgagcttatagatattgaaatggacgatgttgaagaaccagtggagaatgcggccaaagtaatagaggcaaaaggcaagttcagattcttaaatctcgatgagttggatgcctatcgcgataaaaatttcggagcggagcagctgaaactctttgaaaccgcagattataagaccaagcaggcgatgaataccgctgtgcgcgaaaatatggtcgcaggactcgttaccgaatacctcatacgagacggaagaaactcgggagagaaagttgcttttgtaacactggaagattattcggggagctattctttccgtttgggtgacagggattatctccgcctcaaagacaaaatagacctccaaaggttccttattttcaaagtgaagtactcaatgtccaaagacggcagagtatacctcaatgtagtagatgtaatggagcttaaggacgcttttgagcgctttgctaacagcctttccgttgtagtagatatacaagatttcaggcaagaagacttggaattcctctccaaagtgatacaagagaatttcggtgataaaaagctcagattctacctcagaaataaggagaataactcccatctcgagctcaataccataaggccgagcattaaaatagatggagacttcatcaagttctttgttgaaaacaacaaattccagttttatctcaactaaaattgtgaaaaccttaatgctgctcttcaactcattcgtaataacctctggtctctttaccgagactgaaaaccgattaataaacatcattaatgatttcattaaccccgcttaaaaccctacaaaacgcacaatttaggggcttactcgtaggaagattctttttaatcctcgcttttaggatgcttggcactttacttggctggtgggtctatcaactcacaaaagaccccttcgccattggtctcatcggcttatcggaagtcattcctgccgtgtcatcagctctttatgcaggctatgttattgatatgaacgagaaaaaaaggcttctcctcatctgcaattacgcttatgtcctgttggtagccgtgctggggcttctggcgtttagtgcggagggctgggggcttagcaatcaccagataacttatgtcatctacggggttattttctttacgggcatcagcagggcgtttcttggtcccattatcccgtctatgattccaaaaatcgttacaaaggacaccttacccaacgccattaccctgaaccaatccaccttcctcactgcatctgttggtgggcacgctatcggagggatactgatcgggaaaataggtgtagaatggacgctgatagtgattatgagccttatgctcatcgcttcgctcttcttttgggggctccagaagcaaccatctgagaacaataaccagaacattaggattatggagagtataaaagagggtgtgctttatatttataagacgaaggagattcttggggcgcttttcctcgatatgtttgccgtacttttcggtggtgcagtggcgatgattcctgtttttgctaccgatatcctaaaagtaggggcagagggcttcggtctgctaaatgccgccaccgatataggctctatgctcatcattatcacgctatccttcatcccactgcgaagaaatcaggggaaaattctcttgatggcagttgcgggttttggaatttgtattatcggttttgggttttcaaaaatctattggctatcctttattttattgatgatgagcgggatgttagatggaatatccgtcgttattcgtgggacaatcgtccaacttaagactccagacgagatacgggggcgcgttctcagtgtaaattctatatttataatgtccagcaacgaaatggggcagtttgaaagtggccttgctgcaaaactaatgggcgtaacccgctcggtaattttcggtggcagtatgaccctccttattgcccttctcgtagccctcaaaaacctaaaactccgcaatatggagtattaagccatagcaaggcagtcagccatggcatgacgagtatttaagctaatcacctcattagctatagtattaggtcaaaggaaataaataatcaccttactgactacagtatttcaagaaaggaaagtattatatttgtgtcctataattggtatgaatagaaaacgattagctgtttttgcattgattttcctcgttggaggtttaggatgggctggcgctcaggtattggcatcggggcggggaatgcagaatttccagcaggagagagaggagacggttttgtactttagcccagaggtgttccccgatgtggaggagattaaggagcctacgaatctggcttttttctctgcattgacggataaggtagcctctttgaaaggcaggaaagttctccgtgtggatgcaatgatgagttttgaggaaatttctcccgaaatcatcagagaatattgcaaaaataacggtgcaagctatgcagtactgcctcgtgttaagtattttaaggtcggttttggaaagtatgtgttctctaaccaagtggtggtgagtatgaagctctatgatgcagaagggagcctcataacagagacggaatacaacacttataggaagaatatgaggctattaggctcggcggagaattctgtacaggtggggacgaaaggtgcgataaacgaccttgcgaaaaagctgagaaaagtccttagaaaatcgaaataatacgagatgaaacagcgaaaaaagagagaatatcagtcctccgagctggtaaaagcctttgcaaagatttatggctttgaaaataagctcttagcccttgaggtaaagagttttctcgcggaatatatggggacagagagcttcaaagagattgaaaaagtggatttgaagcagaaaaaactcattattatcgtaaaatctccgatacttagaaatgatttacaattcaaacgctcattcctcctgaaaaaaatcaaagaaaacttcggggaagacacatttgagacagtagaaatcatctaagaagccgtatgtgcaggcttattggtgatcggtatccattatttcttggagacggtttggtctagcatctctttggcgcttgaatctaagttggatttcagtggaatgaagaaccttagtggattttccataaaatacctcaaagtaactttggaaatacgaataaactccgagaaatagacctttcgagagcgtaatgcaaggacgattgagagtccaaaactcacaataaagttgaaaaatccaatgataaagacggtgataaaggctatccagaaggtggaagcaacgacatcaaagcccttaccgtagagccccagcgcaaggtttccagatgagaaagtgatgtggcgaatgtctatatcaattcccaaaaatttcccgataggtcccgtagttccaaggcataccccaaaccaaaagttggaagtaatccctgcccagtttttagcatagaaatttgagagaccgtttgcgaatttattcccgaatattcggttaatcatcgggtttttagcaattcgctctggcatttggtaaaacacggagttattggaagcattcccagcgataatccccgaaataaagaggaagaaacccgccagtgaagcgtgtaatattgccttagactcgaaaggattgagctcttttagaaatttatcggctttatctacggcaaaattctgattgaaaagtacatccaagccataaataagaactaaagccacaggaaacgaccacaatacatttcctataaaggcgataaactgcgttcggaaaagtttggagacaacggaagcgaaagcaaggtaatttttctcagaattttcacctaatgagagggcttttgccatagttgcggccgtcatcgcaggctgtttggtagcgagggtataatgcatcaagtaaatcataatgaaccccatagcataattaaacgaatagagtatcgcgtgcataaactcactgccagggctgtaagaatacatcatttttagaacgcaaagggcaccaacaatcactccaccaccgctcgctttccaaaacatattgacataagccttttttcctgaagcgatatagtgagaacctgtttctgccgtatgatttgtgatgagatgggagaggaggcgggtgctgtcatctgcaagttccttcacattattcttgtgagacttgtattctaagatgtttaagaagagcttttgagaattatggagtatatctttttcttcatcgatgacgaggagcattagtacctctttcattcggttaagctgctgcctgatctttaataaagactggttagtacgcccagagataccataggctgaggagtttttgaaggcggtatctacgaattcctcacattgtttccaataaatctttagttgctttgtcagttcatctttagagtgcaattggaagttttgattttgcttaaactcagagataagagtgtcaagctcattttgaagagccaaaaaaggattgccaagattctgatattctggaaccatacggagtacttccatatccatagcgtttcctattactcgccaagctaatacattagcagaatagagcaaacttctccttacggaaggttttgtaatgtagtcagatatcccgagtagctcaaaaaatttgtccaattcctcttgcggaatctgtttgaagtattttaaatctaccgatggaattacggagacattatcaacaatgtaaccaatagagttttcattggagataggggggagaacagcgttgagtaccctttttttaagttcgggaaagaaagaattttcggttaagatattagattcggttaatgataaattaaatgttttcccattaaagagattttgaatataatacccgaaattattagcaatctctgggtgatgaatgagaaaattcaatatgatggaaaacttttctttcctgaaactcttcattatctgtatcagtggctccaccgaagtagtctcattcttaaaagtaaagtatctctctaaaatatgattataacgctctctattaatctttaaaactgacatacaagggcaaatatagagaaaactataaaaattgaaagagaacctcctttttataggtaagaattgaaagaaaggagatgattaatgaatttattttagtggatatttttttgttatttgtaatcagtgatatatgttgtgggtttgttaggatttcattggtgatttttattttggcattaaaattgaatttaaagaaagcaacacaaatgatgagaaaattataaaacactcattattgaaaaaaataaaacacaaatgatgaaaatacgcaaataattaagcacaagtaatgaaaaaagttattgcgtattaagaggatagagaaatctaacctctttttttatttattgtcttaaggatttactttgcttaaaacttgcaatcagataatatgcaacaaatacagtagaaaatctaataatagaagggattacaagtatagaattaaaaaataagcgcccaataattaatagaataataatccctataaatgaaatactcattttcttgtgaagtttccattttggctgatctacaaaataagctaatccccaacccagcccaaaggccataccataaaatagattgagttgccaaccaacttctgcatttaagataaaataattaataataaaactaatagtcgttccaataacgaaataaagtacagattttctcataaaaaagcctcctgattatggacaagaggcgacccaaatgttttcacaacggaataatccttattgtgaattcctttcaatttgattgggacaaatgtagaaaaattattattagtaagcaaaattattattaactttacacaaatttttaaactcataactatgaaaagaattttaggcctcgatttggggacgacatcaataggatttgcttatgtagtagaaggagaaactccagaaaaatccctaataaaggaaataggtgttcgggtaaatcctctaacaacggatgaattatccaactttgaaaaagggaaatcaatctctgtaaatgcagatagaaccagtaagcgctccgcaaggagaaatttacagagatttaaactcagaagagaagttttaataaagattttaaaagaaaataaaattataactgaaaatacggttttagcagaagaagggaagggtacaacttttcaaactttaaagctaagagcccaagcagctaaacaaaaggttagtttatcagaattagcaagactatttcttatcattaataaaaaaagaggctataaaagcagcagaaaagcaaaaaatgaagaagaaggtcagctgatagatggtatgtctatagcaagaaaactttatgaacagaacttaacgcctgggcaatttgtttatgaactaataaataaaggaaataaaagcatacctgatttttatcgttcggatttacaaaatgagttcgatagagtttgggattttcaaaagcaattttatgcagatattttaaccgatgagttttatatagaattaaaaggaaagggtcagaaagcaacaagtgctgcatttctttcaaaatataaaatctatacagctgaaaataaaggcagcagagaagaaaaaaaattacaagcctacctgtggcgtgctaaagccatatctgaaaagttaagcaaagaagaattagcgtatgtcattactgaaataaacaataatctcaataattcaagtggttatttgggagcaatttctgatcgtagcaaagagctttatttcaataaacaaaccgtaggtgaatatttgtgggagcagatacaaaagaaccctcatacttcattaaaaaatcaagtgttttaccgtcaggattacttagatgagtttgaaaaaatatggtctacccaagctcaattttatccagatatcttgacgaataatctgaaaaaggaaattagagatacagtgatattctatcaaagaaaactgaaatctcagaaagggttaatcggtttctgtgagtttgaaagtaaagaaatagaagttataaaagaagatgggaaattagttaaaaaacttataggttctcgagtagcaccgaggtcatcaccactgtttcaggagtttaaaatctggcaaaatctacataatgttactgtaaggaaaaaagatagcaggaaaagaaaagctcttgaaaccgcacaggaattgtttgtagatgaagataaagagatttttatattaagtcttgagcaaaaacaattgttgtttgatgaattaaatttgaaaggaaatctctcatcgtctaaaatcttagaattattagggcttagctcaaaggaatgggaacttaattataagcagattgaagggaataaaacgaatagacagctctatgatgcttatttaaaaattatagatttatctggtcatagtatttcagactatgtaaaagtgaaatcaacaaagagtgatatacaattagatgatttaaatatcccatcattagagataaaaaatattgtaaaacagatttttgaaacgataaatatcagtaccgatattcttgagtttaatgctgagctaaaacaaaaagaatttgaaaagcaagcgtcttatcaactttggcatttattgtattcctatgaaggtgataattctaaaagcggaaatgaaaaattatataagctattagaagataaatttggctttaaagaagaatatgccaagatattagccgatattatatttttaactgattatggaaacctctcaactaaggcaatacggaaaatctatccttatattaaagagaatggatttagtgaggcttgtaaattagctggatttaagcattctaaagattctttaaccaaggaggaaaatcagcaacgagtattgaaacaaaggctagaacctgttaagaagaacagtttgcgccagcctgtagtagaaaaaattcttaatcagatggtaaatgtggttaatagcctaattgataaatacagaaaagaagatgaaaactttgcatttgatgagataagaatagagctcgctcgtgaattgaagaaaaatgctaaggagcgtgcagaattagatacacaagtgagagatggaaaagccagaaatgaaaaaataatagctattttaaagtcgtcagagtttggcattcctaatcctactaaaaatgatattactcgttatcgcctttatgaagaattaaaggataatgggtataaagatttatatactaatagatatatttcaaggagtgatttattcactaataaaatagatattgagcatattatcccaaaatccagattgtttgatgatagtttttctaataaaacaatagctttcagagatgttaatttaaagaaaggagatcgtacggcttatgattttatagaaagtaattataacagtgaattagaaaattatctttctcgagtagaagatctttaccaaaaaaatatcatctctaaggctaaatatcaaaaactactaaaaaaagaatcggaaataggagatggatttatagagagagaccttagggaaactcagtatattgctaagaaagcaaaagaaatgctcttacaaattaccaaaagtatagtctctacatcaggaagtattacagacagattgagagaagattgggacttggtcaatgtaatgaaagaacttaatttacccaaatatagagccttgggactaacggaaatgcaagagcgaaagtttgggcagaaagtggaagtaattacagattggacaaaacgaaacgaccatcgtcatcacgcaatggatgcgcttactgttgcttttaccaaacatacccatatccagtatcttaattacttaaatgcccgaaaagatgaaaatcataaggagcataatgttatcataaatatccagaatttagagactgagaaaattaaggataaaaatggaaatgaaaaaagagtttttaaagagccaatacccaatttccgtcaggtagtaaaggcgtatttagagtcagtccttatttctcacaaagcaaaaaataaggttactactaaaaataaaaacaaaatttcaggtaagaataataggtctcaagatactctaacgccaagaggacaactacataaagaaactgtttatggaaagtatcattactatgtgagtaaagaggaaaaagtaggagttaagtttgacagtgaaaccattgaaaaagttgccaatccattgtttaaaaatcttttaaaatatcgattagaagaaaataataatgaccctaagaaagcattcacaggtaaaaattcattagaaaaaaatccaatttatttagatgattctaagcaaaaggtgatgcctgagaaagttaagttagtttggttagaggtagactattctattagaaaagacatcaatccagataattttaagactgagaagttgatagataaaatcctagatgaaggaataaagaagattctaaaagagcgtctgaaagaatatgataacgatcctaaaaaggccttttcagatttagataaaaatcctatttggcttaataaagaaaaaggaattgctatcaaacgagttacaataagcggtgtgaaaaatgcagaggctattcatactaaaaaagaccacttaggaaatgaaattcttgataaaaaaggtaatcccatcccagcggactttatccaaacgggcaataatcatcatatagctatttatagagataataaaggtaatttacaagaaaaagtagtttcattttttgaagcagtagcaagagcaaagcaaggacttcctattatcgataaaacttataatcagcatttaggatggacatttctatttacaatgaaacaaaatgaaatgtttgtttttccaaataaagaaacaggctttaatcctaatgaaatagacttattagaccctaaaaataagaaaataattagtcctaatttgtttagagttcagaagctctctactaagaactatatgtttgcacatcatttggaaactaaagctattgatggagatatgttgaaaaataaaaaagaactctcaggaatttgctatcattctatccgaagtacagagaaattaaataatattataaaggttagaattaatcatcttggggatattgttagcgtaggagagtattaacataaattaaaaactatgctttaccgttccatatatattggtaatccagcttatttaaagctgaaagataatcagttaaaaatcatttgtcctgagtctaaaattgagaaaggaagtgtggctgtggaggatttaggattattaatgcttgatcattggcagattacactttctcatcagttaattcagaaaatgatggaagctaaagttgtggttattagttgtgatacgaagcacttgcctcaagggattatgctcccaaccaatgggcatacacaatattctgagagagtgaagcatcagatagaagccagcgaacctcttaaaaagcaactttggaagcaaaccattgagtgtaaaatacagaatcagattaaggttctaaataagttggagagattttcagagccaatgtatgattatctaaaaaatgttaaatcaggtgatattacaaatatggaagggattgctgctcagcattactggaaaaatttaattaatccagactttcttagggggcggtttggtgattatcctaatttgttctttaattttggttatggagtacttcatagcattgttgctagagctattgtagatactggtctattgccggttttagggatttttcataaaaataaatataatccatattgcttggcaagcgatataatggaaccttatcgaccatttgtagatttactagtgatggattggataatgcgaaatccagagtctgaagaattggataaagaagctaaaaatcattttttaaatatagcatcaaaagacattttaatagatagacttaatcgtccattaatagttgcggtaaagatgaccgtatcatcattgtacaagtgctatacaggggagaaaagacaaatatcctatcctgaaatgttatgaaaaatgaacgcttaaatgcatatagagttatgtgggtaatggttttatatgatttgcctaccgattccaaggcaagtatgaaagcagccaatttatttagaaaacaattagttgatgatggtttttctctctttcaattttcaatgtacattaggcattgtccaagcagggaaaatgcagaagttcatatccgcagggtaaaagatattctacctaaatatggtaaagtagcgataatgtgtattacggacaaacagtttgagggtattgaaattttttattctagaaagcaagaattgcctcctcctacttggcagcagctcgaattattttaaattttcaattctgattaaaaataaaaacctttgattaacaaaggtttttattttgaggctgtgtgatatccacaaaagtaatcaaattgaaagcaattcacaaccgtaataataatctcgatgctcctgcgcaagctgtgtgatatccacaaaagtaatcaaattgaaagcaattcacaacgatttcctcatcaaactcatttactttatagctgtgtgatatccacaaaagtaatcaaattgaaagcaattcacaacgcggatgagccattacaattcaatgacgatgctgtgtgatatccacaaaagtaatcaaattgaaagcaattcacaactagatataaatcaaggctataaacttttcagctgtgtgatatccacaaaagtaatcaaattgaaagcaattcacaactagtacttatgatgctttacaaaagtctctgctgtgtgatatccacaaaagtaatcaaattgaaagcaattcacaactattttgctcatcttgaattgtttttaattgctgtgtgatatccacaaaagtaatcaaattgaaagcaattcacaacatcggggcaatcgggttctcttaggaatgggctgtgtgatatccacaaaagtaatcaaattgaaagcaattcacaacctttggcttttattatgattttgctcatctgctgtgtgatatccacaaaagtaatcaaattgaaagcaattcacaacggagagggtcgttgtcaatgaggcttttttgctgtgtgatatccacaaaagtaatcaaattgaaagcaattcacaacaaagcctctaagatacgctaatttttctaagctgtgtgatatccacaaaagtaatcaaattgaaagcaattcacaactgtagagcttatccgctggggaatccatttgctgtgtgatatccacaaaagtaatcaaattgaaagcaattcacaactcaaaaatttcatttaactattttttaattgctgtgtgatatccacaaaagtaatcaaattgaaagcaattcacaa

SEQ ID NO: 2359 - DNA, 16633 bp, synthetic construct
  misc_feature 1..16633: note = Synthetic
  source 1..16633: mol_type = other DNA
atgctctgagcatccttgctcagtcgcccactttcactgatggatgcaggtggctcggcacggcgtttgaggtcatgcaaaagtatgatcaatcgcactatgtgagcctgggagtgcccacatggctttatgggcacgagccttcgacaccgctggccactcacattgctaagttctttgagaacagcattagagagaacaacatcctcacaatggcctacggtggcatcatctatgcccctggcagtgcaggcactatgcaagagatttttcaggaggcagtgcagaatcactacctatcctttggcttctcaagccctatgattttcttgggcaagaagttctggagcgaagaaatgcccgcctatccattgcttgaaaaactcatggcgacgggcaaatataagaacttgaggcttaccgtgaccgacgactcggctcacgtggtgaaagcgcttcaagatttcaggcaagagctgcttgccagcgatggcaattgctaattgagctttcctataccctgcaaggctaggttgtattcgttcacaagccgctgcatcactgtggccacggactcgatgtcattgccctttagcaacgatgcgccctgacctatctcgagttctccattttcgatgtcgccatcgaagattcctaccttggttttgccaattcctataatatcgagcagttcctcgggtgtggcaccgcgattctcggcttcctcaattgcggtgtagaatccacctttcaccagtcgggtgggggagagcttgcgcagcagcaacttagtgtcgccctcgttaaggtcgaggcaacggcgcttgaacgcctcgtgtgcgccactctcctgggtgagtgcgaagagtgtgcctatctgcactccctcggctccgagcacacgcatggctaatattgcctcgccgcttgttatgccgccagctgcgatgagaggcagtgatgtggctcggcgtgctgctgggatcaggcacaatgtcgtggtctcttcttttccgttgtggcctcctgcctcaaaaccctcggcaacaacggcatctactccagcatcttcacacttgcgtgcaaacgccgacgatgccaccacatgtgccaccttgatgccgcgctcatgcagccatgaggtccatttcttggggcttccagcactggtgaacaccactggcacctgctcctgggcaatcacttccatcatttcggcactgttgggcttcatcagtggcacgttcacgccaaaaggctttcctgtcgttgccgccttgcactttactatgtgctcgcgcagcacctcggcagtcatcgatcctgcacctatcaggcccaggcccccagcgttgctcactgctgctgccagtcgccatccactgcaccacaccatgccaccagcaatgatggggtactctattccaaagagttctgttattctgcttttcatattcttgtcagtgtttttttgattttcaatctccaaagttaagcacaatttgtgaattgtcattaataactggtgtgattttttcggccttttttattgccaaggggtgaaaatgcttgccttttcttgtcaaatcaacatttaagaactacttttgcaactcattttactatacttagattaatgaataaaattgacgaaaaccgcctatattggattgatgctatcagatcctttgcttgcctgtgcgtgctgctcactcactcggttatcccgggtggtacacgtggcaattacattattgcaccaattcaatatatggctgttgctggagcctcggtgctcttcttcatgatttcgggagcgcttgtctttaataagcctaagccatttgtgcccttcatcaagcgcaggttggctaagatttatcttcccatggtgatttggacagttgtgacgttgctcattttttgctttacaggtgggctcaagtggtcgcagctgcccaatgcgctcatgctcatccccttcacgcagcagtttggaacctactggtttatctatgtgatattcggtatctatttgctcaccccaatggttgccacatggcttgagaaatgcagccgcaccgatgtgctcatcttgcttattgtgagtggtgtggcgatgacggtgccatatttgcgcattgttgacaaggatttctctaaagcgctttatactgagaccggctcgctctattactttgttggctacctgtggatttgcctgatgggctattacattcgccgctatgtcaacattccaaaatttaaatggtggcacttgctcgtgctcctgctcgtgctggcattgccatttgcccttcaatggttgggtgaaccctatgctcttgttaagaagcgtactactatcaatgtggtgttgctgtgtgcatgttatttcatcatcatcaagcacatcaagctcagccagcgcatgaagctggcagtctacaactttgcacagcacagtttcggcatctatttggttcacatgcagattatcaaatttatacttaccccccttgtcaatagccttgatttaagctacactgtgtcgattccattagtattcgtgtcgagtgtagtgattagctacatcactgtacacttgatttctaaacttccttttagcgaatatctgattgcctataaatcataatcctaacactcacggctacaagccatttaatcccaaagtggtctaaaaagaacctaccctttttagaccactttggttataatttgatggccataatgcggtcatcaaaattttgtatttgggtggttttaactaaattttaggttggcgggcttaattatggcgcacctgtactctaattttgcactgtaaatcaatcgtgacgcttaattggcgtgaccaaaatggaggacattattatgagcaacacaagaacatctttatcgaccagtgaccaaatttttgcaactcttgaggtgggtggcaaggtgatggctactgtgtgcaagaacaatttcgcaagcatcgacgaagtggtgcgcttcatctatgccatggctggcaagtttatgggcctggcgcgcctgaacattcgcaacaagacacaaggctggaccatgaaccttgcgctggccagcaggattagcaagccttgcactccaagccatgcagcttcagttggccaatatcgtcaagcatcattatttgcctaataagtattcaactaatctgatgatttgattgtggcaacaatgtattcactctgggtgccaatgcggtacttgccgccccatattcccaggcctgagctcacatagtaacgggtgttgcctttctgatagaatccccaggcatcctcgtacatcttgtgcaccagcaggctgatgggccacacctgcccttcgtgagtgtgtccgctcagctggaagtcgaccccgcactgctgcgactcctcgaggtggtagggctggtggtcgagcagaatgatgaatttgttcttgtccactccagcaagcagctgctcggtgctcctgcgctgccgatttgaacggtcgtcgcgccctgctatcaccaggtcgcccatgctgattgttgtgtcgcgcagcaaagtgatgccagctttcttatagaagtcaagcgccttgtcaataccagtaatatattcatgattgccaaggcatgccactactggtgccttgaggctgtggaagtcggcagccatgtcttcctcgattagtggccttacatatccatctattatgtcgccagccacaaggatgaggtcgggattctcatcattaatcatcttcacccaccgttgccactcggccttgcggttgtgatagcccagatgcaggtcgctaagcatcaccacgcgcagtggtttagacaggtgtttggtggttttcagctcaagtggttctcgaaccttgttgttgtagtgaatgttgccgtagatgagcagccctgctactgcagcagcaatggcgcctgcggtccaggcattgctgtgaagccactccttgggaacgaggtgaaccagcctgcacaggtcgagagctacaaagatcaagagcaagtacaagaacactatgagccacgaggtgctcacgtcgtaggtgaatgaagccaagccaagtggcatgcggtcgaaggccccaaagatgcccacaaacatcatcactaatgccgcggtcatcacggccaccacgctccagcgcagccatgtgggtgcaggaagaacttgatacacatgccacagcacgtagacatgggcaagcaacgcaactattgggatgatgaaaaatccaatcttcatgagtcaaaaatagtaaaataggagtgcaaaattagcgattttaatttttattcacgtcatgatagcgattttttcaatattattcattatttttgtccaaatttttttattcaacttaatcaacatgagaacttttctgttaggcatattaacgattatggcaagtttttcaatcgtagccgaggagcttcctgctcctcaaaccactggcggtaagccattaatgcaagtaatgaatgagcgcaagtcgagccgcgactatcaagagaaccaatctatcagcaagcaggacctgagcaacatgctgtgggctgcttggggcgttacgcatgacggcaagcacaccattgctactgcaatgaaccgtcaagagcttgtcatctacgttgtgactcccaccgaggcatgccgatataatcctgatgctaacactcttactgttgtaaatactggcgacttccgcaagcttacaacgctccaggactttgccgcagttgctcctatcaacattgtgctggctgtcaacaccgagaagcagcagcgccccgagttccagggctacacagcaggtgctgcctcgcagaacatctatctttactgtgctcaagcaggactgaagagtgtggttcgtgctggcttcgaccgcgacaatctgccagcggttctcaagatgccaagcaatgagcgcatactctttgtccagacggtgggcaagtaatcgttatagagtgtaactatcatgtgttcaagaaaatactacattgtcgttgcgcttatcatagccgcaatggcaatggtcatgcagtcgtgtaaggaggagaaacaatatcgcgactatttcgacaagagccagctcaagtacatcgctaagctgggcaataaacccaagcttgacgacaggcacttgcaggccgacacgtcgtgggtagataacgacagcctccaccacattcccatctatccgttgccaggaaaatatgaggacttgtttgtcgactataatcctgtgcaatttccacatgccgagcgcaatggcattgagccgattgataatctccatgatgcctacaggttgcgtcagccattggttaagattgcttcgtgcgaggcctattatctcgactctttgacccattctatgccctatttggtgcccaaggcggcattgctgcttgaggagattggctgcgctttcaccgactcggttctggcccatggtggcagcccttatcagattgtcgtcaccagttgcactcgctcgcagtacactgtgggcaggctcatgaaggtgaaccgcaacgcctcgtcgcgctcatgccacatgtatggcaccaccttcgacttgagctggatgcatttcgagccttacaagaacgactacctcatcaacaacgaggacttgaaaaatattttggggcatgtgctccttgatttcaagaacaagaaacgatgcactgtgctctacgagcgcgggcagtgctgcttccacctgacagtaatataactaatatataaaccctaataacaaaatgactgaacaaacagcaattgccaattacttgaaatacactggcaagaaatcgttcaacttcaccacagcactcgttgacatggacggcgtgctatttgactctatgaagaatcacacccgtgcttgggtgaaactgatgaaaaagaatggcatcaagtgcacgcgcgatgagttctacatgtatgaaggcatgaccgggcgcgacattatcaagatgaaattcaagaatggtgcaggaaaaaatgtgaccgacgacgaggcacaggcgctctacaaggtgaaaacacgctatttcaccgagcttggcgacgttgaggtgattcctggcaccctcgagatgctcaaggccctaaaggttgctggcatcaggtgcgtgctggtcactggatcgggcactgcctcgatgctcgaccgtgttgatgccgactatcctggcatcttcgacgagcagcgcgtcacagcagtcgacgttaagcgcggcaaacccaatcctgaaccttacctcaaggctatggccaaggtgggtgcgcagcccaacgagtgcattgtgcttgagaacgcaccacttggcgttcaggctgggcacactgcaggctgcttcacagtgggtgtgaccacaggtcctattcccgagaaggacatgtacaaggctggagccgatatggtctatgccgacatggcatcgcttcaggctgccctgccaactctgatggaggctttcaagactcaacaatgacgtcacggctgatatataccagcgatgtagatgccaccctcaacgacattattgggggtggcaattaccaccatgtgatggtgctcgttgacgagaacactcgccgtcatgtgttgccgctggtgcattgcctggactcggcccatgtgatagagatgccaagtggcgactgtaacaagacactcgacactctcaccctcgtgtggaagcgcatgcagcagtgcaacgctacacgccactcactgcttgtgaacctaggtgggggagtggtgaccgacttgggcggacttgctgcggcgacattcaagcggggcatcgacttcgtgaatgtgcccaccaccatcctggcggctgttgatgcggcagttggaggcaagacgggaatcaatttccagggcctcaagaacgagattggcgtttttgcccacgcccatagtgtgctggtgagcacttgctttttcggcactttgcccatcgagcaagtcaagtcgggctatgccgagatgctcaagcatggcatgcttagcggtcacgaccagcttgccacattgctcagcaatgatttctcgagcatcaaccatccatcgctgctcaagctgttgcaggagtcggttgaggtaaagcagcgcattgtcgatcaggatcccaccgagcatggcatcaggaaggctttgaacctgggtcacaccgtgggccatgctttcgagagcaaggccatggcgggcggcaagccagtgcctcacggctatgcggtggcatgggggctggttgtagagactgtgctctcgcacatgattctgggtttccccagtgccgacctttatgccctggcacgattcgtgcgtggcaactatggcgcgtttcacatcacttgcgacgactacgaccatctcatcagcctcatgcgtcacgacaagaagagtcgcaatggcgagataaattgcactctattggcctcatgtggcgatgtgagaatcgacaacaccattagcgacagcgacctcaaggcggcactcgacatctaccgcgacctaatgggcatatagctagaaattcagatgtcagatgtcagaaatcagatttcagaggtcagaactctcgctctcaactctcactcttaactcacaactcacaactcttatggcacacacttgcgaaaattgtaaattccgagctcactacgacaagaaacccacctcgatgcttggccgcttctggcggtggcacatcaacttctgtccaggctggaaagcctttttcaccagctgcacacccgagcagcaagccgccctgcgcgagaagtaccacttcagcaagtactgattgctgctggctggtgatgcctgctgaacatcagtgacttaaaagattctataactaccaaaatccatacttacacgcaatgaagaaaatcataattatcgctattttagcagctttcgctattggagccgatgcccagctcaagaaagtgtataacgacgagatcaaccccatcgagcagattgacaaggcgctcgtgcaggcccagcagcaaggcaagttcgtcatttgccaggtgggaggcaattggtgcccatggtgcctcaggtttgccgatttcatcaccagcgaagaggagattgccaaactggtcaacgataacttcgtttacattcatgtgagctacaaccctcacaagagtgtggaccccgctcgcgaccaagccatgctcaagcgcttgggcaacccaggccgttttggctacccggtctttgtggtgcttgacagcgagggccgtgtcatccacatccaggactcaagcttcctcgaggaaggcaagagctacaacaaggacaaagtgatgcgattcttcaacggatggacacctaacgccgtcaaccctaagtgatttcaaccccctaagcaacaaatgtatagcctaaactacaaagtaaccaccagcacttgcgacagcgagggccacctcaagattttctcagcgctgcagatgctgcaggactgctccgagatgtggattgagagcgagcccgcagtcaagcgctatttccacgagcagcacatgacccagctgctcgccacacgtcaggtcgagattgtgaggattcccagtttcaaggaagacctcacagtcaccacctcagtctatggcgtcaagccaatgttcggtttccgcaacaccttcatcaccgatgcccatggcgaaccttgcatcaagacatggagcttgggagcctttgtcgacctcaccactggccgcctcaagcgcatcgacagcgatgtcattgccactgttgccatcgacgagcagcgccccatgaactatcgcgaccgccgcatcatcctgcctcacgtcgagccacaactccacgctctcgtgccagtgatgcgcgccgacatcgactacaaccgccacatgaacaatgcccactatgcccgcatcgcaatggagctcttgccaccgggcttcaccattgatggcatgcgcatggagtatcgccagccagccaagctgggcgacaccctcacgccgtcgctctacaacatgggcaacaccatcatcgttgccctcgccgtgggctccgagcccagtgcaataatcgagttcacgcaaggcgtgggataagttcaatgcactcactttttaatcgccaatgaccgagaaacgcatcaccgccgccactgccacacccgagctcagggagctctacgacgaagccttccctgccgaggaacgcatcccctggcgcgacctcctgcagctggtgggcaccatgccactcgacttcactgcctactaccacgacaatcaactgctgggcttcaccatcgtctatccaaggcccaccttcaactggttctggtactttgccgtcaggccgcagctgcgaggcatgggccatggccagcgcatcctctcgcgcctgattgagcgatacagctcaggcacaagcatcctcgacatggagagcccaagccagcccagccccaaccagcccgtgcggcagcggcgacaccgcttctacctgcgcaacggatttcgcgacactggcgtgggacgttcattccagggcatcgactacaccatcatgatcataggccccggcacattcaccatgcacgactacgacaccatcatcgccgagctccacgccaagtggaacccatgatttcgcataaaacactaattcccaccattcgcatagttttcccactcctatcacatccgatatacacccactaaaaaagaacgaggccttgcggtcccgctcttgatgtcttcacaacggaataatccttattgtgaattgcttcaaatttgttctgcaaaagtagtgaataattagtgatgaaacaaatttttttgagaaaaaaaacaagttatttactttttttgtaaatttgcaaaaatcaaaggaattaaaataaattaatacaatgaaaaaagttttaggtttagatttaggaacaggtagcattggctgggctgttgtcaaccaggccgagaacgataatgaaaaaagcagtatcgttaagcttggcgttagggtcaatcctctcacggttgatgagaaagggaattttgagaaagggaaaagtattacaaccactgccgatagaactctcaagcgtgggatgcggcgcagcttgcaacgtttcaagcagcggcgcaacatgcttgtcgacatcttgattaagaacaatattattaatgatgatactgttctttccgaggttggcaacaactccactcacgagactcttgagctgcgtgctaaggcagcacgtcatgaggtcacacttcaggagtttgctcgggtcttgatggcaatcaacaagaagcgtggctataagagcaaccgcaaagccaataacgatgaagaaggcgaattaatcgacggcatggctgttgctcgtcatttatataacgagggcataactccaggacagtacgtttatcagttattgaaatctcacaagagttacaagccttctttttaccgttccgaccttcgggccgagcttgatctcatttggaataagcagcatgattattatcctgatattcttaatgatgactcccgccgcgtgattgaaggaaagggaaagaacgacactcgcaagtatttttttgccgctcatcacatcgaggctgccgaggtgaaagatcgcaaaatcaggcaactcagttattatgagtggcgagctgacgctgctaatcgcaagcttgatattgagcagcttgttactgtgatttgtgagattaatggcgatatagctgcttccagtggctatcttggtgccattggcgaccatagcaaggaactggaaatcaataaaatcactgtgggagagtacctttttcaattgataaagcaaaatcctcacaatagtttgaaaaacattgtcttctatcgcaatgactatattagtgagtttaacacaatttgggcaactcaagctaaatatcacaaagagctcactccacaattaaaggaaaagattgaaaaggaaatcatcttcttccagcgacgattaaagtcacaaaaggggctcatatcattctgtgaacttgagggcaaggaaatttgtcttgccaatggcaagaaagtcaccactggaccaagggtttgtccaaagagttcacctttgtttcaagagttcaaaatctggcaagacatcaacaacgttattcttgaaaacaagagcgttaagaagtcaagcaaaagcaaagcctcaatcccatcactctttgaggagagctcaatccagcgatttaccccattaaaccaagaacaaaaaatcaaactctataacgagttgtattgctctaaagaattgagtgcaaaagaggtgcttaagtgcttagacctaagcgataaagactatgctctcaattttaagaaactgcaaggcaacatcactcaggtcactcttcttaatgcttacaagggcatagtagagatgagtggtcacgatgttgaaaacttcgataagatggatgcagcaagcaagttgcatcttctcaaggctgtgtttgaaaccttagatgcaaagagtgatttcttattcttcgatgcaggcaataatgcgtccgaaatgcaacaaaatgcaatgttcaagctttggcacttgctctattcctacgaggacgacaacactcccactggtaatggcaaactaatcgaccatatttctcaactcacaggtctatctcacgactatgctgctttgctgacaagagtcaacttcgttcaagattttggttctcttagcaccaaggccattcttaaaattcttccttacatgaagaacgatggcatggtttattccgatgcatgtaaagctgctggatataatcactcgagccagtctatcacaagagacatgaacgaagcaagacaacttgacaagcatcttgaactcttgcctaagaacaccttgcgaaatcctgtggtcgagaagattattaaccaaatgattcatgtggtgaacaactgcattgatgagtatggtagttttgacgaaatacacatagagatggctcgtgaactcaagcagagccagcaacagcgtgaggacaccactaagcgattaaatgctaagacaagagaggtcgaggaaatcaagaagattttgatgagcgcacctttcaatatcgccaatccgcgacgcaacgatgtgattcgttatcaactctatcaagaacttgctcccaacggttacaaaactctttactccaacacctatataagtaaagaaaaactattcagtcgtgactttgacatcgagcacatcatcccacaagccaaagtcttcgatgactcgtttagcaacaaaactcttgaagcaagagctgtcaatatcgagaagtctaacatgactgccatcgactatgtcaaaatgaagcatggcgaccagggagttgacgaatacctgaagcgcattgctttcctcaacacggacggtagtcgcacgaagtacaagcgattaaccacccccgacgataaaatcgaaagtgatttcctaaatcgtgacttgagcgattcacaatacatcgctcgaaaagctaaggaactgctgctcaaggtcacgcgtgatgttgttgcaaccactggttctatcactgcacgcctgcgcgacgactggcaacttgtcgatgtcatgaaggaattaaattgggataaatatgacaagcttggcatgacttctaccatcagagatgaacatggacatgagattaggagaatcaacgattggaccaagcgcaacgaccaccggcaccatgccatggatgccctaaccatcgctttcactcgacattctcacattcagtatctcaacaatctcaatgccaaggatgatgccagtgataaggacagcagcatctatggcattgagaaaaaggaactattgcatggccgcaagtttaagtcacccattcctctcgacgagtttcgtgctcaagcaatgaggcatcttgccgatattctggtctcaatcaaagctaagaataaggttgccaccaagagtatcaacaagataaagggtggcaagcagcaaagcactctcacacctcgcgggcaactgcacaatgaaactgtatatgcgcagcgacaacgttatgctactcgtgacgagaaagtgggcgcggctttcaatgttgaaaaaattaacacagtgtgtcgcaagtctttccgtgatgctctcttgcaaagactcatgcaatttggaggtgaccccaagaaagccttcacaggaaaaaattctctctctaaaaatccgctctttgttgacgacaaccacactgccaaggtgcccgacaaggtgaaaactgttgtgcttgaaacctattacactattagaaaacccatcaccaaagacttgaaaattgagaaggtcgtcgacgagggaatcaagcgaattctgctcaaccgaaaaaatgagtttggtggtgaccaagccaaagctttctctaatctcgacgagaacccaatttggctcaataaggagaaggggattgcaataaagagtgtttcaatcaagggcgttaatgtggcggtgcctctgcacaccaagcgtgataacaatggcaacatcatcatcgacgagatgggtaacgctattcccaccgactatgtgagcacgtcaagcaaccatcacattgccatctttgaggatcccgatggcaacttgcaggagcatgtggtatcactctttgaggcagcagctcgcaagaatcaggatttgcctgttgtcgaccgtgattttaacaaggaactcgggtggaaattcctcttcaccatgaagcagaatgaatattttgttttccccgacgagagcactggctttgacccatcgggcatcgaccttttcaatccaggcaactacagcctgattagtcctcatctgttccgagtgcagaagttgactaaaggcgattatttcttcaggcatcatctggaaactaatgttaacgatgagaaaaaactgaaaaatataacgtggtttagaattaattctacaaatggtttgaaagggatagttaaagtacgggtcaatcacattggtcaaattgtaaaagtgggtgagtacctatgattaagcgcactctttactttggcaatccagcctatctgagcatgaaaaatgctcagatggtgctacgcatgccttctaaagagcaagatgccgaccttgtgcgcactttcccaatcgaagacctcggtgtgattattctcgacaacaagcaaatcacaataacgcaaggcctcatggagcgcttgctcgaaaataactgtgctgtaatcacttgcgactcaactcacatgcccactggcctgctgctgccgctcgatggacactcacggcagagcgagcgattcaaggctcaacttgcttgcaccaagcccttaaagaaaaacttgtggcagcagacggtgcaagccaagattgctaatcaagccgcagcccttgagcaatgcgttcctggttgcaacactggcaacatgcgagcatgggtcaacgaggtgcgaaccgacgacaatctcaacctcgaggggcgagccgccgtctactattggagcaatttctttcctgaaattgaaggatttaagcgtgaccgcgaggggttctatcctaacaatttgctcaactatggctatgccattctgcgtggagtgatagcacgaaatcttgttgggtctggacttttgcccactatgggcatccatcaccgcaacaactataacgcctactgccttgccgacgacatcatggagccttatcgaccttttgttgatgtccatgtcaagaaagtgatggacatttgcgatgacccttgggatctctcaaccgatgttaagcgccagctgctcaccatcccaactcttgatgtgaaaatcgatggcaagcgacggcctctcatggttgcagccgagatcacaacggcctctcttgcacgatgctttactggtgagtcccgaaagatctcttatccttatttttaagtaagtttaacagtgcgatggcaacatgtcagcgatttagcgagtatcgaatcatgtgggttcttgtgttttttgacttgccaaccgacacacgcaagcatcgcaaagcttatgctactttccgcaaggctttgatgctcgacggcttctctatgatacaattctctatctatgcaaggcattgcgcaagtgcacaaaatgctgaggttcacgtgaaaagggtaaaaaatatgctgccacaagaaggaaatgtctgcatcatgacaattaccgataagcagtttggcaacatggagattttcaatggcaggagtcctgatgtacccagaagtggaggacaacaattggaacttttctgaaaacaaaaaatccacctgttagggtggattttttgttgctgtaatacaacttttttaaattctaattgatactgtaatacattgtttaatagaatgttgtgtatatcgagttgtattactcgatacaaagatacaaatttgaaagcaattcacaacagttcattgatgcgaagcatacgcatacggttgtattactcgatacaaagatacaaatttgaaagcaattcacaacctagtgaagtttctcgtgtttttgctgtgcgttgtattactcgatacaaagatacaaatttgaaagcaattcacaacacataataatcatataacctttttctgtcagttgtattactcgatacaaagatacaaatttgaaagcaattcacaacttacggtaaaggccactctttcaagcgcttgttgtattactcgatacaaagatacaaatttgaaagcaattcacaacttattcataggtaatttatatatgaacagagttgtattactcgatacaaagatacaaatttgaaagcaattcacaacgagtgagttagttgagctcaacacaaccaagttgtattactcgatacaaagatacaaatttgaaagcaattcacaacaccgacgacatctgcgacgaccttgccgagttgtattactcgatacaaagatacaaatttgaaagcaattcacaacaatttggtatcttcaattggcaactgtgcgttgtattactcgatacaaagatacaaatttgaaagcaattcacaacacaggatgagttataaagagaaagatacagttgtattactcgatacaaagatacaaatttgaaagcaattcacaacagctcagaaaagttcatacaacattaaaaagttgtattactcgatacaaagatacaaatttgaaagcaattcacaacacttgagggtattcttggaaatgagggtgagttgtattactcgatacaaagatacaaatttgaaagcaattcacaacgtgtttcgctggaggaaccagatggcccccgttgtattactcgatacaaagatacaaatttgaaagcaattcacaactatcgctcgttctgtagtagtcactgtcagttgtattactcgatacaaagatacaaatttgaaagcaattcacaacaggtgaggtgacttttgcaaagaactcattgttgtattactcgatacaaa

SEQ ID NO: 2360 - DNA, 16607 bp, synthetic construct
  source 1..16607: mol_type = other DNA
  misc_feature 1..16607: note = Synthetic
tgaggaaaacctcgccgagagagaagtaacgcagcgatgccgacacggcggagtagtcgccgatgcggtagtaaccggcgagataggcgaggtccatgtcgcttaccagctggcggagccacggcgtatagttgagcgcgacacccgcccttgaaatggtgaacgggtactttgcggggttccagtattgcgataccacgtcgggatcggtggcagcaccggcgtcgccaagacctgccgcacgcgcatcgggggctattgtctgcgatgtcaccgatgtgttcacggggttgaacatgtccttcttgtcctgcgctgcaagtggcaagactgttattgcagccacgatgatggctacgattcgtgtcatgtatttcattgttatgcttgtttctttgtatgttcctttctaagaaaaacgcttatcgggcttatttattgccgacaacgatgagtttctttgctttcgatgtgcgtgtcgcaccctccgaagtgagtcttacgcggtagagatagacacctgtctgcaacttctgtccactgtcgagcgtcagattccagtccacggtgtatgcgcttccggaacttccccccacctcatcgtgacgccaaagaagtcgcccgctcatgtcgaacacatcgataccgacggtgagttccatgccgctgcggtcgtgtgtgacgatgaatgtggtgttgtcgatcgccgggttctgcgtgcattctatgttgcactgaggcttcattcccttcacgacattgaacgacaactcggcaatggagacattgttgagcacgtcccatgcacggaactggagcttatgcttgccttccggcagctcagggatgttgtagtaggtggtgccactcgtatatgaaccgaagtcgaaggtaaagttgtcgttgagcgaataggtgtaggcctgtttgccgtcgatgatgagctgcatgtcatggcctatgccgttgcccgtggcattgatgccgtccttgtccataatctgcgccacgaagtaaggcgtgctgttcacatcgccgccgttctggaacgatggcgagttgagatagcagtagattgacgggccgatggagtcgttttcggcgatgtcgctgcctcccactatgaagctttcgtcgtgtccgttggcgatgacggtgtgcgaggagttgatggcatagaggttgattatgcccgtactgttggagtagtttatgtccttcggcactacaaagttcagctcgaagcgtccgttgcgcacgctgtcactaccgttgtagagcgtgttgggacggtcgtaataggtgaacggagtgtcagccgcggtcttatcgttaaggcggcaggtcacgagttcgcggttgtcgcgcacggtaagggtaatgataccgttgaaatcgtcagcaccctcgatgtgtcccttcactgttgtgcggcttcctgccttgagccttatgtcggcatcagaacctgttgccacgccgtttatttcatccaccaccgccttggcagtgggcagatggagcgcaagggcagggtcaccgaggagcgaatactgcagggtgttgcgtgcgagcgactcgcttccgctggcattcttggcaagacgctgcgcctcgcctatggtgcatggcgtaccgtcggcattgtagctgagcacataacgcatgaagttgcggttgagaatggtgttctgcgcggcatatacggtgcgtgtcgtgccgtagaaagccactgatccacccttcggattgagcatggctgtctcgccgatagtggcttcgccgccgtcgaacggcatgatgtcgcacgacgctgtcacccaaagtgggaggttggtattggtgaaattctcgaaatcggtgatgcgcagcaccatctcatgcgacagctgtatctcgcttccatggcctgcatagtccatgacgagtgctccggcctgctgctgttgctttatcatgcgtgtcgcatcgggataggtgtgacccgtcgaagaagtctcgcgtgtgtaggcatcccacatcactttcttcacgatatagctgggatagttggctatcacctgctccgctacgaggtcggcatcatccatgtgctggttgttgtcgccgtcgtcgcccatgaagaagatggtgttctgccacgcaccgccgtttttattctcggcgtaggagatggttttgtccaccagaacctttgcctcctgctcggtggtgacggggaaacggcccacagccacatcgagtttgtccacccacagaggcttggctccctcgccgtcgtcaagcattgcgtagaaaccgtcgtctatatagcaactgcgtttgtcgaaggattcctcgctttcaaaggcgagcaggtagtcgtcggggttgagattgcggcactgcggagtgagcatacggttgtcccacacgcagtcgccgaagagaagaagatacttcggcatgtctttctcgtcggcggcacggtcgtaaagcatcttcatgtagtggcggtaggcacttgcatcgggcgttccgcttgagaattcgttgtacagttcgtctgccggtacgatgttcacacgcagtccgtcgcgctcttcgtggaacgttttgagtcgctgcgcttgcttcaacagtttctgcgaagtggggattattataacaagatcggcctgcgggtcggcgtggcggtcctggtttgttatgccatagacatactccggcaccggaagcgactccgaatcgaggtcgggcatgggtctgggttccggcgagacaagcgtgatgtagtcgagacgcatggcggctccttccagcacagtcagcttgactgcgttgtccgccttgatgtttctgactgtgaatgtggctgacttgcggcatccgaagatgtatttcgagtcgccgagacttgtgcgtacggtgcccacgatggagtcgttcacctccacctgtaccacacaactcctgccggccgatacgcaaacgacgagtttctggtctccgtccgtgttcggtgcggcgatattcactgtgcgggaagaacccggttccacgctgtgtgagtcgaaaaggttgcgtcctccgttgtaccacgagtaggcgtccacctcgtaatgggaatggaagtcgtcgggtgtgggataggtatcggctgccattgccgccgcatcaacggtggtcggggcatcggcagactccgtgaggaagtaatatccatagtcggagtaaggattacgggtgcggactgtggatgtgttcgacgcccatgacaccggaccgcgggcgtagaacacgcgccggttgcccgacttgtaggtgggaatttcctttaagtcgtcggtattgatgaggtcgtcggcattgagtatttcgttcttgaggttaccgccatagccgtacagcttcactttgttgatgtcggagaagccggctttgcgtatgagcgactcggtgatttggtggaatcccgaagcggagacccttatcttgacccacttcccggttgcgagcacggaatgggcgacatagcgttcggtaggagccacatcggttttccgtttcggtgcgctgttctttacgccgcctttaacggatgcttcccgcttgaggaggaaacttacgagtagctgatacttccccgaacgatagacgacggggcagaacgatgtgctgatgaacggtttcctgcggttgaagacgatgttcgtctccagttcgggcatggctggcggcagtgcggaatggtgtcgcctgtagttggaaacatcggtcgccggcatgtcgatgaattcgggatagacgatgctgacggtatagacagagtcgcgatagttgtcgggcagcggctcggtgtggcagaaatgcggcacgacggagtcggtcttcacctcggctgccgtcaggttgaagaaccgctgcgcctttgtctgcactgccatgagcacgagaaaggcaattatcgctatttgtttcgttctttgtctcacttattgttatttgcaattaaacgacaggactttcctgtcctctatgtatccttcgaggtggtcgtcgatttttacgggtcctactccagcgggagtgccagtgtagagtatgtcgcctgtcttcaaagtgaagtagcgactgatgtaagcgatgagttcgtccaccttgtagagcatgtcgcttgtgcagccttcctgtactgtcttgtcgttgatgtcaagccggaagtgtatggcctgtatgtcgcggaacttgctcagatccacccattcgcccagagcagccgatccgtcgaagcctttgcagatgtcccacggcttgccttcggagcgcaatttctgctgcatctcgcgtgcggtgaagtcgatgcccaccgtcactgcgtcgtagtagcggtgtgcgaaccgctgcggtatgctctttccgaggcggcagatgcgcacaacgagttctgtttcatagtcgatgcgccccatgaagtcgggtataaagaaaggttttccgtccttcaacagtgccgagtcagcctttgtgaaaatgacaggttgctctggtttatataacgctccatgcagctctttattgtgtgcaaggtagttcatgcctacggcaaatatcttcatttttattgtttttaaggttttacggatgtctgattgattttttttgccttttttccggcgttgttcgcctgtgtttttgcataaaagcaaaaaggagtcataaagagttttcaccctttacgactccatttttatgattgtaattgttttcttctttgtttaagaaaaattactcagcagcaagagtgaagcgcttgtaagcgacaatcttcaactccttgtcctgcttcttcaggtagtcggcaacagtttccttgtcgccgtcgccgaactggaactcctgagccacgaggcagttctccttcaagaacttgccgacacggccctttgcgatgttgtttatcatgttctcgttcaggctggcagccttttctgcgctgacagtctccttgatttcgcggaacttcactacgtcttcggcagtgatccatcccttgccctggttagactcgatgtggtcttcagagtcgaagtggttaggattgagtccggccttcttcaaagctacctcaacagccttttcgatctgctcttccttggtcttctgaacggcaacggtatattcgttgtcgataacctcctgcggcacctgtgtctcgtcaagggcgataggcttcatagcggccacctgcatagcaatcttgtgacctacctcagcgttctccttgttgagctgtaccattgtgcagagagtgtgcttgcccatgtggtcgtacacttcgatgttgtcgccttcgagcacgttgtatccgtcgagttccatcttctcgccagtgataccagagcgctgtgttacagcagcctgtacatcgccttcgccgagagcgagtgccttcacttcgtcaagtgtgtgagccttggcagcgatggcagcgtcgaggatgtcgcttgtgagcttgatgaagtcggcgccgttagccacgaagtcggtctcgcacttcaatgcaattgttgcagcgaagccgttcacgctcttcacgagcacgcatccgtttgaagtctcgcggtcggaacgctttgcagcgatagccagtccgcgctcacggagcaagtcctttgccttatcgaaatcgccttctgcctctgtgagggccttcttcacgtcagcgagtccggcacctgtcatggcacgaagtttcttgatgtcttcaattgaaacagccatagtgttaaaatgtggttagatatttattaatattgtctgtctgattactcggcagcgggagcctgctcttcagtcgcgggagcttctgcttctgccttgggagcgtccttgcgtgccttgcgtgtgcgcttcttgccttcagctgtctcagcctgctcagcggcagccttctcgtcagccttctccaccttgcgctcttccagaccttcggcgatagcgctgcagcatgcagagaggattacatcaacagaatcctttgcgtcgtcgttggcagggatgaggtagtccacgttgcgtgggtcggagtttgtatcaacgatggcgaacactgggatgccgaggcggttggcctctttcacagcgatgttctccttcattacgtcgacaacgaacaatgcgctcggaaggcgggtcaagtcggcgatagagccgaggttcttctccaatttagcgcgctggcgtgtcacctgaagaagctcacgcttagagagcttcgagaatgtaccgtcgttcatcagcttgtcaatgttcgccattttcttcactgccttgcggattgtggggaagttggtgagcataccgcccggccaacgctcgataacgtaaggcatattaacgcttgatgccttctcggctacaacgtccttagcttgttttttagtagcgacgaacaggatcttcttgcctgactttgcaatctgcttcagagcctcagcagcctcgtcaatcttggctacggtcttgtgcaaatcgattatgtgaatgccattgcgctccatgaaaatgtaaggagccatagcgggattccacttgcgacggaggtggccaaagtggcagccagcctcgagtaattggtcaaaatttgttcttgacatttgttctttgtttttaaattgtttactttcctttgagttgtgaatgaaccagcccgcgagtaacgattttctgagttatgaatagtgggctgcgaacctgccggcttcgccgtttcctgactgccgtatgcatggtgcgcctccactggctcttcctcggtcttgcgggtttggatgctaaacgtcggagaaatgctaagccacacatatataataaggtgtcccagccgctctcctgatattaacgcttgctgaactggaagcgacggcgagccttgggctgacccggcttcttacgctcaacggcacgggcatcgcgtgtgaggaagccctggtccttgagtgccttcttgtcttcggcgttgatttttacaagtgcgcgagcgatggcgagacgcagagcctggctctgaccggtgaaaccgccgccgtcgaggtttgccttgatatcgtatttctcttctacaccaagaagctgcagaggctgcttaaccacgtactgcagaattgctgatgggaagtattttgtgatttcttctttgttgattgtgatcttaccggtgccttctgtgaggtaaacacgagctacggcactcttgcggcgaccaattgcatttatcatttccatctttttcctttatttatactggttaatatcaattgcctttggctgctgtgcctcgtgcttgtgctctgtgccctcataaacatagaggttgtcgaggagcttgcggccgagaggacccttggggagcataccctttacggcgtgacggatgatcttatctactccgttaggacgcttgcgaaggtcctcgggagtgttgaagcgctgtccgccgggatagccagtataacgtgtatagaccttgtcagtctccttcttgccggtgaataccaccttggcagcgttgatgatgatgacattgtctccacagtccacatggggagtgaaggttggtttgtactttccgcgaatcagcttggctacttttgagcagagacggcctactacttggtcggtggcgtcgataactacccactctttcttagctgtttccttgtttacggaaatagtcttgtaacttaaagtgttcattgtttaaattaaaatttactactaaaaaacatattattttttgcacaagcgattcactaaccgtgccgctcggccaaaagcgtacactattaacactctcatgcaggggactctaagtgtatccccaataatcggactgcaaaattacggtttttttatttaatatgaaatgtggacgcatggcatgaatgttgatattagtaaagtttaacaaattataatacttgacgaagcttttccgggtgtaaagagcgtgggaaacgccgcacttcagcccgacggggagttggagggaagggagagaaaacgtggcaggaagcgtatgaggagggatgctttccggcacggcgaaagcactggaaacggaaagtgattccgccgctttgaaaacaaggcttctttgcatcagaaagaaggcttctttggaatgcaaacaaggcttctttttgacgcaaagaagccttgtttgaaaacccatctgtatgtatctgaaaatcaattaaataacaggcaccgttgtcacaccaccggagtctgctcccgacactgcctgtcgagtcgccgcagcacccaccagtaggcagggaacaggaacacgtcggccatacaccacgccacagggtcgcccagacagacgcccgtccacatcagagccggcaccagatagaggctcactccgctgcgggctatcatctccatgacgccgctaagcatggagaagttgctgaaaccaagtccctgtatggagtagcgcagcacggtgagcatgcccagggcgggatagaagtagttggtgatgcgcatatactcagccgccttcgccgtcacttccgcctgtcctccgtccacgaagagtgtcatcatgtcgtcggcgaaggggtaaatcacagccacggtgaagacgaaatagacggccgtaatcttcgttgccgcccacacgccctgcctcacacggttcatacggcgtgcgccgaggttctgaccgcaatatgtagccatcgccacaccgatgttgtcgaacacgcaagtgaacagatattttatgcgcatcgacgccgtgaacgccgccacacaggtggtgccgagggcgttgttggcactttgcaacatgatgatgcctatacccgtgatggagaactgcagccccataggcacaccgttgttgagcagaatgctcgtgcggcggttgtcgtagcgtcgctcggcaccgtgcggaataaggatgcgcatacggcggcggatgtaccacagacacaggcacaccgacaatccctgcgacaaccatgtggctatgccggctccctcgacgcccatacccaaccagaggatgagcacgacatcaagcagaacattggcgacagccgacgcaatgagaaaataaaagggttggcgcgaattgccaagagcacgaatctgtcccgaaaagaggttgaaaccgaacgtgagagggatggtggcaaactgcagcataaggaatatgtaggcatcgtggaatatctcgtcgggagtgttcacaagctgcaatatgcgccggcagaacatcagcgacagcagcgtcaccactgccgacatcaccaccgccacgcgcaccgcattggcgacatacgcacgcatcttagtgaagtccttggcaccgaaagcctgtgccacaggtatggcgaaaccggcacacgccccgttgcagaaacccatgacgagaaacatcaccgacgacgatgcacccaccgccgccagagcctccacaccgacccagcgccctactatcgccgcatcaatgacaagatacatctgttgcaggatatatccaaaaatgagcggcaacgcaaaccgtacgataccacgcatgggcgaacccgccgtcatgtcgtgcaccgccctactcgaactctcttccttttccatatctttctcctccgttatcccaaaccagccagactccgcggatcccggttcagtcaatgtcataccatgaaaaatgcccaccgttaaggacgatgggctgacctgatgttttcacaacggaataatccttattgtgatttgcttaaaattcgtacggcaaaaataaggattatacttcacaaagcacaacgtttagtccgccaaagcatccgaattaagctttattaacgccgatgtgggcaaaaagtcgagtatgtacaccctcccacattattattattcgtaactttggcacagacgaaagaactatcaaacagaaaattcttttgaactaatactcatctgacttaaacagaaacacatgaaaaagatattgggacttgaccttggtacaaccagcataggttgggctttggtgaacgaaaaggaaaacgacaacgaacaatcgtctatcataaagctcggcgtgagggtcaatccgctcaccacagacgaacagaagaacttcgatgaaggcaaacccatcactacgaatgccgacagaacggtaaagcgcggtatgcggcgcaatctgcaacgctacaagctacgccgcgacaccctgctctctgtactgaaagagcagggattcatcagcgacgacacaattctgtgcgaacagggaaaccgctccacattccagaccttacaattgcgtgccaaagccgccaccgaagaagtttcgcttgcagacctcgcccgtattctcctactcataaacaaaaagcgaggctataaaagcagtcgtaaggtggacgccgacaccgacggcaaatccattgacggcatgagcgtggcacgaactctctacgaaaacaatctgacgcccggcgaatacgcctacggccgcctgcaacaaggcaagaaatacatacccgacttctatccgtcggacctcagagcagagctgaaccgcatctgggaatgccagcggcagtattaccccgaaattctcaccgatgcccttcgcgagaatctgcacggcaagaacgagaagcagacatgggccatctgccacgaacccttcggcattgtaggcatgaagcgcaacggcaacaaagccgaacagaaggtggagaactaccggtggcgcaaagaagctttgacaaaacaactcggacttgaagaacttgcaatagtgttgcagaagataaacagccagattaacggcacaagcggactactcggtgccatcagcgaccgcagcaaagaactgtatttcctcaaacagacggtgggacaataccaatggaacgaattgcagaagaatccgaattacagtctgaaaaaccaagtgttctaccgccaggactatcttgacgagtttgaacgcatctgggagacacaacggaaattccaccccgaactcaccgacgaactgaagcacgaactgcgcgacatcgtgattttctaccagcgaccgttgaaatcgcagaagggactcgtgggtttctgcgaactggagagcagccaaaaggagattatcaaagacggaaagcggaagaccgtgaccgtaggactgcgctgttgtcccaagtcttcgccactgttccagtgcttcaagatatggcaaaacatcaacaacatcaacgtgacaggcaatatcgtacccgaaagacaatgcgaccagtctagcgacgagattataaacaagtacgggacacgcccgctcatggaggaagagaagcagaaactcttccgggagctaaacctgaaagagagaatgtcggcggccgaaatactgaaacttctgttccccgacgaacgcaacctgaagctgaacttcaaggaagtgaaaggcaacaccaccatgtcggcatttgtgaacgcctgccggcaggtgatatacatgagcggacacgacgacatcgacttctcaaaagagtcggctcaacacaccacaggcatcattaaggaagtgtttggaacaatcggcgcacatgctgacttcctcacattcgacccatgtctcgacggaaaggctttcgccatgcaacccgcctaccgcctgtggcatctgctttactcatacaccggcgacaactccgcaacgggcgacgagcgtctgaaagaacgcattgctgacatttgcggactcgacaaggagtatgcttcggcatttgcgtcaatagcattgcaggacgactacggcagcctcagcgcaaaagccatgaggaaaatactgccgttcatgatggacggcaacaaatacagcgtggcctgcgaatatgcaggctaccgccattccaagcgttcgctcacaaaagaggaactcgacaacaagccgcttgtgaacacaatcccgctactgaagcgcaacagtctgcgcaatcccgtggtggagaagattctcaaccagatgataaatgcggtgaacaccgtgtcggaaacctacggaaaacccgacgagatacgcatagaaatggcacgcgaactgaagaaaagcgcgaaggaacgcgaacagatgacaaaggacataaacgatgccaagaagaagaatgacgaatacaagcaggtgctgcaaagcgaattcggaatcacaaacccaagccgcaacgatgtgatacgctaccgcctgtacaaggaactggaacaaaacggattcaagacaatctacacccagacctacatcccgaaggataaactcttcagcaaagaattcgacatagagcacataataccacaggcacgcctgttcgacgactcaatgtcgaacaagaccattgaggcacgacaggcaaacatagagaaaggcagcgcaacagcctacgactatgtgctcggaaaatacggaaaacaaggcgcagaggaatacaaacagcgcgtggacaagatgatggaggacggcaaaataagcaagacaaagcaaaagaaactgctgatgcgagagcaggacataccggaaggcttcatcgaccgcgacctgcgcgactcgcaatacatagcacgcaaggcccgcgaaatactcgaaagcatggtacgcacggtggtggctacaacaggaagcgtcaccgaccggctgcgtgaagactggcaactggtggatgtaatgaaggaattgaactgggacaagtacgaccgtctgggactcaccgagaccattaccgaccacgacggacgccagatacgccgcataaaggactggacaaaacgcaacgaccaccgtcatcacgccatggacgcactcaccattgccttcacacgctatagcttcatacagtatctcaacaacatgaacgcacgcagcgacaagtcatcaagcatctacggcatagagcaaaaggaactcagtcgcgactcgcacggcaaactacgctttgtcccgcccatgccgcttaacgagtttaggagtgaagcgaagaagcatttggaggacattctcgtgtcgataaaggcgaaaaacaaggtgatgacgaagaacccgaacaagacaaaatgcgccaagggtaaaacaaagacaacgctacaactcacaccacgcggacagcttcacaacgaaaccatctacggacgcatacggcaatatgccacaaaggaagagagagtaggctccgcattcaacgccgaaaagatagcaacagtggcaaacaaacggttgcgcgaagctctggcggcacggctacgccagttcgacggcgacccgaaaaaggcattcaccggtcaaaacagtctcgaaaagaaaccgatataccttgatgctgcacacacggtatgcgtgccgccaaaggtaaagacagtaacgctggaaccgacatacaccttacgcaaggaggtaaacaaagatttgaatgtggaaaaggtaatcgacccacatatccgccgcatactcaaagagcgtctgaaagaatataacaacaacgccaaggaagctttctccaaccttgaagaaaaccccatttggctaaacaaggaacgcggaatagcaataaagcgtgtcacgataagcggagtaagcaacgccatagcactgcacgacaagcacgaccatcatggaaagaagctgctcgacagcgagggacgccccatgcccaccgactttgtaagcacttccaacaaccatcatgtggcgattttccgcgatgccgaaggcaatctgcaggagcacatcgtgtcgttcttcgaggcaacaatgcgtgccagccagcacctaccagtcatagaacgcgactacaacaaagaactcagatggcagttcctcttcaccatgaagcaaaacgagtacttcgtgttcccaaacgagaagaccggattcaacccgaacgaaacggatttgcttgatcctaagaactatgcggagataagtagaaatttgtttagggtgcagaaactttcttctaagtattatgtttttaggcatcaccttgaaactacagttgaagaaaagaaagaattgttaggagagaaatggaaaagaatccaaacactcaacaaccttaacggcattgtcaaagttcgtgtaaaccacatcggacaaataatcgccgtgggagaatactaatatttcaaaccataacaccctatgattaagaagaccctttatttcggcaaccctgcctatctgtcgttaagacagcagcagatggtgataaaattgccggaagtggagactaacgagtcgcttacagacacgttcaaacgcaatgccgaagtgacgaaaccgatagaagacataggcatcgtagtgctcgacaaccggcgcatcaccatcacacagggactgctcgaagccctgcttgaaaacaactgcgccgtcatcacctgcgacacacgcagtctgcccgtaggaatgatgcttccactctgcggcaacaccgtacagagcgagcgtttccgttgccagattgacgcctccataccgctgaaaaaacaactgtggcaacagacgataaaagcgaaaatatgcaatcaggccgcagtactgaagagctgttgtgacatggaagcaaagactatgctgcgatgggctgacgatgtgcgcagtggcgacccggacaacatagaaggacgcgcagccgcattctactggaaaagcatcttcaacggcattgaagggattgattctttcacacgcgaccgtgagggcgtgccacccaacaatctgctgaactacggctatgccatactgcgggctgtggtggcacgcgccttggtgtcgagcggactgatgcccactctgggcatacaccaccacaaccgctacaacgcctattgcctcgccgacgacattatggagccgttccgtccctatatcgactgtcttgtgcataaaatagtaacagaaaaaggagtcgaagcactggaactgaccaaagagacaaaggctcagttgctctccatccccgtcatggatgtgatgataggtggcaaacgcagtccgctgatggtgggcgtgagccagaccactgcttcactgttccgatgcttcaacggggaggcacgcaagatagcctaccccgaaatgtcgtaatatcacatttatgaaccgtttcagccaataccgtgtcatgtgggtcgttgtatcgtttgacttaccgacggagacgaaaatggacaagaaaaattatgcccttttccgtaaaaacctccaacgcgacggtttcaccatgttccaatggtcaatctatgtccgccattgtgccagcatggagaatgccgaagcgcacataaaacgtgtgcggacattccttccacaatacggccatgtggcgatactgtgcatcaccgacaagcaattcggcaacataaaagtatttcaaggagccaaacctgttgaagcaaatgcgcctggacagcaactcgaacttttctgaaacattacaatcttttaaactctatttgcttttaactcatctaaaaaagcctcaccacaccattatttctcacctccttcatggattatctacaaaaacaaaaaaggctcgctatccaagcgaacctttttgtttgcgatgcattttttatttccatacgacctcaccattctctctgatattcaatcacttcagcgttttgagatgtcgattgcaccacaaagatacgaattttaaagcaaatcacaacttgagcagggtgttcttcttcatgtattcggatgtcgattgcaccacaaagatacgaattttaaagcaaatcacaacgcatcaaaatatttattttatgaaacatccgatgtcgattgcaccacaaagatacgaattttaaagcaaatcacaaccgatgtatcagagtttcaaaaacaaggaatgatgtcgattgcaccacaaagatacgaattttaaagcaaatcacaactgcctattcttgatactgcgaaacctattagatgtcgattgcaccacaaagatacgaattttaaagcaaatcacaaccctgcaacaagccgtgagcagacaaggcagatgtcgattgcaccacaaagatacgaattttaaagcaaatcacaaccctttttattcattatgggtatatggaaaagatgtcgattgcaccacaaagatacgaattttaaagcaaatcacaacaggcggcagtcagcgtggcaagggacttgtgatgtcgattgcaccacaaagatacgaattttaaagcaaatcacaaccttatataagtctttcaaatttgtataagtgatgtcgattgcaccacaaagatacgaattttaaagcaaatcacaacggctctttgttcccatgtagaggtcttgctgatgtcgattgcaccacaaagatacgaattttaaagcaaatcacaactgactttatataataatggtctctctgccggatgtcgattgcaccacaaagatacgaattttaaagcaaatcacaaccctacgctcaatggttgcctaaacttgaccgatgtcgattgcaccacaaagttactacaaaaaagagaaatgcggaaagatatagtgatagaattgagtt

SEQ ID NO: 2361 - DNA, 16595 bp, synthetic construct
  misc_feature 1..16595: note = Synthetic
  source 1..16595: mol_type = other DNA
tcatcgagtccggtgtggaactccagatgtgcagcgtcaacctcgcaaaagctgaaggcagactatgaccggcaagctataaccggcagacaatcaacagataatcaaaaaaacacaatacaatggaaaagactcagaaaaaaggcaacctccttttggggataatagttctggttgctctcatcgcagcagtcgctgtacttggaatcatcttctctcagccgaagccggccctcatccagggcgaagccgaagccacggagtaccgcgtgtcaggcaaggtgccgggacgcatcgaggccttctatgccaaggaaggcgacatggtcaggaagggcgacaccctcgtggacatagactcccctgaagtcagggcaaagctcgcccaggcccaggccgtctacgcagccgcttcagcccagcgcaacaaagccaacaagggagcacgtcaggaggagatagccggtgcttatgaaatctggcagaaagccctcgtgggcgaggacatcgcacgcaagactctggaccgcgccacacgtctgcacgagcagaaggtcatcagtgaccagaagtttgacgaggccacagcccagtacaacgccgcacaggccacagcccaggcggccaaatcccagtacgacatggccgtgaaaggtgcccgcgaggaagacaaggccgcagccatagcccttgtcaaccaggccaacggagccgtgatggaggtcgagtcatacctctccgaactcaagctcacttcccctgtggacggtatcatcagcgcgcgctaccctcatgtcggggaactcgtgggcaccggttcacctatcatgacagtgaccgacttgagcgacatgtggttcacgttcaacatccgcgaggacaaactcaacagcatcaagaacgggacggtgcttacactcaagatcccggctctgaacgatgccaccgtgcaggccaccgtcaactacatcgccgcacgcgagtcctacgccacctggagggcaaccaacgagacaggacagtacgatgccaagacattcgaggtgagggcagtgccttcaacagcagtggacggactccgtcctggaatgacagccattgtcgtaaacaagtaaacgatgaacagcatcttgaaagtaatgcggcgggagttcgggataatacgccgcaaaccagtcttccttcttggatcagtcgggatgatggcagtttgctgcctgttctacctgacattcttcaaggcgggacttccggagaacctccctatcggggtgctggatctggacaactcctctctatcccgtaacttctgccgtcagcttgacgccacccagctgggcaaggtcatcaagtacgaagacttcaccaccgcgagggacgcgatgcagacaggtgagatcacctcgctgtgcgtgatcccccaggggatgaacgaagatgtcaacgccaaccgcaggccggtgttcacctactacgtcaactccctctacctcatcggcggtgcgctgagctacaaggacatacttaccatggtcaccctcaccggcggtgccgtgcagcgcgaggtgctgagggccaagggatattccgagggcgcgataatgggcttgatccagcctatagtggtcgatgagcacaagataggcaacgccaccaccaactacggtgtctacctcaacaacatcatccttccggggcttctggcgatgagcatcatctttgtgcttatctacgccctcggttcggagttgcgctacggtacttccaaggaactgatggacaccgccggcggttcgttcaccgccgcgctggtcgggaaactgttgccctacacgcttatctacctgtttctcgggctgggactggacctgcttctcttcggggtctgcgggtatccgctcaacggtaacgttctcaacatgatgctctgcatggtggtgttcatcctcgccaacgaggctgtggccgtgacacttgtgggcctgcttcctactctgcgctatgcgctcagcatcgcggccctgttcacgatactcgcgttctcgttctccggattcacattcccggtcgaggccatgccggtggcgctgcagggtgtgtccgtgctcttcccgctcaggttctactatcttttttatgtgcaggaggccattttcgggactgggtttgccggatggtggctgtacatggtatgcatgcttctcttcctcgtcggcccgctctgcgtgagcggcaggctcaagagggcttggcttaatcagaattacgcgatatgatcaaggaactcaaaagaatattcgccgactcctatgtggcgatcatcttcctgctcggcggactgatataccctctggtgtacgggttcgtctacagcaagggcacggtggatgacatgccggtggccgtggttgatctcagccggagtcaggacagcaggcgtttcatccgcaagatggatgcgacacgcgaagtggaagtcgcataccgatgtgccacgatgcaggaagccgagcagctgatgcaggagcggaaggtgcacggggtggtcctcttcccggaggattacggcgaccgtctggctggcatggaacaggccacagtctctacctacgccgacatgtccagcttcctctactacaaggacttgaccatggctgtgaaccatgtcatgatcgatgagatggggcagatcgaggcttccagatatgctgcgaccgggatgaccgacgagagcatcaggcagatgatcaacgccatccctgtcgaggaggagataccgttcaacaccaacatgtcattcctgatattcttcctctcggcggctctcatcctcgtcgtgcagcagaccatgttctacggcgtcagcgtgatgaacggctccatgagggaaggcggtgccacgcatgacggttcgcttatcggaagggcaagtgcttatgccttgatatatatagggatagccgtatatggactcatgctggtgccgatgatgttcgggatgccgcagcggggtatgctcgtggatctgcttgtgctgatattgcttttcgtcatcacctgtgtatctttcagcttcactttcagccgcttcattcatcacagggagactgtgttcgtggtgctgctgttcatgtcttcgctctgcctgttcctcagcggatgctcatggcctgtaagctctttccctccgttctggaaggcggtgtcttacatattcccgtccaccttcatgatccagggtttcaacaacatcaacaacgccgcatgtacattggacatgatacgcccgcagatcatcgggctcgtcgcccagttcgcattctacagcgtgactgcgttcatcatggatatcagcgagcgcaaccactacaggctccttatcgacaagatagaatcaagaatagaatcaaaactcgaatcaatttaatttacacacaatcaattatgaaaaagacaatcattactctcgctgctattgcagcaatgacattcaccgctaatgcccagattttcgtgggaggcagcgccggactcaacttcaacggcggcaacaccactaccaacggaaccaagactgacaaagagtccaaagtcggattcaccgtcgctcctaatgtcggctggtacttcgccgacaacttccttgcgggtgcaaggctcgggctcggttacgacaaggacacgactcctggggctctcgccgacaccaagaagtcaagctttacatgggctctccagccttatgcccgctaccgcttcgccgagtggaacagtttcggcctctggagcgaggtcaatctcgggctcggacgcaccaccggcaagactgaagtcggcaacatctccactgacaacaatcctgtgcttgcatggggtctgcatgtgctgcctgtgctgacatattctgtcaacgagcacctcagccttgagacttcgctgaacttcctgaccctcggctatgagggctcatacactaaaaacgacgacaagacctacgaggagaacgcctcttcatttaccttcggtgccagcgccaacgatgtcatcggtgccatcggacaggtgaaggtagggtttacctacaggttctaagcgagcttctgactatgaattgcttgaggccgtcccttcgggggcggctttttgcgtgccgcgttgtcgctcgtttcgttgttcgtttcgtcgctcgttttgtctccagtacagatccgctccactacgctgccgtacagaaagaggggtgttttctgtaccgcgggggtctttgggggcatttcgtacagaaaagggggtgttttctgtacgggacggcttcgtggggggctcccgtacagcagaaggctgttttttgtacggaatgtggcagttgaggtgattcgcgtcatggcggtcatgcggtcaatgggaaaagtgaatcgatttcgtattggctgagggccaggatcctgcggatctgcgcgttggaggaacggaagtcgcgccgtagtctgatggcaagatcaaacttctgttgtcggctgaggtctttgaggggagctgccccgtattcttttttgaggatcgctgccagttgattgtaaagctcgggatcagtgaggaactctccgtcaccgagctcggctgcgatctcggtgtatgcctccacatttttactgaccagagagaagtagtggtgcgcgtctcggaacaacgccatacctgtttttattgagcagaatgatgatgggcagatgtggccgtctatgatttcccaatttccaggaagctccggctctcgtccgcggaacatgagtctgcgctggcctgaatggatttcagcataacgatggtttgtcgggaaatcctgaaaatagtagcgccctgtgccccaagggtagctgaatggtgtgtgcaaagggtcggcaacgtagccgttgcggttggtgtagacgatgttgtttctcagagattgcaagttatcgatgggcttcagtgacggggttacgttttttatcaagggaaacggttttatcatcctcttgcgtatgagattccagaagttgaggatttgttctttgtctgccgaaattacgaaatggaagtggttacccatgatttcaaatgcgagtaacgtgacactggtgttggcctgggcttgcgccaccatattcatggcaagggtaaattcttctctggtgctgaaaatcagcggtgtttctttgccggaagtgtagacgtgccaatacggtccgccggagagaaaagtcgcgttgcagaacctttctcgttctttgaagtttttcatcattttctgaaagttttaatggtgcagcctgctccgctgaggctgctcagcggtacaaatatgggacagaagaatcagatttgcaaatcttggcctcgcggttcgcggttgccgtacagcagagggccgttttctgtacggcgtgcccatggaggtcggggcggcctctgccggaagtagcaggagtcagggataattcgtatctttcaaaaaatcagttagtatgagggtaacaattgtctttttgatttgcctgatggtggcatcaggcctcaaggcccaggaaatggagggagtttgggtgcaggtcgattctgcttccgagaaaggaactgagatgactgtatcggacacgcttaaactctcagaggatggtgctttccgcaatgcgactgtaatggaaatgtcgatggatgacggcagcgggcagaagttcacagtcaaaatgctggtctcatgcagcggaaaatggtcttgcgaaggcggtgtgctgacacagacttacgatgcgaaatccattcgctctgaagttctggaacagccgaagggctttccgaagatgttcgggaatatgctgaccaaaaagacagtctccgaatttaaaaagcatgcgaagaaaccacagcgatcggaagtgctcacattgacatccgacaagctcacactccgggacattggggtaaaagaccctaagaccgacacttatatgcgcgtggagtagcggaaaaattggctcgccttcacttgttgtgagggcataaagacattgatattccgcaacagcatggcagtcatacacgacaggacattttccggatgcaagaacctcgaaaggatagagtttccagatggtctggaggagattggtgacttcgcgttcgcgcgctgcacaaagctcaccgaacttcatcttccagcctcagtggaaaagattggctaccggtcgtttgctaactgcttctctttggagaaggtggacttgctgtcctttccggcaattgatgacacggcttttgaaaattgcgacaaacttcattaactttcgcggcgtttctgcgacttacagatgaaacggtttttactggaacatgacagaacaggagttcggacatatcgcacaggactgcagcggcaggctcaaggtgctggcaaggcgtttttgccgggctgctgatctggccatcgatgaggatgatgtggttcaggaggcgctgctcgctttctggaacctctccgaaaaaggctacccggtgcgcaatgccgaggctctgcttgtcaagattactaagaacatctgcatctcgcattaccgcagacggcacattgtgaccgagccgattgccggagatgtcctccctggcggtttgtctgcgacggaaagtgtcgatgcccgggatgccgcagcgctccggaaagagatgtacgggagcctgaccccctcggaacttgaatatacgcagctgcgcgaggagaccggctggtcgctggatgaaatgtcggcaaataccggcaaggacaagtccgtgataaagtctctgctctcaaaggcaaggcgcaagatgaaagagattttaaaggaacaatgatatgatacaggataacaggacattgccagaactcgagaaggcttatctttccgatgcggccgcagatgagtttgacaggctcgtgcaaggggcggaatcacgcaggcgcagacccgtagtctgggggctgatgctcgccgcggcggcttcgctggcgctgatcgtgacactcaggccccgtcaatgtgatttcaacgggcttgaaatcgccgagggaatccagcagatcatgagccttgacactgacaacgtgaagtccgtcacggcgactcctgacggagagcgcatcatcctcacagccgagatgaatgacgggagccggtgctcctatgtgatgaaccgggagggtggagctgtgtcgataactgcgatgaaataggaaggcctgcccggaggcattgtcagtagcgcgcatgaacagatgtctgggtgggaacaacttaaaaatcaaacgaatatgctaacaatgtttttgagcgcggtatgcgcattgggcctaaatgccgcaatggtggcggcaccggccgatacaattgacagatacatcatcaacggacagctgatagagaagttcgacggcagtcagctggtcggcaagacggtaagcgactacaagatcactctcgccaagggaaattccggtgaagcagtcgtgcggatgcatgttatcgggactgacggaaagaaggtgaaggaaatcaaatccgccaccgtggttgagggagtgcatcctgaagatattgaggtcaatgtcaacggcaaaacgtacaacagctccaattccacggtgctactcacatcagcggtctacatcatcgacgggaagaagtgtgacaaggatgctttgacgaagatcaagcctgaatcaatcgcttccatgacagtctacaaaccaggctccaaggaggctgtcaaactctccggaaagagcgacgtcaccgtcatcgaggtagtcaccaaatagttttgttcggcacccgcttcttctgcctgaggccccgcggcttcaggcagtttttcgtctcgggcgagacagttatttttgacatttgccaagatccggcagccacagggcaatgatgccgatgagggggagcaggctgctgatgcggaagatgaactcgatgctggtacggtccgcgagccagccgaaaaacgccgagccgagcccgccgatgccgaacatcagcccgaagaacaccccggagatcataccgaccctgtccggcaggagttcagtggcgtagacgattattgacgggaatgccgaggcgatgatgaatcccgttatggccgccatgatgatggtccatccgaggctgagatgcggcatcgccaaggcgaacggagcggccccgagtatggagatgagtatgatgcgcttgcgcccgaacctgtcgccgagcgccccgcctattactgtccctgcggcgaaggcggccagatatgcgaagaggcagagctgcgatgacttgacatccagggcgaatttgtccataaggaaaaatgtgaagtaactggtcatcgaagctgtgaagaagtacttggagaacagcaggatgacaagtatcacaagggctcttcggactagccgggcggagagcgggcgtcccgggctggcgttcttttctgaactgcgcgtggcggtgaggctgcggctgtaccatttcccgaccacaagaagcaagagggctgcggcaattgcagccagggcgaaccagctgatcgcaccttgcccgtgcgggagcactatcgctgcggccaggagcgggcctatggcattgccgccgttgcccccgacctgaaatatggactgggccaggctcttgcgcccgccggatgccagctgggccgcgcgcgaggcttccggatgaaacaccgatgaaccgagtcctacaaggcccaccgacaggaggatcagcgcaagggtgttgcttgtggagagcagcagaaggccgcatagggtgaagcacatccctatcgagagggagtagggcttcgggttgcggtcggcatacagacccgtgaaaggctgcaggatggaggatgtcatctggaagaccagggttatcagacctatctgcgtgaaagtgaatccgaacttctccttgagtatcggatagacagccgggatgaccgactggatcatgtcgttgagcagatgtgatacgctgattatcagcaggatcccgaaagcagtgcggctggcgctgtctggggtggctgcgctggtggtggcggtgtggctgtctgttttgcttgcggcggtagctgctttgttgtctgtcttcatctttgtgtgctcctgccttaagaaatatctgccccggtgttactttctgggacgagacccctggccggcgcgcaaagatacacctttcctgtcggattgcaatgcggccgctgttcgttcctatccctgcccctgatttcctttgtccttgccccgactgcctatgcctctgcccaaagtgcccttcgggccagatcttcaaaaggttggggtaaaaatcgagaaaaataccccaaccttcagaacaggtatggtttagaggcacgtcggggcgaggtggagttcaaaggttggggataaaatcacaaaaaacacccctacctttgccgcaaggtagccttggagtgccgtgcatggagggtgccgtgtaaaaggtaggggaagaaaacgccgaaaataccccaaccttcggctggcacctttgcttccgcccgttccttgtccccgttccttgccatcgtttctgccccgttcatgccaccgccccgagctcagtgcccgtcgccccgagctcagttctcagtgccctgccgccccgtgcgcacgagaccgatcccgtgcgtgaaaagccgtctggtgcgcacgaggacgttggaaaatcttcgccgtgcgcacaaggccgtctggtgcgcacagaatcgacttcgtgcgcacgagaatggggaacatgtggcgggttgcggctaaaaaaagagcgaatcatgcgatccgctctaaatgtttgcacaacggaataatccttattgtgaattgcttcttttgttccgcaaaaatagtaatatcaaatggaaatacaataaaaattgttagttttgtggaaactacaaccaatttcagatgaaaaaagtattgggacttgaccttgggacgaccagtatcggttgggcattggtcaatcaggcagaatcaagcggtgagcattcttcaataatcgcaacaggtgtcagggtcaaccccttgacaactgacgagaaagacagctttgagaaaggtaaagcaataacaaccaatgccgaccgccgtcaaaagcgcggcatgcggagaaacctgcagcgttacaagctccgccgggaacacctgttgtctgttctcaggcgtgaaggatggataagtgaggatactgtgctgtccgagcagggagcgcgttcgacttatcagaccttcagacttagggcagctgctcctgcagaggaaatctcccttgaagatttgtcacgtgtcctgctgatgatcaaccgcaaacgcggatataagagcaaccgtaaaactgacaagggagaggaggggcatctgattgacgggatggaagttgcccgtacactttatgatgaaggacttactcctggagagtattctctgcgtcttgtaaatgaaggaaagcgtgtactgcctgactattatcgctcggatttggtggcggaactggagaaaatctggtcatcccagaaagtctggtatccggatatccttacggatgagttcaaaaacagcatcgagaatgacggacgcaacggggtcatcaagaaattccttagccgatactctatttatactgctgacaataagggtaaagacaagaaaaagactgcactcgaatggagggttaaagccctcgcggatcagcttgataaagagactcttgcctatgtaatagcagacttgaaaggtgctatacagggttcaagcggatatttgggtgcaatcagtgatcgtagcaaggaacttgtttttgacaatcttacagtcggccagtatctctggcggcaaattgaacaggatcccaattatagcacgcgaaacaaagtcttttaccggcaggactatatggatgaattcgagcgtatctgggtatgccaaaaacgttttcatccggaactgaacgatgaactgaagtcggaaatccgcgatgttgtgatcttttatcagcggcggctcaaatcccagaaaaaccttataagtttctgcgaatttgaaactcgtgacatcaccgtggaggaggccggtgtgcaaaaagtcaagaaatgcggatgccgtgtggccccacgctcatcgttgattttccaggaattcaagatatggtcagtcctcaacaatatctccgtcaagagcaagacggatggcagtaccgttgaggtcactgatgagatgaagaggcgactttttgattatctttctgtaaatgacaagattacagtgtccgacatgctgcgcctctttgaactcaagccgaaagggtatgatgtcaattataaggagattcagggaaatttgactttggctgaattgtaccgtaagttttttgaggtcgtttcagccagcgggaacggtgaacacgatcttgcgaagctgtcgtattccggggcgtataagattctgtttgaggtgtatagtgcgttggggttcagtactgaaatccttacgtttgacgcttccttgccaaagaaagagtatgaatgtcagcctcttttcaaactctggcatcttctctattcttatgagggggataactccaagaccggggacgcgagccttattcgcagagtggcggaaatctgccggatgccggaggaatatgcccggattatagcatctgtaaagttacttgatgactatgcttcactcagccacaaggccatgaagaagatcctgccgcacctgaaggatggctgtgcttatgacgaggcatgtgctcgggccgggtacaaccattcttcttccatgacaaaagaagagaatgaggctcgggttcttaaagacaggcttgaggtgcttccgaaaggagcgttgcgcaacccggtggtggagaaaatcctcaaccagatggtcaatgtcgtaaacaccttggcggatgaatacgggaagccggatgagatccatattgagatggcccgtgaacttaagcagaatgcaaagcagagggagaaggcaactaaagatattgctgacaatacgaagcgtgacgaggagatagtgaaaaaacttcaggaggagtttggacttaagtatgtcagcaaaaaggatatcctgcggtacaggctctatgaggagcttaagtcgctcggatataagacgctgtattcgggccagtatattcctaaagatcgtcttttctccaacagcattgacatcgaacacatcatcccgcaggccctgatgtttgacgattcctattccaacaagactctcgaattcagcgatgtcaaccgtgacaaggggaaggagacggctttcgattatgtgtcaaggaaatacggcccagcagagttggacgcatataagcttcgtgtccatgagctttattctcatgaggtgatttcggcccgcaaacgtgaccgtctgcttatgaggcagagtgatattccatcggacttcgtcaatcgcgatctgactaattcacagtacatagcacgtaaatccacggaaatgcttggcgagtttgtccgtgatgtgatgccgactacaggtagtatcacagcacttctcagggagcagtggcagcttgtggatgtgatgaaagagctaaatcttccaaaataccgtcaggccggcaaaactttcacagtcaccaagtctgacgggcaaagtcttgagaagatcagtgatgactggacgaagaggaatgaccatcgtcatcatgcgatggatgctttgacaatcgctttcacaaggcgttctcatatcaaggtcctgaatacgcttaacgcgcttccgggttccgaagattacagcctgaaggagatggttacgaccgtgttgcctaatcgtaagcgtatattcacacctcctatgccgctcggggaactccgttccgcgttcaagtcggcacttgagtcaacactcgtttccatcaaggctaaaaacaaagtcgcgaccaggaatgtcaacaaatcaaaggtcaagaacggaacaatcgctgttgagacattgacccctcgtggacagctgcataaagagcaggtatacggccgccgaaaagtatatgagccattcgaggtgacggtcggaggcaagatggatgctgccatgattgcttctgtggcttcaagggccgaacgtgaggccttgaagcggcggcttgaggcgtttgggggtgaccccaagaaagccttcaccggcaagaactctctggagaagaatcctctgtatgtggacgaactccagtcagttgctgttccggccaaagtgaagtgcgtgagaatgaaggaggtatatagcatcaggaaggagatcgggccggatatcagtgtggataaggtcgttgacgggcgcgtccgtgctcttctcaaagccaggcttgacgagtatggtggagatccgaagaaggcctttgttaatcttgaggagaaaccgatatggatggatgagtccaaggggatcaaaatgaagaaagtgaccatagccgagaactttgacctttgcgctatccgggacaagagggacaaggatggaaaactgattttggattctgccggcaacacgattccgtcggattatgtcaatcctcgaaataaccatcacattgcaatctatgaagatgcggatggcaattatcaggagctggtcgtgactcttcttgaggcacttcaacgcaagactgccgggctgcctgttattgataagacgtaccatgaggatctcggctggaagtttgttttcagcatgaaactcaacgagatgtttgtcttcccgaatccggcaaccggcttcgacccttcagagatggatctgatggatccggcaaattatgcggcgataagtcctaatctattcagggtgcagacattgagtagtggtgattatcgtttcaggcatcatctggagacatctatagagagtgataaagaacttaaggatgtgacttggaaaagattaaaaagtctgtcctcactaaaaggtatcgtcaaagtccgcatcaaccacatagggcagatagtcgcagtgggggagtattgatatgataaagagaaccctttatttcggcaaccctgcctacctgtcattgagcaacaggcagctcgtggtggagaagccttcggacggagacctgccgttcggggacgggccgccgcgcaggaccatcccggtagaagatatcggggtgatagtcatagataaccgtcaggtcacgattacttcggccctgatggctgcgctcttggacaacaatgcggctgtcatcaactgtgacgagaaatccatgccggcagggctgctcttgccgcttgaagccaacacggtgcagagtgagcgtttccgcagtcagattgatgcatcccttcctctcaaaaagcagttgtggcagcagacggtgcagtgcaaaattgccaatcaggcggcggtgctcaaatatgtttcaggggaagatgctcgcaatatgattatctggtccggtcaggtgcggagcggggacagtgaaaatatggaagggcgggcagcggcgttttattggaagaacatttttccggaattgccgtttttcgtgcgtggccgttatgacggtgccccgaacaacctgctcaattacggctatgctgttctccgtgcagtgattgcccgtgctctggtatccagcgggcttttgcctacattggggatccaccattgcaaccgctacaatgccttttgccttgcggatgatgtcatggaaccgtaccgtccttatgttgaccggcttgtggttgatattatgtccgacgacaatctgtgcccgcagttgactcgtgagatcaaggcaaggcttcttggaattccggtgctggatgtagtgattgacggtcggaggagtccgctcatgctggcagccagccagaccacggcctcgctggcgaagtgttttgggggagagttgaggaagatcgtttatcctgagatgtaggctgtgtccaggcttagcgaatatcgcgtcatgtgggtgcttgtattctttgatcttccgactgagaccaagaaagaacgcaaagcggctgccagtttccgtaaagagttgatagggaatggtttctcgatgttccaattctcgatttatatccgccaatgtccgtctgtggaaaatgccggggtgcacatccgcagggtcaagggcctgcttccggagtatgggaaggtcggtgtgatgtgcatcacggacaagcagttctccactatggagctttttatcgggcggaagaacgcagaacttccgtcggttgagcagcaactggagcttttctgatgaggatgtcgtaggctcgcgcgaggtcggttctcattgctgcggtgttcgtaagatgcccccagtattcattggtcatttatgcaggtaggagcgtatttgcccagattcgctcctacctgaaaaggaagggtgccacagaacgccgtgtggggcaggtggggtgtctaggtgtgagcggaaagcccggaatcggctcacacctggcgcgtgtgtctggtacgggcggcccgccgtccgttctttgttcccgacgaaaccatgccaaaacaaaggaaacccgacacatcatgccgagtttccttaatcctattgttataggtaattctttgttttataggtctttgtgcagattgtactgttgtgacctatgacaaagatacaaaaagaaagcaattcacaacggtgcgctgctgctgacgttcacgggacgcactgttgtgacctatgacaaagatacaaaaagaaagcaattcacaacgcgaaaaatttagtcgctgcgtgtagaaatactgttgtgacctatgacaaagatacaaaaagaaagcaattcacaacacgaacgtctcaaagcggtcaatttcttttactgttgtgacctatgacaaagatacaaaaagaaagcaattcacaactatgccgccctcgtattccgccggataatactgttgtgacctatgacaaagatacaaaaagaaagcaattcacaactatcttggttcccgcgaggtcgaaataatactgttgtgacctatgacaaagatacaaaaagaaagcaattcacaactggagaagatttctgaagcattggcacgggactgttgtgacctatgacaaagatacaaaaagaaagcaattcacaaccacggatagaagaaatcgtctgcgacacgcactgttgtgacctatgacaaagatacaaaaagaaagcaattcacaaccggagactgatagaacaaggagaaacaaggactgttgtgacctatgacaaagatacaaaaagaaagcaattcacaacgaatacatagctaatagccggagagggaaactgttgtgacctatgacaaagatacaaaaagaaagcaattcacaacccaaaccgcccaaaagcgacaaaatgtaagactgttgtgacctatgacaaagatacaaaaagaaagcaattcacaacaagtatgagtacgaggaagtgctcgtgccgactgttgtgacctatgacaa

SEQ ID NO: 2362 - DNA, 16561 bp, synthetic construct
  misc_feature 1..16561: note = Synthetic
  source 1..16561: mol_type = other DNA
gcctttttagctctcgtctcttgcgggacgcaggaaaagatgggcatggaggcacctgtggactatgtgaatccgctgatgggaacggcgtccacctacgagctttcaacgggaaacacttacccggcggtcgccctgccttggggaatgaacttctggactccacagacaggacgcaacggggacggctggacatacacctattcagcgaccaagatcagaggtctgaaacagacccaccagccaagcccgtggatcaacgactacggctcgttctcgatcatgcctgtgaccacagggccggtttacgacgaggaaggacggcagagctggttctcgcacaaggcggagacggtcaaaccttactactaccaggtctatctcgccgaacacgacgtggtagccgaactcgcgcctaccgagagggcggcggcgttcagactcacctacccggaaaaggagatgtcgtacctcgtggtggacgcctacagcggcggacacgtggaggttctgccggacaggaatatgatcgccggctattcgacagcgaaccacggcggcgtggccgggaatttccgcaactggttcgtcgtggtctcagacacaccgttcgaggcccggacaactgacggccacatcgccatggtcgggttcaagacagcgaaaggacagaaggtcaacctcaggatcgcctcctcattcatcagccaggagcaggcggaaatcaatctcaaagaactgggcgacagaacgttggacgagatagcccaggccggacgagcgaggtggaacgaggtacttggccggatcgccgtggaggatgacaatctcgacaatctgcgcacattctattcctgcctttacaggtcggtcctgttcccacgtgatctgtccgagatcaacgcggacggcgaaagggtacattacagcccttacgacggagccgtgcacaagggctatctgttcgccgacaccggcttctgggacacattcagatgtcttttcccgctgctgaacctcgtctatccggacgagagcgtgaagatgcaggaagggctggtgaacacgtggaaagagagcggattcctgccggaatggtccagcccgggacacaggggatgtatggtcggaaacaattcagcatcagtggtcgccgacgcctggatcaaggggctgcgcggctatgacaccgacgagctttggaaggccgtcacccacggagcccacgccgtccatccggaggtcagttcgacaggcagactcggctgggaatattacgacagcctcggctatgtcccttgcgacgtaggcatcaacgagaacgccgcaaggacgcttgaatactcctacgacgactggtgcatctaccaattcggcaaggccctgggacgcggcgaggaggaactcgctccctacgccaaggccgcgctcaattacaagaacctctacgatccggagtacaagttgatggtcggaaagaaggccgacggctcgttcgagagaccgttcagccctctaaaatggggcggtaacttcacggaaggcaacagtctgcactacacctggtcggtgttccacgacccgcaaggcctgatcgacctgatgggaggggacgaagtcttcgccgggatgctcgacagcatattcacaattcctccgctcttcgacgacagctactacggcttccctatccacgagatcagggagatgcagttgatgaacatggggaactacgcccacggcaaccagccgatccagcacatgctctacctctacgactggtgcggccagccttggaaggcgcagcagcggatccgcgaggtgatggacaagttctacaactccaacttcgacggctattgcggcgacgaggacaacggccagacatccgcctggtacgtattctccgccctcggattctatcctgtctgcccggggtccaatgaatatgccatcgggacacctctgttcaggaaagcggtcatcacccggcctgacggaagcgtcatctcgcttgaagccccggagaattccaaagacaacttctacgtcaaaggcgtgagaatcaacgggaaagagtggagccggaactatttccgccatgaagaccttgcagaaggagcgaatattgtttatcttgtagggtccgagcctgacacggtgagaggaaccgcaaaggaggaccgaccatattcatacactaatgaaaaataaattatgaaacgcacactacttctggcttcggccattcttttgctcagcggcgcgctggcgcatggaaaagactatgagtcacagcgtccggcccccgagaaacggcttttccgctccgaggcagtcgagagcaagatcacacagatgcagggcatactgacgaacccccgcctcgcctggatgttcgccaactgctacccgaacaccctggacaccacagtccacttcggcaaggacgaagacggcaacttcaggacattcgtctacaccggcgacatccacgccatgtggctgagggactccggcgcgcaggtctggccttacatccagcttgccaatgaggacgagcatcttaggaatatgctcgccggcgtgatcaactgccagttctccctgatctgcatcgacccttacgccaacgccttcaacgacggcccgacgggcagcgagtgggattcggacctcaccgacatgaacccttacgaccacgaacgcaaatgggagatcgactcgcactgctaccctatccgcctggcctaccagtactggaaggtgaccggagacgattccgtgttcggcgagacatggctcaagtccatccaggccactctcaagaccttcaaggagcagcagcgcaaggacggcccgggcccttaccggttcgcccgcaagaccgaccgccagttcgacaccaagtccaatgacggccgcggcaaccctgtcaagcctgtaggcctgatcgcctcagctttccgtccgtccgacgacgccacgatcttcgagttcctcgttccatccaacttctttgctgtcacctctttgcgcaaggctgccgagatcctcacggatgttaatcacaacaagaaactcgcgaaggaatgcctcgacctcgccgccgaagtggagaaggctctttatgaatatgccgtcgtggaccaccccaagtacggcaagatcttcgccttcgaggtggatggtttcggcaacaggctcctgatggatgactccaacgttccgagcctcctggcaatggcctatctcggagacattgacatcaacgatccgatctaccagaacacccgcaggtttgtctggagcgaggacaatccgtatttcttcaaaggcaaggccggcgagggaatcggcggcccgcacatcggctacgactacatctggccaatgagcatcatgatgaaggcctttacatcgcaggatgacaaggagatcaaatggtgcgtggagaccctgatgaagaccgacgccggcaccggcttcatgcacgaatccttctataaggatgacgcaagcaagttcacccgcgcctggttcgcctggcagaacaccctcttcggcgagctgatcatccacctggtagacaccggcaaactcgacctcctcaactccatcaaggtcaagtagacatccgccacggtcgccggactacaaccgagagccgctgaaaagaaacacggcacggccgccgggcaacaacccgaagtattaaagtttgtccaccgaaaaaggctattcggtggacaaattggtttttcccctcggtttgtccaccgaatagccctttccgtggagaagtcggacacttctgaacacgggaatccctatcctactgcctgtcgaggaaggacttggcggcggcgagggctttggccgggccttcggcgaggactgtctcggaggtgaaggacttgaggattccggtcaactgaccgagttttgcctcgttcccggtctcctgccagcgggagcggaggatgcggactttctcgaagtcctggatgccttcgaccagtttggagaaacggacactgccgcggcctccagggtaaaccacgaaacagtctccggcgggccaggtgcggaaacgggcatcggtgagcggatcaagggtccaactgttgtaggcccagcggagatagccgtcgtaaccctcggcctgggcgaaccagccaagccaggcggcctcgtcaggattcgagatcacgaacatgttcggatgagcctcggcgcagcaggtgtagaaggtcgtggtcaggccaagttcctttcttttggtcttggcggactcagggaattcctgcttgccggaaaaagtctcgctaaaatcgacaatgtcataaatcaccggctcgtgatagtttcctgcgagagagatcttgaaagccggctcgacctttcgtataaggccaaggacagcctgcatcgactccaacggacgctcatccatcgcgatcatggtcttttcaaaccagcctttcgccttgagatgccgggcgaagtctgcgatgaaagccccccaatattcattgtactcctcacttccgggagcggcctgaaaggtcgccggcgaagatgtcgcctggtcgatgtagtcgaactgcaacgcccacggaatcattgagtagcagttgatctgccggtcgatgccgagggagaacatgaattccacccagcggtcgaagatggtgtagtcgtagagccaggtaccgtcgatgcggcggatcttggtgaccatcgagccgaacgcgtcctcggtctgaccgttccacggacggctcatgatggtggcggtgacggatttctgaccggcttcggcgagcatcctcatcaccggacgcatggcctcgaaatgagcctcactccaaaggggaacgttttcgtagcgcgccactgaatatggattctgccacagatccagatggaaagcccagtcacgggccggcggcaggacatgatcagccacggtcagttccacattgaggctgcgggccttggcattggaggacgtgactgtcagttttcccgaatattttcccggcctcgcatccgaaggaacgctcacggtcatccagaccggctgctttcgtccagccgggaccgtcatggaatcattgatgtcaagcacgtcggccacaagcacttccccccacttggacttgtcctcgcgggagccgcactggccgtacttggtcgtgtcgagcaagtcggagacaacgtagctgacgaattgtagacggatgttctccgccccgatcagagacttgccgttacgcaggtcagagactgacagccgtacatccttcaactcctcctccgacgacactacggcctgcgcgaacaccttctccccacgccatgcgacatggttgaaggcttttttctgaaactccagagacgggccgcctccgatgacacagtgcgagccggtcgccgcccagtccaacctaaaggatgactgcggttgcgccgccataagcacaggcagcacgaccgctatcgccaaagtaagaatattcctcattatgaatctttttgaatatacaaaaaaataatgttgccgcaggttttgcgaagatgcggcaacatattaccaaactatcgccttacaggcctaactgcttgaagaagtcgttgcccttgtcgtccacaaggatgaaggcagggaagttctccacacggatcttccagatggcctccatgccgaggtcaggatactccacgcactcgatgctcttgatgctctcgtaggagaggacagcggcagggccgccgatggagccgaggtagaaaccgccgtgcttcttgcacgcgtcagtcacaacctgggtgcggttacccttggcgatcatgatcatgctgccgccgtgatcctggaagagatccacgtaaggatccatacggttggcggttgtagggcccatagagccgcaggccattccttccggagtcttggccgggccggcgtagaacaccggatgatccttgaagtactgtgggagatcctcacccctgtcaagtctttccttaaggcgggcgtgtgcgatgtcacgggccacgatgatggttccgttaaggctcagacgggtggagacagggtactggctgagaagcttgcagatctggtccatcggcttgtcaaggtcaacgaccacaccttcgccctcaccggcattacgcagagactcagggatccaccgagtcgggttgtcgtccagtttctcgatccagacaccgtccttgttgatcttggccttgatgttacggtcagccgagcagctcactccaaggccgatcgggcagctcgcgccgtggcgaggcagacgaacgatgcggatgtcgtgggcgaaatattttcctccgaactgcgcgccgaggccgatcttgtaggcctcctgaagcacctgcttctccagctcgatgtcacggaaagcccgtccggtctcgtcgccggtcgtaggcaaagcgtcatagtaatgcgtggaagccagcttgactgtcaagaggttcttctccgccgatgtgccgccgatcacgaaagcgatgtggtaaggagggcaggccgccgtaccgagagtcttcatcttctccacaaggaaaggcacgagggtgtcagggttgaggacggccttcgtcatctgatagagataggtcttgttggccgagccgccacccttcacgacgcagaggaacttatattccataccctcctcagcctcgatgtcgatctgggcgggaaggttgcatttcgtgttgacttccttgtacatgtccagaggggcgttctggctgtagcgaagattctcctcggtgtaagtcttatagacacccttcgagagagcctcggcgtcatcgaaaccggtccagacctgctggcctttctcgccgtggatgatggcggtgccggtgtcctggcagaaaggcagtttgcctttggcggacacctcggcgttgcgcaggaagcgcagagccacgtatttgtcattgtcggaagcctccggatcgctaaggatcttggcgacctgctggttgtgggctggtctaagaaggaagttcacatccctgaaagcggcgttggcaagcattgtcaaagcctctggagccaccttgagaataggatgaccctcgaactcgccaagcgaaacgccttcgcctgtcagcttgtagtactcggttgtgtccggtcccagctggaacatcggagcgtatttgaattctgccatattaatgaaatattttagtgattatcagtcaatgtcctcaatcggagcggtcgcgccgccggagccttcctgcatcaggtagcgcttcatgaactcgttcaggtcgccgtccagcacgccctgggtgtcggctgttgaatatcccgtccgcagatccttgaccatcttgtacggatgcaggacgtaggagcggatctgcgacccccactcgatcttcttcttggtaccctcaatctcggcctgcttctcctgccgcttcttcagttcaatgtcatagagcctcgaacgcaggatgcgaagggcgttctgcctgttgtcctgctggaagcgggactcagtgttctccacgactattcctgaaggaatatgcctcacccgcacgccggtctcgaccttgttgacgttctggcctccgtggccgccggagcggaacgtgtcccattccagatcggaagggtttatctcaatgttgatggtgtcatcgaccaaaggatagacgaacacggacgagaatgtggtctgccgcttgccctgcgcgttgaacggggagatgcgcacaagcctgtgcacgccgttctcagccttgaggtagccataggcgtagtcgccctccacctggatggtagccgactttatccccgcctcgtcaccttcaagcaagtcgttgacagtcactttgtagccatttctttcgccccagcgcatatacatcctcatcagcatcgaactccagtcgttcgcctcggtgcctccggctccggagttgatcgtaagcacggctccgaggttgtcaccctccgcaccgagcatattcctaagttccaatgcctcaacgtcttcaacggcttttgaataggcctcctcaagttcctgcgtctcctctgtggcgacggtctcgtccgcgctcccgccgaggctttccttggcgaaatcgtacaggacatccaagtcctccacctctgtgaacgccttgtcaaaccctgtcacccaagactttacgccgttgagattcttcatgaagacctctgcggccttagggtcgttccaaaagtccggcgactccgtcttcttctgcagtgcggctacctgcccacgtttcccggggatgtcaaagacacctccccaacgtttccaaccgctgatgcagagcctcaatctgatcctttagtatcataatgccctccatttttaaattgttcctacaaatttagtgaatttatctctgattcgcatcttatccataatgtgttttcttgaatcaagggttaagcatggattcacatatatcttttcgcgaggtggtggagaacgccattgacaccccagattgccatctccaaaggcattttggtctctaaacgccaccgaaagtctctacgcgtccattttcggagacgttttcgccataaagcgatgccttcgcgaccattatttcacctctaagaacatttcaaacaaatcaaaacaacttctttgtgttttcgaggatagatgtcttttggaagaaggagtgtgccggtggcacatgactgatgaggaaagatagccagaccgaaaagacaatcaaagataaccaagttgttttttaaggattacttaatacaaggttttggacttgatcctggatccttggcctatagaaaacctgttaagaaaaagacgagaagcatatgctccccgccttaagtgttttcacaacggaataatccttattgtgaattgcttcagatgttgcaaatttagcgaaaagatgcgaatatccaaataattattctaaattagcggataaagactaagaagtctcgagttcaaccacgttataataacacgttataaataatatacctcgtatgaaaaccattcttggattagacctcggaactaccagcatagggtgggcgctggtaaaggaagcagagcccttctctgacgagaaatcagagattgtcagactcggtgtacgtgtcattccccttacagtggatgaaagaacgagttttgaaaatggcaaaagcattaccacaaatgcccttaggactcaaaaacgtggaatgcgacgaaatctccaaaggtataaactaagaaggcaggccttgatcgaagaactgaaaagtacaggatggattggtaatgacttcatattttcagagaccggtccagggtcaactttccgtacgttacggcttagggctaagtccgcatcggaagaggttactcttggcgacctggcgagaatattactacagataaataagaagaggggctacaagagttcccgaaaaatggtttcaagcgatgacggccaggccattgacggaatggccgtcgccaaggagatgtacgacaaaggattgactccgggggaatatgtctaccagcgtatgctcgaaggcaagtacgctattccagagttctataaatcagacttgcaggaggagtttgacagaatatgggcactccagaaatcctttcatattgaattaaccgatgaactttacaggaagctgtctgacaggaacaagagccagacctgggcgatctgccgtgacgaactgggcattcaagggctgaaaagtagtttcattgggaaagaaaggctaaaagaagcttaccgctacaggcatttagctgccacacaggaagttaatatggaagtcctgacctgtgccctacaagaaatcaacggctagaaagcctccctcagtggcctcctgagcaagattagcgatagaagtaaagaactatatctcaacaatttgaccgttggtcagatgctattgaaaagaattgaggataatcctaacaatagcctgaaaaacattgtgttctacaggcaggactatcttgatgagtttgaaagaatctggacggtacagtcgaaatatcacaccgaacttacccatgaactgaaaaagagacttcgggacataatcatcttctaccaacgtccgctaaagagtcagaaagggcttatcagtctatgtgagctcgaaaccaaagatattgaggtcgccattgatggcgtgaagaagatgaaaaacatcgggccacgagtatgtccgcgttcttctcctttgttccaggaattcaagatctggcagacaatcaacaacatcttcgtcaacggagccgcccttgatgacgaagacaagtccgtcatcgcaaaagagttgatgttcaaggacaaactcaaagacagcgatctcctcaaactgctgttcaagaccacaaagggacagagtgtcaatttcaaggaagttgacggcaaccgcacaatggcgaccttgatgaaggcatgcttcaagattgccgagaacttgggatatgacgacattggtctctccaaactctcttctgaagaccaaatggtcaggattgagggaatattcaaagagcagggattcaagacaggttttctccatttcgattcctctctggcctccccggaatttgagaatcaggactcctacagactgtggcatctgctatattcctacgaaggtgataagtccgcaagcgggaatgagtcgctcgtgaaatgcataatggacttgtgttcaatggatgagggatcggcaaagatacttgccacttgcacattcctccccgactatggtagtctaagtgcgaaggcgatgaggaagatcctgccatatatgaaagatggtcttgaatatactgcagcctgcgcgatggccggttaccgtcactcaaagcgctcgctgaccaaagaagagcttgacactaaggaatattccgaccgcctctcccttttgccgaagaatagcctccgtaacccagtggttgagaaaatcctcaaccaaatgatcaatgttgtgaattccgtcatagatgtctatggcaagcctgacgaaatccgcatcgaaatggccagagaactgaaaaagagtgcaaaagaaagagaggaggcacaaagggatattgcatcctcgactgcggaaagccagaaagtaattgagatactaaaaggcgagcctttcttcatccagtttccgacacgtaacgacatcatccgttaccgcctgtaccaggaactggcacagaacgggttcaagactctttatagcaacacttatattcctaaagacaagttgttctccaaagaatttgacattgagcatataatcccgcaagctctcatattcaatgactcctttgccaacaagacacttgaatcaagacagtgtaatcttgagaaaggaaaggagacggcaatggattatgtcaaatcgaaatatgatgagaccggagtccaggcatactgcgatagggtcaatggcctgattggcaaggggatttccaagacgaaggccaaatggctgttgatggagggcaaggatattccggaagatttcatcaacagagaacttcgtgacagtcagtatattgcaaagaaagcaagggagattcttgagtcacttgtcaaattcgttgtcccgacaacaggatctgtgacggcaaggctccgtgaagactggcagcttgtgaatgtgatgcaggagctgaactgggagaaatatgcccggttggggctcaccggtgtcagagaagacaaggacggacgcagaattccgttcatccaagactggacaaaacggaatgaccatcgccatcatgcgatggatgcgttgaccatcgctttcacacgtcgtcagttcatccagtatctcaatcacttaaactctaaaattgacgttgtctcttgggacaagaaggatctggatcttagggattatgaccttgaagacatcaagttcggtaatctaagcgccggagacaggtacggcattgtcaaggctttgcaggacaagttcctttacaaggacggcaacgataagtaccgctttgtcccgccgattcctttggatgagttccggagacaagcgaaagaacaattgagcgacattctcatctccttcaaggcaaagaacaaggtctgcacaagaaacgtcaatgtgacaaagaacaagggaggggcaaacaggaagactcaacttacacctcggggaccgttgcacaatgaaaccatctatgggagcagtctggaatatgtgaccaaagaaaatgagaagatcggtagttcgtttgacaccgaaaggattacgactgtctgcaagaaaaagttcagggatgcccttgcgcgaagactggaagagtttgggggagaccccaagaaggcttttaccggcaagaattcgcctgaaaagaatccgatatgggttgatgaacatcattcggagcaggtcccggccaaagtgaggacagtgactatgggacagcggttcactggccgaaagcctattgacgctactctgaagatagagaaagtcattgataaaaggattcgtgagattcttcaggctcgtcttgacgaatttgacggcaaggctgcaaaggctttctcgaatcttgacgagaatccgatttggctcaacaaggagaagggaatcgcgatcaagagggtgactgtgtccggtcctgcgaatccggttcccgtccggttcaagagggacaaggatggcaagccaatcattgatgatgccggtaaaacaataggggctgattttgtgactcctggcaacaatcatcacattgccatattcagagattcttcaggaaaattgcaggagcatccggtatcttttcttgaggcgaccatcgccaaatctcatgggatagacgtgattgaccggaactacaataaagatgaaggctgggaattcttgttcaccctgaaacagaatgagtattttgtcttcccgaattcagagacggggttcaatccgttggattatgatttgacggatcataggaattatgcggagattagtccgaatttgtatagggttcaaagtatttctactaacgactattttttcagacatcatcttgagaccacaagcgaaaagaataattctctgtatggaatcacttggaaacgtattaggaatgcatccgctcttgagggtctcgtcaaggtccgcatagacaatctcggtagaatcgtagccgtcggggaatatgattaagcgcacactctatttcgggaatcctgcctacttgtcactgaaattaggtcagcttgtggtctacaaaccggcctccggtgaggaaaagaaggaagtagttaagactattccggttgaggacatcgcatcggtagtgcttgacaacaaacagatcacaattacgcaggctttattggagagtcttcttaaagagaattgcgcggtcataacctgcgatttctcccatcttccgaccgggctgatgctacctcttgacggacacacgctccagaacgaacgtttccgctcgcagattgacgcttcgcttccgctgaagaagcagatatggcagcagactatccaatccaaaattgtcaatcaagcagcggtccttgaatatgccacaggcgaaaagcatccgaatatgcttaaatgggcgacttgtgtacgcagcggggatcctgataatcttgaagcacgagcagcggcatactactggaagaatcttttctctgacaatatcagaggtttcattcgagggcgggacgaagatgccccgaataacctcctgaattacggctatgccattgtccgcgctactgtagccagagctttggtttgcagcggcctgttaccgaccttgggtgtccatcacagaaacaagtataatgcttattgtctggctgatgacattatggagccatatcgcccgtatgttgatttacttgtctatcagatagtgaaagaggaaggtccgttggagctaaacacatctatgaaggcaaggcttttgtccatcccgatgactgatgtcagaatcaatggggtgacaagtccgctgatgatagcggcgactaccacttccgcatcattggctaaatgcttctgcggagaatccaagcaggtcatatatccgatcttgcaatgactagctcagaacggataagtcagtatcgtgttatgtgggttatggtgttttttgatctgcctaccgacacaaagaaggaggttaaagctgcgacggagttccgcaagcagttgatgagcgacggcttcgtaatgttccagtattccatctatcttcgtcactgtgcaagtgcggagaatgcggatgtccacataaagagggcaaagtctttccttccgcccaaagggaaagttggaattctccgcataaccgacaagcagttcgccgcaatggaactcttcaactcgcagaaatcagaaagtcttccagaagaaggcatccagttggaattgttctgaaaacccgcacgcccaaatcaaaaaatccggcaaaagccggattttttgattcttgaacacctatcgtaagtcgttgtacctcatcgttctacacaaatcctattgtgttcaaagaacgaatatacaaaatctgaaagcaattcacaacttcttcggcgaggtcaaagaggtgagcagtattgtgttcaaagaacgaatatacaaaatctgaaagcaattcacaacgggtcaggctttgacactgacgatgtggaattgtgttcaaagaacgaatatacaaaatctgaaagcaattcacaaccccccggggttggcgccttacgggggtgaattgtgttcaaagaacgaatatacaaaatctgaaagcaattcacaacatgctccgcgaggtacggcggcattgtcgaattgtgttcaaagaacgaatatacaaaatctgaaagcaattcacaacgcatcgatggtactccccggcgaggaggtattgtgttcaaagaacgaatatacaaaatctgaaagcaattcacaactaatcacaggctacgcgaacatagactaccattgtgttcaaagaacgaatatacaaaatctgaaagcaattcacaactcacacactacgactggcatcgtgaccccgattgtgttcaaagaacgaatatacaaaatctgaaagcaattcacaacgcgggagtacgtggaaacaacaaacgacacattgtgttcaaagaacgaatatacaaaatctgaaagcaattcacaacatcctcagaatctccgtggaaagaaagttcattgtgttcaaagaacgaatatacaaaatctgaaagcaattcacaacacagcgccagaagagtgagattgacgctctattgtgttcaaagaacgaatatacaaaatctgaaagcaattcacaacgaacaggtacgccaatatgattgcggccaggcggcgggtgcatgtgtagtggctgcggagcctccctcttctggaatgggttgactatctcgttaaggtcttaccacgagactacgaggctgtcataggcctaatctgcgtctatcatcaggaacgccttgtcagcatcactttcagtcccgactaccgccggatcagacgcgatccggacactccggaggaattggctaggattttcaggaaagattgaaaaagagttaattatttgaaattaactgttgaaaaatttgaatattgttagaattaatactatctttgccccagttaaagaaatgaggcatgaagtacaacgaattaatgagacaactgaaaaaggctgggtgttacgacacgggacgacagcagagcggacaccctctctggttcagtccaagaacaaacaaggtgttcaaggtcagcaatcacgggactgacgaagtggcaactgggacattggcacaaatcaaaaaggcagcgggaatttaattcccactgtcttacaataaaaatagagacagttatgagaaaggttaacgcaattattgaaaaggcatcagacggtaattacagcatctatatggatgacaatgatatgccttatcttgtcaccggaacagggaagactgtggaagaggcacgcaaggtgttcgaggatggttacgaggacatcaagaaatactatgctgaaactggagaaccattcgaagaggttgagttctgctaccagtacgacattccttccttccttcaggagtatgcatatctcatcacgctttcgggacttgaaaaaatcaccggtgtcaaccagaaacaactcggacactacatcagcggctacaggcatccgtccgccaagacagccaagaaaatcgaggacggaatcagaagattaggacaaactttttcgtctgtcaaattcgcttgattgcaatcggccttcgggccaagcgagtacttcatttcattttctttgacagtcaggcggccaggcatcacccaaatgccttgctgcactcgtaaaagtagacacggaggggtagaaaaagattgaatgagttatctttgtagttgagttcaggtcgt

SEQ ID NO: 2363 - DNA, 16515 bp, synthetic construct
  source 1..16515: mol_type = other DNA
  misc_feature 1..16515: note = Synthetic
tatacatgattctttttattaagccaaacttttccgcacttttttcatttgaattactctttccttaaaaaaattggctgtaattcaggatcaaataaagaaacaccacacaaacagttaaaaacacagtaaatcgtaattttacaacaaaatacatacaataaaatttgtgtacacaaaaaataattcgtaattttgtaatggaagtacgaataaaatctaaatagatcatcctatgataagagacttttgggtaaagaattatctttccattcgtaataagcaagaattgaattttgtagctaaaggtccttcttcggaacttgttacagaggtttcggaaggagtattcttgtataaattaggcatcttgtatggttctaatgcttctggaaaatcaaacatgctgatagcactgaatgaggttttccgtttgttggtactacaaaaatccgatgcaacccaaagaataaatggtagcataccttttgttctgacaaaggatgagccaactcagatgcatgtgtcattctatgcgaatagcatacgatatgactatgatgtggagttcaatgataaatatattctgaaagagaatctgtattattatcccaacaaggcaaaggcgttgttttatgagcgtatatttgtcagtgacaacctgcaggcagaaatcaaattcggctccagtcttagactgctcgttaagacccaggaaagtattcgcgagaacacattgaacaatcatagcgtgctgtctgtttgcatgaagacagctctgaaagaggatattgccccattcaacacgcttcatagttggattatggacaattatcacgatgtggatggtgatggcgaaaagggacttgtagaaatactaaaggttgcttatagtaacccgaaaaagtgtaagttctataacactatgcttcaaaaggcagatttgaacattttagaatatagacctatcatagaagaccgttttctgcctaacgaatttcgtgaacgcatccaaaaggagaatataccagaggaaatgaaggaggttttgctaaaaccaacttccgactctgtcacatttgtcaatcactctgttgatggagactttgacatccctctaagattgcagtcaaaaggtactcagaaatatatacgaattttggaggctttgtataatatgataacaagtgaccatgtgtattatcttgatgaattaggtgaggatttacactatgatctgttatactattatctcaatgtttttatcttcaactccgagaaatcgcagttgattataacaagtcaggaaacgacacttctctctcaggatctaatcaacgagaacagaggagttgtatggttcgtagagaagaacaaagagacagcctcttccgagtattcccgtggtgactcactcgggctgcataagaacctgtctctctataactcttatcgcattggtcgcttgggagcaaaacccgaattaggcagtatatttataaatctggaagattgatatgggaaaactacgacaaacagcacttatcttaggcgaaggtcctacggaattcttctatttcaagtctctgtgtgatgtattcaaacgtttgaccatcaaaccagactatcccaagcatacaagtataaaggaacttgatttgaaaatttcagagggtgtggcaatgggttacagtcacatcttctgtatcatcgatatggatacgaaagatgtagaaccagaacattcccaatatcaaaaactaaaggcaaaatacgacaagcctatcaacaaacccaagaaaggcatatactgcgaggtagagttttttgagacccaccgctgtacagagctgttcttcctctactatttccgttatacatctcgtccatacgagaatcaagaatcattgcttaaagatttgaataaatgtattgaataccggaaatccagagatttctttatcaataccaaagggttgcatgcttattttgagcggaacggaggcagtctgatctctgctatctccaatgccaatcgctctatggaagaaaagcaattgtgctacagagattatacttattcagaacttggacgcctgatgaaggggttgaaagaatatatttatggaaatctaagtcttaataaaaactaaacaattaattaacgtgaattcaacgaattgttaagtaatttgtaaagttggcgattagcgatttgctgtaactttatagtgttataaataacgtgagttctgtaaatatacatgattctttttattaagccaaacttttccgcacttttttcatttgaattgattttttgtaaaaataaaattgtttttctttcataatcaaataaaagaatgtaacttagtagtcaaaaactaaaaccgtatatgaagagaatacttggacttgatcttggcacaacaagtatcggttgggctatagtcaacgaagcagaaaacgaaaatgagacatcatcaatcataaagcttggagtgagagtaaagcctctcaccgtagatgagcaaaatacgtttgagacaggaaagagtatcacaacaaattcagatcgtactctcaaacgttctatgcgtcgtaatctgcaacgtcgcaaactacgtcgcaagaatcttatagaatgtcttaaggaaaacgatatcattgaaaatgatacgatactatgcgaagaaggtaataaaactactttccagacatatcgcgaccgtgcagatgccgcagtcaacgagatctctctcgaagcctttgcaagggtattgctcatgataaataaaaagcgaggctacaagagtagccggaaagcaaagtcagcagaagaaggacagctcattgacggtatggctgtggcaacggaactgtacgagcgcaatctcacgccaggaatgtttgtaacagaactgcttaaaaagggcaaacgctatgtgccagacttctaccgctccgacctcgtggcagaaatggagcgtatttggcaattccaaaaacaattccatgcagacatactgaccgacgacgtccgcaaacagttgaagaataagaaaaagcaacaaacagaaaatattttcctcaagaacttcggtatttcctctgcagataacaaagaaaaggacaagcgccgtcaggctttccaatggcgagccgacgctgtaagaaaagaacttacgcgagaagaactggcttatgtcattgccgatgtaaacggagccataagcaattcaagtggatatctcggcgctatcagcgaccgaagcaaggaactgatattcaatcatcagacagtaggtcaatacctcatggaaaggctcaacgccgacccacatttctctcttaaaaaccaaacattctatcggcaggattatcttgatgagtttgaaacaatatgggagacgcaggcaaaatatcataagcagttgacgcctgaactgaaaaaggagattcgagatataataatcttctatcagcgaccgcttaaaagcaataaaggcagtattgacgtatgctactttgaaaaccaccagaaaacaataaccgagcatggcaagacacgcacaaagagagttggcttgaaagtattgcctaagtcttcgccattatttcaggagttcagaatatggcagatactccacaatatagtcgtttcagaaacatcatcaggcaacaagcgcccgctatatcaggaagagaaagaactgctgtttgcagaactcaacataaaggagaaactcacgaagaacgaagtcctgaaacttcttttctctaagcctcgctcctacgatctcaactacgaggaagtagagggcaaccataccttggctgctatctattccgcttgccaagaaatcatatcaatgtcgggacatggagaatacaatttccagaaattgcctgccaatgatataaataaggtggtgtatggcgtattctccggtctgggcttcaagaccgatttcctaacattcgattcttctcttgagaagcacgatttagagaaacagccaatgtaccgtctttggcatctgctctattcttatgaaggcgacaactccaacaccggcaacaggagtcttattgaaaagatacgctcgattaccggcttagatccggaatatgctaacattttggctaatgtctctttacaacagaagtatggttctctctcagcaaaggcagtcagaaagattctgccttacatgaaagaaggatttaattacagcgatgcatgtgaaaaagcaggctaccgccactccgactcattgacacgcgaagaattggagcataaggaatataagaatcaccttgatctccttccgcgcaattctcttcgcaaccctgtagttgagaagatactaaaccagatgatcaatgttgtcaacgaaatcgtcaaagtctatggcagacccgacgagatacgcatagaactggcacgtgagctgaagaagagtgcaaaagaacgtgaacagatgtcaaaggatatacgcgaaggcactaaacgtaatgaggaactacgtaaagagatagagacaaagttcggtataaagaatgtcacacgcaacgacattcttcgctaccgtctctatcttgaattggcaccaaatggatttaagacgctctacagcaagacacgcattcccgaagagaaggtattcagtaaggagttcgacattgaacatatcattcctcaggcacggctcttcgacgattctttctcgaataaaactcttgaagcacgccagataaatatcgacaagagcaacaagactgccattgatttcatacgcgagcgttatggtgaaaactacacagaagaatacaagcagagtgttgaagatttgttaaaaagcggagctataagcagagcaaaacgtaacaaactgctgatgacagaagccgacataccttccgacttcatcgatcgcgacctccgcaattcgcaatacatagcaaagaaagcgcgcgagattcttctaaacatgtgcatgtttgttaatcctaccattggttccataacagatcgtctgcgtgaagactggcaacttatcaatgtcatgcaggaacttaactgggataaatatgatcgcctcggacttacagagaccataaccgaccacaacggtaagcctctgcgtcgcatcaaagactggacaaagcgcaacgaccatcgtcatcacgctatggatgccttggcaatagcattcacacgtcctgaatttgtgcagtatctaaataacctcaatgcccgcagcgacaaggcaggtgcaatatacgccattgaaaagaaatatctcgaacgcgacaagaacggtaagctgcgctttatcgctcctataccactcgccgagttccgtgcagaagccaagcggaaacttgaagaaattcttatctccataaaggcaaagaataaggtgacaacacagaatgttaatgtcatccgaaccagagaagggaaaataaaacgcacccaacaaacaccgcgtggacaactacataatgagagtatctacggtcacatacaacgctacaccacgcgcgaggtaaaggtaaacggttcattcgacgagcagatgatttcactcgtttcaaagaaagcatatcgcgaggctctactttcaaggcttcacgagtttgacaacgatccccaaaaagcattcacaggaaagaacagtctggacaaaacacccatttggcttgatcgaaaccatacatgggcagtaccactgaaagtaaagataacagagatgcaggacgaatatcctatacgcaaagatatcgcccctgatctgaaaattgataaggttatcgatacaggagtacgttctattctgcaacggcgtcttgatgagtacagcggcgatgcacgcaaggcattctcaaaccttgacgagaatccaatatggctcaacaaagaggctggtataacaataaagcgtgttagaataaaaggtattgcaaacgcaacagcattgcgatcaaaaaagaatcataaaggagagtttatatgcactgctgatggtaagaagcaggcagtcgatttcgtcaatacaggcaataaccaccacattgccgtattccgcgacgaaactggtaaactgcaggagtgcatagtttcattccttgaagtcacggaacgcaaggctcaggacttgcctgcgatcgacaaagactatcgcaaagccgacggttggacctttgagttcactatgaaacaaaacgaattattcgttttccctaatgaagagacaggctttgacccgtcagaaatcgacttactgaatcctgacaactacgcactgataagtccgaacctctaccgcgtccagaagttggcaacacatgattattatttccgtcatcatcttgagacaactgttgaagacaaggaaacactaaagaacattgctttcaagcgcattaagtcactcgcaaagcttgaaaacattgtgaaagtccgtgtcaaccacataggacaaatagtagaaataggagaatactgacatgataaagaaaactctctgtttcacaaatcctgcctacctgagccttaaggataatcaactcttgttgcgtctgccggaagttgagaaagaggattctctgcccgaaggtttcaaaaagacagccgagagaactatacctatcgaagacataggtgtagttatgctcgacaacagatggataacaataacatcaggacttcttgatgcactgctcgataacaactgcgcagtaatcacatgtaacagcaaaagccttcctgtcggattgttacttcctttacaaggcaataccgtgcaaaatgagcgttttagaaaacaaatcaatgcttcgctgcctcttaaaaagcaactctggcaacagaccatgcgacagaagattctaaaccaggagtctgtgcttcggcgcaacacaacgaaagagacacgctgcatgcgagtatgggcaaacaatatcaagagcggcgactcagagaatatggaatcgagagcagcagtatattactggcagaatctctttgccgaagacatcaaccattttgtacgcgacagagagggagtccctccaaacaatctgctaaactatggttatgcgatattacgtgctgtagtagcaagagcattagtatccagcggtatgttacccaccttgggaatacatcatcacaacaagtataatgcttactgtctggcagacgacataatggaaccatatcgtccgtatgttgatgaactggtaataaaaatcatgaaccaacacgacgattactccgaactgacaaaggaaataaagatggaactactcggcattccaacaattgatactgtaatagaaggagtacgtagccctctaatgattgctgtatcacaaactacagcatcattatataaatgcttcaacggtgagttaaggaaaatatcttatccagaaatgacctgataattatggagtacgactgttcacgatttagcgaatttagagttatgtggttacttgtattctttgatttacctacagaaacaaaaaaagaaaggaagacagctgctatatttcgcaaaaatctgatacgtgatggctttacaatgtttcaattctccatatatatccgtcattgtgcaagtaaagaaaacttagccgtacatattaaaagagtcaagtctttcctaccagattatgggaaggtaggactactcggtattacagacaaacaattcagtgatatagttctttttcacggacacaaaacaatagaaccgaatgcaccagggcaacaactggaattattctaataacaaaatagaaatatggaatccaagcagcatgcaaggactccatatttctttaagtcattttttctttttcaacatcctttgcaagtcactgaccttcagcttattactaatatcaagttgtctatgactatgcaaagatactaaatttaaagcaattcacaacggctttgttcagccacttatgggtagagaagttgtctatgactatgcaaagatactaaatttaaagcaattcacaacacatccaaagaattctcaacatctcgagaagttgtctatgactatgcaaagatactaaatttaaagcaattcacaactgcgcatagatttttaagttttgtgtgttggttgtctatgactatgcaaagatactaaatttaaagcaattcacaactacagcgacaatgcctatctgcgcggaaccgttgtctatgactatgcaaagatactaaatttaaagcaattcacaacgcgaacctgacgctcgacaagctgaccgtggttgtctatgattatgcaaaaatagtaaatttaaaacaattcacaacagatacgttaagaaaaatcatattcgcgatttttagcgaaatagaaaatcaaaaatgatgatttgctaatttcacatagcaaaaatcatgtcttcaggaagcaacgaaagcagaaataagctttattccgcgatttttcgccgaagaaacggtggttctttatgctgaaaacgagggttccatcggtaagaatcgtaggtttcagcctcaagaaacggcggttcttgaaattggttagtatttttgtcggcattaaaaacgtttattacactgattatcaatatattgtatctaataccgaaaataagcgtttttcgtcaaccaatgataacacgctggcgaatatcggctgtatgtatgcttagaatagcctttttgttgaatttattcgcatctatcgtaggggcgtgatttatcacgcttaagcctgttacgttgggcttattccgtagctctggagcgattatttgttttcacggagggaggcttaagcgtgataaatcacgcccttacgactgacgcgcttgttttccgtacgcggcggaacgtggtgaatcacgtccctacgctggcatgtgtcggatatttttatgaattattataccgaactatggaaagattctcaattcaaatcaattcataacacgacacgtgcatattgttatcagaagcgcttttctacctctgtccaattaatgatttgccaaagagctttcagatggtctgctctgcggttctgatagtcgaggtaataagcatgctcccacacatcaaatccgagcagtggcacaaggttctctttcacgggagtaccagcattagaatagttcttaattgaaagatgtccgtcagcgtctttcacaagccatgtccatccggagccgaagagcgatgaagcctgctttacgaactcctctttgaaagcgtctattgagccccatttttctgttattgcctttgccagtttacctttcggctcgccaccgccctttggcgagaaagccttgaagtacagctcgtggttaagcaactgccctgcgttatcgtatagactgccttcggcgccgagaataatctcctgcaggctcttgttgtcatactctctgccggcagtcattttgtttacgttgttgagataacctcgcacatgcttaccgtagtgcagttccaccgtctgcctactgataattggctcgagcgcatcaacggcgtaagggagttcgaacaatgtgaatcgcggactatcattttgtgcttttgctgtcaatgagacagccataagaaggaataaaagtaattttttcatgtctgattatttatattgttattatgatgtcacttgaaaatgacatgtacaatattacgattttttcttcaataatgtaagagtaacgttgtcggattacagttttttatacaaaacacacgtccttttatcattttctaatacatttattgactgttttccgtcgtcgtttatccaaaatcggtcgatagaccacggtgttgttttattgtcaaagaacaatagattccctactgatttcgcctgctgatatgctccacaagcagacgaaagcagtagggaatctattgacctatttgggattattccggaataattgtgaacttcaattcgcggtctttgtagtccacacggtactgtggcagtgtttccgcattatagctccaactgtctattcctcctacgccagccatttccgcatcaatgtagaggtttgtgaatggcgacttggtcaactgttccgggtgacgctggtctttctcgtcaccttcgtcgagttcgtcaacggtgaaatgaagtgcagaggcggtgaaagccttgtcggagatgaatgtcagaggtccttgtttccaccatctgatgcctgtctttgtgcctgtctcctgtggtctgacatacttccagaactgctcgtcggcagtctgattgtatattcctatcatctgaccggaacagcggtcactatagttctcgattggtccacgaccgtagaatttacttgtgtctaagacataaggcaactcaaataccattccgaagcgcagcatttcaggcatatcagctcctgccgttgtcgtcatcttctggcttactgtcagagcgccgctctcttctatggtatatgtcagcgtaagtgttgctttcacgtcgggcatatcatacactgccgtggtcacattcttctttgtcttcagcgacatcagtgtcatcttaggcgtacgccatacgcggagtctcttatgcagtccggcacccatgtcattgtcggtaactgcgcgccagaagttcggtttcagtgttccgccacctacgagcatttcctttccattgcaactgtaactctccatgaagcctgtctgcttgttgaacttcaccttggtctttgccttaaggtttgccttcatcgtgtgggcagcgagagcatagtcgtattctttaacgacaaactgctgatgtgccatcttctgtcctgtctttaggagcgattcatcattcttcagctcgtaatatacattaagaagcagttcgttaccgccattgcctttggtgtaattgaggttatactcgcgtgtctgttgtggtgcaatgtcaaggtcgtcgatagtgcctttatcgcttacggttccgtcgtcctgcaccagttcccaacgtaggcggtagttcttaaggtcgcggaagaagtattcgttcttcacgtccacgacacctttctccttatccttcagtgttgtccatatgctttgatactgatagcctatctcgtaagcctgcggcgtcattttgcggtcagcagtgatgaatccattgcagttgaagttgttgtcagacgcgtcatagtcattataatctccaccgtacataagtgtgcgcaccgactttcccttttctggcggaacgcttcctatgagagcctgatcaacgaaatcccagatgaatccgccttgaaaacgtttgttctgacgcactatatcccaatactccttaaagcctcctgacgagttgcccatagcgtggttgtactcacattgtatgagtggcttctggtcttcaggcttatccgagtctgcatacttctggcagtatgcctgcgatgcgtacatcggacagtatatatctgtgttcgcgcctttcaatgcgcgctcccaatgcaccggtcggcttgggtcctcggcgtgtatccatgcctttgtcttggcgaagttcggaccgtcggcagtctcgttgcccatcgaccatatcaccacacttgggtgattgaagtaaatgcccacattatgtttgttgcgctcgagaatctgcttaaagaacatatcggtttttgatattgccgtgtcctcatatccgaagctgtgcgactcctgatttgcttctgcaacgaggtacattccatattcgtcgcaaaggtcataccataccggatcgtcagggtaatgacatgtacgcacggcgttgaggttgaggctcttcattattttcaggtcctctatcatacgctctcgcgatactacatagcccgtacgtgggtccatctcatgccggtctgcaccttttatatatatagcctttccgtttatcagaaagcggtcgccttttatctccaccttgcggaatcctaccttctgcggcactacgctaagcagttttccacgcttgccgttttctatcttgtataattttgccacaagagtgtagaggtttggtgtctctgcagtccatttcagagggttagccacattaaactctccctccatattgcattccgctgtttttttctctttgttctctcttgccatcgacatcgtcatcaccgtattctgattagcgtcgaggagcgacagttcaaggtctacacttccttttgtcttagccacgaccttcagtattccgttggtgtagtcgttcacgagatcgggggtgatgcgtatgtctgtcagctggttctccttatcaagggtgtagaggtaactgtcgcgtgccacaccagagagacgccagaagtcttggtcctcacagtatgagccgtcgcaccatcggaacgtttggaaagcaaacagattctcgccaggtatcacaaagtctgtgacgtcaaactctgccgccacctttgagtcctccgtatatcctacgaactttccgttgacatacaaatacatattcgatgtcacagaaccgaaatgtgctatcacctgtttgccgtcccagccatcaggaatgcttattgtcctgcggtatgagccgacgtgattgtcctttatcggaggcagcggtggattatcctcgtagtgaccgcgccatgcaaaaccgacgttcacatagacaggatcgccaaatccgttgagttcccacatacccggcacgggcattgtcgtccagttgctgtcgtcgagatcagtcatgtagaagtcagccgggcgctcgtcagcattttccacataatggaatttccactgtcctttgagcgagagatagtttgccgaggtagtcttgtcgcctgccatagctttctcgagcgactcgaatgcaaagaaattcgtgtggataggatagcggttcacttcgttcacctgcatgtctttccattctgtccatgttggcgcattgtctgcaaaagcgcataaagcactgccgattagggcaatgatgatagtcagtttcttcattatatttataaactttaagttagcgataaaaagagttctttgcttgcaaagataatgaaaaaatctttgattatcaaataaattacgtatatttgcaataaaatagaagtgaaatgagaaaaataataccgtttgtcgtttatgccctcatcgctacagagacttttggcggtataagacaacataagcagccacttcccaaatacaaggacgccactgttcctaccgaggagcgtgtcgaggacttgctctcacgcatgacactcaaagagaaaatcggacagcttatgtgtccgatcggctggcatatgtacgacaaaaccgtggtgaagacaaacaaaggcaccaagtcgcatatcgtgcttagcgatgaatataagaatgtcatgactgacatgccacctggttcgctctggggtattcaacgtgctgacccatggacgaggaagaccctcgagaccggcatcgacgctacggagagtgcacagaccatgaatatgctgcagaaatatgccatagaacagacccgacttggcattccggtgatgattatggaagaggctccacatgggcatatgggcatcggctctacgtgttttcctaccggtatcggtcaggcatcaacgttcaacgtggagttgatgcagcagatgggcacagtcatcggacgtgagctgtcgcttcgtggtgcccacattgcatacggtccagttcttgatatctcgcgcgagcctcgctggtcgcgtgtggaggagacccttggcgaggatgcttaccttgcaggaatgataggtggtgcgatatgcaagggtgtccgtgcccagggcgtcataaacacactgaagcatttcgccgcttatggcatccccgagggcggactcaatggcgagcaggtgtcattgggttggaatcagttgctcaatgagtacatacctcagtttcaacaggctatcaacgacggcgccggttccataatgacatcatataatgttatcgacggcataccgtgtaccggcaacaaggaactgctgacagacttcctccgtggacagatgggtttcgacggtttcatcatatccgacctgcagagcatcgaggtgatgaaaaacaatctgcgcgtcgttaaagactataccgaggcagctgcaatggcattgaaggctggcgtcgacatcgatctgcatggcaatgcctacgcacatttaggcgaggcgctcgaccgaggtcttatcgatattaaccatatcgaccgcgccgtgcgtcaggtgctacgcacgaaattcaacctcggattgtttgaaaatccttacgtcgatgtcgcagcagcacgcaatgtgcatagtgccgaaaaccgtgaggtggcgcgccgcgtggctcaacagagcatcatcctactggagaacaacggactgctgcctttgagcaaggacataaagagcattgccgtaatcggacctaatgccgacaatcagtacaaccaacttggcgactacaccgctccacagtctgacgatgacatagttacagtgcttgagggcatacgcaacactgtgccgcatgcagagataaactacgtgaagggctgtgacatccgcgacactcacgacactgacatcatggctgccgttgcggctgccaagaaatcggatgcgacgattctcgttgtcggcggcagcagtgcgcgagatttcaagacgagctacgcttctaccggcgccgctaatgtcgagacagcgtctgaccgactgcctgacatggactgtggagagggttacgaccgcgccacattagatctacttggcgaccagttgtcactcctgcaggcgttgattgatgcgaaggtgcgccttgtagtggtttatatcgaggggcgtcctcttaacatgaaccttgccgcagagaaagctgacgccctcctctgtgcgtggtatcctggcgaacagggcggacaagctatcgccgacgtgcttttcggcgactataaccctgccggacggctgcctgtcagcgtgccgagaagcgtaggacagttgcctgtctactacagcaagcgtgtctctcacaactatatcgactctcccgctgctccactctatccgttcggctacggcaagagttataccaccttccactacggcactccttcggctcaggtcaatgccgacggcaccgtcaccgtgcgttgctcgctgaccaataccggcaataaggacggcgacgaggtggcacaactttatctctgcgacgaatacagcagtgtagccattccgcgtaagttgctcaagggcttccagcgtgtcagtctcaaggctggcgagacatgcaaactgagcttcaaactgggcatggaggaaatgtcaatatataatgccgaccgccggaaggtcgtcgaaccgggcacgttccgtgtctttgtgaagggcagttccgcaactgataaggatactccaacttgcgagtttgagattaaataatgcatagaaattccatgatatcagcaaagataaatagaaagtcttttttatggataatcagcagccttctcttgctgctgattattatttgggcggtgcttgtcttcatcgccttcggcaatgttaacgaccctcgcagtagcgtcaccgtggagcgtcaagactggtatgaggtgcagctgaagggctacgcgcagctctatttcactgccaccgaccgcaacaatccgtttaccgcactatctgaaaatcgcgactctgccatctatcgcaccgttgcctacggtcgttgggtcaataagcgctggtggcttcctgtgtcgcgaggcagcatcgtcgtggctttagacagtctcacacagcccaccgtagacccgaaaacggtgcttgcagctaatatcaagaaaggcgagaagcgtctccacgacctcgccgtcatgatcgacgatatggattactacttctccgtacactccgtgcgcgacgagggctatgagctggtcaccgactactacgagcatacactccgtgaggtgaaacttttgaacgatgtcatggcaaaggcgcgtcagtgtatggcgtcggactccgtgcagatagtgcatcgctcggtctgccgcgctcattataataacgagcatggacgtcaggttgtcgacacctgcagcatggtgcggttggataagaaaatacatactacgggcgacagcctacaatataccaccatcgttcaacttgcagctcgccgtactccgaaggttgccgcgagcgtgtcttaccgcaatgacagcgtgttaggactgaagactatatataaggtcgctttcaccacaccggcaatccccctcaatggtttcggactgaaagtgacaccagagaaaggtgtgcaagtgggcgaatggaaagaaggacgtttcctcggcgagcgtatgacattcagttcgcatcgtatctttggcattgacatatcgcgcttccagcatgagaagggaagaaaga

SEQ ID NO: 2364 - DNA, 16467 bp, synthetic construct
  source 1..16467: mol_type = other DNA
  misc_feature 1..16467: note = Synthetic
  variation 9895..9896: note = n is a, c, g, or t
taatgccgtatttatgggaatgggggagcctttggataactacgacagtgtgtcgagggctatagaggtacttacggccgactggggtttcgggtggagtcccaagcgaataactctcagcacggtaggtgtgttgccgttcctcaaacgctttcttgacgagcagaagtgccatctggctgtgagcctgcataatccatttccggatgagagacttgagatgatgccggttcagaaagcatatccgcttggcgatgtggtgtccctcatacgtcaatacgacttcagcgggcagagacgtgtaagtttcgagtacaccatgttctctggatttaatgacgataaacgccacgctgacgcgcttatccggatgcttcgcggactggagtgcagggttaatcttatccgtttccataagattccggacttcccttacgagagcagttcacttcgtaagatggaagagttcagagatagacttaacaacaacggcataatatgtacaattcgttcatcccgtggagaagatattctggcggcatgtgggatgcttgccggaaagcatacggaaaagctataaaaatctcttgcgcactttccgctgtcattttgctggtggttatggtcggagcacaggctgcttctgcccagacaaggaaaaatgcagcacctaaagtgtaccccaacaatcttactatggacagtgcgcagccgtctgtagatagcgtgttcttaaagcaaatgcgcacgaggatggcgcgtgtcagagctacagagcacagacctaccgtgggcctggttctttccggcggcggtgccaagggcgctgctcaagtgggggcgctaaagtatatcgaggaacttggtattcctgtggacttggtatgcggcacgagtattggcggacttttgggcggtttgtatgcgctcggatacaatgctgatgctcttcgttctctctttatgaatcaagattgggacaggcttctaaccgatgtggtggatcagaaatatattccgtattccaccaagatgtacaactccaaatatgttcttaccattccgttccagacagcgattgacctccttaatagcggaagacaagatagggaagagtacaagaaacagtctttcgtcagttcgcttccttctggatttgcatacggattcaatgtcaataatcagatctcaagcttaacagttggctatcaagacagtctgtcattcagtgcattgccacttccgtttgtgtgcgtggcatctgacatgataagctgtaaggccaagaattggggcagcggttccatcaatactgccctcagatcaactatgtccattcctgggctttttgacccggtgcgcacagacggtatggtgctgatagatggtggcactcgcaataatttcccaacggacattgccaaggcaatgggggctgatattatcattggtatcgaactttcagacatgatgccggggttcgatgaagtgaataatataggcgacatagtttcacagatgataagcatgcttggaacggatgcccataacaagaatattgatctccctgatgtatttatcaaaccatatcttccagagttcaatatgctgagtttcagtgccaaggcagtggatacgatgatagtgaggggctatgatgcggctaaggccaaaaaagatgaacttctgaaagtgaaaaggcgtgtgggcagtgtggcttcttccaaggatgatgcatctcgtggtgggaagcagttcaataacgctacggatatctctgtcactcctgtgacccttagcagcatagagtttgaaggcatttcagacaaggagtctaaatatctctctaagcttcttaacttcgaagtaggtgacaaggttgatagagccatgttggatgatgtcatgagccgtctccaggctaccaacagcttctcctccataacttattcgctgcttggacgcgaggagccgtataggctggtgttccactgcaagacctctccgtccaatagcataggtctcggattccgtatcgattcagaagagtgggcatccatcctgctcaatctgggattgaataccaatagcctcatgggctcccgtcttaatctgacagccaagcttggtcagaacatgaagttcgatgcccattactccttggatctcggatggatgcctaccatcaactttaatgcgagtgtcttcaggtattcgggaaatcttggtataggtaccgatgctcttaagtatggggtgtcttattggagtcatcgtgagcttctgtatctgaccgatgtgcgatggaagcgctccaatttcaagattggcctcaagaaccaatacaacaatgtggaccctaatacagtgttcggctccataatcagcagcagcctctctaaagacgctcttaggggtaattatatcggtgctttcctcaacggaaactattattcttttgacaataaatactatcctaccaaaggttcaagtctttctttctctgctaactatgattttatcaaaagcggtaatccgtcatttcacccgattgtcgctcttggatttgactggaagtcggtctttcgtataggaagtcgtgtggctatcatcccggatgtgcatttgcgcaatattttctctaccggtgatcttgtaggcagtgacggacaggtctacaacggagtgtccctgcttcactgcaactttatcggtggtagcatggctggccgttatactgacaatcaggttcctttcttcggaatcgataatgtacttatggctgacgagcacctcgctactgcgagcctggaagtgcgtgtcagtccattcaagaagttctttctctcggcagagggaggattcgtgcagtccagggatagttttgtggatatgttgagttcattttctccagatatttatgctgctggattgtcagcgggatacaatagcggtgtgggacctcttaaacttgatgtgcattggaatcaggtacacaagtggggattgtatgtatcttttgggtatgatttctagtttctgatatggatgataaggggaaaaaggttcttgactatcttcaggggatctgctccaagagggagtattgccgatctgatgttttaaggaaagctattgataggcttgatggtgaccggagtggcgcagaggagctggtggactccctggttaaggatagattcgtggatgacttccgttatgcatgcgcctatgcaagggagaagtcctttgtttctggatggggtccgcataaagtcagcactatgctgttatccaagcagatagaccgtcagaccatacaagatgcgctgtctgatatcgatgccgaaagagcttcggctaaactctccaaggtgcttgaggtcaaatggaagtctcttgtaggtgatccgcaggcaaaatacaaactgcttcgctttgcgctatcacgcggctatgactattcccaagtacgtcccctcgtggacgcgatgtgtggcgcggagtgacgaaaagaggagttgattgatttataaaagaaacagtgatgccgatgaaagaatatattcaagagaataaagagaggttctttgaggaattgttctctcttctgagaatcccgtctattagtgcgaagccggaccacaaaaaggatatggaacgatgcgcgcagaggcttaaagaactgcttctggaggctggtgctgatgaggctgaagtctatgcgagcaagggaaatccagtagtgttcggaaagaaagtgatcaatccgaagtggaagactgtgatgatttatggtcactatgatgtgcagccgccagagccgcttgagaagtggaaaaccgatccgtttgagcctgtaattaagcaggactctaccgggcaggatgcgatttatgcccgtggagccaacgatgacaagggacagctatttatgcatgtcaaggcttttgaatatcttctccgtaaaggcaaactgcatcacaatgtgaaattcattttcgagggagaggaggagatcggcagtccatctcttcccgactgggtcagaaaacacaagaagtggcttggtgccgatgtgattcttgtatctgatacgacaatgatttccgataaggtgccttcaatcaattgtggtatgagggggttggcatatctggaggtgacgctgaccggaccggacaaggatttgcactctggacattatggaggtgcggtggctaatcctatacagacattgtgcgatttgatatctgggctgattgacagtgacggcagagtcacgattcctgggttttatgatgatgtagtggaactctcaaggaaagatcgcgcgcagcttgcaagggcaccgtttgaccttaaagaatttgagaagtccgtgggtgtcagggctttgcgtggcgagaaaggctatactccacttgagagaataggcatcagaccgtgtcttgatgtgtgcggaatctggggtggctatactggtgaaggtgcgaagaccgttctcccgtccgtggctcatgccaaaatctcgatgcgccttgtaccgaatcaggacagtgccaagattactagactatttaagaaatatttggagaaaacggctccgagatattgccgtatagaagtcaaaccttgtgaaggaggagagggtttccttattccaatttcttctccttcgttccaggcggcatcaagggcaatggaggaagtttacggaattaagccggtgccaagtcgcggtggcgggagtattgctgtgcttgccgacatgcagaagattcttggggtggacccgctgctgatgggattcggccttgagcgggacacaattcattctccgaacgagagtttcttgcttagacagtttttctctgggatggaatccattgccaagttctttgagtattacgaatagattgcccactccaaagtggtgtccaggctgctggtttggcgataagcttatttgccggtatgtgttggaatggggcggagacggtatttgatgttaatgtgtccgtcgcattccattatgctgtcttgtgtaaatccgagttgcttgtatgcgtccccgccgtccgggtactctgtgtctgcataactcatgatgtcatccgggtggatatcagatataaaggcattgagcaatttgcccatacctcctgtcacgcgaagttccttcaaagaagcgtatcttatccattcgtacgagcggatgatatagccttccttattccatcttctcgcattgctgaatacagctacagctgcaagcgtcccttctttgatgtggctttctgatgcccctgtactgcgttctacgaaaagcccatagaagtaacggcctccagtgctgccaagtctgtggttggcattgagaaatgcagcggcttccggcttggttatgcgctttacgtgacaattacgggcaaatatcgtgtcaagggtgttcattgacgctcctcttcaagggctttgttgaaacactcacgacagagtggctcgtacacgtctttttctccgagtagcacaaggtctttgctcttggcgagccggtgggagtggttggcaaggttgccgcatttgacgcagatagcgtgaactttctgtacatcttcggctacggccataagcatagggatgggtccgaacgggacgcccatgtagtctgtgtccagacctgctacaatgaccctgattcctctgtcagcaagtgtctggcaaacctgtacaaggtcttctccgaagaactgtgcttcgtctatgccgaccacctgtatgtccggctctacgccaagcatctgtgatgcgctggtgatgggtgtggaggtgatcttatggaagtcgtgtgatactacttccacatcggagtatcttttgtctatcgctggcttgaagatggcgatcttctgattggcaaactgggcacggcgcaggcgtctgatgagttcctcggtctttccggagaacattgaaccgcaaacaacttctatgcagccggattttttgtgattttcagaaaacattatgtagatttgtatgattgcttcccgtatgggatagcaaagataagaaaatagaatgatggaaaaaagcggaacgggtgttttgtatatagtgcctactccagtgggcaatctcaatgatatgactttcagggctgtacaagtcttgaaagatgccgatttaatactcgcggaggatacccgaaccagttccgtccttctcagccatttcggaataagcggcaaacttcagtctcatcataagtttaacgaacatcagactgcggatgtgataagggacttgattgcttcaggcaagactgtggctcttgtgagcgatgccggaactccaggtatctctgatcctgggttcctgcttgcgaggagctgtgccgatgagggaattgaggtaatcactcttcctggggctacggcctgcattcctgccatagtttcttctggacttccatgtgacaggttctgttttgagggctttcttccgcagaaaaaaggacggaagaccattcttgatcagttgtctggtgagtctcggacaatggttttctatgagtcaccgcgccggcttgtgaagacacttgagcagttcgcggaggtttttggcatggataggcggtgctctgtggcgagggagatttccaaactgcatgaagagcatgttcggggaaacatggctgaggtgctggagcatttccgcaaggaagaacctaaaggagagatagtcgttgtggtggctggactgccgcagcaggaaaaacgagaacaccgaaacaaatataaaaactatgaagacgcatcttgctacacaactgaagaagttcctgaggaggcacctcctcacattaaagagtgaaccgcactcaaaggatgaaggtcatgggtcaacattcaagattggtgctgtttgccttgtctttcttgtaattggttttcaagcggctttgtttgtgaataaggctgccgttttacgtattgagagtctgcgggatcatccggatacggtgtatgttgtcaggggaattgacctagattctcccggggtggggtgccgggagttggacgttgactctggtatttccgggatggcgctccgagaagcagaagttggttctggctccgatagggttgatacgtttcgcaggtctgccgctcatagcgctgtggttcagagcgtcagggaacataatcgtaaggtggagaattttcgattcaatcccaatacaattagtgttgaggacttccagcggcttggatttagtgccaagcaggcgcaatcgatcgagaactatcgggccaagggaggccgctttcggagaaagagcgatttcgccaagtcgtttgtggtatctgaagaggtattccggagacttgaaccttatatagacatacctctgcttgatattaataaggctgattcagcggattttgatggacttcctggcattgggccttattttgctgccaagatggtggagtaccgggggaaactcggtgggtattcttatgcagagcaattgatggatatccgcaatcttgacgcccagaagttcgatgctcttgctgatctggtttattgctctgcaccgctgcctttccgtttgtggcagctcccggcggatagtctgcgttgtcacccttatatcgggggatggaaggaagctgaggctatcgttcttattcgggagaagtacccatctgattcattgaatgtaggccttcttcgtcgtgccggaatactttcgcctaagaactgtgatagacttgcaaagtgtcttattgcggaccctgattagggaccattgtttattcttctgcagtacgtcgtgtatcttcctcttctccgaatgcagttattgtaaaggcgggaatactctaaaaaacaacggagggaactaatccctccgcgatacgacgtgccgtagcacacgctaaccgttaccggctgatacaaaggtaatcaatttgcttgaatttcaaaaggttgcaagtagaagaaaaacatctgctcaaaataagaaccgtgcaagacaatccacaacactttcggtacggcagaaggtcatttttttgcacggaacggtctattcggccctatacgttttacaaaaaagacgagacgcaagcgccccgccttaagtgttttcacaacggaataatccttattgtgaattgcttcgttattgtaactgcaaagttaatcaattctgtcatatatgcaaacatatatgggaaatatccgtcaaatatccgtcaaattattcacggctctttcatttaagattccattgcagacctaaaaatgttgttattttatagcgggtgttttccagtccggtgcgttttttttgcccgcgcggttcacaattcacatggagatccgatgactggaagaaatgcttccggatgatgcgtattcctttggttttcagcaaaataagtgcttaaataaagaggtcgaatggcagatttttcgtaactttatagttaataatcaaagagttatgaagcaaatcaagccactcgaccaagtcattccgattgaagcgtatgcgcacaatcataccgcaaaagtagcaaataaattcggttcacaagacagtattctgtataatctgaaggaattctcctcatccgtgccggatttcagaagaacagacaaagggaatatccgtcacagactcgatgacatcatcatgctgatgatatttgcccgcgcctcgaagtgtgtcggcagggcggagataatggaattcggcagacacaatctcaagaaattccgccaattgggcatgctgaagaacggtgtgccgtccgaggcgaccctccaccgtgtggaacgcggcattgacgagctggcgcttgcggacaggatgcaggggttcgcggaggcgttccgccggagactgtacggggctgagggggacagggaaataatctgcgtggacggcaaggccgagcgcggcaccgtgctggacaacgggcgcagtccggacatcgtgtcggcgtattcatacaacaccggcatcacgctggcgaccgaggcctgccgtgagaaaagcaacgagatcaaggccataccgcgtctcatcgacaaaatcgacatatcggggaaaatagtcacggccgacgccatgtccatgcagaagtgcataatcgacaagatcagagagagcgggggcgatttccttatagagctgaaggcgaaccagccgtccctgcgctacggcgtggaagacaggctcaagggacacgctcccgtgtattcatacacggacgggccggaactcgggcacggcagaatcgaaaccaggacctatcgtgtctttgacggcctcgacatcatagccgacaaggaaaaatggggaggaaacatgacggtcatagaatgcgaatccgacacggtgaagaagtcgtccggtgcacagaccaccaaaaagaggctgtacgtgagcagtctgccgacagacaccccggcattgggctcgctggtgcgcagtcactgggcgatagagagcatgcactgggcgctggaccgcaacctgctgcaggacaggataaagcgcaagtcggctagagccgccagaaaccttgacaccattcagagaatagtacactcgctgttctccatatggaaaggactccggaaaaagagggaggacaagagaaaggggatggctgaactcatgagggaggtatcaacgggctttaccggactcttacgttttcttcgccaaaaatgacaaaaaattagattttgataaaagcataacttcttgacatataacgacaaacaaaatacccgactcgcaatgaatcgggtaaggggcaatatatcattacttatactttaaatgaaagagccgtgatannaatccttattgtgaattgcttcagatttacgcaaatctatgataataatgtgagacttcaaaatttttttatatatttatgcaaattaattgaaaaccactataatgaaaagcattttaggacttgatcttggtaccacaagtattgggtgggcactcgttaaagaagcggagaacgaatccgagaaatccgaaatagtaaaactcggagtaagacttgtccctctaaccgtagacgaaaggacagattttgaaaagggcaaaagtattacgaccaatgcggataggaggctgaagcgcggaatgcgtcgcaatcttcagagatataagcttcggcgcgaggctctgattgaagagctaaaaaaggagcattggatcgaggacggattctgtttctcggaagagggcccaggttctacttttcgtactcttgaaattagggctaaatctgcgtttgaagaagtttctcttcaggaactagcccgaatccttcttcagataaacaagaaacgcggatataagagttcgagaaaatctgattcgagtgatgatggccatgctgtggatggtatggatgtggccaagtatatgtatgataatgacttgactcctggagaatatgtctatgagagaattcttaatggtcagtatcgtattcctgagttctataaatcagacttgcagttggagtttgacaaggtgtggaatttccagaaagctttccaccctcagctatctgatgaactctatgaaaaactaaaggataaaaacaagtcacagacgtgggctatatgccgtgaaactcttggtatacaagggaaaaaaagcagttctacaggtaaggagcgcacaaaagagtcatattacaaccggcaattggctcttaggaaggaacttgatctcgaaactctgacttgtgtccttcaggatatcaacgggcagaaatcttcgctcagtggccttctcagtgcaattagcgaccgcagtaaggaactctaccttgcccatatgactgttggacagatgcttgtgagacgtttgcatgacaatcccaatgcgagcttgaaaaatattgtgttctaccgtaaagactatatggatgaatttgagaagatatggtccgttcagtcccagttccatcctgaacttacgcctgaattaaaaaagagacttcgggatataatcatattctatcagcgtccgttaaagagccagaagggacttgttaatctatgcgaattcgaatccaggacgttcaataaatgtgttgatggagccgtcaagaagataaccattggtccgagagtctgccctcggtcttctcctctatttcaagaattcaagatttgccagaccatcaacaatattcttattgatggtcaatgcttggatgatgatgagcgtgccgatttggtgtccgagcttacttatcgggacgggatgacggactctgaaattctgaggcttttacataagtctccaaaggaacatcgtgttaatttcaagaaagtggacggcaacaagacaatgagtgcgttgctgaaggcgtgtgaaaaaatcattaattctcttggatacgatgtggacttgtctaaagggcctgcaagggacaaattgtttaagatagaggaaatacttggaaaggaaggggttaaaacggacttcctgcactttgattcttctctttcatcgcccgcatttgaaagtcaggattcgtatgctctctggcatctgctttattcgtacgaaggggataagtcaacgagcggtgataaatcgctggttgataaaattaaaagtctgtgctctatggatgaggggtctgcgaaaattatggctggatgtgtcttctcttcggactatggaagcctgagtgctaaggcgatgaggaagattcttccatatatgaaagacgggctcgagtacagtgcagcttgtgcgatggcaggatatcgtcattctaagagttctctaacaaaagaagagcttgcaagtaaggaatatgtggatcatcttaagttgcttccaaagaatagccttcgtaatcctgtggttgagaagattcttaaccagatgataaatgtggttaattccgtggttgatgcctacgggaaacctgatgagatacgtattgaaatggctcgtgagttaaaaaagagtgcctcggagagggagcaggcccaaaagaatatttccgccgccagcaaggtcaatgagtctatagtggcgacgctgaagggtagtccattctttattgacagcccgagccggaatgatgttatcaggtatcgtctatgggaggaattgaagccgaatggttataagaccttatacagcggaacttatattccgaaagagagcctgttttcgaaagagttcgatatagaacatattatccctcaagctcttttgtttgatgattcatttgccaacaagactttagaggcacggtggtgcaatcttgagaagagcaacaagacggctatggattacgttttgtccaagtatgatgaggctggggtacaagcatatctggatagggttgatagccttgttaaagatggaatatcgaagaccaagatcagccgtcttaagatgaaagggactgaaattccagatgactttatcaatagggaacttcgtgatagtcagtatattgcaagaaaggctcgcgagattcttgagtcgatggttaaatttgtggtgcctaccaccggctctgtcaccgcgcgtcttagagatgactggcagttggtcaatgtcatgcaggaacttaactgggagaagtatagtaaactggggatgacttcgtaccgacaggatagagatgggcgtaggattccggttatcgaagattggactaagagaaatgatcaccgtcatcatgctatggatgcactcacgatagcgttcaccagacggcagttcattcagtatctgaatcatctgaatgctaagattgatgttactgacaagagtgatattgaacttcgagactataatcttgatgatgttgactttagcgcgaaaagtccaagagaccgttttggaatagttagggctttgcagaacaagtatctgtacaaagatgaaaaacagaaatatcgcttcgtgcctccgatgccgatagatgaactgcggatggaggccaagagacaactcgatagtgttttggtgtctttcaaggctaagaacaaggtctgcaccaaaaatgtcaatgtcatcaagagtcgtaatggaaataaaagatgccctcaacttactccgcggggccctcttcataatgaaactatctatggtaaaaaccttgagtatgtgacaaaagatgagaaggttggtagctcatttgatatggagaagattgctactgtgtgcaagaagtcttatcgtgaggcccttcttcgtcgtctcaacgaatttggcggtgatgcgaagaaagcgttcacaggtaagaatgcccttgacaagaatcctatctgggttgatgagcatcattctgctaaagtgccaggaagagtcaatactgtctctatggagccggtatatacgattcgcaaggctgttgattcgtcattgaacatagacaaggtgatagatagaaggcttcgggcggttctacaagcacgacttgacgagtatggcggaaatgcgtccaaggcgttctcaaatcttgatgagaacccgatatggctcaataaggaaaagggaattgctgtgaagagggtggcgatagacgaaagtgttattccgattcctattagaaataagcgtgacaaggatggtcagtttgttcttgattataagaataacccggtccagtcagattttgtaaagacaggaggtaaccatcatgctgctatatttttgactccttcagggaaacttcaagacgtggtggtgtcttttaatgaggctgttatgcgaaaaagccttggccttgaagtcgtagaccgcaattataaaaaggatgaaggatggcagttcctttttactctcaagcagaacgagtatttcgtgttcccgaatccggaagcaggcttttctcctaaggattatgacttgatggatcctgccaataacgctgtaattagtcctaatttatatagggtgcagaaaattgccaaatgtaattatatgtttaggcatcatcttgagactaatgttgaagaggattcacgtctgaggaatatttcatggataaatatacgtactccttctggccttgagggtgctgtcaaggttcgtgttgataatctcggtcgtattgtagcagtgggggagtatgattaagagaaccctatatttcgggaatcctgcgtatttgtcgctgaagcttgggcaactggtaattagcaagccatctgctggtgatggtaagtcagaggtcgtaaagaccattccgatagaggatattgccacggttgttctggactgcaagcagattactcttacgcaggctttgctagaggagttgctggaggccaattgttccgtgataacgtgtgattcgcttcatgttcctactgggttgatgctccctttgagtggacatacacttcagaatgagcgatttcgctcgcagttggatgcctcacttccgctcaagaagcagatctggcagcagacggttcagtctaagattgctaatcaggcggctgtattggaatacgcaacaggagcgaaacatcagaacatgctccaatgggcgggaagtgttagaagcggagatccggacaacttggaggctcgagctgcggcatattattggaaaacgcttttctgcgactgccttgagggatttgtacgaggaagacatgaggacagtcccaatgatttgttgaattacgggtatgctttggtacgtgcgaccattgccagatctctggtatgtagcggattgcttccgacccttggtgtgcatcaccgtaataagtataatgcttattgtcttgcagacgacatcatggagccgtaccgtccgtatgtggacaagttggtcttcgagatagtgaaggagaatgatttgtggattcttgactctggaatgaagacaaggctgctttcaataccgatgttggatgtgaagattaatggggttacgagccctcttatgattgccgctaccactacatcttcctctttagctaagtgcttcagcggcgagtctcgtcaggttctgtatccggtaatgtcctgcgtatgagagaaccggagcgcataagtcaatatagggtcatgtgggtaatggtgttctttgatcttcctactaataccaagaaggaggttaaggctgctgccgaattccgcaagcggcttgtgagcgatgggtttatcatgtttcagttttctgtttatttgcgccattgcgcaagtgctgaaaatgctgatgtccacattaggaggacgaaatcttttcttccgcccaagggtaaggtggggattcttaggataacggataaacagtttggggcgatggaactctataattctcagaaatcggagttgcttcctgaggagggagtccagttggagttgttttaggattgaaaatctgatcgatataataaaaaagttcggagcaattccgaacttttttattcttggacacatgctgtaagttgttgtgtttctttgtcttgcacgaactctgttgtgtccgaaggacaaagatataaaatctgaaagcaattcacaactgtgatgcagacggtgcggttttgattatgttgtgtccgaaggacaaagatataaaatctgaaagcaattcacaacggtgacggtcatacccataagaaccttccggttgtgtccgaaggacaaagatataaaatctgaaagcaattcacaactggaataaagaatagagcgccaacgaccaagttgtgtccgaaggacaaagatataaaatctgaaagcaattcacaaccaattacagcctcatctttggaattaaagagttgtgtccgaaggacaaagatataaaatctgaaagcaattcacaaccaatacttttttggcttgccccaagaggaaaagcagcgtagagcttctaaatattgtctaatgagaattgaagataaacgccttgaccgtcagtttgaatcagtatttaacagagcgaggcaaacttgttatactcttcttctgttgttgttcggtatttcccgttttttaggagaatgaaaaacgggaagccaacgccatattctgggctgccaatgaagataggctcgtagcattctgtgtcatcaagcgtccctacatactgaacgcccgcaacaatgtctcccatttggtctttggcgaatttcaacgctccttctgcctttttgcttggtttatcagccatattgtttgcaaagttagctttttctgcgaattgtgacgtacaaacgcattttgtgtatggtagtttttttcttttctgaactacttctagaaaggcgttttttaccttgcgtctgccgagaggggagtctgtttttaagataaaattccacacgagaaatatccttagggcgtaatgactgaatctctcgaaaatcgaccagccgaccatcaatatatagtgt

SEQ ID NO: 2365 - DNA, 16457 bp, synthetic construct
  misc_feature 1..16457: note = Synthetic
  source 1..16457: mol_type = other DNA
tgaatgggttgcttactatacgtctttcggaacatacagcatcaacctatcggctgtatgtaactgacgtttccggaaaaactgttcttgaagaaagcaaagcagtattcaataacggcattaataaaataaacactacaggttttgtgcctggtgtgtactatattcagttagtagataagtcgggtaaatcagcaatcaggaaattcgtaaaaatggattaggtttgattttcatggtgatagggtttataggggctggcctgttctcgggccggctttttgtttaactaataaaatcacttgcaaagtgctgaacagatggttatactatggctatcttttatatagtcatcaactatacaatggctacagtacagataacagctaaagtgaacgccaccgtaaaaaaggcgtttatgcaggctgcaaaaaaatacgaccttcctgccagcagcttactgtctatgctgatgcgcatggtagctgaaggcaagttagcccctgaaatcagcagggtacaatatgacgatacccataccgcattctatgacgacaaggatatgctgcctgtaaatgaacctatagaacaagtaatcggcgctttagaacgtatgtcataaacagcatgcaacaacgagaaaaatacctttgaaaactacctaaagcactgagggacgacatccttacgggtctgagagcaatcgtatcaggtcatactgagaggatgaacataaaaagaatggtgaatagaaaaaacgaatacaggcgaaaagtaaatgattggttaagggttatctatacagatgaaaacgggaggatagttattattaaaatctgaccgagaggggatatttataagaggcagtaagaaattataactaaatatgattttatcttttatccatattgatactatgccgaatatccaacttgataaaacgacattagaatatgtaataaaaatacttttaaggaacagaccgcctaaaaagcatgtagatgagaggatataccataatgggtacgtacaggctatagaagaaatcgaaaaactactggaagaacagtaagacgctatgcagactaatttgtaaattattttgatgggggtagctaataatattttactggttgctccaaatactcttgaaaattgaatgaatattcatatagtcgaacctatcaagctgtaataatgtgaaggacttacgatacattattttcttgtttatgctggccgccagggctgccgatgaggtccaaagcggctgagaaaatggaaacgagaaacgtttcaattccccgtgggaccgagtaacgagagagtaagtttgtaaaacatcactcacataaagtagcttggtaactgcgttatcaggctttttatattataacacatctttggaaaagcaatacccctttccaaccctggtactgtagttgaattaattttcaattatcacttgcaattgtacatattttatgtacgatgctatcaaatcaaatatgatttgtgcaagtggtaattgagttattgtattttactcgttaccacttgctgatgactatcgtcgaaagaacaagtatgaaagtatgcaccttttgttgggagttccattcccaatatatgaaaggtgtttcttttaattatgcaagaaaagaggcggtaacagggtgccgattatgtcagcaggttatgtgtcaggactgccaggcaagttctcaaaaggaattggaaggtgatgtgttagcggtgtactgactgacgatgtgccaacgctgcataacgcaggtacgaagattaaccacctggcataaagagtatgagcagatagccgaaatagcattagagaaatttaaagcaggtatccgtaaagagatttatcacctaacccaagcaaaacatgccgttagtgatagacacttataatgactactttttctacctgcaatatagaaggcgttgtgttccggctaccgtaaaagccaaccaactggcgttgcaatacttttcgttgttgtatggaaatactgacataaagaccctgaagcctacacatatggtgaggtttcacgaatggttgcataacagaaagaggttacaaaaaaatgagagaggtgaatacgactacctaagcaggtactccatatataaaattatggtgaaattaagagcatatataaaatggctcgaaagtgataacctgttatgagacttgacgccggttgacgtacctgtcggtgatgtgccgcgtcccattccgaaatatctcactaaagaagaactgaagaagatactggcgtacctggatcaacgcgtatatgaagtaagcacagatacgagcaaaactgaaaagtataacgcttatctctaccgtgcagtcatccggtttctatacacaacctgattacgtaacgctgagttaagaatgctcaaaatgcaggatataaatctcagtgaccttatcggcgctgtcctgggtaaaggtaaaaaatacgctgcgataacctttagtgaaaccgcaaaagagcatttaatgatgtaccacgctgtcagacgcaaaatgtttccacaggtaagttttcaatatgtttttacgccatacacatttgattcaaataagacttttaccgaacaatgactaaataagatggtcaagatgattggtacaaaagcagggattactacaaaaactaatacccatatctaccgccacacgctagccacgcatttgatacagtctgggtgtacgattgttcaggtaagggataaactcaggcatagttcattaaccgttacaaatatgtacacccatagcagcccttttgagcagatgtctttaacgaaagacattgataccaggattctgaatggtgtgacttagcttaggtttatcagatgaatagattatcaataattgataaaatgttgaaaaaaattatcattcctgttgcaatcgcattcaaaactgttactatgatttcactgtcaatatgaaatatgctttatagctgatttgtaaatgtagtgagtaggtaagaagtatcacccgtttgtcatggtttatacgcgctgttattttacatcttaatcattacagccatgacaaaagactaccagctagacattactcttaaagaggtactatgaacagaagttttttcggagagctataagattgcactcctggatgaatttgtaaataataccagccctaaagaacacggctttgtaaatcacgctcacggttttgtaacacaactgtttaagaacaataaacccttacccgcatcacagacttttgtaaaacgacaggtctttgtagtcagctacggtatgaataccggtagcgaggttaatggcgacagaccaagtatcatcttcaaagccgaccatagcaccaaatgagacgatataatcgtcatcccgctgacctctgcactccagcagaaacaatccgacaggtacgatgtgttggtgccaaaggacaatgacaataaactgttccagaactcttttgccaggattagacaaatgcgtgcagtatcgctcagaagagtaggaaaacaggtaggcactataaccgaccctaaagtaatacaggcaattacagcatgagcacaaatcatgctctgaatggaagtacaagaaaacccctctgaatagaggggccttcttgcattcaaatcattctcattaattgaggctacggacaccgtccgctaaatcatgtagccaccttatacagataatttcctggattgcaagagaaagttattgttaaacaaaaacgtaacgcaatgacaagtaaaacaataacaaaatggacacgcaaaccgcaggaaaaagaaggcagctacttctttgccggccagttctatactaccagtggcgtagctacggaactaaccgttgaggaaatcatggaaatctatgttgatgccaaaaactacgtctggcataacgatggggccgattacatctttgtctatacggacgaacagggccgcaaactctttttcattgacaacctgaacaaggaaatgatcgagagcggcgagtatgggccggaacatgattactgcacactgatgttcgcaagcgaatactaaagaaggtaaacaggtatacctggtgcagaaatcctttaggtaagtccgtccaaacgtgggcaagctaaaaaaaactcacattttgtaagcggctttaggaaaagggctgcacaccatttgttaaccttagctccctgttttgcagggggctattaataattttcattctcaacccaatctacagcattttcaaatcgcttcacatacttgtctaataggctttgtatagcggtttcgctatctgcaaatggtgcagagggtgtataaacagtcacttcgtttgcaagcctgcaatagtagtttatttcccaggtatattgcgcatttgcgcccaatagaattttatatattctgccttttatctttggcacatcattgtcaaaaatgtagtgtatttcctttatgagttcgtatttctctatcatgggattttttgcatccatataacaacttctttttgtaggaatgtaatttactcaaaaatgattatcttgttacctacaaacaaaaagtagaaacacatggaagcaatggaatacgagtttttattgcgcagggtctaccgctgtggtagaaactactcaaacggtgctgatgccgatatttacagaagcatggaacacgcacaccgtaatcttgaaacaaagacgttatattttacacaagacgaaagagagtatcagtttcagaaggcttttgcagcagttcgtatgaatgtccgtgatgctatcgaggctggtataaagcagattggctcaaaagaggctattgcacagttgcaagacttaaaagcaaaactaaccatgcgattttactcgaaagaggaactggataacataatagaacaagctgacgatatttttagagaaaatgggcttgatacagaatactaagtatttagcaaagataaatactcggttgttgtggcgacttctacagcatatatttcagcaacattggccaattcacttagcgggtagataatatcggttatttcaaagatataccctgtgttatctatatttagttcgaccttttctccaatccgaggtatatatgtagcgacaggctcactatgtagcgcaaaagatgtttctcccttgcgttttatcattaaactgaaattcttgtccatgttccgattattttaaaaattattaatgttatttagtaaagttgcaataattccagctatggaaggagaaatgccgaataaaaaagagggtgattacaaatttaagttacaagccgaagttgcagcaatgataagtgttgtaggcaaagatggttattttcctgtttttgcagtgggctttaatttagcattgacttttgtggtaattcagttattctaaccttttttataagtacaaataaaatgcagaatcagccttatgcgttttctactgacagaaattcggcgggaaatttggagaatatattaacagagatagaggcgtatgcagctacctgagatattttgttgttgtgtagttggctggagagattgaaggatagaataactcttgaaggggagaggcattataatgagtatagtgagaaagaaagaagagtattagctgcaatagaaatacttcttaattacgcagaaataagtaacgaactctcccttaatatcaaggacttacaattagtgtcacaatatatagtttcctacttcaagcaatttttgttcattgagaactaattgcgcttaccaattaaggcattcaatagcagtacggatagcactgttaacatcacttccgtcaggctcatctaaatctatctgccaacgatggtcgccgcggtcttgactggcaattactcgcacaatgttcctgctctcataaaagatgatgtgtacatgaggatatcccctttcataattgcctctgtcatctacaaaatattcaaaatctccattcgatttgtagcgtgaataaaactcatctaatccgttggcagttctcataaaacatatgtttttttaaggttagaatttatgcgtaattacccattcatcgttatagttatcccactgtcctatagctattagttgatccttttcagtaatccactcatgggtaggtcttgctttttcaagtacttttaaagctttaaccaaaacatccttttttgttggatgttttggaaagagagttattggaaaatgtaattcttttgaccaatcacaatcgttaccaccatcgaatcggaaaaggacatctgttttccaggtcataattgtctcttcttttttatgatgccacttacttgaggctatccaaaattgagaaacaaattgaggataccatgcttcgctcataataaattaaaaggtttaatatcaataacactatcaatatagtgaaaaatacgtcattttataagtttcattagtcttggtattaaccttacagatagtttacgcctccaatacccttatccctcaaccagccagttcgataaacgtccaataaggttcactaaacttgaaagtcgctccaatagcggcttttgaatagtagtatttgcttaattcaattgcaatttaataacccatttgacttgccactaacggcggcaacgccttgttatgtgccatatttattggttttcttctatatcaattattttgttgtcctttagtgtaaaactaattcgtttatacttcatgaccatttgagcttgtttttctttgttatctgtatgtggaaaatactttactcctattgtaatgtatggcaagcgaatatcccaggaagaccttatagtgaatttttttgaacataattcttggtttggagattttaaataatcttcaaattgctggataccctcagttctttcttttgtttgatgctgaacgcgcttttcataaactatagaattgtcaaggtttcttaaaattcctgctatctcattattgttgcatgaattaataaaatctctaacaatttttcgtggaattttatgcagctcatgtatttgctttttcttttccaggatatatttcttgaagtcttcatttactacgtcttgcattttgtaatagccaaaacggaatgcctcattttctgtcttatacagactgtcgttaaaaatttcatcatttcctttctcatagtttattctaaattcgttgagaagtagaaatcctttttcatccgttgacctgtttatgccattaactatgttgatgaaatagttttgttgaactccctcaaataataccgtgacttgtgggttaaatttttcaactacggtttctgagttttttattagaaacttggtttcatttaggggattttctattggtcttccccagttgtctgtcgaaagttctgactggtatctacagatttgtaaccttatttcttttcttcctttttcaagatcagttgtaaatttataatctgaaaaactatttagaatcttgtcgtcaagttcccattcctcatagtcgctgacaaactctatttcgtaatgattatcaaactcaaagatgtaaactgggaagcgaagattactattaataatattttgcctaacagtgtctatgtcagattttctgtttacaagtattttgacttctgtttctaccattaattggtgttttattaaatagccgtatagacacgactatagttattgaccataagcataagatagttttgatttcttacaatatactcttctaaagaactatattgagtatcgtcatagacaatactatcttcatctaaaaacacaaattggttagattcttctttatcctcgataaatacagtctttgagattgcatatcgaagccccattcttaaagcatccatttggttatctgggtcaagacgaactcggagcacctcgttagaaatttcgttataatcagtggaggtaaagagttttaacctgggtacacctccgaaagaaagaatttcacccacgtacacctctgtacgagtactttcataataatccacaaaaattttgaatcgtggtaaatagtccggatttcctttaatcaaagtataaaaaagagcagtgacaatagaatcagggttgtatatatcgacaagtaaccggaatttttttgaactcgtttgcaggtctacgatcaaatgatcaataaaggctgcccactcaggagtatgtatcaaacaatgctgacattccgtacggatttctttaattctttctttttggtttgattccgaaagtgcaacgaatttgtttgagctgttgccatcatgtccctttaactcttttaacaacagatcgtcgtcatatcttggatcgcttttgaatatgccatgccggtttattgacgttacctgccagttctggacacctataatactttcaaatttctcaccgtagccagcttctactgtatcagaatattgccccatttcaagagcagcaatgagaacctgttcgagataagagtgatattcatccctattttcaaactcattttcttccatatcaagatgacgggtaccttcaagaagggtaatgcaagacaataattgttccattgattgcttttgaaaagccacattaagggcatagcggtagtgcagtactttttcggttggagcttcaagttctatagtcacatagtcgccaaaatttgctttctgaagtttttgatccaaaatttcatgtgctctatggcatttttctttggtagcaaataaatacagtatttgagactgcataaaccttctggggtagtcaacagaacttatcggttgtacctcttctattctttctggtattttagtttgagcattgatgtaaatctttagacctttaatggcaaaaggagatttgaagctgctaaacgaaaatgccctaatgatttgatcccaatgagttgaaataacgataatccttatctcgctatgccgtgcgctatgctttacttggatgagttcagcatatttaaacacttcagtaaaggtctgccgcgcagttgaatcggatctcttaatttctattatgacaaaattgttcagcagatccttgcatagaatatcaataaacccacttgcacctatgtcgtcaggcagatagtactctttgctcaatacctgcaaaccccgttcaatgaattcggggttggcgaccagccagtcccgaataatatgttcgccctgcataccggtataattattttcagtatccaaacagattttgccgctgaaagatgcagttattgaatactcatcaataaataaacccgtttagagtatttcaaagataattaaatccgtcgtcctttccttttggtgcttttggctcttctgttattgaagctaagcgccctgttaatttcatccgctactggttaattatccagttcatctaaatacattgtataccgacgaacagggtcgtaaactctttttcattgacaacctaaacaaagaaatgattgagagcggccaatatggactggaacacgattactgcacactaatgttcgcaagcgaatactaaagaaggtaaacaggtatacctggtgcagatatcctttaggtaagttccgcccaaacgtgagcaagctaaaaacctcacattttgtaagtggctttaggaaaagggctgcacaccatttgttaaccttagctccctgttttgcagggagctattatattttctatgtaatagtctgcatccggcaatataaggaaatagaataaaaaatggtagggtgtttttcccgtattgcagttaacagattgattgggtattttggggaatgaaaaaagcccccgtttatagtcgagggcaactaaatgttttcacaacggaataatccttattgtgatttgcttcaaattagaatacaaaaataaaccatcaattcgaatatgtcaacagaggctaaaaaaaatcttggtcttgaccttgggacaacgtcaataggttgggcagttgttacagaagcagaacaatctacaattgaacgcgtaggtgtgcgagtaaatcctcttacaaccgatgagcaaacaaattttgaaaaaggtaagccggttagtataaacgctgagcggacacttaaacgtggtatgcgcagaaacctggaccgttatcaacttcgtagagataacctgattgagacattaaaagaacatcatctaatagatgataacacgattcttgcagaagatggtaaagctactacacatgaaacctggcagttacgggcactgtctgcatcgcatcaaataccattagacgcgttcgccaaagtcttgctggccataaataaaaaacgtggatataagagtagcagaaaggccaaagatcaagatgaaggacagataatagacggcatgacgatagccaaaagattgtatgaagaaaacctcacaccgggacaattagcctatcaactattgaaggaaggtaaaaggcatctccctgatttttatcgttcggacctgaatgcagaattggataaagtatggagtttccaaaaaagtttctatcctgaaattctaacgaatgaatttaaaaaacatcttgagggcaaaggacaacgtgctacctcagcagcgttttgggggaactacggatttaatactgtggaaaataaaggcacacgcgatgaaaagagattgcaggcttatggttggcggggcagagctccgcaacaacaacttagtaaagaagaagtagcctatgttattaccgaaatcaataacgatctccacaaatccagtggctatctcggcgcaatcagtgaccggagtaaagagctctattttaacaatgaaaccgtgggacaatacctatataaacaactcaaacaaaatccgcatacacgccttaagggccaggtattttacaggcaggactatcttgacgaattcgagcgtatatgggaagtacaagcaagctattatccgcaacttactgataaactgaaggaggaagtccgtgatataattattttctaccagcgaaaactaaagtcacaaaagggcttaattagtatttgtgaatttgagagaaaggaagttgaggtgaataaaaacggtcagaaaacaaaaaaaaccgttggtttacgagtagcaccgaagtcttcgcccttgttccaggagtttaaaacatggcaagtacttaattatctggagttaagaaataaaacaactaaagagatactaaaacctgacattgaagcaaaacaacagctatttaatgaattgaacataaaaggcaatttgccgataagttcaatcataaaaatattaggatataaaacaaaagaatgggaggcaaactatagtgtccttgagggtaatagaacagcttgttctctctacgaggcatatttgaaaatcttggaattggaagggtacgatgacgacctgttcaaattagccggaagcgacgagataaatatttccaaaattgataaaacaagcaccgaaatacgtcaaattgtacaaacggtatttgaacttttgaacatcaatacggctatacttgattttgatgccgaaattgacggcaaagcatttgaacaacaagcatcctatcaattgtggcatctattgtattcttacgagggggacaattcgataagcggtaatgaaaaattatatgaactgtttaaacaaaaattcggttttaaaaaagagcacactcagatactagcaaatgtagctttcagtgatgattatggtaatctcagcagcaaagcaatgcggaaaatctttccttacattaaggaactcacttatgacaaggcttgtttggaagtaggatataaacattccgcatcttcacttactaaagaagaaatcaacaatcgcccattaaaacctcgcttagaattgttgaaaaagaatgaattacgcagtcccgtggtagagaaaatccttaatcaaatggtgaatgtcgtaaatgctttgattgacgatgaaaatagtaagctgaaagcccagggcctgcccgaggattttcattttgatgagattagaatcgaacttgcgcgcgacttgaaaaaaaatgcgacagaacgtgccgaaatgtctgccaacatcaatgctgctaaaataagacatgataatatcgcaaaagcgttgcaagcagaatttgggattaaaaatcctacgcggaatgatattatccggtacaaactataccaagagctaaaaaacaatgggtataaggacctgtacaccaacacctatataccgagggaaatactatttagcaagcagatagatattgaccacatcataccgcaaatgagcctgtttgacgatagcttttccaacaaaacagtcgttttcagaaaggataaccaagacaaaggaaataaaacggcctatgattatatacttgaccagtatggagagcaggcggtaacagaatttgtaacacgcatcacccttctatttgatttgggcaagaaaaatacagaagagggaattaacaaagccaagttcctgaaactgcagaaacgcatgagtgaaataggcgacggttttatagagcgtgatttgagggaaagccaatatatagccaaaaaagcgaaaaacatgctgcttggcatttgcaggagcgtagtttccacaacgggtgaaatcaccgcaagactgcgcgaagattgggatttggtcaatattatgcaggaaatcaatatgcctaaattccgggcgctgggactcacggaaatgatagagaaaaaagatggtggagaaaaagaacgtataaaagattggagcaaacgtaatgatcaccggcatcacgcaatggatgccttaaccattgcctttacaaaacacaatcatattcaatacctaaattacctgaatgcccgtaaagataaagaccacaagctacacggcaatatcattgcaatcgaaacaaaagaaaccgaattaaaatatgacgatttggggaatcgcaaaaggaagtttaagccaccgatgcccaactttcgggtagtggctaaagagcatatagagcgggtacttgtttcgcataaagccaaaaacaaagtagttacaaaaaacaacaacaagactaaatcaaaaacaggtgaaaatgtgaaaggagaacttactccaagggggcagttacataaagaaactgtttatggcaagtaccgttactacgagagcaaggaagaaaaaatcggtaccaggttcgacggaactgttattaatatggtggctaatcccttgtacaaggaactattgctaaagagactgttagcaaataacaatgacccccaaaaagcatttaccggtaaaaatgcattgaataaactccctatatacttagacaatactcaacaagcggttgtacccgaaaaagtaaaactcatttggttagaagataattattccatccgcaaggacgtaactcccgaaaattttagagatgtgaaaacaatagacaagatattggatgcgggtgtaaaaagattattgcaaaagcgcttggaggcatttgataatgaccctaaaagggcatttagcgaacttgataaaaatccgatatggtttaatcaatccaaaggcatttctgttaaacgcgtaacaattagtggcgtaaaaaatgcagaatcgttgcattttaaaagggatcattttggcaatttcatattagataaaaaaggtagaaaaataccaagttcgtttgttagcacaagcaataaccaccatgtagctatatatcgcgatgcaggcggcaatctacaggatagggttatatcattatttgatgccgtacaattggtaaatgcagggttgcctataattgacaaacaatacaataaaggcattggctggaattttctgtttacgatgaagcagaacgaaatgtttgtgttccccaatgataaaacagggtttgaccctttagctattgatttgctaaaccccgacaattaccaactgataagccctaacttatttagggtccaaacaatttcagtggtaaaatatggaaataataccgtgagagattttaagtttcgacatcatttggagacattattagaagatagaaaggaacttcagggtattacctttcaacaattaaagagtttagcgcccttggaaaaaatagtgaaggttcgtattaacgctattggtcaaatagtaaaaactggcgaatattaaaaacctatgatcaaacgcacactatatttcggtaatcctgcatacttgaaaactgccaacgagcaaatggtaatagaattacctcctaccgataaagacaacggcggagaagtaatcgtgaagcaggcaccaatagaggatataggtgtgctgatactggaccaccagcagataaccatcacgcaggcactgctggccaggttgctgactaacaatactgcggtaataacctgcgatgcaacacatcaccccacaggtttgttgctgaacctggatgggaacagcctgcaaagccagaaattcaaggcacagttggaggccagcttgccattgaaaaagcagttatggcaacaaaccgtcaccgctaaaatacagaatcaagcagctatgttggcctatgagggtgttgacaacaagctgcttcagtattacgctaaagaggtgaaaagcggggatagcgacaaccatgaggcactggcggcgggttattattggaaaaatctgttcccggggtttcttaacttcagtagggagcggtatggccccccacctaacaatctgctgaactatgggtatgccatattgagggccgtggtagcccgcagcttggtaggcagtggactgttgcctactttgggtattttccaccgcaaccagtataatgcatactgcctggctgatgatattatggagccataccgtccatttgtggataaagtggtatgcggcatagtgagtatgaatggcatgtatttggatatgactccaaagatgaagcaacaactgcttggtataccggctatggacgtgatgataaacgggcaaaaaagcccgctgatgaatgcggtgcaacggacgactgccagtctggcccggtgctttgaaggaactgtgaggaggatagcctatcccataatgccttgatattacagcccgaatagtgcgaggctgaaacaatatgtataaccggctaaacgcataccgcatcatgtgggtacttgtcttcttcgacctgccgaccgaaacgaaaaaggacaggaagaactacaccaagttcagaaagttaatgcttgccgatgggtttcagatgttccagttcagcatatacttgcggcattgtagcagtaaggaaaatgcagatgtccacataaaaagggtaaaatctatacttccacccaaaggacatattggcgtgatgtgtgtaacggataaacaatttggtatgatggaaatattccaaggcagggaacaggtggacgtaccggagaccacgcagcaacttgaactattttaacctggtagaaataaaaaaatgggcccgaagcccatttttttgatcgtaaaaacaacctcaaacgtccgccagtaaagcgttttagcaataacagttgtcaaagacctaagttaccacataatttgaaagcaaatcacaactacgaacttagtatagttcgacttgtccaggttgtcaaagacctaagttaccacataatttgaaagcaaatcacaacaaaaagaccaccggggccatgcactgatacgttgtcaaagacctaagttaccacataatttgaaagcaaatcacaacggacgaaagtttagacagctacctcgatgagttgtcaaagacctaagttaccacataatttgaaagcaaatcacaactgctcaaaacagggtgccacaagaaaggaagttgtcaaagacctaagttaccacataatttgaaagcaaatcacaacgtcggaacttgtacagttcataccctcagcgttgtcaaagacctaagttaccacataatttgaaagcaaatcacaaccccaggcttcacggattattcagacgtaaagttgtcaaagacctaagttaccacataatttgaaagcaaatcacaacatagactgtcaagaatagagcattgctctagttgtcaaagacctaagttaccacataatttgaaagcaaatcacaacaaacactcgttttgcatttcggattaaatggttgtcaaagacctaagttaccacataatttgaaagcaaatcacaacacacccgaaagaacgcacgaaacgaacaaagttgtcaaagacctaagttaccacataatttgaaagcaaatcacaactattaccggaacgggccgggcgaaacattgttgtcaaagacctaagttaccacataat

SEQ ID NO: 2366 - DNA, 16433 bp, synthetic construct
  source 1..16433: mol_type = other DNA
  misc_feature 1..16433: note = Synthetic
cttcataggcaacccaattgtcaccatccctgaccaatatgtcaagcataatcagcacatcatcgaattgaaaaactgcttcataaagaacattgatttcatggtttgaaagtgcttcagcagtctcatttcttttttgctcatattgcgaaggtgaacgaggactcatatcaattcctccaggaaaaagttcacgtgcaagaaccccaacaccggtccctctcctgaattttgcaagttgtacggcactcagtttgtctctgagaaagggtctttttttatgcaggtaaagtgatttttggcattgctggctacgaataaaagtggattttgagagaaggtgttttgacataaatgggtcttatggtatttcagtttaaagcagctttgcaaaatgaactaagctgcaataaaaattaaataattgtaatatttcgtttttaaaggaagcaattgtcaggcaaaaacaatctggtcttcccttatcagcgtttggttaaggaatcgtcgcatcaattgcgcaatggcgagaacatccttttgacagtagttttttatacgttcaagatttttttcttcccagtagacattgccaaccatgctaccatcaatgtcgtcttttggagtggggatgttaaaaatggtcgttaacagatcgagcgaggtgtagcttttaaaatcaccgaacttccacaattccatggtgtcgagatgttttacctcccagggtttcttgcccgcaatttgtagaattactggcaactctatgccgttgataaccatgcgtctggcaatgtatggaaagtcaaattctttaccattatgcgcacaaagcaggtcgtctggattataataatggcgattgagcagttcagcaaattcctcaagaagtattttttcatcgtcaccataaaatgacttcaatctgaaatcggtaccgttaaaataaccgaccgaaatgacaattatttttccaaattcggcatatattccggctctgccatacagctctttgggtgttgactctttttctgttttcaactgtcttgcctttttattccaaaggcgctgcatcgcatcactcaggtcttcgtaatgctgttgcattggaactgtttcaatatcaagaaaaagtacttttgaaaggtttaaattgtagatcattttctgtttctgtttgtttggatgaaatgaattaatttagccaaagataaaaacaagatatcagcgatgcaaattcaaagagcagcttttgtgttttttttcttttccatgatgctgatcagttgttcaaagagtgcagataagcagattccggaaatcgaattcttgtatccaaaagatggcgcaactattacttctgacagcatctattttgaggtgcaaatcagggacgacaagaagcttgagcgtatcagactttctcttttaaatgaggaaggagtttctgttgtaaaccctctttttattcatgccatggcaatcgacactattatcaggcatgctttttatccggataacagtctgaataattcaattctaacgctgcatgttcaggttgaggatggtatcaatcaaaagaacaagtatctcaagtttaattattttccgccgactgattttataactgaagttcttttgctggaacatttgaacgacaatagcgctatctggaaactcgatcttatgtctgataaaatacataggaaggtatacttgcaaagagaagtactggcaatcagagcgattacaaccactgataaaatgtatttgatgacagcaaaaccctctgaaataatcgctctggatttaaatgactttgggcaggcttggacatacccatctttgtaccctgaaaaaatctttacagcgcttgcggttcgagacaacaatgttattatttctgatagagcaggcttgattcgtgttttacaaggcatgactggaaatgtagtcgtttcaacacccacgcagccagatacaattacccattttttatgtcagagtgaaaactatattattgcaggacaagaaactgtcagtgaaggaaagtatttcattggtatgtattataatgcaagcggattaatgtatcgaagagattttttggatggaccattgattggatatgctgagttggagcatcaaaatgcttcaattttagtcgtagaaaaggagaatggttttttaataaaaaggtttgactttttatcacagctttatcaagcagtatttacaagcgaggcttttcagccaactacaattgaattcattggcaatgacattttgttactggcttcaaaaaacaaaatctatcggtattacctaggttccaacgaactggaattgatatttgaaaattccgaatcctttgttctcaattacgacaagaaaaataaattgatttatattgcttttgagcatgaattgctgcggttggatatgaatggtgcaatcctgaaacaatttccagtcgaaatttcaattcttgatttcattattgttcaccgaaatagttgaaatgactgtaaaaaaaataattacagaggatcagtccatgagtctttttcatggtgaattgaatgaaacttatcattctacgcatggcgcaatcacggaatcgatgttaatctttattcaaaacggactcttacccttgctttccggaaaaaaaaacctgaatattattgagatgggttttggaactggcctaaatgctttgcttaccttaagttcagctcctgaatcttcaatttattataaaacgattgaagcttacccactcagtatggatgtaattcaccagttgaattatgcatatttacctggttttgataattatagagatgcattcaatagtatgcattcatcaaattgggaagaagacattagagtaaacgatttttttactttacacaaaaataagagtgacctaagagatttcaaggttgaaaaagagagatatgatttgatatattttgatgccttcagcccaaatgtgcaacctgaattgtggaccaaagaagtcttttccaaaatgtttgaatcaatgaaacccggaggtgtcttggtcacctatagttcaaaagggattgtgaaacaagcgcttagagataccggttttatagtggaacgtttgcctggcccacccgggaagcgtcacattgtgagagcagtaaggaaattctaatagaaatctaaagatatctggcctaagagattctttacattctatgcggcttttattatatcaaatggtattcttttgcaaatagttggctccaaatctggaaatgtaatttaaaaacattctaaatttcaagatagggcttttaaaggagaaaaacgctttacttttgctgtgaacaaattaacaacaggattttttgttccttgaaattgaatcactcatccaattttaaattcatggaaaatatcgtcaaacaaatcattgacaaatatggcagcgacagtaaccgtttaatggatattcttattgatattcaggaggagtttggttacataagccgtaaggccatcgaattgatggctctcacacttggaatttcacaggtcgatgttgaacaagttatcaccttctatcatttcttaagtgttaaaccaaggggtaagtatgccatttatctaaacaacagcgttgtatcttatatgtttggccgccaggcaatcaaagaagcctttgaaaaagaagtgggtacaactttcggcaaagttactgacgatggattgatcggactgtttgatactgcttgtattggtatgaatgatcaggaaccagctgcaatcataaacaataaagttttcacaaggcttactccttaccgtgtgcgtgaaatcgtacgccatatgcgtgaaggccgtgaacttgaagaattgagcaatgaaagttatggagatggaaagaaccagcatccagaacttaaagcaatggtatcaagcaatatacgccgaaaaggaatgatcctttccgatgattataagaccggaaaagttgttcaatcaattcttcctgaaatgtcaccagaagctgtaattgctgaaattaaacacagtcatatcagaggccgtggaggagctggttttcctactggtttcaaatgggaattttgtcgcagggcaaaaggggagaagcattatgtagtttgtaatgcagatgagggcgaacctggaacatttaaagacagagtaattctgaccgagaaaccagaacttgtttttgaaggaatggctgttgcaggctatgccattggaggcgaagaaggtattctataccttcggtatgagtatcgatatatgaaagattatcttgaatctgttcttgataagatgagagaacaaaatttccttggttcaaaaattggtgaaatagaaggttttgactttgatatccgcatccagtttggtgctggagcttatgtttgcggagaggaatcggctttgcttgaatctctggaaggcaaacgtggtgaacctcgtgacaaacccccattccctgttgaaaagggataccttaactttcctaccataataaataatgtagaaacttttgcaactgctgtcagaatcatcgaaaaaggtggagaatggtttactcagtttggaacggaagattcaacaggaacaaaaatcctgagcatttcaggtgattgcatgttccccggagtttacgaagtgaactggggttttaatgtggaagatatgcttgatatggttggagcttatgatgttcaggctgttcaggttggaggtccttccggaacacttatcgccaaagatgaatttcaccgcactttaggatattctgacctttcgacaggtggttcgatgattatttttggtaaacaacgcaatcttttgaaagaggtcgtacttaattttatggaattttttattgatgaatcctgtgggtcatgcagtacctgtcgtaatatgcctcaggtgatgcataacaagttattgaaaataattaacggtaaaggtgtgaaaaaagatctaacagatcttaaggaatggggtaagatacttttagcaagccgttgcggcctcggtcaaacagcaggaaatcctatcatcagcagtttgaaaaatttccaccatctgtatgaagatttgattcaaaaagacaaggaatttgatgagggtttcgatttaacagcttcagtaaaagagtcatgcaaattcgttggacgtgttcctaattttaaccaccactgatttaacaaactgaaaaatatttgatcatgagtaatctaataaaattcaagattgacggcgtagaatgcatggcagaggctggaacttatatcattgaagcagctaagaaaaatggcgtttatattcctacactttgtaatatgccgaatttgaaaccgaaaggttcatgtcgtatctgtactgtaaaaatcaacggtcgtctgatgacttcctgcactactcctgtagccgatggaatggaaatcgaaagcacttctgctgaaatcagtgaactgagaaagagcataatagaattgctttttgtcagtggcaatcacttttgtccctcttgcgagaaaagtggcaattgtgaacttcaggccttgggttacctttatcaaatgatggtgccacgtttcccctttgatttccctgtaaaaggtattgacgcatcttctccgaaaattataaaagaccagaacagatgtatcctttgcaaacggtgcatcaagtcaataaaagatgcagaagaccgatctttctttgctttccgtggaagaggcaaccaccttgaggttgttcttgatgctgaattagcttccacaatgactgatgctcaggcagaagaggcaatgagaaattgtccggtaggttccattatcgtcaaagaaaaaggatttgctatacctattgggaaaagaaaattcgatcataatcccattggaagtaatgttaaagtataatttaaggaggaaaatatcatgagtaaacctattttagcaactacttctttggccggatgtttcggctgccatatgtcaattcttgatattgacgaacgcattctaaccttgatagagctggtggagttcaataagtccccggtggatgatattaaaacttttaccaagcctgttgatattggtattatcgaaggaggctgctgcaacagcgagaatgttgaagtacttcgttcgttccgaaagaattgtaaaatccttatttctttgggtgaatgtgccatcatgggcggcctgcctgccttacgcaatggaattcccattgaagaatgtctgcacgaagcatatataggcggacctacggtgcaattgaatacagatcatattctgccgaatgatgatgagcttccaatgctgctcgacagggtttatccctgtcatgaaatcgtcaaaattgactatttccttccaggatgtccgccacgtgctgatcttatttgggacgccctggtagctttaattactggcgatcctttgaagctgccctacgaagttgtgaaatttgactaaactaaaccgtcgtaaatcatgtctaaaaaaattaccatagaacctgtaacccgtgtcgaaggtcacggaaaggtaaccattctaatggatgaacaaggaaacatccagcaaagcagattgcatattgttgaattccgcggatttgaacgttttgtgcaaggaagaccctattgggaagcgccggttcttgtgcaacgtttgtgcggaatttgtccggttagtcatcatctcgcagcagcaaaagctttggatgtaattgttggcgcaggtaccggagaaggattgacgcgtactggagaaaaaatgcgtcggcttatgcattatggtcagtttttccaatctcatgccttgcactttttccatctcagtgctcctgattttctctttggagttgatggtgatccggccatccggaatatcataggtatagcactcaccaatcctgcattggctgttcaaggcgtaatgatgcgtaaatttggacaggaaataatccgcgccacagccgggaaaaaaattcacggaaccggagccattcctggtggaatcaataaaagcctttcaattgaagaacgggatgagtttttgaaaggtgctgacccgctcaatgcggacaagatggtatcctgggcagaagaggcactggatttcttcaagaaatactattttgccaataaagattttatcgacaattttgcgtttttcccaagtaatcatctgagcattgtcagaaaagacggtgctcttgacttgtacaatggggtgcttcgcgctgttgacgctgatgggaagaaaatactcaatgatgtagattgccaggaatacgccaattatattgaagaggaagtgcggagctggagttatatgaagtttccatacctcaaagaatacggaaaagaaaaaggttggtatcgcgttggcccacttgcccgtttgaatactatcgatttcatcccaacaccactggcacaggctgagttcgaaaaatacaaagctttgacgaatggaaagccaaataaccattgcttgcatatgcactatgcccgcttaattgaaacacttcatgcagctgaaatgatccgcgagttgctcaacgaccctgaaattatgggtgatgacctcgttacaaagggccaaaaaattaaagaaggtgttggtgttatcgaagctccccgtggcaccttattccatcattaccgcataaatgataatgatcagattgaaatggctaatctgatcgtatctaccaccaacaacaatgagccgatgaaccgttcggtaaattttgttgcaaaaaaaattatgacaggcaaggagataattactgaacctatgatgaatgcagttgaagtcgcaattcgtgcttatgatccttgtttgagttgcgctacgcatgcattgggtaaaatgccacttgaaataacattacttgatcacaacgaacaggttattgatcgaaaaagatcccattgagaatgacagattcagataaaatactgatttatggatatggtaacccgggtcgtcaggatgatggtctgggtgctgcttttatccagaaagtagatgattttatcatacaaaatactttacatcatatcgttaccgattgtaattatcaattgaacattgaagatgctgatacggtatcaaaagcaacggctgtggttttcgtagatgcatcacaggaagaaaatattgaacacttctcattatcggaagttgatgcctcagacgcaagggttgaattttcaatgcatgcagtatccccttcatttgtaatagatctttgcagaaaaatatatggtgttacacccatagcctggctgattcacatcaaaggatacgaatgggattttaaagaagaaatgtcggaaaaggcaaaagaaaaccttgaaatggcatttgatttttttaaaccttttcttttgacgaaacagccgttgactcttatcaatgcattgacgacagaaaattaaagaatttaaaataacagaaaatggatttatcaacaacttatctcgggttaaatttaaagaatcctattgtggttagcagttccaagctgaccggaaacattgaaaatgttaaggcatgtgcaaaagcaggagccggggcaattgtacttaaatcactgtttgaagaacaaatcaatgccagaatcgaaacaaacctgcgtaagaatgaactttatttctggtatcccgaagcatccgaatttgtgatgaacatatcaaaaggggctggcgttgaggattatcttcgtcttatcacagaggcaaaaaaagctgtatcaattcctgtgattgcaagcgttaactgtgtgagccctgttgggtggactcattttgctgccaagcttcaggacgcgggagcggatgcaattgagcttaatattgccattttcccgtttgatagaaatgtatccagtcttcagatagaagatacttatatagaaattctgactagtgtgaaggaaagagtgacgattcctgtatcagtaaaaatgggatcgtattttaccaacatctatgcaatggcataccggttggcagaagcaggtacggatgggcttgttttattcaatcgtttttacaaccctgatgtggatattgccacagcaaaagttgtgacggacaatgttttttcgaatccggatgaaaagtcaatctcattgcgttggatcgctcttcttacagcaagcggtatcccgacagatattgctgcttcaacaggcatccattattcaataggtgttgctaaacagcttcttgcaggtgctaccgtaacgcaggtttgcactactttatatcaaaacggcattccatatctgcgtgaaattgtgaatggtctttccgactggatgaagaagaaaggctatagcaacatagaagacttcagaggtcttgtaaacaaatatcctgaaaacactgcaggttttgaaagactacagtacatgaaaaagaactttgaataacatttttttatattattttttttttgccgcaaggcccgaccaaattttttttgagtatgatcccggagacttttatagtcttcgggattttttgttggagtgggaagatgatagaatgttagaatataaatcgaactatacaatatcatcatttttaaatgatcattttttttacaaataataaaaaatttatttatctttcgaacttcaaatcatcggctggttgctgcataaaataatgggcggaattattgatgaacaacaaatagtgaccagatgatactattacaatgtatggcgctgaatgcgattctgaaaatacaacacgctgaagtgttgtggagtatttttttatgctcagaagtttgctattggattatcaacaaaaaaaaggcgagttaccccgccttaaatgttttcacaacggaataatccttattgtgaattgctttagattgtgatgcaaatataagatcaaaaactcaaaagtcaatacaatatgaaaaaaattttaggacttgatttaggtaccaacagtattggttgggctttggtaaatgaggcagaaaataataccgaacaatcttcgatagttaaacttggagttagagtaaatcctttgactgttgatgagcaatcaaattttgaacgaggtaaaagcataactacaactgctgacagaactcttaaaaggagtatgcgtaggaatcttcaacgatataagctccggagagaaaaccttatagaaattcttagaattaatggccttgtaagtgatgatactactttttcggaaaacggaaataggagcacttttgaaacttacagactaagagcgagagcagcaacagaagaaatttcattgtcagaatttgctcgtgtattgctaatgatcaacaaaaaacgcggatataagagcagtcgtaaagcaaaaaatcaagaagaaggacaattgattgacggaatgggtattgcgaaaaaactttatgatgaaaatctgactcccggtcagttagttttagggttacttctcgagaataaaaaacatgtacctgatttctacaggtcagatttaatatccgaatttggtagggtgtggaactttcagtcgcagttttatcctgaaatatttacaaaagaattcagaaatgaaattgaaggaaagggacaaagagttacctccgcagctttttggaaaaagtttggttttaacattgctgaaaacaagaatactagggatgaaaaaaggttacaagcctataaatggagaagtaaagcaatagattctcaattactaaaagaagaagcagcgtatgtaattactgaaattaataccaacttaaacagttctagtggctatttgggctcaattagtgatagaagtaaagaactttattttaataaactgactgtcgggcaatatctaatgtcacaattggaaatgaattctcatacccgattaaaaaatcaagttttttaccgccaggattatttagatgagtttgatgtaatctgggaaaagcagtcaacatttcatgagaaacttacacctgaattgaaacatgaagtaaggaatattattattttttatcagagaaggttaaaaagtcaaaaaggtcttatcggtttttgtgaattcgaaaatagacaaattgagatcttagttgatggaaagaagaagaaaagaacagttggttttaaagtgtgcccgaaatcatcaccattatttcaggagtttaaaatttggcaaattctcaataatcttgaagtatttgaaaaaaataacaataaaagaagactattggatcaggaagaaaaagatttattattcaaagaattgactctgaaaaataagcttacaaaggcggatgtattaaaacttttatttgctaacccaatagaacttgacctgaattataaagagattgaaggaaatagaactcaagcagtattatttgaagcttacttcaggattattgaattaactggtcacggtgagttcgatttttcgaaaatgaattatgctcaaataagttcaactgtaaaatcaatttttaccggattaaattataatacagatattcttttctttaattcagaattagaaggaattgaatttgaaaggcaagcagcttataaattctggcatttgttgtattcttatgaaggagacgattcaaaaactggtaatgaaaaattagtaaataaaattactgaattatttggttttgagaaggaatacgctgtaattctggcaaatgttagtttccagcaggattatggaagtttaagttctaaagcaattcgaaagattttaccctatttaaaggctggaaatgattttagtgaagcttgtaagtatgcaggataccggcattctaagagttcgttaacaaaggaagaactggatactaaagtcttaaaagataaacttgaaatcttgcctaaaaatagcttgcgtaatcctgttgtagagaaaattattaaccaaatgataaatgtggttaatacagttgttgatgcttatggaaagcctgatgagattagaatagagttggcacgtgaacttaaaaagagcgcaaaggaaagggaagatctaacaaatgctataaatattgcaacaattgaacatgagaaatatcgtgcaatccttcaaagtgaatttggtatttcgaacgttagtagaaacgacattatacgctacaaactttatcttgaattagaatccagagggttcaaaacgttgtatactaatacatacattgcgcaggaaaagttgtttagtaaagaatttgatattgaacatataatacctcaatcaaggctttttgacgattccttttcaaataaaacaattgaaactagggcggcaaatattgataaagggaactatactgcttatgaatatgttttagcaaaatatggccaaaatggattgatagaatatcttgatcgactagaggagttgtataaagctggaaaaatttccagagggaaatataataagcttaagatgaaaggtgaagatattcctgatgactttattgcccgcgatctcagagattcacaatacatagcaaaaaaagctaaagcaattttagaagaattggttaaagaagtaatttcaactactggttcaataacggatcgattgagagaagattggcaactgattgacgtaatgcaggagctgaattggggaaaattcgaaatgcttggcatgaccgaaacaattgaaaatagagatggacataaaataagacgtattaaagattggacaaaaagaaacgaccatagacatcatgcaatggatgctctaactattgcttttacaaaacgaagttttatccaatatcttaataacctaaatgctagaagcgataaagcaggaagtatttacggaatagagcaaaaagagctgtatcgtgatgaaagagggaagttaaaatttaaaccgccaatacctttaaatgattttcgatatgaggcaaaaaaacatctggaaaataccttgatttcgatcaaggctaaaaataaagttgcaacgattaatattaatgaaacagataaaaaaaacggaacaaataaaaagaagcaactcactcccagaggccaacttcatttggagactgtttatggtagtattaagcgatttatttcaaaaatggagaaagtaggatcagcattcaatgaagagaaaatcgcaactgtagcaaaaaaatcctatcgtatagcccttttgaaacgtttgattgagtttgataaagacccaaaaaaagcttttacgggtaagaatagtttagacaaaaatccgctttacctgaatgatttacaaacactacaagtccctgaaaaaataaaaactgttggtgtagtgacaatttatactattaggaaagacataacaccagatttgaaaattgaaaaggttattgacaagaaaattagagaattattacaagtccgtttgaatgaatttggaggagacagtaaaaaagctttttcaaatttggatgagaacccaatctggttgaatgaggaaaaaggaatatcaataaagcgtgtaaccattactggaatcaataatgcagtggcattacacgacaaaagagataaagatggagttcttattttggatactgaaggtaaaaagcaagctgttgattttgttaatacaggcaacaatcatcatgtcgcaatttataatgacgataaaggaattctacaggaaaatgtcgtttcattttttgaagcaacaatgcgtgtcaatcagggactgcctattatagacaaggattataggaaggacgaaggttgggaattcctgtttagcatgaagcagaatgagtattttgtatttccaaatgaaaaaacaggatttaaccccaaagaaatagatttacttgattccaaaaattactttctcataagtcctaatttatttagagttcagaaaatttcaacaaaaaattatgtttttaatcaccatcttgaaacaaaagctgtagatggggacactttaaaatcaaagaaatacttaattggaattactcattattttattcagacgccaaccaatttaaaagaccttattaaggttagagttaatcattgcggaaatatagtatcggtaggagaataattcaagttgattaatcagttgtttatatgataaaacgtacactctatttcggcaacaaattgtatagtttggatcacagatttgttatgaaatcattgatagtcgctcaatatctctgcttcaaagtcaacactgatcgtctcggaaatatctcaatctcattaatctcagtgatatgaatttcgaacgcaatggcatctaccatatttataaccagggaaataaccggcagaaaatcttttttagccgcgaaaactatttgttttttgttgataaactatgcaatcatattgttccatttggaaatctgcttgcctggtgtttgatgccgaatcattttcatttgatggttgaggttgagaggctttatgccgtcatagatagtcggggcgcgactcaaagtcgcactccgactatctatgacccagacaacaaaccaatttctttcaaccattccatcggaataatgcttgcctcttatacccgtgctattaataaacaagaaaatcgcaccggctcacttttcaggcaaaaaacgaaagctatctgtcttaatgaaacgagtagagtagcacataactggtttacatcatccggtgctacaatgattaacatcgaaaagtgggaacttcaatatccacagcaatgtttcaactatattcattccaatccgataaaagtagggctggtaaccaaagctgaagactgggaattttcttccctgggcggctatatggggaagcgtgagtgcgtttttggtaatttgaagagagcgaatgagttgggactaactgttcaattattttcggagagtcatggtttgacatagtattaaaacctgtgaaaataaaactgctaatattcttttcataaatagaacttataacgaaaatgataaaacgcaccctttattttggtaatccttgttatctgaaaaagaaagacatgcagatgcatattgattttccggaaaaggagaacaaaccacctgctatcattcccatcgaagatgttggagttgttgtgttggacaacccgcatattactcttaccaatgcgctgattgctgaattgaatcaaaacaatactgctatcatcagttgcgatgcaaaacatttgccttttggattgatgttgcccatgttcgcgcatcatgcttttaccgaaaaaatgtatcaacagcttgaatgttctctgcctttaaaaaagaacctttggcagcaaactatcattgcaaaaatcagcaatcaggctgccatactaagaagtttgggaataaatgacagcaagatgcaatattacctgaagctggttaaaagtggtgacccgcaaaatgttgaaggacgtgcagcagcttactattgggagaatctttttggaactgaaagttcattttcaagagataggttaggtgaaaacccaaatgcgatgttgaattatggatatgccgtacttttagccattgttgcacgtggtcttgtttcaagcggacttttgccagccgtaggcatccatcatcgcaacaaatacaacccatggtgtctggcttctgacatcatggagccctatcgcccttatgttgatcgtgttgttcttgaggttgtgaaaagatttcctgatcaagatgaactaacgcctgaaatcaaaaagcagcttttgcaaattccggcaatagatgttgatattgatggaaaaagtagtccgctcatggtaggtttgcagcgcacaacagcgtcgttatctgcctgttttgaaggatcttcgagaaaattattatatcctgagctaaaaatttaagattggataaaacatatttcaaacgattaaatcagtatcagattttgtggatttttgtttttttcgacttgccaacagataccaaaaaagaccggaaaaactacgcccaattcagaaaaaatctgcaaaaggatggctttacgatgatgcaatattccatctatgttcgccactgcagcaatcgcgaaaatgctgaagtgcatacgaagcgggtaaaatcatttcttgctccccgcggggaaattatactcttttcattgacggataagcagtttggaatgatggaattttttcgtggtcaggatccggccaagcgaccgggcactccccaacagcttgaattgttttaataacaaaaaaaaccttgctaaacgtcagactgtctaaaaacccattccacaagcatcaatatacaataataaaaaattgataagtattgaagaataattgttatttataagataatttatgctatatttattgcgtaattaaa

SEQ ID NO: 2367 - DNA, 16387 bp, synthetic construct
  source 1..16387: mol_type = other DNA
  misc_feature 1..16387: note = Synthetic
taaattaaaaattacgaattaaaaaggtggtggtgtaatggcagacgttgtgccaacggtgaagggactatagggatgccattacaccaccaattctatttatttttcttttttggttcttttttcttttgagatcgcccaaacttggtcgatttatactatcacggactcggggttgaaagccccgagcacaggacactgccgcggcggaataccgccggaacagaacaccgctgcgctgaatgacggtgcaaaggtagtacaaaaaaatgacctatgaaaaataaagaactacaaagaagtgaaaaagaagtgaggaagtaaaatcggcacaaaaaaagaactcacttccctgatttagagaagtgagtgaagtgaaaaggaagtgcttgggtattaaaaattgtcagtaaaattccggtacgtgtactgcctcatggtggggagagcggaggctgcagggtccccgcaagcttgcgccgtggggggccaggcaggcgtcgcctttatgtcgccgcgcgacatccgatgcgaccgccttgccgaacgcgtatgcaaaggtactacaattttctgacatttgcaacttttcctgaagaaaaaacgaagattgtttgtactccctgatagccatgctgttacgagcctcgggagagcgaaatttacactgctgaaaaaattttgcatttttttgccaaaaaatttgcaaatatgcaaccataggctaatcaatcagttacggggcactcatgatgccccgttttgccccgattccgctccatcgccctgtatatcggggattaggtgttttgagggatttttttgtatggttttgcataaatttcgccaaaaatttcgccataaaatgcacctccgtgcaatttttctgctgtaagatttgcaaatgtcagaatattttcgtaattttgcagtcgaataatgatacacgattgtttcctaatcgcaaacagtaaaacaaacactatatgtcagtacaagagattcatcagagagaactgcaacacctctttgagcaatcaatgaaaccgattgactaccaatgggagataaagcatcatcaacagatgcacgaggcctacgagcgcagcttgaaggtctgaatagtgcagaacaacaaaaggttgcttatcaatgggcattggctaatgataagtttttggacttgttaggagattttgctaacgagcgtaagttgcttatcttcaagagcggaaatgagtgcgaaaactggattgatccggttttgaatcttgtttacaagatgaacacgcttatgcacgtcggaggcaatatcgcaaaactattcgagcgtatcgaacagttcaatatgcttttcccgtccacggcacttcgattcgtcggctttcaagcgatgagttcaggaaacgtttaccctatatttgtgcaaacttttattgccaaaagccgtttcgcaacagatgatgagatatgcgaatatatgaatcgcatcggttttaggcagatgaataaggatggatactttgaaaacgatatatatatattgtcagacatcaagccaaagaatgtcttatacttggaaggtgacatgtacgtcatcgatgcagagatagccccaaaataatcacacctccatcccgcgagcaccccggtgctcgtttttttatgccgttggctgaaatttcaccaaaaatttcgccataaaatgcactgccgtgcaatttttctgctgtaagatttgcaaaaatgcatttttttgcataattttttgcatttttctttacgactgacctgtggtgtcagtctgatgtagtatctttgtgccgaatttggtttatgccattatttgcatgtaaaaaatacatgatttttgcaataagtgattttaaggcttgcatatatcaaaattttttagtaactttgcaggcggaaataaaatgtcgtagcaatgacaaaacacggcgacataactaaagttggcacagaagttctgcaaccacgtaagcggaacaaatagctgctatcgcatatcaatgcggattcaggacgtaaaacggaagcgcagtagcggcagagagaaaaatgaaaaggagaaaatctatactataaaaaacaagagcgagacttgcgtcccactccgaatgttctcacaacggaataatccttattgtgaatagcttcaaaatttatggtgcaaagatacacattatttttcaaatatacaaatattttgacaaaaaaaatataaaaacctctatttttttgtaattttgtaaaaaaaaggcataaaatactatgaacacgaagaaaattttaggacttgatttaggaacaaccagtatcggctgggcattggtaaatgagtcaatcgacccacaacaacgttctgaaataattaaaattggcgtacgtgtcaatcccttgactgtggacgaaaaagacaatttctcaaaaggcgctgatataacgaccaacgcagacagagcactcaagcgttctatgagacgcaatctacaacgctataaattgcgtagagatgagttaacggctctccttaaatcaaaaggttggatctcagatgatacaatcttggctgaacacactaatcgctctacatttgaaacatggcaattacgagccaaagcagctaaagagcacatttcgttggaagaatttgctcgagttctgctaatgattaataagaaacgcggttacaaaagcagtagaaaagcaaaatcaaatgatgagggagaattaatagacggcatgaccgttgctaagcaattatatgaacaaggattgactcccggacaattttcatatcaattgctcatgcaaggtcacaaacatctaccggactattatcgatctgatttgcgtgatgaactgctaaaaatctggacagttcaagctgcattttattcaaacatattaacccaagaactttacgaaacacttataggacgaaacgaacgtcagacatgggctatattagccaaagcatggaatcttgccggtatcaaaattaatgaaaaaggagaggctttaaaaaaagagttatatcgtcttcgttcaaatgctacacaagagaaactgaatttggagtatcttgctgttgttttgcaaaaaatcaatggtcaaataaacgcttccagcggctatctcggtgctatcagcgatagaagcaaagaactatactttaataatcagactgttggagaatttcaatggactgaattacaaaacaatcctcatcatagtttgaagaatgaagtgttctatcgtgcagactatatggatgagtttgaacgtatctgggaacagcaagctctgtatcattcagagttgacacctgaactaaaacgtgaattacgggacgttatcatattttatcagcgtccgttacgtagtcaaaaagggcttatcggctattgcgaatttgagaagaaacagaaggagataatgatagatggcaaaaagaagattgtaacatcaggttgtcgcgtttctccaaaatcatctccactattccaagagtttaagatttggcaaatattaaacaatatcgttctctcatgggaagatgaaaaccaccacaagcaaaaacgcgagttgacaaacgatgaaaaaaaccgtttgcatgaaaagttgaatactttagataaactcagtaaagcagatgctttgaaattgctatacggcaagccagcaactgcgcttgatctcaattataaggaaatagagggaaacaggacgatagcagcattctatcgggcatatctttcaattgtaaacatgaatatgcccgaaggcaaagaaataaagaagccagagtatgaaatcatccgtgcacactttgaaaagcatggcatcaataccgatatactttcgtttaattcgaacgtgtctgccgatgctttacaaaatgagcctctttacaagttatggcatcttctttattcctatgaaggtgacaagtcaaatactggtattgaaagccttattcatataataagtgagcgctatggatttacagaagaccaagccaagataattgccaacattaaattggttgaagattatggtaacctcagcacaaaagccatgcggaatattctgccttatatgcgtgaaggaaagaaatatgacgaagcgtgtgagtatgctggttataagttctctaaacagtcattgacacgagaagaaattgacagcaaggaacttaaagcactattagatattcttccaaagaatagtttgcgtaatcctgttgtagagaagattttgaatcagatgattaatgtcgtcaataatattattgaagagtatggtcgtccggatgagatacgcatagaattagctcgcgaattaaaaaagaatgcagagaagcgaaaggaaacaaccaagagtattaacgatgagaaaaacttacaagagaaatatcgccaaatcttacatgacgagtttgggcttgagcatgtaagccgaaatgatattatcagatacaaactatatcttgaactggaaaaacgaggatacaagacactatactcaaacacttatatcccacgagaaagattgttctcaaaagactttgacattgaacacataattccacaagccaaagtgtttgacgattcattcgccaacaagactttggagttgtgccaaatcaatatagagaagagcaacatgacagctattgacttcatagcaagcaagtatggagagcaaggagttgctgaatatattgcacgcattgataatctggcagcagaacatgctatatcgccagccaaagccaagtatctaaagatgcgtgaggaggagattcaatccggttttctaaatcgagacctaagcgatacggcatatattgcacgcaaagccagagagattctattggatgtcgtgccagaagtacataccacatccggctcaatcaccaaccgcttgcgtgaagactggcaactggttaatctgatgcaggaacttaactgggacaaatataatgccattgggcaagtggaatattacaccgatcatgacggacgacgaattggcaatattaaagactggacaaaacgcaacgatcatcgccatcacgcaatggatgcattgaccatagcatttaccagaccggagtatgtcaattatttgaataacttaaatgcacgttctgacaaatcaggaataatatttgctgttgaaaagaaatatctacatcgtaacgaacatgggaaaattgtgtttcttcctccaatgccgttagaccagtttagagccgaagccaagaagcaactggaggctatattggtgtctatcaaggcaaagaataaagttgttacacgcaatgtgaataaaagcaagacgaaatctggttataagcgtacagaacaacttacgcctcgaggacagttacataatgaaacggtatatggcagtcgaaaaaagtacgtgacaaagatggaaaaggttggctctgcatttgatgtcgctaaaataatgactgttgccaaacctgcagaacgggaaatgctcttacaacgattgcagaaaaacggaatgaatccgaaaaaagcatttactggtaaaaatgcacttgatatgcgggttaagaccgtcagcttggagactgaatatactatccgcaaagctgtagcaccggatttgaatgttgataaagttatcgatcagcatgttcgccagattctcgaagcacgtttagctgaatatggtaatgacccgcgtaaagcatttgctaatcttgacgagaatcctatatacttgaataaagagaaaggtattacaatcaagcgtgtcgcaattacgggtgttagcaatgccgttgccttgcatgacaaaaaagataatcagggacaatatatacttgacgcagaaggcaaccgtatcccaaccgatttcgttaataccggtagtaatcatcatgtggcaatctatcaagatgctaaaggcgaatggcaggaacatgtagtatcattctatgaagcaacaatgcgttccaatcaagaattgcctgtcgtagataaggaatacaacaaagatcttggatggacgttcctattcactatgaagcagaacgaatattttgtattcccaaatgacaataccaacttcaatcctcaggatttagacttgactgatcctgctaattatgcagcgataagtccgtatttatatcgagtacaaaagttgacccaaggagattattggtttaggcatcatttggaaacacaaacagatagtaccaaaaaggagttacgagacataacatggaaacgcattaccagtccaaaaggattgaaaggaatagtaaaagttcgtatcaatcatttgggcgaaatcgttgctgtcggtgaatattaaatcatttacgccatgataaaacgtaccttatgtttttccaatcctacctatctgtcactgcggcagatgcagatgcttattcgttttcccgagattatcaatcaggaagggatacctcaaaaactgaaggatgaagcgcaagttactattcctgtagaagatataggtgtcgtagtgttggatcataagcaaataactatcacacaaggactaatggctgcacttctggataacaattgtgccatcgtcacttgtgatgatagacacatgcctattggcttgcatctgccattgatgggcaatagtattcaaaatgagcgttttcgagctcaattagatgcttcgttgccattgcagaagcagttgtggcaacaaaccgtgcaacaaaaaattctcaatcaggcggccattctacaatctatcggcgtagaacagcggaatatgcaagcgtgggcaagagatgttcgaagcggagatggagacaatcttgaagggagagctgcggcatactattggaaaaatatcttcccatctcttcctgactttgtcagaggaaaggaagaagatcctcccaacaacttgctcaactatggatatgccatcgttcgtgcagttgttgcacgttctttggtcagcgcaggcctattgccgacacttggcattcatcatcataatcgctacaatgcttattgcttggcggatgatataatggaaccttaccggccttatgtggataaagccgtcattgacatcatgcaatccggagtggattatagtgaattatctacagacatcaaacgctctctattgggtattcctgtaatggaggttgttattaatggtacacgaagtccgctgatgacagcggctcaaacaacagcgaactcgttagttaaatgttttaccggtgagatgagaaaactaatatacccggcattggatggatcggtttagtgaatatcgtgttatgtgggtactcgtcttctttgatttgccaacagaaacaaagaaagagaggaaaatctatgcccaatttcgtaaaaacctgatacaggatggctttacaatgtttcagttcagcatatacctgcgtcattgcccaagtgtcgaaaacgcagatgtgcatatccggcgagttaaagcaatgttgccggaattagggaaagtgggaattatgcgcgtaacagacaaacagtttggggatatggaacttttcgaatgccgcaaacaatcatcagttcaacaacctgtgcagcagttggaacttttttagatatagtactgattgcggcagtcaatcatacagaacaggatagaaaaaacaaaaagaaagaagttgtttggctttatcaccaagcaacttctttcaatcgtagataatcgcttaacttgtagataatcaaacattagcaaagaatgtgttgtatgttatctacttcgatacaaattttgaaagctattcacaaccgcacgggaatacgtccgcgacggtcggaggttgtatgttatctacttcgatacaaattttgaaagctattcacaactgtacgcgttaccagcccaggtttccggctgttgtatgttatctacttcgatacaaattttgaaagctattcacaacaaaacattatgaacgctattcaggtcggtagttgtatgttatctacttcgatacaaattttgaaagctattcacaacaaactgcacgatattattacgcacataatcgttgtatgttatctacttcgatacaaattttgaaagctattcacaaccgagcgctacgcccgtaataatacgggggtgttgtatgttatctacttcgatacaaattttgaaagctattcacaacggatttccttttgcagcgttagctcttcctgttgtatgttatctacttcgatacaaattttgaaagctattcacaaccacaaatttatagaaatgtaaaaaaaaatggttgtatgttatctacttcgatacaaattttgaaagctattcacaacagtatgtcaaagagcactgcacaaacgaaagttgtatgttatctacttcgatacaaattttgaaagctattcacaacgtcgaacagctgcatcgcgtcacgcatcgggttgtatgttatctacttcgatacaaattttgaaagctattcacaacgcaaattggacagcagccaaaagttgctcggttgtatgttatctacttcgatacaaattttgaaagctattcacaacccaacttcttcaacgcgttggcgattgtcagttgtatgttatctacttcgatacaaattttgaaagctattcacaacaatcctgatttgtattcccatcaggatactgttgtatgttatctacttcgatacaaattttgaaagctattcacaacatgaacttgtctgacgattataccaacggtgttgtatgttatctacttcgatacaaattttgaaagctattcacaactgctggcttgcttattgggatttctttgtcgttgtatgttatctacttcgatacaaattttgaaagctattcacaacgcgtcatgctgctgcaatacatcctgcgcggttgtatgttatctacttcgatacaaattttgaaagctattcacaactaaagaaatgcggatatgccacctggggacgttgtatgttatctacttcgatacaaattttgaaagctattcacaacacggttcatgaaatatcttcgtaaaattcagttgtatgttatctacttcgatacaaattttgaaagctattcacaaccatgttgcgcaagcatcgtgggtggctcgtgttgtatgttatctacttcgatacaaattttgaaagctattcacaacaaccaactgaactacctctccaaacgggaggttgtatgttatctacttcgatacaaattttgaaagctattcacaactgaaaacgaattgttgcgtaactttgacacgttgtatgttatctacttcgatacaaattttgaaagctattcacaaccacgttctccgtggtctccacgtacaccacgttgtatgttatctatttcgatacaaattttgtagccaatttgatagaaattatgtcaaagatcatatccgattgcaaaattacaaaaaaatacggaaaaaagcaaatttatttgaaaaatattagcaaagttcatagatttttgtaactttgcatcaattttgaaggatatacacaataaggattattccgttgtgaaaacatccaaagtggcatgtgggctttcaggcgtacatgtcgcttttttatacagccatgcaggagggcgtctctatccttctcgccctcggtgaactggcactatacatctacctgcttatcgcggtgtttagacatgaccttttcgggcgtataatcagcggatttggggtgttttgatgtaaaatccgctgaataagcacgcactaatcagcggatttggggtgttttggtgtgaaatccgctgaataagtgctattgctggtattcggtaggcggaatatcgggtttgtcgcagttgatatacaaggtgtcgtagatatacacggtgtcgcgcgtgtgtacggtgggcagcatgtcggggaactcctcggcaaggcggcggagatcgcggcgtttctgctcgtcggtcttgccggtccagacggacagcccgagtttgatacccgccgtccacggatgcagagcggtgacagctttcgtgccgatcagtccgtggtactcgggcatgaacgtataaccgttgcggctgttggcaaagccaagaggcgtcagccggctgacgggcgtggataagaggtcggtgaccgtatattgcccgtaggcggtgatgatcagttcggtgtgggcaccacaacgaatcgtagtgcccaactccatatacacggcagcgttccagcggttgaggtgctgcaaaaacgagccctgctgcggcacataggtctgctcggtaatgaatctgtccggcaggtcttgcaaggtcagatcccaatacgggtaataacccgagtgggtgactgaacccgagtggtgccggtagtcggcaaacagcggaatctgcagtttggctccgagtgcggcatacacgccggcacgagggttgttgcgtccgtagtggtgcaacgtgaatcccaagggaatctcaagcaggtacgcctcctgttgttcgtaccagtcggcaaacgccatgcggtgctcgtattggtcacccgaagcgtcggtaagcagatcctgccagacgtaactgccggtgagcgaggcaaccgatccgagacgcgtgagctgaacgcccgtttgcagacccgtcccgggaacgaagaaccaggtgtagcctaatcctgcagaccatgtataggcgggatactgcctgccgccttgcaggtcgtagccgagactgcctatacctccgccggcggtgatatcaatgttgtgtgacatctttgccctgacaggcgcagcctcagggatttccgatgcttgcgcggcgagcgtgccgcacagggctatggatagcaagaactttttcattgtacaatcagtttatggttagcggaaatatatatacctggtgcagcaggtttgccgcacgggcgtccgtcgatggtgtagtagcactcgggttgtgcggtgctgtgcgtattatccagcgcgtcaggcgtatagtcatagacgcacgagcggtacaacagaccgtcggagccggtcatatatacctgatacgcgccgttcagtccgccgggttcgcggtagtattgtccggtggcgtcagggatgagtgtgccgttcttgtaccactggtacgccacaaagtgcagatcggttgagtctgtcggattgccgttgccgggattgttgtccacaaacagcaggtcgtcccacttctgatgcacaaagccgtcggtgagcaacgtgaacgggaagaagtgcgtcgagcctttgcatgccgtgccgttggtatagaacgtgagcgagatatagaacgtgccgaccggtgcattggcaggcagagggataacaatggtgctgtcctccggcagttcggctgcaaggatagacgcgaagcctgcctgtagcgcatccgtggggaaaaccagatcgtagaggtcgggttcgccttcggtcacggtgaagcggatggcaagggcggtatcgctccggcacaagtcaaccacaggatcgagttccactacggggcagataacctgacaatcctcgctcgtgccgtcaataatgatggttacagtacctgcactggttgcccagtcggagaaaccgctgttgtccttcacctgccggctgaagatatatgtgccgccttccgccatggggaaggattgtacaggcatcgaggcggtgtcgctgtggaagataggctcgccgttgcacagccagcggtaggtgtactgtccgttgccgccggaagcggtgtccgcctcggcgagtgtgccggtatagcggggatggcagagcgtgattgtgaatgaatcgatggcacccggctcaacggctgccagcacataaaccttgtgctccgactgcgattcaataggtgtggtgttgcacgattcgtcgcttgctctgcgtgtgaacgtgtattcgcccggttcattaaaggtgaagttgagcgtatcggctgcggctacagagccgtcgatatacacgggattcttcgtgccggacggtgtgacggctttccacaggtaactgaatacgcctgcaccgcctgtggcagcctgttcgctgcggatggtgaacgtttgcggcacgccgtagatcgtgtcgggttcgtcgaacagcttgcccgcgtcgaacgggttgagaacagtcaggtacaagcgtcctggcgattcggtccaatcggtggtacactggtagtcgtgcgcgtaacggcggaaagcgtatgtgccggatacctcggtaggcaaattccggttgcggtactcgttatgactgaggtaaacagtatccatcggaatgtgtgccagcggatggtgctcctcgtcgtacaccaccgtatcgcgaataaccatgtaccggtaacataagttcccgtcctgctcatcgtccttgccgccaaggggttctttgccgccgttggctttcaggatcttgacgttctcctcgcgccagcaggcggtaaccgtgccatccatcttacctgcatcgaacttctcgtagcctttgacaatggcataaatctgcttgctcgtactgccttcagtcacggtgagaataacctcctgattgccgcagggacgaacaacctgtgcactgttggcattccggatgtgaataacatcctcgccggaagaggtccatacggaactgctgccgcccaacaatttgaacgacttacgcggcaggttgccctgcataggcgcgccaacgccctcggcacgctcgacaggcagattgtcagcgtcaagaaggatagcgttggtggagacgcgtgctgcctcatgatcgccgaagcatttaaggcgcgggtaacgatagtagccgttggtgacgcattcccactcgctgcggttagtgtacggattggcggcggagaagaacgtggcggacttctcgatggcgtactgcgtgttgtcgagcacatcggctgtgccgtagccggtggcgtaggtgcgcgtcacttgctggtcgaagcatatttgtgtgaggttggctgcggctgcctcgttcagtccgaacagtgcaccggcatgctcggcacccttgcagtaaccggcgttatagcactcgttgagagtagccgtgctcttgttcacaccgactaatccgcccacatggctgttggcgtcagtgatgatgccgcagttgtaggcatattccagtttgccgtagttcgtgccaatcagtccgccgatgttatctccgttatgggcgatgatctgcgccatgttgaagcagtggtgcagtcgtccgcggttgataccgatgaaagcacctacattgcttgtggcgtctgtcatgatctgtccctgcgcaatgccgaggttatgaacgagtgcttcagcacctgtctcggcaatcagtcctgctgccgtgggaaaggagttgaggatatacaggttgtagatgacgtggttgttaccgtccagttcgccgcgaaaaggcatagcggctgagccgacaggttcccaactcggcggcaactcctgcgtgccgccaaggtcaaggtcggtgtccagacggatacgtttgccggcaaagtcgtctgtgcggctctgctgcgctatccaggcgaggtgctcgggtgcggtaatgacgtacgtggcgccgctgatagcaggggcttgtgcagtgccgttccacggcgcggaaacagcggcaaaggaatgggtgccccctaatgccatgcttattagcacagcatttacaagtgcaaagatatgtttcataggagtgtgtttacccgatacgcagcaggttctattcaatccgatgtccggatacggtgaatgtacctgtaggcgtgatcagtagcaatttgccgttaatgattgaccattgacagttagcagccggtgtgttgcagccgggtagtgatatacccgtaaagactgatgcatccgggtcgccgggtatgataggcggtgtgggcagcacctcgttgccgtcgggttgcttcaggtctcctttgaaacctgtagttgcaaagtcgccggcatagacgtggataggtgttccctgttcatcgagtacggagagaatgtacgtgtaacgcgacgcttcgtccagacccgtcaccttgaacgacagtgtataaggcaactcaccactctccagtctgttgcgcttgggcgcgaaggatatgccgagtagttgtccgcggttgccgagtgtcaggtggcagaacacgtttccgtctttgtagatgtcaatctggtaggtgtttgccagagagtcggtcggccacgtaaagtctgctgtcgtctcggcggcatccacaatcactgtgcgctgaaccattgcggagtcgggcgtgtcgttcatgcggaaacgtccccaatacgggtgttcgcggtagagtcggcggctatccggcaacacgctcagccatgcgctgtctggtatatcagccagtgtaccttctgacacagcaggaggagtggatgcccaaatggttatatgggtgatggcactgtcccccttgaacgcattgtcgcctatcagtactacgttctttcctatggacaactctcttagcgaggaccagttctcaaaagcgttcgtgccgatggagataactttgtcgggaataacgaggctgtcttgcagcttaatccccgaaaaagcactgccgcctaccatcgtcagttctgtcggcaacacgatagagtccaagttcggacatcccgagaaggcgttatcaccaatcgtgctgatgccggcaggcatctctacacgggtgagtgctgtacagccgttgaatgtggcggaattgatcgctttcacgttctccggtatgctgatatgcttgattttcgtacaccctttgaatgcctcctggtgaatagccgtcagcgtagagggcaggataactgtgtccagttggttattcgaggaaaacgcacctgcaccgatatactggcacccttctggtagcactactttcttcatccgtacctgctggcacagcttggcgggcacaaactctacatccggaccgaagataaattccccgttccaataatcatacagattgtagaataccgacgatgaagccggcggattcttggcattccaaacaataacaggattagagtggagacaccatgagatctgtttgctggaacggaaagtagcagggaagaatagtgtgtcctgaagcggaattgtcgctacactattctggtcatataccgcaccattgggttctccgtcaaagatactgccgtcgatcacctccaggcactccgaccagcggacggatttcagtgcgtagcagttcctaaacgccatctgaccgatatatttgacacctttgcccaagtcacacttcaccatcgtcgtacagttgctgaaagcgtattgtcccactgtatctacagagttcggcagtttgatgtccttcagtttgtaacagctctcaaacagattcgcaggaatcttcgtcacgccttcgggtatgtcgcacgctgtcaggttccaccagtcttggaatatggcgccgctgaaacccgtcaacccttcaggcaaactaatcgtcttacaagaattgtacggataataggtcttataactcgttgcccacgacgaagcctgtagcacctgtttattccaccagaggctgtccacggtgttcttgagcacgccgtaaccctcgatagtcatgtgcgcagtctcggtgtcgtacgaccaggtcaggtgctcgccgcacacgccgttgtacaccgtggcttgcacactgctgccaagcattgccaggctgacaagaataatacatactttcgttttcatgagtgtatattatttgattcggttcccttgtacatcgtacatgcgtccgttgtacatcaaatagatttgtccgtcacggaggatcttgccgttcgaaccctcaaaagtgccggtttcatcggatatttcttcgatagctgtcggcatgtttgcaccgagcgtagcaaaggatccggaggcatagaagagttccgtatcattggcatcggaagcggtcatcgtgaaccaatagtcggtgttctcatccaaaccgttataacggaacgagaaggtaccggtggtattcttcgcacgacgagtaggtgcgtgcttggagaagtcgatctcaacgagctgtcccatggagttgaacgtcagcgtacaaatcttctccgtacgctcttcattcgcccagatgatgagcgtgtagtaactggcaccttccacggccggccatgtgaactgcacgctgtggtcgtcgggttgcgtctctacttccggctctttttccggcagctccagaagtgtactgtccac

SEQ ID NO: 2368 - DNA, 16338 bp, synthetic construct
  source 1..16338: mol_type = other DNA
  misc_feature 1..16338: note = Synthetic
ggcaatgaccgcagcatagctcatttgaaaccctacctgaaataacagcatggggttgaacaccaataaaatagcgaacatagagagtgctagaatattgaaggtattgcttggcctgttcaggtagagggcataggcgacaaaagagaacatggtcactgccctgacgaccgatgccgataaacctgccaagaaagcgaagccccagagtagggcaactatggtgacgagtttcaaggtttttccttttggcaatcgttctatgggtcgcagaaaaaaatcaaggagcaatagcaaaataccaatatgcagacctgaaactgccagaatatgaacagcacctgcatttttgtaattggtgtaagtggcttctgaaatgtcattgcgctgccccaataaaagggcttgtataatgcccagttcgtcttttccgaaattggcttcccgaagttttgcgcttattgtatttctaaaggcggcagcgaccccataaatggttttagaagaattctccaatacaaaatggttggctgtattcaaccgtatttgatggtatatgcccaatccctttaagtaagccctataatcaaattgattggggttgataggcgggcgtactgaatcaaattccccatagaacaacagttcatcatcgaccgagtatttctgatttaaggtatcgaccgaaaaattcaagatgacctttccagagaccttttggtcatccatagcataaagaatacccacataccgatctgagaaagtgttcgcttttaaaacctctcgaacctttaaacgccaagtatgctgcttttgaaaagtttgatgggtatagtggtttgttctatttctcggctgccaaagtgaaacggccaaaataccaatacaaagggtagtaaaaagtgttgttgcaccaaatactatgaattttcgatgggtttgtttgaacaacaaaaacccaagaaaaccaatgcttataagggtcaatagaattgaaagtaacaggctgaaatgcacataacgccccaataaaatacccaataccaagaagagggtcaactttataggtataaatcttaagagccgcatgccaataatttgactctaatctactcaaaaattgtcagtaaactacctcggggcaagcccacgaggcattgataggaatttatcttttttatttcgacgcaagcctgcctgtccggcgaggcaggcgccgaagtttcgggggtgggaataaattctgtcaaagtaccctagtggctttaacaaaggccgaattccaatagccttctcttaacgaagagacgatgacaccccttgatgaagaggcgtgaatgaatttgatttcgtactcatcaacggcaacgaccatacccacatggtttatttttttcccccgtcttttggttttgaaaaagagtagatcgcccttgatcactctattgatccgaacacgttttccttcctctgccatttgataagatactctgggcagttgaacatcgtgctctccgaaagcaacatataacagccctgaacagtccatgcccttttttgtggtgccaccgtatttataacgagttccggcataggtgagggcggtgatgatgatattatctgcggccgatagggtggtggtacgtctttttgtagtttcggcaggtcttttggcctttggctctgaaggggctacggtaacctttcgttctttgctataggtggtcttcttttttataagaccacagctgctgatttgcaaaaccaaaaatagaagtaggatgttgcgcatgcgtaatgggtgtttaccgttcttggtgttcaaaattaaagaaatattttgtaaaaacctgttaggtttccgcccaacaaaaaaaatctattttttcacatcatgagaagacatttttttaccttctcctaaactcggctacgttcagtcacctaaattgattttaaattctcaacgctgcctacttattatctaaaacctctccaagatccttagatttcaccgttatccattcctctaccatatcctctaaaacattcaagggtacggcgccatttaccaagaccacatcatgaaactcgcgaatatcgaatttatcaccgagcttgattttggcattttcccgtagttccaatattttgttcatacctactttgtacgcggtcgcctgggaaggcattaccacatggcgttctaccatttttacggcatcactttccgcatttggggtgttgctctcatagtaatcgatccctttttcgcgtgtccattttttcacgtgaatacccgtatctaccaccaagcggcatgcgcgccagagctccatggccaaccttccaaaatcggaataggggtcgctatagaagcccatttctttgggtatgaattcggtgtaaagcccccagccttcaatataggccgtgtatccgcccatttttctgaacatgggtacatctttgagctcttgggcgatggcaagttgcatgtggtgaccgggtatgccttcgtgataggccagggcttccatttggtagttgggcattgctttgatatcgtacaaattggcataataggtgcctggtcgcgaaccatcgattgccggagcttgataaaaggcttttcccgctgctttttcacgaaaaggctctacctgttttacgatcatttcggcctttggtttggtcaagaacagctcatctaggcgccccttcatactatcaatgatcatttcggcctttttcatatactctgcacgaccttcgccggtgtcagggtaatagaactgcttgtcttctttcataaaaacaaagaaagcttgcaggtttcccttaaaccctaccttttcttttattgcgttcatttcaccgtgaatgcgttttacttcggataggcccaggtcatgaatctcatcggcggtcatgttagtggtcgttgttctggcgagggcattgttataataatcattgccatcaggaaacttccatgcgccatcatcggtattggctctttttgactggtcttctagaaaagcgatcaaattttcaaatccgggtttggtagaagagatcaaggctgccgatgcattatcgatcaatttctttttttcttcggatgacagttccaaagtatccaattttcctgaaaaatctttcaacaaggtgctttgttttttagaagcgtcgaaaggccgccctattaaaatattcttacaagattccaacactttcggaaatacaaagctagggggaacaatacccgcttcttcacgttctttgaggttggtaatcacctgggcgaacatatcatcaatgccgttcaaccttgaaatataggcttcggcatcgctcttatcggtaatttggtgcatgtttatcaaaaatgacggtacaaaagaatgtatgccgtgcatttggtttacagggtagttgtgcaagcggtatttataatctgaaatttcgttctccatctgctgtaccgccaatttgtaacttagtttggtggcctcgtcaagcgcatttgtatttaccgaatctttcaggtaaccgaggcgcattttggtgtgttcgagttctttttcatcggcctccttcgagcggtcgtcccatttgccataatcggttttatcgcccaaataagtctgcatcatgggtgatagggccaattcggcatcccactgttgttgaaaccaatcattgagttcttttgaggtagaggccatttcttctggggaaacttccaaggtgtctttcgggtcatttttacagtttgcagcgaacacgaagattgtgcataagaatactgttttaagaatactatttttcattgattgatttttttagatttataaagatacatgttttttgtaatcagttcagcgactttaacacttgcgccttcaccgcccaacttattctcaagttcgctatatgccttgagttgggctttgcgatcagggccttcaagtatttttttgagggctgtctttaggtttttagtatttagatcaccttggattaattcttttactacttcttttttcataatcaggttcaccaatgaaatataatccaaggtaataatacgtttggcgatttggtacgataaccaattggccttgtagcacactacttggggcaccttgaacatggcggtttctaaagtggccgtgccactggttacaattgcggcatgtgataagcctaaaagatcataagtcttgcccgaaacgaagctgacgttcgggtttgttaaaaagggctcgtaaaaagatttttctaaactgggcgtaccggcaatgacgaattgataatcattaaaatcactgatgacagataacatgattgagagcattttacgcacctcttgttttcgactgccgggcaaaagggcgatgatgggctttacgttatcgagtttgttttctgccctaaatcgagtctcgtctatagaagggctatcgtcaatggcatcgatcaatggatggcccacaaaatatacgggaaaaccatgttttttttcataaaattccttttcaaaaggaagaatgacgtacatggcatcaatatctctttttattttatggatgcggccttcgcgagaggcccaaatttgtggtgatatatagtaattggtagtgaaaccatgtttttttgcccactcggcgatacgcagattaaagcccgaatagtcgataaaaacaatcacatcgggtttgaattgctgaatatcgttcttgcaaaaccgaatgttcttaaaaatggtggtcaggttcaaaagcacttcaaaaaagcccataaaggccatttctttataatgtttcaccaaagtgcctcctgcccgttgcatcaaatcgccgccccaacacctgatgtcggcatttgtatctttggcctttagggccttgatgaggttggacccgtgcagatcacccgatgcttctcctgctatgatgtagtatttcatttttcaagttcaagtgcaaaattcaaaatacaagttcaagttcaaactcaagtttaaattataaattcaaacgctaactcgatttatttcaacggctatttcaaaactcagttgaaatttacagtgctacccttttttgttttttattatggttgcgatgattttgatcagttgctctgcctcatcttgtaaaccttcacttttttgtgtattggcatattcgagttttttcaatatttttagatttactcttgattctttcagttctttgaggctaaggcctgctttatgaatgaagtccctatctgaatttgtgccttgcagttcaccaaaatttagagctgcactaccacttgaacgtagtagttgatttccatagtacacccctacagaatcgttgggcagatctctgcaaaaaatagccgcacttacagcaaaatccactaatctatcttcaaggtcaaatttttggtctttcatattaatcacttctatatgtacatttgagtttgaacttgtatttgagtttgagtttgagcttgagctttgatttgagtttgagtttgagttttgatttgagtttgagctttgatttgagtttgaacttgtatttgagtttgtatttgagttttgatttgagtttgaacttgtatttgagtttgagcttgagttttgatttgagtttgagcttgtattcgagtttgagcttgagcttgagttttgatttgagtttgagcttgtattcgagtttgagcttgagcttgagttttgatttgagtttgagcttgtattcgagtttgagtttgagcttgagttttgatttgagtttgagcttgtatttgagcttgtattcgagttttactagaaaaccttataacacaaaatcaccatggccgtcatgatagttgcgatcaatacgcctttggccctgttgtctcttcgtattcttaaaaacaaaaagaaggcgaccaaatttaaaatggcccccaaggccaaaaggcttccgatatggccttgctgaacagcggcttcaaaggtgtcttttatacccctatctgaaaatagcagaatgtataaaagtgtgccaacggtgttggcgataatacctactgcaaaacctatgatcaattcttttttatacatgtaaattccaattattaatgtcttgtatggcgtggtgggcggtcagatcgaactgggtgggcaccacggatatatagccgttggccagagcccattcatcggtatcctctcccttgtccaagagttcaaattcgcctgtgagccaataataatccttgcccatcgggttggttcgtttgtcgaatttttctttccagttcgctcgtgcctggcggcatatttttatccctttgatgttttttccccctagtttcggaatattgacattgagcactacgccagtcggtattccgttggtgagtgcttctctgacaatttttgttatggcggcctcggcaggcccaaaatcggcattccaagaatagtcgcataacgagaaaccaattgcgggaatcccctcaatacctgcttcgatggctgcgctcatcgtacctgaatagataacgttgatcgaagagttcgagccgtggttgataccgctgatacagatatcgggtcttttgttcaatagctcttgaaggcctaatttcacacagtcggccggcgttccgctacaactgtattcctcaatagcaccattatcaaggtctattttcatttttttcgaatacagggcagtgtccaaagtaatggcatgacccatacctgattgcggactgtcgggcgcaaccaccacaacatcacctattttcttcatatagcgcaccaaggctctgagtccgggtgcagtaattccgtcgtcatttgttacaagaatcaagggttttggcattgcgtataatttatatggtaaaaatacgtttaaaaaaagatataactccctttcttgtactgatcgaacgggtttaaattttttcaattagctaaatcccgaggcctcgagagcccttttgcgcccattttttgtctttttttcgttccgtagtctaaattatgcaactcgaaaaagtcttcaactgatctcaaaatcgctaattcctgcccgtctggcaggcgggttcgcttcaatccaaaaaatttaaaccagttcatcataaaaatcaggcatcagtgatagactggcatggttttttcagtaccttagggaattcgataagaataaacataagatatagtgagtttttaaatgcaggaatcctgattttatttatctccacatcttgaaattgtaaatactattttatgaaaaagaacttggcctatggtttattggcactactcattgccattaccgcatgcagcaataaaacttttgaaaatgacgacaaagacaagttgttgttagacttgattacctatgttttggcgaagggccactatgagcccaaagatatcgatgatgatttttcggtcaatgtctttgacgatttcatcgagatattggatcctacgaagcgttattttatggaggaggatatcaaagacttcgagcaacataaatttcagatagatgaccagatccaaaataccgaaatcgactttttcaatgtggtctataatcgtttgatgctacgaatgaaagacgccaaagtcatctacaaagaagttttagagcagccattcgattataccaaagatgagaccatcaatattgaatatgataaaatgtcattttcggctacccgtgaagatttgaaagaacgatggaggaagcagttgaagcatgccactttgaatacctatgactcaaaaatatcacatctacacgaagatgccgaaacggcaaaagaacatggtcacgatgaagacgaagaagaaatgacccctgtcaaagcagaaatgtcttcaagagaatcaataagaaaaacattggacgagtattttgatttcatcaatgacctagatcgtgaagattggtttgtgcagtatatcaataccattgtagatgagttcgatccacataccttttacttcgcacctgaggaaaaagaagagttcgatacgagcatgtcgggtaaattcgagggtataggtgcccgtttacagaaaaaaccagaaggcgctaagatcgtcgatattatatcaggtgggcccgtatggcgtgatgcacgtattgaagtaggtgatattatcgtaaaagtagggcaagagggtgaattgcccattaatatagtgggtatgcgtttagaagatgccatcaaaatgataaaaggcccaaaaagtactgtagttgatttgacaatacgtaaaatagacggttcgcaagaagtgatttctttgaccagagacattgtcgaactcgaagaatctttcgcaaaatcggcgaatattaccaagaaagatgagaaatacggattgatcaacctgcccaaattctatgttgattttgatgattatagcgagcgaaactgcgcaagcgatgtcgccaaagaaatagagtgcttaaagaaagaaggcattgaaggcttgattttagatcttcgtgacaatggcggtggatctttaaagaccgtagtggaaatggccggactttttattaaagacgggccaatcgtacaggtgcaatcttcgggcaagaagaaagaggtatatgatgataaggacgaacgtattcaatgggccggcccattggtgattttggtcaacgagctttcggcctcggcctctgaaattttggccgctgccatgcaagattacaaaagagcggtggtgattggtagtaaacagacttttggtaaaggaacagtacaaaacgtgatcgaccttgacaatatcgttcgcagtaacgagtatggcagtctaggcgccattaaattgaccatgcaaaaattctataggatcaatggaggctctacgcagttagaaggtgtaaagagcgatatagtgatgccagacaggtacagttacattgatattggtgagagagatcaatctaacccgttgaaatgggataagataagcgaggcggactatgacctttggggtggtaatatcgattacgaccagaccattgccaatagtatggcaagaatgaaagaccacccccaaataaaattaattgaacagaatgcgcaatggatcaaggcagaacagaccgaacatatgatctcgctcaactatgaggcgtataaggccgaaatgaataaagacaaagaaaaatcagactatttcaaaaagatgggcgattatgattcgcaccttacttttgaatcgttgaagtatgaaagagaattgtttgcacaagattccgttttaagggaaaaaagaaatcgttggcataaaaaccttgccaaagatgtgtatgtagaagaggccataaacgtcttgcaagacctaaaatcgaatcgcattaaaaacggaaagctggccagtgtaaaagggtaattccttacataaaaaaaacaaagtcttaaagccccaacggtaaccgttggggctttttgcttgtaaggtatttacgaagatgcgaattaattgtatgtcgataaaagaaagtaaaaagatacatttttaacattttttcatatcttgtgaaagcctcttagattacttcattgattttttacttacattttatggtggcgttaggttgattagccattttggacttatggtatagcgtattttttttgaagaagataccatgcctctttatggtagacctaacaggtttttacctgtctgccgtaggaggaaaaacctgttaggtctggcaagccaagaaacaggcattatctctttagaggttttaaaaatgataaggcttttgaaaaagaaaaagcgacccgtaaaggccgctttgaatgttttcacaacggaataatccttattgtgaattgctttcagtatggtaaagatattaaaagaaagcaattacgcaaatgtgggtttttgtaatgggcttattataaagatttttagttttaaaagaaagaagagtatatgaaacgaattttaggattggatttggggacaacctccataggttgggcattagttgatgaggcaacagaagacaatgagaaatctaaaatcataaaattgggggtaagggcaaaccctcttacaaccgatgaactgacagattttgaaaaaggaagaccactttctgttaatgcagataggacattgaaacgaggagctagaagaaatcttcaacgctttaaactaagacggaataacctagtcgagattctgacaaaacattgcattatttcaaaagacaccagtttaacggaaataggcaagaatactacgcaccaaaccctttcgttaagagcaaaagctgcaagaaaaaaaatcgagctagaggagttggcaaaggtgtttttggcaatcaataaaaaaagaggttataaaagcagtagaaaagccaaaaatgaagaagagggaaatctaattgacgggatggcaattgctaaagagctatatgataaaaaacttacgccaggtcaatatgtttatgagttattgaaccaaggcaaaaagtatattccagagttttatcggtcagatttgcaggccgaattcgatgcaatttggggttttcaaaagcagttctatccagaaattttagtagacacgttatataaagaattgttgggtaaaaataaaacccaaacctgggcaatttgcgagaaaccttttggtattgtaggcatcaaacaagagggcaaaactaatgagaaacgattacaacgatatcaatggcgagttaagggtttaactgaacaattggaatcagagtatctcgcaattgtattgcaagaaatcaacaataaccttaacaaatcaagcgggtatttgggagcaatcagtgaccgcagcaaagagttgtatttcaataatgaaactgtgggtgaaaacttgtacaatcaactccttaaaaccccacatacttcgcttagaaaccaggtattttaccgccaagattacttagatgaatttgaacaaatatgggaaacacaggctaacttctacaccgaactgacttcgaccttgaagcaggaaataagggatgttattattttttatcagcgtaaactaaagtcacaaaagcatttaatttctaactgtgaatttgaaaaacatcataaggccgttccgagatcatctcctctttttcaagaattcaaaatttggcaggtcttaaataaccttgaatttaaaaataagaccaccaaagaagttcaagttccagataaagatttaaagcaattattgtttgaagagctaaatcttagagggaatttaaagcccaatgaaattatgaagattgtaggacttccaacaaaagagtggagtttaaactataaggaagcaatagaaggcaatcgaaccaaccaagctctatatagtatttaccaacagatagccgaaaatgaaggctatggttttgaatggcccaaaaaatctgccaaagaaataaaagaggaactgaaaataatctttccccaaattggaataaaaccctctatacttgattttgacgcagaactcgatggtggggtttttgacaagcaagaaagttatcaattttggcatttattatattcttccgaggatgattctaaaatattggaaaaggacaagttggtctatggaaactccaacgtagcccttaaaaagaaattagatcttaaatatggttttaaacctgagtatggtaacctattggtaaacataacctttcaaccagactatggaagtttatcggcaagagcgatacgtaagattcttccatttttgaaatcggggaacgagtattctgaagcatgtcagttggcgagttacaatcattcccattccatgaataatgaagaaagggcaaataggagcttgaaagacaaactggagcttttgaaaaagaacagtttgcgcaatcctgttgtggagaaaatcctaaaccagatgattaatctgattaacctggtgatcgaaacctatggtaagccagaggaaatacgaatagaactagccagagagttaaaaaaatcagctagtgaacgtgcggataccacaaaatacattaacactgctactaaaaagaatgaagaagtccggaagattattgccaaagattttggtataccgaatcccacccgcaatgatgtcattaagtataagttatacgaagagttgagcgaaaatggacataaaacactttttacgaaccagtatattccaagagagaaattgttttccaaagaaatagatatcgagcacgttattcctaaagcgatgctgtttgatgattccttttcgaataaaaccctggcatatcgaaacgtgaatttaaaaaaggcagatcgtactgcttttgattttattgaaaatgactataataatgatttggaaaactataaatcaagagtaggggtcttgtataagaagggtaaaggaagcattagcaaaggcaagtataaaaaactgctaatgagcaaagaaaatctgcccgatggttttattgaaagagacctaagaaatagccagtacattgccaaaaaggcaaaacaactactagaggaggtttttaggacggtcaatacaacaactggcagggttaccgataaattgcgtgaggactgggacttgatcaatgtgatgaaggagttgaatcttcccaagtaccgaaccttgggtttgaccgaaatgcaagaaaggaaagaaggcaagaaagtagaacaaattatagattggaccaaaagaaacgatcatcgacatcacgccatggatgctttaaccgtagcttttacttcttatagtcacatacaatatttaaataacctaagtgcatcacgagataaagaaaacagtacgttgtatggcatacgaaataaaataaccaaacaatatgtaaacaaaaacggtggaagaaaacgaaggtttgtccctcctatgaacaattttagagaggatgcgaaacagcatatagagggtattttgatttcgttcaaagcaaaaaataaggtcgtcactaaaaacaagaatagaaccaagcttgggggaaaggataaatacaacgaaaaaacacaattgaccccacgcggtcaattacataaagaaacggtttatggaaaaagcaaacgtgcgatggagaaggctaccaagcttaacaagcgtttttctttagaacaagctaaaatgattgttgataaagacattagagtattggtgttgggtcatttaaaaaagcatcaaaacaatcctgaaattggttttgacactaaaattttgaaaaaagagcctctaatctataaagatgaatcgttaaaagaggtacggtgttttgaagaaatctatacgataagaaaagacatatcccctgacttaaaggtagacaaagtagtggacgagggtgttaaaaaggtgcttcaacagcgcttggtagaatttgataataagcccaaagaagctttctccaaccttgataaaaatcctatttggctcaataaggccaaagagatttccataaaacgggttaccattaccggagtgagcaatgcagagcctttacatttcaaaaaggaccacttgggcattgaaattttggataaaaataatcaaaagcaagctgtggattttgtgagtaccggaaacaaccaccatgtagcaatttatagagactcaaaagaaaaattacaagaaaaggtggtttctttttatgaggctgtggccagggtaaatgaaggtttgtcaattattgacaaagaatataattcggatcaaggatgggaatttctttttaccatgaaacagaatgaaatgttcgtgttcccttcagaagattttgacctacaagaattggatttgatggacgagaagaatgcacctttaattagtaagtatttgttcagggtgcagaaaatatcgacaaagaattatcttttcgcacatcatttagaaacaaaagcaataaatggggaagatctgaaaaataagaagatgctttctcaagtaacctatcattctatacgaagtacagagcctcttgatggaatcataaaagtcagaaccgatcatattggtaaaatagtacaaataggagaatattgattaaatcaccaaaccttagtaacaccgtgactcatagtcacggtgttacgaactcaaaaacatgcaattagaaaaaggctatctataccacatttataatcaaggcaacaaccaaagaacactattctttaaacaagagaattatctgttttttctaaagaaaataaaaatttatgtttcgccttatgcagatattgttgcttggtgcttaatgcccaaccattttcacttgatgattttattgcgagaagaagagttgcctgtgagtgaaagtgatacgatgactcaaagtcatcgtatcactactaaaaaaagaacattaaacaattcaatagctatattgctccgttctgacactagagcaataaatattcagcaaaacacaagtggttctttatttaaagcccataccaaagccgaatgtatcaattgccataaagtaatcgccccctcttttacgacccaaaaaggagctacaaaaatcaatgtccaaaatcctgaaaggcaatacccacaaatttgtttcgattatattcatcaaaatccggtaaacgcaagattggtaaaaaatgaaattgattgggaattttcctcggctttggactatgcaaatttgagaaacggaaaactagtgaataaagaagttgcggccgagtatttggatttttaaataaaagagtaacaccgtgactttgagtcacggtgttactactactaaagttatgatcaaacgaaccctatttttcggaaacccggcctacctgagcaccaaaaacggccaattggtggtcaactttcccgaagagggtaaaaaggaagcgaccataccaatagaagatctggggtatgtggtgttagaacattcgcaaattaccattaccaatgggctgttgatgaaattagtgcagaataaaacagcggtcatcacctgtgacaaacaacatttgccctgtgccctgtttcaaccgctggtaggccataccgaacagaccgaacgtatgcgccaccagatcaatgcaagccaacctttaaaaaagaacctttggcagcaaacggtacaggccaagatcgaaaatcaggccaatcatttgttacgccgtgaaaaaaatgccttaaaattgaaacgatgggcaaatgaggtcaaaagtggtgatacgggcaaccatgaggcgattgccgctgcctattattttcaaaacctatttaccgatctaacgcctggttttagtagaaatcaatcgcgtgatgttttgggtggcaatccgccaaacaatttgctgaactatgggtatgctatcttaagggcggttaccgcccgtgccttggtcagtagtggtatgctgccctctgtgggcatttttcaccgtaataagtacaatgcgttttgtttggcagatgatattatggaaccctatcggccttttgtagatgccgtggtttacgaaatggtaaggacaggggaagatatcagtgaactcaccccgattttaaaagcacagttgttgacgatacccgcccttgatgtttttttagatggtaaatggagccccttgatgaatgccatgagccgtaccacgagtagtttgtatgattgtttttatgggtcgagccgaagaatattatatccaatgtatcaatagcagatccactaggttggtacttgtccgccgtaggaggaaatctagtaggtcttgaacgttaaaaaatgctaacaaaagataatttttcaagactaaaccaataccgtagtatgtgggtacttgtactttttgacttaccgaccgaaaccagaaaagaccgtaaggccgctacaaggtttcgtaaaaatttgttggacgatggttttaccatgttccagtttagtatttacctgcgtttttgtgcaagtcgcgaaaatgcgaacgtgcatatcaaacgtgccaagatgaatttgcccaaacagggcaaggtgtgtattatgcagataaccgacaagcagtttggaatgatcgaactctttcatggtcaaaaagaggtagagcccgaaaccccgagtcaacaactggaattattttgaataacatgattgtctccttgaggggactataggggtgtccaacgtaggttgggaaattcaatagggaacaaatttcaaagcgagggtataagggttgttttttatttctacaaaagcacataaaaaacaggataccagcctgttacagcgggtatcctgtgaataatcc

SEQ ID NO: 2369 - DNA, 16311 bp, synthetic construct
  misc_feature 1..16311: note = Synthetic
  source 1..16311: mol_type = other DNA
tattcttaactcaggggtgctctttaaaatagtctgaaaatctttttgtgataaggattttaatatacaaggctctatactttctatactgtataaacttggttgattagtcctaaaactctcgaaggaagaaaccccatctccttcgaagaaaaattgagtggtaatttctttaccgtcattatttatccaagtccgtaaacaacctttctcaataaaaaacattgtttttgagatttgtccttccggtaaaagaattgtcttggctggaatttcctgctctttaaagaaatggttgaactctttcaactcattcaatattacagtcgtcaatttcttcatcgctcggttcttctatagttgccgctaacatcttatttacgcaagcaaatatataacattcgtttataaatttaaaacattcgcataacatttttttgtaatcacccaacccaacagcaaaaaaccaattttatcatacacttaaacatcaagctgttattttcatttacgaattctggcatctttgtagtactcttaaaatctgtaaaataaagagagcgatgatctaattcatccttatcaattaagcgaagatgaaattgaaaaataaaaaaaccccacaagtcattaaacttgcagggcttgtcttacttttggctgtttttagctaagcctttcagcggaagcggggggattcgaacccccggtacagttacccgtacgacagtttagcaaactgttggtttcagccactcacccacacttcctttttgtaattttgctgaaatcggatgcaaatatacatgaatgttttcaacttttcaaagaaaacaatcaatttcaaacctaatatttatacttttgtcgttttaggtcggtaaattatgaagaaaagaacaaaaatcatcccaataactgctggcatcttactgctaatcattatttcagccggtatatacacctacaatgcaatcttcaaaccgttcgatcatcccgaaacggtatacatatatatagatgaagagaagagttatgataaagtgatagaccagctgcaggaaaaagcaggcatacccaacgaaagaatcttcaatctgcttgccgacaggatgaaatacatcaacaacataaaaaccggtcgctacgccatcaaacccggcaccaccatgctcgatgcaatacgtctgctccgctcaggagtgcaagagccggtaaacctcaccttcaacaatatccgcaatatggaaagcctggcagggcgactttctagccagcttatgaccgacagcctctcgcttttggaagcactaaccaaccccgatatagcagcaggatatggattcaacagtcaaacctttggagccatgtttatccccaacacctaccaggtgtattgggacacgagtgtaaaaggactaaccgacaggatgaaaaaagagtacgatgcattctggaacagcaaccgcaaaaagagagccgaagagataggcctcacccctctggaggtatcaacccttgcatccatagttgaagaagaggcaacctatgcagatgaatatccaatagttgccggactatacctcaaccgcataaaacgaggcatgcgcctggaggccgaccccaccgtaaagtttgccgttggcgatcccacccttcgcaggatcctcttcaagcacctcgaagttgaatcaccatacaacacctacaagaacgacggactgccccccggtccaatcaggataccctctatacagggaatagatgcagtactcaaccccgtaagtcacaactaccttttcatgtgcgcaaaagatgatctctcgggccgtcacaactttgctgttacacatgccgagcacgccagaaatgcgagagcataccagagggcattgaatgagaggaggatttattgagatttgcggatgactttttgaaaattaaaataagaaagcgacccagcgggccgctttaaatgttttcacaacggaataatccttattgtgaattgctttcaattacaaatatatatataatttgacataaaaactattttttagttaatttatttttatgatctttggtcatcaccatacttaaaatgtaaaacacgatcaaaaatgagcaagacaatcttaggccttgaccttggaactaattcaattggctgggcattagtagaagaagctgaaacaaatcacgaatcttcaaaaataatcaagttgggagtaagggtaattcctttaacagtagatgaacaaacgaactttgagaaaggcaagcccatatcgaccaatactgaaaggacattgaaaagaggagctcgtcgaaacttacaacgttacaaattaagacgtgaaaacttaattgagatattgattagcaataaaataattaatcaggatacaccattaacagagataggaaagaataccacccatcaaacattaatgctaagagctaaatcggcacaagataaagttgatctagtagattttgctaaaatcctattggctattaataaaaaaagaggctataaaagcagtagaaaatcaaaaagtagtgatgagggtatagcaattgatggaatgacagtggcaaaaatactttatgagaaaaatattacacctgggcaatacgtatatgagagcctaataaatggaaataaaattattcctgatttttatagatctgatttacgtaacgagttaaaaaagatctgggacaaacaatcaatgttctatcccacattattaacaaatgacttataccatgctatagaagataaaaataaatcgcagacctataaaatcttggaatctccctggaaattagaggggttgaaacaatctggtaaaaaagatgaacaaagattagaaagatacaagtggagacaacaagcattatcagaaaaaatagaacttgaaaaactatcagttgttttacaagaaataaacaatgaaataaataaatcgagtggttatttgggagctatttctgatagaagtaaaatactatatttaaataaaataactgttggagagtacctttataatcagatattaaaaaacccacacacatcacttaagaataaagtcttttataggcaagattatttagatgaatttgagcaaatatgggaaactcaagctaaacactatccacatattttaaccaaagaactaaaagaagaaataagagatgttgttattttttaccagcgtaaacttaaatctcaaaaaggtaatgtaagtttttgtcagttcgaaagcaaacaagaacagtatgttgataattcaacgggtaaaacaaaatacagaactataggacaaagagttgcacctaaatcatcacccatatttcaagaatttaaaatctggcaaaacataaataacctcaactatataaacgaaaaagagaatcaaataattgaggtaagaaatctcgacgattatattcgtgaagaaatttttgaagaactgaatcttaaaggtccattaacacctacagacatcctaaaaattatatctaaacatatatttataaataaaatatcagactggagatgcaattttgaaaaaattgaaggtaataccactaacaaagcactactgagcatatatcagaaaatagctgaggcagaaggttatggttttgactgggataaaaaatctgcaaaagaaatttatgaagaattagaatatattttcactgtgataggtgttaacaaagaaatattgaaatttgactcaaattctaatgattttgacaaacaaccatattttttactttggcatcttctatattctgctgaagattcggataaagcaagtgaagaagaccgtttaatatatggtaataatgacactaaacttcgtaaaattcttcacaagaaatatgggttcaaacccgaatatgcaaaaatgctctcaagcattaccttagaacaagattatggtagtttatccacaaaggcaatgcgtaaaattacaccttttctgcaggcaggacatccatttgcaggaaaagctacgaatattagtgaagtaggcgcttgcgaattagcaggatacaatcattctaaaagtgaaacagcagatgatcttaatagaaagactctaaaagataaacttgagttattacctaagaatacccttagaaatccagttgtagagaaaatactaaaccaaatgataaatctggttaatcagattattgatgaatatggaaaaccagatgaggtaagaattgagcttgcacgagaattaaaaaaaacagctagtgaacgtgataaaatgaatagagaaattgcggatgcaaccagacgcaatgaaaacataaaaaaccttttaataaaagactttggaattccgaatccaacaaaaaatgatatagtcaggtatagattgtgggacgaattaagtgttagaggatataaaacaatattcactgataaatatattcctaaagagaaactattctctaaagatatcgaaattgaacatataataccacaagcccttttattcgatgattctttttctaataagacactagcatatcatgaagagaatcaactaaaaagcaataggactgcatatgactttatttgtcaggactattttttaaacaaaacagattacgaaaataaggttagtgattggtataagagtaaatcaatttcaagagctaaaaagaataagctacttatgacttattctgaaattcccgatggttttattgatcgtgatttaagaaacacacaatatatttccaaaaaggcacgagagatacttctggaggtattcaaaacagttattcctacaacaggtagcattactgacagattaagagaagactggggattgataaacataatgaaggaattaaatcttgataaatacagagcattaggcttaactgaacttgaagaacgctttgacgttggctctgaaaaaataaaaaaagtggaagttattaataattggaccaaacgaaatgatcaccgtcatcacgcagtagatgcattaactgtagctttcacaacacacaatcatatacaatatatcaataatctaaatgcacgtagagacacaagtcacaaaaaacatgacataatttttgcgatagaaaaaacaataacagaaagaattaatggaaatataatctttaaggaacctattccaaactttagaactgttgcaaaaaaagaaattgaatctatacttgtttcatacaaagctaaaaataaagtcactacaaataatattaataaaaccaagttacaaggtaaggaacgatataaaaaaacattacaaacaactccaagaggacagttacataaagagacaatttatggcaggtcactccgaccaatggaaaaagcgataaaaatcaataaaaaatttagcatagaaaaactaaatctaattattgacaaaaaagagcgtgatgcagttctttcacatctctcaaaatattcaaataacgttaatattgcatttgatactaaagttttaaagagtaatccaatcttattgaatggtgaaccactaaaggaagtgaaatgctttgaagaaatatttactattcgcaaacctatatctacggatttgaagattgacaaagttgtagatgctggagtaagaagagccttagaggaaagattaaaagagtttaatggtagttcaaaagatgctttttcaaaccttgaagacaatcctatatggttgaataaagataagggggtatcaattaaaaatgttactataataggagtaaattctgcaattcccctccactacaagaaagatcacactggaaaagaaatcattagtgatataggagaaaaaattagttccgattatgtacaaacaggtaacaatcatcatgtggcaatctatttagacaaaaacggtgaacttcaagagtccgtcatttcattctatgaagcagttgagcggaagaatcaagaattaccaatagtagataaatcttacaacaatcacttagggtggaaatttctctttaccatgaaacaaaatgagatgtttgtttttccttcaaaggattttgatccaacagaggtagatctattaaaccctgaaaattatgaactaattagcaggaacttatttagagtacaaaaaattggtacaaaagattatacattcagacatcacttagaaacaactgttacaaataatttggattttacttttaaaaggatacgcactccaaatggtctaaaaggtattgaaaaagtaagaataaatcacattggaagaattgtacaagttggtgaatactaatataaaaatctatgataaaaaaaaccctttacttcggtaatcctgcttacctgagtttaaagaacaaacagttggtgataaaattaccagaagtagagaaaaatgatcagcttccatctgagattaaaaaagaatcaatcagaacgattccaattgaggatattggtgttttgataattgataatggtcgtataacaattacacaaggtgtaatagaggcattattagaaaataactctgcattggttacttgtgataatactcgtatgccaattggccttatgttgcctttatcaggcaacaaaacacaaactgaacgttttcgtgatcaaataaatgccacactaccattaaagaagcagctatggcagcaaacagttcaatccaaaataagaaatcaggcatatgttttatcaaataaaaacaattcaattgttgataatatgtatatatgggcttcagaagtaaaaagtggagatccggacaattacgaagcacgagcagctgtctactattgggcaaatttattcaatgaaatagagggtttttatagagatcgagaaggtataccaccgaataacttgctcaattatggttatgcgattttaagagcagttgttgcaagatccttaatagcaagtggtctcttaccaacacttggtatttttcaccgtaataaatataatgcttattgtcttgcagatgatattatggaaccataccgtccatttgttgataaattagtttgcgaaattgttgctaaaggaaatgatataaaagagcttacacaagaaacaaaattcaaactcttgaatattccagttattgatgttattatggatgggcagagaagtccattaatgaatgctgttggaaaaactacttcttcactttataaatgctttgccggtaaagtaagaaaaataaaataccccacattcatgtaataattaatgaagcgatttagcgaatatagagttatgtgggtcatggttttttttgatttacctactgaaacaaaaaaggatataaagaattacaatatattccgcaaaagacttattcaggatgggtttacaatgttccaattttcaatctacttaagacattgtgcaagtagagaaaatgcagatgttcatataaaacgagtaaaaaacatgctaccaccttccggtcaagtaggtattttgtgtgttaccgataaacaatttggtaacatggaactatttgttggggaaaaagagactaaagttcaaaccccttatcaacaattagaactattttaaactcccttttctatataatagaataaaaaatcctgccttctgacaggattttttacttgcaacaacatcttttttttaatttgacaatcacctataacagactgataatctatacaattacgcagatcctgttgttgtgtaataccaaaagtactgaatatgaaagcaattcacaaccttcgctgcctgctcttctgttaattgaccgttgttgtgtaataccaaaagtactgaatatgaaagcaattcacaaccaggttacgttattgttgagcgtgagatgcgttgttgtgtaataccaaaagtactgaatatgaaagcaattcacaactatgtcaagtagttaagtgctaaaaaagcagttgttgtgtaataccaaaagtactgaatatgaaagcaattcacaacatccaggatgttgaatatgacattcgagtagttgttgtgtaataccaaaagtactgaatatgaaagcaattcacaacaaacagttttgtccaaccccacttcatatggttgttgtgtaataccaaaagtactgaatatgaaagcaattcacaacattcttttctttgcaacaggatgcaagcctgttgttgtgtaataccaaaagtactgaatatgaaagcaattcacaacgcctttatttcttcttcttcttcttcttttgttgttgtgtaataccaaaagtactgaatatgaaagcaattcacaacacaggtatgatagggagacaactgttccctgttgttgtgtaataccaaaagtactgaatatgaaagcaattcacaacaatcgtccagtcgatttaagtattgcgatagttgttgtgtaataccaaaggtactgaatatgaaagcaattcacaacagtatcagatagttttgaaagaagttcattgttgttgtgtaataccaaaggtactgaatatgaaagcaattcacaacaatatctcagatgaaattttttccagttcagttgttgtgtaataccaaaggtactgaatatgaaagcaattcacaacagaataaatgaatcagtaactataatgttttatggttttcatttttctgaacatttaatatatatactatctgaattttgtgttatgtcatatgtactcaaataaagccaaaaatgcaaatcttttatgctccaaagcttactaataaccattttagaacttaaatcaattgttgcagtgccttttgaacgtttggcactattgtgaaagcaaacagcttcgggggttgattcatttaagcacacaatattaacacggtcatcttctctgccgggataattatcaaagatcggttccggattccaattaactgtagctaaccttgttttactgtcaacatttactgaaacaaaagtgggaagttgtaatttaccttcggctacctgaatcttactataatcaagtttgtactcaggatattcacctatgacagcattgtttaatgctttcgacactgcttttctataagcgttatctgtatttaaaaaaccttttttaattaccctgtttaatggcgaaagagatttattcaccatcccaaatctcattctgtaagctaactgtttaggtgttttgggatcttttggaattacatgttttcttaatatttgcttcccatctttacttacataagcaacataaggtcctattttaccagaaatcagacctaatttttttaagtctactatacccataatgtttaattattattcattacaatatacctattattatgcatattagcaacacctaatctctatccacctcatatttttatgaggaggatataaagtgaatatgaggaggatatgaagagggttcggacttggtacggagtagctttagctatgtatagtccttaaataggtttacactaagaataattttctgaaaaaagggagctgctatatgtaattgataatcaatgtttatatttttaacaactgataagaatagctgagggggcggaattcatgcagtactagcttgctaaatatcgtaatttttggtatatttgtgaaatgccagtctatcaataatatggcaactatatatgagcaatatcatatattttgtgtaacgaataaactatatattgacaaaacgaatgattacttccaccataagaaaatcagggattaaagtagtccgtaagataagagttatgcattggtagcatatttagaatgaatgaatgaacgaaatgaacgaaaaaatcaaacattattttattgacacacctatttattcacaagctgaatatatatgttataatatctcgttcatttcattcatttcgttcataaaaagaaagaaagaaagaaagaaagaaaaataggtattaagaatatataaagtatcgatggcgtgcttatatgcttgccacctcctaccatgagacagtaagaacaagtattccaccaatcactaatgaaatataaaccaatctataacaaccttttgattttttgtatatttaataccgaaaaaaataactacttttgcaactcattataagctattgcttaagaaataagttcattcataaaatgataaacagaaatttaattcgtataaggactgttcagttagtctactcatggtatcaaaatacgaatagagatttaagaaaagctgaaaaagagctgttgttcgggttacaaaaatcatacgatctttattattacatgctgcagctgatgctggaagtaactaaggtgtacgaacagagagtggaggctaaaaagaataagttccttccttcagaagaggatctgaatccaaacatgaatcttcttgagaacaagttcataatacagctgagcgacaacaagcagctgcagaagtataacctcgacagaccacaatcgtgggaagagaatgagtcatatgttaaaaacctgctggaggttattctggaatcggaaacatataagaactattctcagattcaagcgccaacatacgatgaggacagggagttctggagaaaggtatttaagcagtttatatgcggaagtgaggagctatacgatctccttgaggatgaatgtatatactggaatgatgatatagagattattcagtcgttcgtgctcaaaacaataaagagatttaatgaaaataagggggctgaccaaccgcttctaccaatgtttaaggatgaggaggataaggagtatgcactgaaacttctgcatgagactatccttggggagaaaaaattcagggatcttattgaggagaatacagataaatgggatttcgagaggattgctgtgatggatcttattataatgcaggtggctcttgccgagatttttacttttgaatcgatccctaccagtgtttcgctgaatgagtatattgatatcgcaaaatcatacagtactcctaagagcggtacttttataaatggaattttagatgcgatagtgcataaaattaagaatgaaaatcttatctttaaaaattaattataaacttataaaaaataatttcttatgaatattttattacaagcaacagcacaaggtcctgcaggtggaatgggtggaactttaatcatgcttattgcaattattgcagtattctatttcttcatgatccgcccacagcagaaaaagcagaaagagctgcagaagagccgtgaagccatgacaacaggcgataaggttgttactgcaggtggtattcatggaagaattaaagaggtgggcgacacatggttccttgtggagattgccgatggtgtgaggattaaaatcgagaagacatcggttttccaaactacaaaagatatagctgctcaataataaattcattcgtgcaatggatttaaaagctatcataaaggatggggttcccaggttaaaatcatacttctctgctttgccgtggaagagtatgctggctttcctgtttttccttttggtagcttttattttctggttgatgctcttcttccagaaacaaaatattgaaggtacctaccgtgtaccattgaaatacacaaatatccccgaagatgtggtgtttgataatcctttgcctgcttatattgatgtgagcgtttctgataatggggcggagattttcaggcttgatattaggaaaaaggactcgctggagatcgattttgctgcattgacggaagatggcactacgcttattcagggtgagcagtttcgtcaactgctgcggggtaagtttgcatcgggtacgattatcagggggtattaccctatgacgctatctctggctacctctaagctggagagtaaggagctgaccgtggcttttgacggggagctgaccatgagcagggctaatctggttgccgactctgtaacgtttattcctgaaacggttatggcatacggatcgaaggagtcgctcgacaagcttaaggttgctactactgaatatactttgtttaagaatcttaacgctacctctcagctgaagattaagattaatccggtggagggggtgaaattctctcctactgaggtggatatttatatcccggtggttgagtatactgagcaaacattcgaggttccgataagggctactcacctaccccgaaatcttgatgtgaagtttttcccttctcgtgctaaggttacattctctgttactcttgatgagtataagaagattgttgctgaggatttcgagattgagctggattacaggaaattcagggataatcaggatggacgtgttgaaattagtctgaccaaagcgccggcaacagctattgagccgaagctatcacctactcaggttgagttcctatttgaaaatgttgactgaagatgatcagaattggtgtgaccggaggcataggtagcggtaagtctattgtgtgtgatattttccgcatttacgacataccggtatttgatgctgacatcgaggcgaaaaggcttaatgacacttctcaaacaattagaaggcagcttattcatcatttcgggcctgatatctacgagaaagatagattgaaccgaaggagatttgccgaactgattttcagcaatgatcagaatattaagattgctaactcaattattcatcctgtggtggccgactgcttcctggagtggtgcaatagctatagggagtgccctgttgttgttattgatgctgctcttctgatagaggccggctttaatcagtttgttgataaagtgattacggtttatactcccgaggaaacaaggattgagagggttatgaaacgtgacagggtaagcagggagcaggtggaggcgcgtatgtttaaccagatgcccgaagaggagaaggtgaagcattctgattatgttatctacaatgatagcagccactcactgatagagcaggtttcgaagattcttgatgagttatctttcactcactcagcttaaactgcagctaaattattgcaattaagatttttagatttaactttgcagcttaattgactattaattttgtaaacaatagaaaaaaaatgattgagaaatttggtattaatgccgggaaagtatggactgtgcttgataagaaaggaaagctggagataaaggctcttaagaaagagacaaaattaactgataaagatctttacgctgcattaggatggctgggacgtgaagagaagattgctattgagactgaaggaaaggatatcttcatctcactgaattaagattttagacttacctatatgattattgaaagagcggttgtttaactgctcttttttaatattattttgtaagtttgtgctcttacatgtaaatcctttattgaatgactgaaaaacaattgcataaagagcttgctgatatattcactgcagatcagctgtttacagatgagctctctcgccttacaaagggtacggacgccggtctgtatcgtctcataccaaaagcggttgttaaggtaaattctgaggaggaggttattcgcctgctcaggttttgcaacgacaagaagattcctgtgacttttaaagcggggggaactagtttgagcgggcagactatttctgactccatacttatggaggcgggcaagggttttgatttttcggttattactgataatggggagacagccacttttgggtgtggtttgacaggtggtgcggctaaccttattctaaggagatatagaaggaaactgggaccaaaaccggcatctgttaagtcggccaagattggtggtatcatctctaataacgcaagtggctccagctacggtattctgcacaacagctacaacaccatcaaatcgatgcgcattatttttgcaaatggctctgttctggatacgggcaatagcgagagccgcaaagcttttatcgctgagaatcctcaactgattggtgatatagttcagctgcacagggatgctactgagaacaaggcgattgaaagcagaattgcatcgaaatttaagcttaagaatacctgcggatatggagtaaactctttgatcgattttgatgatccaatcgatataattcagcatctgatgattggttcggaaggaacgcttggctttatctcacaggcaaccttcagaactgttcatgatgctcctctgaaggctactgcaatggtttacttcaggaacctgcgtgatgtgagtgaggctattatcccgctcaggggcagccaggtgagtgctgctgagctgatggacagaaatgcacttagggctgttgaagatcagcagggtatgccggaagaactgaagacactgcctgagggtgcgacagctctgcttattgatacttcggcagatgatgaggctactcttctgaatcagatgcgtgaaattgaggagaggcttgctcatatagagacattgactccaataaaatttactactgataagtttttatacaacctctactggaatgtgcgtaatggtctgttcacctcggcagcggctacccgccctgctcacactgcaagtattatagaggatgtggcttttagcggagagagtctgggtgatgcgcttactgatctgcgtgagcttcttgtgaacagcggttatagtgatgcagtgatgtggggacatctactcgacgggaacgtccatttcacagttttccctgatataaacagtgtggaggaggtgaaaagatattccacttttatgcatgagctctctgaactggttgttgtgaaacatgatggcagccttaaggcggagcatggtaccggcaggaatatggctccgtttgtggagaaagaatggggaagcgatatatacgatttgatgaagcgtataaagagggcatttgatcctgataatgttcttaatccgggggttattataaatgatgacagcgaggtatttataaaaaatctcaaacggatacctgatgcaaatcctattatagataaatgtattgagtgcggattctgcgaggttgtttgtccttccaaagatcttactctgacaccaagacagcgtattgttgcatacaggtttattgctgacagcagctctgtagagaaaaataggcagaagagtattctgaagcaggtgagggagatatcatatccgctggatcagacttgtgctacggatggactatgtggtatagcttgtcctgttgacattgatacgggtaagcttgtgaaggagctgagatggcagcagaatggcaaactggcaaatatggtggctgacactattgcctcaaatatggcgccgcttacatcttttatcaggggatttattactctgccccactctatatctaaggtggttggatataagtccatggagaactttgcaagaggtatttacaagcttggggatggtgttttcccactttggacaaaatatacaccatcagggagcaaaaagataaaacagaatatatactcaaatgagaaccccgattcgcctgaggtggtatatttcccatcatgcataacaagatcaatgggtggcccttcgttcggctacgaagagaaagaggatctgcctgcaaagatgctctctgttttgagaaaagcggggtataaagttattatccctgaagagaaaaacagactttgctgcggtatggccttcagtagtaaaggtttcagaaaacaggccgccaggaaggagaatgagctgaatgaggcgcttttaaaagcaagcaggaacggtgaactgccaatagtgtgtgatatgagtccatgcctcctgcatatgcgtgagactttggacgggagactaaaactgtatgatcaggttgagtttattcatgattttttaattggacggctccagttcacaaaagcacctgtgaggattgctgttcactctacatgcagtgctacaaagatgcagctggaggagaaactgtttaaggttgcatcgctctgtgcagatgaggtgattgtgccggatagtgtgacatgttgcggatgggcgggtgaccgtggattcttctatccggaactgaataatgctgctctctcaccgttaaaaaatgagataatgaatgcgagtgagggttattccaacagcaggacatgtgagattggactatctattaacagcggtgtagcgtataagtcgctcgtttaccttgttgacaaatgcacaacaatgcacaacatagttgacgaattcagatcatagagaggaatcacctcatcctgtcgaaccctttgcc

SEQ ID NO: 2370 - DNA, 16243 bp, synthetic construct
  misc_feature 1..16243: note = Synthetic
  variation 2852..2905: note = n is a, c, g, or t
  source 1..16243: mol_type = other DNA
atgtattgcaaagcggaatggattaccccagcgaaaagccaaggatatttgtatccgactttgttgacttttctatttatgtggatgcagaagaacagttgctcgaagattggtatatttcccgttttatgaaattcagacagggcgcgtttaccaacccccggtcttatttcaagagcttttcggagctatctgagaaggaagcgatgaaaacggcgaaaacgatttggcgagagattaaccgaaaaaatctgagaaaaaacattttaccgacaaaggaaagagccaatcttatacttcacaagggagaaggtcattctgttgactttgtaaggttaagaaaataaatagtagatttattcgggttcatcagtatcgagacagaagggatgcccttccgggtcgatcattgttcttgaagttttgtagtattgttcgttagcaagttttgctccacattgcatcgcaaattgtacagcttcttccagattgtccacataaaagtctaaatgtagcatttgcccttgttttccttcttgccaaggccaggcaggaggagtatagttttctacttcctgaaaagctatcaccataccggagggagatgttatagctgcccaaccatttgcatgaggatgggtgcactgccagtttaaaatcttgctataaaactcggacataactccagcatcggcacaatcgataacaatgtttacttttttgattggggctttggttttcatgttgcagaattaatgaattatatgtttgtgttccaccaaataatatcttatttaatttatgaataagaatggagcgaaaaggctatcttttattgatgtattcttcgctccatcttgaatgacaaaggttatcttatttctttattgtaaatcgatgtacagttttgcttttgaacgtttctccgggtctgagtattacactcggatactccggtttgttgatactatccggaaaatgttgagtttcgaagcataccgctgcacgcatcggataacggtgtccgtgttttccttcaaaattacctgtcatccagttgcctgtatatatctgaacacccggctctgtagtcgaaatattcatttgaattcctgacttgggagaaaaacattctactgctaaggccaattcatcctcttttttatctaataccattgtatggtcgtagcctttcccgaaatgcaactgttcgaagtcttcttcaattcgttctccgatggtatgaggagtagtgaagtcgaacggagttccttttacaggttctgccttgccgtaaggaatagcagtatcgtcggttggaagatagttagaagcatgcatgaccagaatgtgatcgtttatagtaggatctccctcgcccgaaagattgaaatatgaatgatttgtaagattcaaaatggttgccttgtctgttgtggcttcgtagtctatatcaaacgaattgtcatctgtcaatttatagatcatttttacattcagattacccggaaatccctcttctccgtctttggatagatatgtcagctccagagtttgatgatccgtttgttttgcatcccatactacagcattaaaacctttcagcccaccatgtaggttattcggtccattgtttattgccaattcgtatgtaatgtcatcgagcgtaaattttcctttggcaatgcggtttcctgttcgtccgcatacagccccaaaatatggctcttcagaattgagatattcgtttagattattatgtccgagaacgacatcggtgagttggccgtttttatcaggtacggataaggaaactatttttgctccgtaattaatgacggttgcttccaatccattcttgttggataatacgtacatttttacatctttaccatctactttcccggagaagtttgttggactcaattttgatttggttaattctgtttgcatgatatttttttaagttatacgagcttttttataaatgataaacacaaatataaggctatttttaacaaaaaatatttttcttcccctgaatgtgaatctaacgatatctaaaaaataaaattgctatacctacatgtcgaacctgtatagtcatcggttgggcgaatcttgtgattttattatgttatagataacggctatcagagttgagaatagtcttagtctaatgtctaatggaagtgtttcaaagtcttaaattaagcaataaaccaaaacaaatggagttttaatagtgtttattctttaattgcaaagaagtatttattaaaaaagataaaaatactactataagatgtatttattttgtttctttgcagcgaatttgggtgctttgtactcattcactaaatactacttatttgtctttgtacaatatgtctgataagcatcagtataaaacgatatcactatttactacaggggtcattactacgattagtataactcttgttctttttcttttgggtttgacttttttggtaggatttaccgctaaaggcataggttcgtatctgaaagagaatatgggcatatcgatagagcttgccggaaatgtagatgatgcttctgtcgcgaagatacagaaaaacttgaatgctaatccgtatgttaagtctgtcgtgtatatcagcaaagatgaggcgaaaaaacaactggtagaagatcttggtcgtgatccggaagaggtgttaggatataatcctgctcatgcctatttcgatgtgtttataaagtctgactatgtaaatccagacagtataaaaaaagtagaagcaagtcttaaagttcaaaatctgaaaggagctcagatagtaaataatatcgtttataatgaaagnnnnnnnnnnnnnnnnnnnnnnnnnnnnnnnnnnnnnnnnnnnnnnnnnnnnnnattattcagctgaatatatattcaaagagatttttgataaatacaatgcgattggtgggtgcaacaaactcttttatcagatggccttttatgtggcgtatggtaattagtggcgttgttgctgctatcttggcgaatttagctattacgggagtaatatattatattacaagcataattcctgatatgctgtctattgtgaaaatgtacgaattgttgattgtatatgggcttgtccttatctttggcatacttatagcggcttttgccacagcattttcggtgaataggtatttaagaatgactacaaataaactttatcacgtttaaaacatatggataagaaagattttgcttttggcaagctaaattacatcatttgtgctgtgtcggttgtaattattataattgggtttatcctgatgacagggccatcttccagcatcgaaggcgggtttgaaccggacatctttagtgccaagagaatcgttgtggctccaatggtgtgtcttgcagggttcttactgatgattgtcggaatactgtatcctcgtcgtaagagtttagctgaggagaacaaagagcacaactgattaattacaaaactaataaataacgatgagtatttttgaggcaattataattgctattgtagaagggcttaccgagtttcttccagtatcgtcaaccgggcatatgattattgctcaaagccttttaggaatcgaaagtagtgaatttgtaaaggctttcactgttattatacaatttggtgctattttgtctgtgattgttttatactggaaccgcttttttcgctttagaaatgatagattaagagcggattttaaaaatatattcagctatttgttttataaattagagttctattggaagttgttgatcggttttgttccggctgcttttttaggattgatctttagtgataaaatagatgaattgctcgaaagtgtaacagttgtagctatcatgttggtgcttggcggtattctgatgctgtttgtagataaatggtttaataagccgaaagaagactctcaagaaataacatataagaatgcgtttataattggtttttttcagtgtatagctatgattcccggagtgtctcgttctatggctaccatcgtaggggggatgagtcagggtttgagtagaaaaaatgcagcagaattttccttcttccttgcagtgcctacaatggctgctgctaccggatggaaagtgtataagctgataaaagcacccaatggaggagcatttgattttgatttcagcatattattggataatatgactgtgcttataataggaaatgtagtagcgtttatcgtagcgctgttggctattaaattctttataggatttgtaaccaagtatggatttaaactttttggctggtatagaattgtagttggaggaattattctaatccttatgctggcaggacacgaattaacagtataatggattttatatcaggagaggtcttatatataaataagccactaaattggacatcattcacccttgtgcgcaaattgagaaacaaattatgccgcaagctgggtattaagaaattaaaagtcggtcatgccggcactctagacccattggctacgggtgttatgattgtttgtacagggaaaaagacaaagttgatagaatcgtttcaatatcagactaaagaatatattgcaacgataaagattggagaaacaactccttcatttgatttggaaacagcagtagatggagtcttccccgtagaacatataacgcaggagctggttgaggctaaacttaaagattttattggagaaatagagcaagtgccgccaacatattctgcctgtaaggtggatggaaaaagggcatacgagtttgcgagagaaggacaggatgtagagttgaaaccaaagttgttggttatagacgaaatcgagcttctcgactattcctttcccgaaataagagttagagtggtatgtagcaagggtacatacatcagagctttggctcgagatattggagttgcgttaggctcaggtgcacatcttaccgcactggagcgaacacgaataggagaggttactcttgatcagtgtattgagggaagccagatagaagaatttgtggacgcactaattattgataaataataaatttagataaagaaacatgaaactttctcaattcagatttgatcttccagaggaattgatcgccactcatccgtcaaagaacagggatgagtcacgcttgttggttgtcaaccgtaaaaccggggatattgaacacaaaagttttaaggatattattgactatttcgacgataaagatgtttttgttttcaacgatacgaaagtctttcctgcccgtttatatggaaataaggagaagaccggagctacaatagaggtattcttgctgcgtgagttaaacgaggaattccatttgtgggatgtgcttgttgatcctgctcgtaaaatacgtataggaaataaattgtattttggtgacgatgattctatggttgccgaagttatagataatacaacttcgcgtggacgtacacttcgttttttgtatgatggtccatccgaagagttcagaaaagcactttatgctcttggtgaaactccaatccctaaatacctgaacagaggtgaagaacccgaagataaggatcgctatcagactatattcgctaaaaacgaaggtgctgtcgtagctcctgctgccggacttcactttagccgtgagttaatgaaacgcttagaaattaaaggtgttcattttgcatatataactttgcactcgggcttgggtaattatagagatattgacgtagaagatcttacaaagcataaaatggactcggagcaattgcttattactcaggaagcgacagatatcgtcaacaaagcaaaagatgaaggtcgtagagtatgtgctgttggaacttcggtgatgagagctgtagaaacaatagtgagtacagatggttacctgaaaacaaatgaagggtggacaaataagtttatcttccctccgtatgattttggtatagccgactctatggttactaattttcatttgcctcagtctacattattgatgatgactgctgcatttggcgggtatgaccgtataatggatatatatgaaatcgctgtaaaggagaaatataaattcggaacttacggagacgcaatgcttatcatttgatgatactcgaaaaagaaaaaaagcataatgtttatctgggacttggctccaacttgggagaccgaggagaaaatctggataatgcaatagattatatagaagagcggattggcgaggtgatcgccacttccgctttttatattaccgagcctgtcggctttgagtctgctaatcagttcttgaatgctgcatgcagagtggagactaaacttactcctattgaagtattacaggctactcaatggattgaaaaagagatgggaagagatgttaagtctcagggagaaagatacaccgatcggattatagatattgatgtcttgttatacgaagatgtaattctggattctgctgatttgaaattaccgcaccctcatattcacgaaaggtcttttgttttatttcctctagctgagattgcaggggaatacatgcatccgattcttcataagacaatcaatcaattaaaggatgccatagtgccaccgacttccatagcgtaataagggatagtattattgtattgaaaatatataaatcagcagtttcattgtaaactgctgattttcttttttatgactttcttataaattatgactgaaatcaaaactttcttgatggttgtctattgctcatttgctgaatgagagaaaaatgcagggaaggtaaccgtactctcattatggtatctgtctgaagctgttactgtataataatacccaaaatcgccctctttgattgtaaaagcatagctatttgttcgtagacctgttgataatatattacctgcatcatttgtgtctactggttctttatctgatacatacacggtatatgtgtaatctccatctgctgttggcggattccatttaatgtttagcttgttgtctttgtctttaaagacttgcaaatcagttggggaattgggggcaatgttgtttagccatgtcagcggcggtagcttcgccggagtagggtagtaggtgtgtatagagtctaaaacccctttcagattgctgagaacattcgctgttctaaaatatgctgctccggggatctttttatcccgaatgtattgcatctggttcgtaatatcttgtagcggccactttaattcatccatctgataaacacccagtcccggagcaataagccttccgttactatttgcaatccagtcgttaaggaacggatagaaataatgatcacggtaatacatcattgggaaaagtaggtcgtgttttccgcttttcagccaatgtcctgcatcctgaaacactgtttcataagctgtccagccatcgttgggtgaaacctccggtagaactttgtatcttcctaaaggagagctgctcacttgtacccatttttttagagactttaccgtatcgtatgcttcactgatcagcttgtttatattttccctacgccaatcgtatagattcatcccgtttccatattttcggtaggtatcgtcatcgggaaatttgcgggagttactcggatagcggatataatcgaaatgaatgccatctatatcataattctgaacgatctccttcactatagatactatcagattgcgtgtttcgggcattccgggatcgagataccatctttctcctatagctttgtaatatgaaggtttgttttgtactactgtggcttttcttcgccttcctttgcctgtatatcgcactgtggctttatccataggataggctataacccatgcatggcattccatccctctcttgtggcattcttctatagcgaaggccaacgggtcgaaattgtcatcatgattgaaatatgagctgagaggttctatcttggagcgataaaaaacatatccttgagctcttgcctgaaagagtactgtgttgaaattcgcttcctgtaatttatccagaatcttttttaattgttctttctgagccttgacgctggtatgctgggtaggccagtcgagaccccagtttgttgttagccaaacggcacgtatttcggtagcaggagcttgagaaaatatatatataggaagtagtaaaagtagaaataagaggtggaacggtttcatatttataatccgctaaagtttacattgttaaataaaagcgatggaatgcgccaagaggaagtctcacggggatcgtttcctgcttctgtaagactatcccaaagagacagcatatttccggttatgttcatttctcccaatggagttgaaatctttccgttttcgatcaaaaagccctctattccaaacgaaaaatctccggtagtagggttgctgttaccgccgttgaagttggtgacccatatccctttctgtacagatgctaaaatggcatcgaagtttctttctcctaaagacatttgaagaatagacggggaagatatggtaggggctactctcattttcagagaattgtatgtgtctatgaaataattttgcagaatacctttctctataatcgttctatcttttgtctctacgccttcaccatcaaaccatcgggcaccaaaggagcgttttagatgtggtgtatcgtaaagtgtaaagatgtcagccgttatcttttctctcattttgttcaataggaaagaatttttctgttgaagtgctgtcccgtacattgcactgataagtggagataatatacgcgacgaagtagtattgtctaacaacatgtcatacttgcctgattttatcttttgttgtccgatcttgcgtaatgctctgttgaatgcaatttttgctatcccattttttttcagatcttcccaatatacagcactgtcgtaccagaaggattcggcacgagcgtcaccatccgttttcagcgatacttctaccatcaggttgaacgctgagtctacacattcggcttcaaatccattactggcaatcatatattctgctcctacgccatcatcgtatgccgaggtgacagagattatacgattgtcgctgccatgtatttcgtctacagactgctttataagatttaacttctcacttgttggaatggactcaaagcttccgtcacagaggtctaaatcagtttcgtctcctctgaaatatctttgcttgtcgggcagttggcgaaaagggtcttccgataaatatttagtagacgtgataccttcttttataaaagactctaatcctgccttttctattcgatttgtagaaaatgagccgtatctgccatctataaataattctatatagagtttgttttcactgctttggtgaagtttatctaattgagtgtttctatattcgaaagagttgttgtttgccgtgataactgaaacccgagctccttggcatccattagccagagccagttccatagaccattgggcaatatctttgtgttgcttacttatcatatctttgttgttgtggatgcaaaaatacacagatttagtgtaaaaaagagaaaaagttagaatagaaactttctagctgtacgaattaacgttctctaactaagctgttgtaattcaaactctgtacaatgtttctggagaaaagattctgatttaatttcttaaagcttagtcaagttgcagaggagacttatagtatgtacttataaatagagattgagggatatttattatagaatatcaaactcacaacaattgttttctcttatataatagaaaaagcgacaccgaagtgccgctcttgatgttttcacaacggaataatccttattgtgatttgctttcaaattgtatttgcaaatatattaaaatttcacataaccataccaatattcttaaaatttatttatttatctttaagcctttgataaaaaggatactatgaaaaagatattaggattagatttgggtgttgcttctattggttgggcgcttgttagcgaagcagaaaaagagaatgaagtatcatccattattaaacttggagtaagggtgaatcctcttactgttgacgaatcgtccaattttgagaaagggaagagtataacaaccaatgctgatagaactctcaaacgaagtatgcgtaggaatcttcaacgttacaaactaagacgagaaaacctgatagaaatcttaaaacagcatggttttatatctgatgatagtattctgtctgagcatgggaataacacaacatttcagacttatcatttcagagctaaagcagctacggagcaagtgacattacagcagtttgccaaaatattgttgatgattaataaaaagcgaggttataaaagcagtcgcaaggctaaatctcaggatgaaggtcaattgatagatggtatggaagtggcgagaaggttgcatgaagagaatcttactcccggacaattgacgtacagactcttgacgaacggtaaaaagtttatacctgatttttatcgttctgatctacaaactgagcttgaccgaatatgggatttccaaaagcaattttatcctgatatgcttactgacgattttaagaagaaaatagaaggtcaggggaaggaaaatatatccaaatactttttggcaatacatggtgtttatacagccgataataaggataaggataaacgtttgcaagcctctaaatggcgtgtggatggtttgatgaaacaactgactgccgaagaagttgcctttgttgtcagacaactgagtggtgcaataaaagagtcaagcggctatctaggtgcaataagcgacaggagcaaagaattgatttttaataaacagacggtagggcagtccttaatggagcaattagttaagaatccccatactcgcttgaaaaatcaggtgttttatagacaagactatttgaatgagtttgaaacaatctgggaaacgcaagctaaattttatcctatactaactcctgagttgaaaagtgaaataagagatgtgattattttctatcagcggaaacttaaaagtcagaaaggcttgataagcttttgtgaattcgaaagtaagcaaattgaaataatcgaagacggaaaaaagaaaataaaaattaatgggatgagggtatgtcctaaatcttctcctatatttcaagagtttaaaatctggcaagtactcaataatatcgagatcacagacaaggataatattttagcaaaacgtttcttgaatcaggaagaaaaagaaacgttgtttgatgagctaagtttaaaaaaagaattaaaaggtactgatgccttaaagctgttgtataaaaatcataaagagttagaactaaatatagaaactatcgaaggcaacagaacacaggcagctttattcgaagcataccaaagaattatagaattgagcggtcatggtaaatatgattttcagaaaatgagatcgaaagatgttttggatatagtgaagtctgtttttgaagggctaagctataataccgctattcttaaattcgattcggcattggaaaaagatgcttttgaaaagcaggcattctatcagctatggcatttattatattcgttcgaaggggatcaatcgaacaccggaaatgagaaactaatacaaaaattatcggatttgtatggtttcgaaaaagaatatgcccatgtattagctaatgtttcgtttcaggacgattatggaagccttagtacaaaagctattcgtaaaatattacctttcatgaaagaagggaacgaatacagtgttgcgtgtggctatgccggttatagacattctaaaaactcattaactaatgaggaaaaagaaaataaggcttatagggataggttggaaattttgcctaaaaatagtttgcgtaaccccgtagtagaaaaaatattgaatcaaatggtaaatgtcatcaattcgataatagatacctacggaaaacccgatgagattcgtatagaactggctagagagttaaagaagaatgcgaagcaacgtgaaaaaatgactagggatataaatcaagctgctgccaatcatgaagaatataggaaaatactcaaagcccagtttggactatcacgtgtcagtcgtaatgatattatacgttacagattgtatgatgagttgaagaataacggatatcataccttatattcaaatacgtatatttcgccggataagcttttttctaaggagtttgatatagagcatattattccacaatctcgtttgtttgacgattcattttcgaataaaacattagagcttagtagtataaatagagataaagggaatgatcctgcctacgattatgtttctagaaaatacggagccgaaggtttggatgaatacaagaagcgaatagatatattatatcaacaaggtattattaaaaaagcaaagtatactaagttgatgatgccatttagcgaaatccctgaagatttcattaatcgtgatctaaacgatacgcaatatatagctaagaaggctaaggagatgttggaagaattggtaaaagatgtagtttctacgacaggatcaattaccgaccgattgcgtgaagactggcagcttgtagatttgatgcaagaactcaactgggataagtacgataagcttggattgaccgaaattattgaaaacagagaggggcataagataaaacgtataacagactggacgaagcgtaacgatcatcgccatcatgcgatggatgctcttacggtagcctttaccaaaaggagtcttatacaatatctgaatacgctgaatgctcgtagtgataaaaacagtgagatttacgaggtagaaacaaaatatttaaaaagagatactaaaggcaagttaagatttataccacctatgccattaaacattttcagagctgaagcaaaaaagcagttggaaaatattttgatttctattaaagcaaagaacaaagtagttactgtaaacgtaaataaaacaaaaaaatcgggtggagtaaataagaaaaagcaacttacgccacgtggtcagctacataatgaaactatctacggtagcattcaatgtcctaatgtaagagaggaaaaagtgggtgggggattcgatgaagcacaaatagccaaagtcgcaagtaaacgctatcgtgaagcccttttggctcgtttagcggcattcggaaatgatacgaaaaaggcattcacaggaaaaaatgctttaactaagaaccctatttatttgggtgaacgtcaaatggagtgtgtgcccgaaaaagtgaagatagtagatgtggaaacaatctatacgattcgtaaagagattagtcccgatctcaaattagataaagtgatcgattcgggtattcaagctattttaaaagtacggttagatgaatatggcggagatgctaaaagagcattttctaatttggacgaaaatcccatttggctgaataaagacaaaggtatttctatcaaaagggtaactattcgagggattaacaacgccaattcgttgcacgataagaaagataaagacggcaatttgatattgggcaaaaatggtaaaaaacaacctgtggattttataaatactggaaacaatcatcatgttgctatttataaagataatgaaggcaacctgcaagaagtggttgtgtcattttatgaagcgacaatgagagccaaccaaaaattgcagattgttgataaaacttataaacagagtgaggggtggtgttttttgtttaccatgaaacaaaacgaatattttgttttcccaaatcctaacacaggatttgatcctcatggcatcgatttgaaagatcccgataagtatgcagagataagtccgaatttattcagggtacagaaattcacgaacaaagattatttctttagacatcatctggaaactaatgttgaaaataataattctttgaaaggaattacgtggttgagattagggctaaatggaattaataatgttttaaaagtgagagtaaaccatattgggcaaatagtggatgtgggagaataaacaaacaacccaaaccactatagtttgggttgccaatagcaatctattaaacaatgaaagcaaatcataactggacttgatattcaataatgtaaaacccatctcgaaatatagattgccgtttatttagtccaggggtggtactttctaaatgaagagaatacccaacataaatgaatgttcctcttttattattatttataactttgaataacaatatacaaatataataaaaaatattattatcaagtccaagaacgtaaaattttatttttttttgtttaatttgttatttaatagtgttttatgataattaaatcttcaacctatgataaagaaaactctttactttggcaatccagcgtacttgagtatgcgcaacaatcagttggtaataaagctacccgaagttgagaaaaatagcagcttaccagatagctttaagaaagcaagcgaaaccctctttcccattgaagatttgggagtagttatactcgaccataaacaaataacgctaacacatgggcttatcgaaaaactgttggataacaatactgctctcttgacttgcgatagtagccgcatgcctgtaggattgatgcttccattatgcggaaacaagacacaaagtgaaagatttaactcgcagatcaatgcttctgaccctttaaagaaaaacttatggcagcaaaccataaaggccaaaataaccaatcaggcagaagtcttgaaaaagattagatcgtgtaatattcgtaatatgatatattgggcaggagaagtaaaaagtggcgatccagataattttgaagggcgtgctgctgcatattattggaaagaggcttttcctcagatcgagaattttactagaggcagagaagagaatcctcctaataatctgttaaattacggatatgctattcttcgtgcagttattgcccgctctttagtagcaagtggtttattaccaacgttaggtatacatcaccacaaccgttacaatgcttattgcttagcggacgatataatggaaccatatcgcccatttgtagatgaattagttttctcgatagttgatagtggagaggattataccgaattaacgacttcgttaaaaagcaaactgctacaaataccaacaatagatgtgatgatggggaaacaaaaaagccccttaatgattgctgtaggtcagacaactgcatccttaaaccaatgtttcgaagggaaactacgtaaaattaaatatcccgaattattgtaatctgtcggtaatatggagcaagaccgattaaatcaataccgtattatgtgggttctagtattatttgatctacctaccgagacaaagaaagatagaaaagtatacgctgatttcagaaaaaacttacagcgagatggatttaccatgtttcagttttcgacttatttacggcattgtatgagtgttgagaatgcgaatgtgcatatcaaacgagtgaaaaactttcttccggcaaaaggacatgttggaatactctgcattacagataaacaatttggaatgatggaactattttatgggaaaagccctgaatcaaagaaaacaggagcgcagcaacttgaattattttagaaaataaaaatcccgacttcgatcgggatttttatttgaaatacattgatttttttaatgctaatggtgtttgcaatgtattgaaatacatacacttgttgtatggtatgatgtatttcaatgaactaagatacaattttgaaagcaaatcacaactagtgaagattatttgttaccgggtgtagagatgtatttcaatgaactaagatacaattttgaaagcaaatcacaacggggattagttgaaacttacgaagataaagatgtatttcaatgaactaagatacaattttgaaagcaaatcacaactgtgcagttaaatttcctatcgtttctatgatgtatttcaatgaactaagatacaattttgaaagcaaatcacaacttgtaatatcgtgtgctgtatttagcgaaggatgtatttcaatgaactaagatacaattttgaaagcaaatcacaacatgccatatcgaaggctatggacggtttatgatgtatttcaatgaac

SEQ ID NO: 2371 - DNA, 16235 bp, synthetic construct
  source 1..16235: mol_type = other DNA
  misc_feature 1..16235: note = Synthetic
taatccataatttgcaagatctccaaagttgtaagaatcacttgtgtttactactccaaaaccgaaccaacctccaactgctgagttaacagtgtatgccagagcatcatctccttcgtattcgctagcaacagtttgacttacagtaccggcccattctgcaaattcgttactgcgtaaatccaaataagagtccatatctgatacttcatcgcgaagaataacccagtagttatacgagtcgataattgaaatatcttttgcatcttgtttgatgcgtgtagtccaatcaccatttattggtctaatgtcagcgattgcaatataatcgtctgcaatttcgggcaaattgtttaagttaattgtaagctttgatgttccagtgccttcttccacaataacttttgtttcaccaattaaatcataattttttgtcttgtatagtgaaacccacaattcacgttgttctgatgctgaatagtttacatcaaaactatatgttttattttgtccaaatgaattttctgtgctattgaatgatgcattatcgtatgagcctccgtttaaattcgaattattagttaatcttgagtccgggtatttttcttgatcttgatatatgcgaacccaatcaactaacattgttgccgagctaaaattcggatcgatgctatagtttgtataactaccgccaagtgcaatattgaaaattataaagaattcattgtcttcttgatgaaaagtatccaaacctgtagcactattatttggaatatccattgcaactatttgtatgtagttactaccatcaccatcacatacatatcctataagttgacttggggtccattctatgccataaatacgatatcttgctcctagttgttcattatatgtatgagataaaccataagcagcatgttgagtcccattcgcagtattccagtggaatgttgtaagtgttctgttccatgtgcttggatctgaagtacacatttgttccataatgtctatttcaccgcagcccggccatcctaagcttgtgcctactttccgtcctaacatccaaaatgcaggccatacacctgtagctccccatgggcatttgatgcgtgcctctattttaccatatcttaagtttactttgttgttaccgatgatgcgtgcagatgtataaccaccattcgattctttttttgcagtaatacgtagttctccatttgaaacactaatattatccgtattattagtgtatacttgtgactctccatttccccagccaccgccaccaagttcatattgccatgcagttgtattgaatgaatcaaatgggtcttcccatactaatttataagatgctgatgcatttagtgagaaaccaaatacgaataaagagataattaaatacctaagttccttttccattttgaatattgatttaagattatttctattctacatggcaaagtaacacataaaaaataaagaaaaacagccgctttgcattctcaccttaataatgtgggttgtagtgcaagcggctgtttaaaattacaagtctattagtttgtaaatcagtattatatattctgatttatttgtgaactaggtgctccggatgtggagtttaactatttcaacaatactttctttattgtgttttcaatatgtaataaatacaatccttttggtagattttccacattaagttttgtattagtatcacttgaaatacagctcattactgttttggcatttaaattcataagttcaatttccgtatcaatatcaattcctgtaattacaatctcattattgtttggttgatataccgaaatctcagtgatatctgaatcttcaatatctgtaaatactaatgttaatggaacattcttgtaataatagatatcatcaacatttatggttgcaccggttttaacaacattctcactaataatagagaatatcagattatttgttgttgctcctaattgaaggcctgcttctgtaaattcagacatctttatttcttgtgtatgccatttgttatccgaagtaggggtgaattgaaccgaaaactcaccatttactcctcccattttcacaaataacgggccattataatttgttttataagcaaaatgtaagttgtaatctgccaaatctccaaaataataagtgccactagtattcaatactccaaagccgaaccaacctccaattgccgagttaacagtgtatgcaagagcttcttctccttcgtatttgcctgctaaagtttgacttactgtgccatcccattcggcaaaactattattgcgtaaatccaaatatgaatccatgtctgatacaccatcacgaagtataacccaataatcgtaggtatcgtgatatggttcttccaatttccaatgtgaacatttttgattgttattatcccatgtttttagttcgatatctgaagcactgctattatcagggacttctacaactttaccacaatgacgtgctacaaattgataataaccgtctcctgcatcaactaaaatgtattgttgacatttcgaattgtttgatgtccaaatctgtacagttgcacgattttcggcagacgcattgtttatgtcaagaaccattttgctggtacttgcataaacggtataaacaccatttccaatttcttctaatttgaattgttgaaattgttcgccttgttcgtcattgtattgtacaattttagttccgctattaagactatttgctttcaagtcccaatacaaattactattacgtccttttattttgtaagtacctgcttttcctgatacgccttctgcttcaatctttaaagatgaggttttgtcattaaaatcaccacctacataatttgtgtttgatgttattattttgcttgtaccttcaaaattatcgtcagcgtaaagagttactttaaatcccgataatactttcacagatgttaaagtgttatcaatgaagccataagcactcaattcagctttggtatatgtcccttcaggcagttgtacatttgtacttgcataattaatgtcatcaaatatagttgcaacagggttaccttcaggacttagtcgtttaaattgccaaaatgaacaagtttgtttattattgtcatataatttgataaactctccaggatttgtgctaaaatcaggtacttcaataacttttccacaatgtcttgcaactaattgataatatccatctcctgcatctacaacaataaattgttgatttggtgtattattattgtcgtaaattaaaatttctgtacgattgtcaactttgccccaagacacatctattgcgcgagtttgtgctgatgccggtgatattgtataaacgccatttcctgactcggtaaatctccattgttgataatactctgtaccttcgtctgtgtattgtactacgtgtgtgttgttttcaggactatttccgtctaagtcaagatattgcccattatgaccttttatcttatagatgccagagaagccgcttacgcctttaggctctattttgatagatgatattttatcgttccaatcatcacctacataactaacatcacttgtatatgtttttgaattacctccaaaattatcatcaacataaactgtaactttataaccgggtaatacttttaatgatgatgcccaattatcttcaaggcaatatgctgccatttgcgacatagtaaatgaaccttcaggtaatccaactgcatcacctccataatttatatctttatagaaagttacaactgcgcgatctgtttttgtgcaagttgtttcagtaccgccaccgccgttacaattaaatgttgcgtatgttccgtggtttacgatgttagttaaaggacttgtcgctgcgccgctccatccataaggctggtagctgtttcttccaccattaggccacattgaagattcgttaagtggtgtatctccattgtttgtatgaggattattacactctacaaggtcgtagcatggatgtccggatttgttgtttggactattccaattatcccataatattttgcctgtaaagtagctgtcataattagtccctcctgtttcaaagctgatataacgatttgaagatctgtcaacgtgccatataagcataccgctaccaggtagagaagcatcaaaaccggtacgttcacgatattcaagtacataaaattcgtcattagtatctgtattgattttatatccgggcgtgttgctgctattctgaattttgttcaatgtaactgcaccatccggacatttaggaatagtacaccaacctaattgttggcgttcaattgctccgtagagtggtggggtacgactatcgttgttatagcaaccacctgccattacactccatgaacctggtgtgtgtccattaccattagtgtcgccatctgtatcataaaaatcaggtaagcctataacgtgtccaaattcgtgtgtaaatgtacctatattcacttggtctgcaccgcttgcccattttaattcggaagagcatccataaccgctaatttgtttaccatctaaatatagacctttgtttccaatgcctgatgcatgcgaccatatacattcttccggaccgccttgtgcttgatcgtatccggcaaaaatacaatatacattatctacaataccatctccatctgtatcgtaatctgcaaaatttgcacctaaaccatctgcaagttggcatgcttcataaaccatgctacctacatcaccgccttcagaaccatagaatgctctattttgcgatactgtaactggtccccatacatcaaatgtaggctgaaattgattccatgaacatgcttttaaataatctgcagtactgccggtcgaaccatttgcactatagccattttggttcaacatattccagaaattactttgtccgtaattaaaacgaacattagcaaattgtacaagtatgatgcagaatttacgttgaccactatgtgcagcggcgtattgtacattttcatctgcactccttgtttttgatactttagttgcagtaccacttacatttaatacaggaccgcgtttttcaatgaattcttgtctgcctgcttttattttaagttcagcggcttttatttgtttttgggtaagtccgggtgataatttttttctatatgagttttcttcagctgtacgtgccgatttattgtgtacgcgtacattagaaggaacaaaacgatctttgtcagcattctgattagcatatacaacataaccttcgctatcttctgttacaacgaaaccatcttctgttgttttgtacgaaaaatattcgtctccgtgtactttaacttgaattttttctccattcggttgaacattctcaacgcttgtaggtatagccggagctgcatttagaattgaaagagtaaaaggtactcctaaaaatgcagttaacaatacagttttaactgtgtttgcctttttcattatatattgattaattggttatttaaattctacgaaggcaaaggtatcccgattctaaataatagatatacttataagtaggtctaaaatactttagtggttagcaatcgttttcgaaaaataaaaatacaatcaacatactgattgttagttgattgcattctgtagatgtattagtgagcaactcaataatatagagctgaaattcaatgtgtttcacttaaattcagagtgaatttattattcaaaacatagtatatctgtatattaatcctttaattttcagcgaaatgacttctttctgtattagtataaaaaaagcgagaccatacagccccgctttaaatgttttcacaacggaataatccttattgtgaattgcttcaaactttgtattacaaagatacaaaataaagtattattacaacacttgtatgtgttaaaaatttattatatttggggtatcgctaacaaataaataattataatacaaaactatgaaaaaaatactcggattagacctcggaaccaatagtattggttgggcattagtaaatgaaagagaatcagagaatgaaaaatcttctattataaaacttggtgtacgtgtaaatccactgactgttgatgaacaaagaaacttcgaacaaggtaaaagtataactacaaatgctgatagaacactaaaacgtagtatgcgccgcaatttgcaacgctataaactccgccgtgagaatcttttggatgttttaaaagataatggattaattttcgatgattcaatattgcttgaaaatggcaataaaacgacttttgaaacttatcgtttacgtgcaaaagcagccacgaaagaaatatcgttagaagaattggctcgcgtactattgatgataaacaaaaaacgcggttacaaaagtagtagaaaagcaaaatcgaacgatgaaggtcagttgatagacggaatggaagttgccaaattattgtatgaaaataatcttacacctgggcaatttacattacaaattttagaaaaaggaaataaatatattccggatttttatcgatcagatttagaacaggagtttgataaagtttttgataagcaaaatcttttttatcctgaaattctttcacaggaattgaaagaagaattacggaggaaaaaacgagatgctgtatgggctatttgtgccaaaacattcaaagaaaaagggtttgagttagttggaacaaaaagacaaggaaaagttgctgatcaaaagttagaaaactacaaattgagagcatcggcactgactgaaaaattagatttggaacaattcgttattgttatgcagcaaataaatgctcaattaaatgcttctagtggctatcttggcgctatcagcgaccgcagcaaggaactatattttgaaaaccaaacagttggtcagtatcaaatggcagaattggataaaaatccaaattatagtttgcgaaatcaagttttttaccgtcaagattatttggatgaatttgagaggatttgggaaacacaagccggttttcataatgaattaacgccagaattgaaaaaagtgattcgtgatattgtgattttctatcaacgtcagttgaagtcgcaaaagggtttgataagtttttgtgagtttgaaagcagacaaattgaagttgaaatagagggggaaaagaaacttaaaacaataggttatcgtgtttgtccaaagtcatcgccactatttcaagagtttaagatttggcagatattgaataacttagaagtacaagataagtcaactaatgtttcacgtcgtttagagcaagaagaaaaagaaattttgtttgcagaactcaacttaaaagataaaatatcgaaagtagatgttttgaagttgctctataaaaaccacaagaatttagatttgaattataaagaaatagaaggtaacaaaaccaataacgcatttttcaaagcctaccaaagtattattgaattaagtggtcatggcgaatatgatttttcaaaaatgcaagcatcagaaataatggatattgttgaatctgttttcaaaggtcttggctggaatacggatattcttcatttcaattttagtttgcaaggaaaggaatttgagaatcaagctgcatacaaattttggcatttattgtattcgtttgaaggtgacaattctaaactcggcaacgaaaaattaataaataaaattacagaactgtataagtttgataaagaatatgcaattatacttgctaacgtaactttgcagcctgattatggaagtttaagcacaaaagccattcgtaaaatattgccttacatgaaagatggctgtgaatatagtgttgcttgccaatatgcaggttatagacattctaaaaactcactcacaaaggaagaactagataataaagttttgaaagataggctggatatattgccgcgtaatagtttgcgaaatcctgtagttgagaagattctcaatcaaatgataaacgttgtaaatactattgctgctacttatgggaagcctgatgaaattagaattgaattggcacgcgaactaaaaaataatgcaaaagagcgtgaagaaatgacggctgcaattaacaaaacgactgctgaacatgaaaaatatcgtgaaatattgcaaaaagagtttggtattcaaaacgtcagtagaaatgatattatccgttataaattatatcttgagttgaaggacaatggtttcaaaacattatattctgatacatatattccacaagaaaaactatttagtaaagaatttgacattgaacacattattccgaaggcaaaactttttgacgattcgttttcaaataaaaccattgaggcgcgtggtgttaatataaataaaagagatgtcacggcttacgattatgtgttagaaaaatatggcgagaatgacgacaaagggtataaaactaaaattgaaaatttatttaagaaaggctctataagcggaacaaaatgtagaaaactgttaatgcgtgaagctgatatacctagcgactttattgaacgtgatttgcgcgattcgcaatatattgcaaaaaaagcacgtgaaattttagaaggaatggtaaagtttgttgtgcctactaccggctcaattacaagtcgtttgcgcgaagattggcaattaattgacataatgcaggaattgaattggaataaatacaaaaaacttggtcttactgagactattgaagataaagacggacgcataattaggcgaattaaagattggacaaaacgtaatgaccatcgacaccacgcaatggatgctcttacaatagcctttacaaaaagtggtattattcaatatttaaacaatttaaatgcacgaagcgataaatccagtagtatttatggtatcgaacagaatgaactttcaaaagataatcacggaaaacctaaatttaatccgccaatgccgcttgacgaatttcgtaccgaagccaaacgtcaacttgagaatattttgatttcaataaaagcgaaaaataaagttgttacaaaaaatatcaatataacaaaaaaagaagaaggaacgaataaaaaaatacaattaactccacgcggtcaattacataacgaaactgtttatggtcgaataaaaaaatatgcgactaaagaagaaaaaattggaagtgcctttgatgcaataaaaataacaacggttgcaaacaaaaaatatcgagaagcattactagctcgtttgactcagtacggaaatgatgcaactaaagcatttacgggtaaaaatagtttagataagaatccaatatttttgaacgaacaacatacagaaactgttcctattaaagtaaaaacagtagagtttgaagatgtttacaaaattcgtaaagaagtctctaaagatttgaaattggaaaaagttgttgattcgaaaattcgaaaaatattggaaaaccgcttgaaagaatttggtggagatgccaacaaggcattctcaaatcttgatgaaaatccaatttggcaaaataaaaagaaaggtattgctattaaacgagtatccatttatggtgtaagtaatgcagaagctctacacgataaacacgaccaatttggtaaacctatactcgataaagaagggaaaactcaaccggctgatttcgtaagcacaagtaacaatcatcacattgctatatatcgcgatttagatggcaatttaaaagaaaatgttgtttcgttttatgaagctactatgcgtgcaaatataggaaaccctattgttgataaagattataaaaaagcagaaggttggcaatttttattcacaatgaaacaaaacgaatattttgtattccctaataaagaaacagatttcgacccaaatgtaatagacttactcgatcctgataattttgccgtaattagtccaaatttgtatagggtgcaaataatatcatcaaaagattatacttttagacaccacttagagacaacagtagtaaataatattaaagattatacgttcaaacgaataagaaatacgatgagcctagaaggtattttaaaagttcgagttaatcatattggacaaatagtatcagtaggtgaatattaaattatctattaaacaatgattaaacgcactctgtgttttagtaatccagcatatttgtcagtaaaaaacgaacagttggtaattaaattaccggaagtcgaaaaagcagatatgccggatattcttaaaaaggaagcaatacgaacaattcctgttgaggatataggtgttgtggttctagataataaacaaattactataactcagagtgctatagaggtgatgcttgaaaataattgcgctattataacctgcgacagtaatcatttgcctgtaggtctgatgcttcctctttgttgtaatacaactcaaaatgagcgttttcgcaatcaaattgacgcttccttacctttacaaaaacaactttggcagcaaacaatacaacaaaagatacgaaatcaggcagctgttttacaacaaacacacaatatgcaggttcgtaatatgttagcgtggtctaatattgtaaagagtggggactctgataatttggaggctagagccgctgcatattattggaaaaatttatttctaaatatatctgatttcactcgcgaacgcgaaggtattccgccaaataatttgttgaattacggttatgctattttacgtgcagtagttgcgcgtgcattggtttcgagtgggttgttaccaacacttggaatacatcaccataatcgttataatgcatattgtttggccgatgatattatggaaccatatagaccttatgttgataaattggtagttgaaattattaatagtggaattgattattcagtgttaaatatagagttaaaacaaaaactgttgaacatacctgttattgatgttattattaacaatcaacgtagtccgttgatgattgctgtgggacaaactactgcatctctatataagtgttatagtggggagttacgtaaaatgatttatccggaaatgtaatatgcaacgttttagtgaatatcgtattatgtgggtattagtactttttgatttaccgactgaaacaaaaaaacaacgaaaaatatattctgattttcgtaaaaaattattgttagatggattcactatgtttcagttctcaatatatctgcgtcattgtcctagtgcagaaaatgcagatgttcatattaaacgtgtaaaaagtatattgccggaacttgggcaagtaggaattttgcgtattacagataagcaatttggtgatatggaactgtatataggaacaaaaccaaaatcattgaatcctccaacacagcaattagaattattttagtattaataatttgagctattaataaagaaatcccgttatttttaacgggatttcttatttctaaaacaacaaataagttattgtgaattaactagttgctgatatcgagttgtttcagatagtcaaagatacaaagtttgaaagcaattcacaacgtaaaccttagctgagccgcaaacccatgcgttgtttcagatagtcaaagatacaaagtttgaaagcaattcacaactaaatccatcgcgcttgttgcattcggagtgttgtttcagatagtcaaagatacaaagtttgaaagcaattcacaacacatattcgcttggctctttgccctctgctgttgtttcagatagtcaaagatacaaagtttgaaagcaattcacaacttctacactacgttgattctcacgtttacgttgtttcagatagtcaaagatacaaagtttgaaagcaattcacaaccgcttggccataaggcggttcgtctttggagttgtttcagatagtcaaagatacaaagtttgaaagcaattcacaacgatgcaccaataacactaacagcagaatttgttgtttcagatagtcaaagatacaaagtttgaaagcaattcacaacttctttttgtacaacatttatgttgtatttgttgtttcagatagtcaaagatacaaagtttgaaagcaattcacaacttgtatcaaattgaattaattatatttatgttgtttcagatagtcaaagatacaaagtttgaaagcaattcacaacattgtttgcaaccgttgcattagtgtaaagttgtttcagatagtcaaagatacaaagtttgaaagcaattcacaacataaagattggtttttttgcttccataattgttgtttcagatagtcaaagatacaaagtttgaaagcaattcacaacacgaagctgtcgaatcagacaaagacagctgttgtttcagatagtcaaagatacaaagtttgaaagcaattcacaacagagcgtgaagtacttgaaaatttaatgagttgtttcagatagtcaaagatacaaagtttgaaagcaattcacaacgcctcggtcgtaaatgtatatcgctagacggttgtttcagatagtcaaagatacaaagtttgaaagcaattcacaactgaacaacagtttgaacttatacaaaaaggttgtttcagatagtcaaagatacaaagtttgaaagcaattcacaactgcttgctctttgttcattaacagcctgtagttgtttcagatagtcaaagatacaaagtttgaaagcaattcacaaccatcagctgtttgctaacgtttaaaatatgttgtttcagatagtcaaagatacaaagtttgaaagcaattcacaactatcctatacccgtgtttgataacgcaattgttgtttcagatagtcaaagatacaaagtttgaaagcaattcacaactatttaaccatgctttcaatcaaagaaaatgttgtttcagatagtcaaagatacaaagtttgaaagcaattcacaacttagtgggagttgcaaaacaaggttgcgacgttgtttcagatagtcaaagatacaaagtttgaaagcaattcacaacatctcgcaaagttcattcaatattaataagttgtttcagatagtcaaagatacaaagtttgaaagcaattcacaactcagacagaacagcagcagcgcaaactgtagttgtttcagatagtcaaagatacaaagtttgaaagcaattcacaacatgcacggcttcgttgttgatttaggtgctgttgtttcagatagtcaaagatacaaagtttgaaagcaattcacaactttaaacatgtcgctttacatcctgattggttgtttcagatagtcaaagatacaaagtttgaaagcaattcacaaccttcgtgctatttttaattataatattaatgttgtttcagatagtcaaagatacaaagtttgaaagcaattcacaacactcttttgtcttttgcaacccttcagcggttgtttcagatagtcaaagatacaaagtttgaaagcaattcacaactgacctgcagtaacagggaatgtaagaccgttgtttcagatagtcaaagatacaaagtttgaaagcaattcacaacgtattacctggtgtgcttttaatagcttcgttgtttcagatagtcaaagatacaaagtttgaaagcaattcacaacgtaattaaaaaaggtgacaaaggtggatttgttgtttcagatagtcaaagatacaaagtttgaaagcaattcacaacaaaacacgtgttatttgtcgaattaatgcgttgtttcagatagtcaaagatacaaagtttgaaagcaattcacaacctacccaataggtattatgttatcttgcggttgtttcagatagtcaaagatacaaagtttgaaagcaattcacaaccaacttcatgattctgtttttcaagttctgttgtttcagatagtcaaagatacaaagtttgaaagcaattcacaacagatactaaaacattaacattaggtgcaacgttgtttcagatagtcaaagatacaaagtttgaaagcaattcacaacgggtaaaagccgaagtctaaaccaattccagttgtttcagatagtcaaagatacaaagtttgaaagcaattcacaacatactgtctctgcggtattccatacaattgttgtttcagatagtcaaagatacaaagtttgaaagcaattcacaactaaaggcgtgcatcttctaaatggtaaaaagttgtttcagatagtcaaagatacaaagtttgaaagcaattcacaaccaatcaagtagaattgtgccgctacagcgcgttgtttcagatagtcaaagatacaaagtttgaaagcaattcacaactatttataggtccagagaccactgtaactgttgtttcagatagtcaaagatacaaagtttgaaagcaattcacaactttcaacggcttcattagagttttctcctgttgtttcagatagtcaaagatacaaagtttgaaagcaattcacaacatgaagctgttgaatctgacaaagacagtgttgtttcagatagtcaaagatacaaagtttgaaagcaattcacaactaaaaaattgttgtatatttacgcttattcatcccattcccattctgccatccgaaagtgcggtggataatgaaatttttaaaaaaaaaatacgaataaaatatggatatattgtagatatttttatacctttgtatttggatataatatgaataaaatatggataaatttgtaaacaaactaaattttgattttgcaactaaccaaaaagtgttgcaacttattggattcattgatggtttcaaagggaagtggaatatcgttgaaaaaaaggaaaatcgttatttgaaagaattacggaaaattgcaaccattgaaagtattggttcttcgacacgtattgaaggagcaacactcaccgatgaagaggttcaaggccttttgaagaatattaaaatatcaaagatgaaaacccgtgacgaacaagaggttatcggatattatgaagtgttggaactgatttttgacaattattccgaaataaaattgtcggaaaattatattaaacaattacatcaattgctgctaaaacatagcaataaagatgagcgtcaccgtggtggatacaaaaatatttccaataaagtcgttgcaacttatccaacaggtgaacagaggactatttttgcgacaacagaaccggctttagttgaaggagaaatgcatgaacttatcgaatggacaaatcaccaattcgatgaaaaaagcattcatccattgattgttattgctgtttttatttatgattttctaagcatccacccatttcaagatggtaatggaaggttgtctagattactgacaacactttgcttactgcaatgggaatatgaatttattcaatacatttcttttgaaaatcatattgagaaaaacaaaaaagtttattatgaggctttaatgagcgggcaacgaaatcgtaataaagaaaatgaacggattgataaatggatgattttctttttggatagtttgaaaacattaaccgaaaaattagaacaaaaatataatgtattcaaatctaaaggcggctacttgaatgaacggcagaagcaaataaaagcgttttttattgctcaaaatcaacctttaaaagtgaaagatttgtctgaaaaattctttaaaatacctattgcgactttgaaaaaagatttgcaatatatgcgcgatgaacaaattttaatcatgattggcaaagggaaaggtagtgtttacgttctgaaagaaacaagtaataaaattgctaatagctaaaaattgtaatatgttacagtaatcgttccaatttgggatgattgttgtattaaaaaaagttatatcattgtagaataaaaggatgtccaaaatcgccagatcttgcgtaagcataagttagggttggatgtcctttttttattgtatttccgtcaaccatgtctacatatttagctcattcgcttgattgaatgtacagaatgttattttttgcccatattatgagttcctcaccaaatgtacgtgcggaccatgaattgcctttaactgcgcctccaccttttctctcgatatcggttgtcgcgttaaggattctaaatagattgtatgtcccactaatattgatgctagtggatacttttgcagaaatatccgttcttgttgtgatgcctccgagtacactttt

SEQ ID NO: 2372 - DNA, 16211 bp, synthetic construct
  variation 15816..16064: note = n is a, c, g, or t
  source 1..16211: mol_type = other DNA
  misc_feature 1..16211: note = Synthetic
tatatgttcgttttacagattgaactccatcaatttctttaaggtctaaaataactttatccaattcagatttattttttacagaaactgtaattttcccatcaaaaatacctgcgtcttcagataaattaatactatgaatatttaaagaattatttttagaaataattagtgtaatatcacttagcattccagctctatctaatccttgcatttctatcaaggctttaaattctctttgagtagaatctatccacttggcttttataattctgtacgcataatttgcttgtaaagaaattgaatttggacaatctactttatgaacttttattccttttgaaactgtaataaatccaaatactttatctcctggaatagggttacaacatgttgctagctcataatctaggcgttcttcatcatttccaaaaactaaactatctaattttgatttatcaacgacagtaaaatcttcttttttagcagatgaaaatgttgattttctaaaacgattgattaaacctgtaaatcctgaatttctttcagcaaattttcttaaatcattattattaatgactcccatagcaacattataaaaaatatcttgactagaacttagcttaaaatattgttgcatttggttaaccgtattttcgttgaaatctacttttaaatgtcttagttttcgttgaataatttcctttccttcgtctgcaattttacgtttatcagaattaagggaagcttttattttacttcttgccttactggtaactacgtattctaaccattctagcttaggtttttgctgagtagatgtgataatttctacttgatcgccgctttgtaatttatgagaaagtgggaaaagtttaccatttactttagcacctaaacaatggtcacctacattagaatgtattgaataagcaaaatctaaagaacttgctccttttggcaaagaatgtaaatctccttttggagtaaaaacatagatttcttttgaatacaaattgaatttaaagttatccataaattctatagcatcctttgtatcctcttgctctaacatttcacgcacttgatgaatccattcatcaacttttgtttcatcgtcagatatattttctttgtatttatagtgtgctgcaatacccatttctgcaacctcatccatcctttcggaacgaatttgcacttctacccaacgagcttgtggtcccattacagtaacatgtaaagattcgtaacctgttgttttaggttgagaaatccaatcacgcatacgtttagggtttggaatgaataaatctgtaatcatagaatatattttccatgctaagaatttttcatttttcttgtctgaacgataaattactcgaatagcaaataaatcaaaaacctcttcaaatggaattccttgattaactatttttttataaatagaattgatagattttgaacgaccttttatttcaaattctaaaccttctgcttttaatttttcagaaattattttacaaaaattattgatataagtctctctttctgttttagtttctgttaacttatgctctatattaaaataagcatctggtttagtatattttaaactaagatcttctaattctgattttatattatacaatcccattctgtgggctaatggagcataaataaaaatagtttctgatgctatttttaattgtttatcctctcgcatactatctagcgtacgcatattatgaagtctatctgcaatttttataagaattacacggacatcttcagaaagagttaatagtaattttttatagttttctgattgaatagaaatatcctgacgattaagtacggaaatttttgttaatccatcaatgattttagcaatcttagttccaaaaagtttctctaaatcttcaattgtataatcagtgtcttctacaacgtcatgcattaaagcagaagcaattgaagttgctcccaaaccaatttcatcagcaacaattttagcaacagcaattggatgataaatatatggttcgcccgtttttcttctttgatctttgtgtgcttcaactgcaagatcaaaagctttacggattaactttttatcttcatcagacaatgttacgtaagtattttttaacatctctttataacgtctagctatttcgagtgtttctctttctaattgttcgtctgtaattatttgaggagtattcattcttttcgtttttttaggtaatagtatttttaaataaaaaaatgagtcaagtaaaactagcctcattgctagaactaaatttacaattattcttactatttaacaaaaaaaacaatgtatttgttataaggtaaaatgggaaaaattagaatatattgattttttttaaaacactaattataagtattttaaaattattaattatacgattaaagaaaaaaataaaaaatattgaattacttattaaaaaaaaatcgtcatttttctattgaaaaatgacgatttttttaacttactttattcggataactcgaaactccttccaaaattattcgaggattgtttttcaataaaacaatcaattgtcttaatttttcagcattttgatctgtattaaacatgtcatcgtgcattaaaattactaaatgatttttttctaaagttcttttatgatctaatcgatgaacaattccttcatatattttttcaggactatctaattgatgaggatttctactccattcataatcccaaccaaaaatataataattatttttagctaataaatctgctgtagcatcagcatcctttaaaacatctcccttctttttagcatctactcgccatacattacgagctggtaaacgaacatatttagtgtgaatgtctaatgctgtttcattttttaaaacatcattatatacaccttctggactactataaaaatgtttgtatttattatttgcatgcgagaaagtatgattagcaatatctatattaggattttgtttataatcttctacgtgttgttttagttcttttgtaaaagcattatatccaaccaaaaaaacagtacctcttacgttctcttcggtcagaattttattaatatttttacttcctttaaatggtccgtcatcaaaagttaaataaacatgttgttttgtagaatctaattctgcaacttgaggtaattctacttcttcttttggaatacttaaagtatcatcaacaggtgaagatactgtatctgtttttacgacatatacagaatctttttgtttttgtaaaatttcattaacttctgatgaagtatttacatcggatttagtttccgtattatttttttcatttttacaagaaaaaataaaaaataaaaagctaagtatataaaagctttttaaacgattgtttatagtaaacattttaatattattaggttagggattaattattaagtaatttttgttttattttttaaaattgatcaatatatccttctatgattttcaatactccatcttcatcattagaaggtgcaataaaattagcttcctcttttactgctggatgagcatttttcatcgcaaaactatattttgccaaatgtagcatttctatatcgttcataaaatccccaaaaaccattatttcttcaggttgaatatttaattttttcattaaagcatttagtgcaacacctttatttgaattagaattcataatatctaaccaaacttctcctgatacaacaactttcacgccattttcttcaaattctaaaagttttggatatacatttttttctgaaccttcaggatgatttatagctattttaataaatttttcatcttttatttttgttaaatcatcaacttgaatactcttattgtaataatttttaaaaaattctagaaagacagggtcagtagattctacatatgctgcatttttacttgccaaaacaatatttgcaccttctatttttctaacacgctctattattttatttactaaaatagtatctaattcatcaacaaatatttcttctcctttgtatgtcacataggttccattttcagcgataattgctaactcgttctttatatcttcaaaataattgataatactataatattgtcttccacttgctggaacaaaaagtatatcaagctcttttaatttattatatatttctttgaattttgggcttaatgtatgatctgaacgaagtaaagtaccgtccatatcagttacaatcatttttatattttgcataattaggttttgtctaaataaagttttaaaggtagttaaatttagatttcaagagcctaaattttctattaatcttactatttttcataattctaatatagttttaatttcaaaattaaagctctttagaattttaattgtttttataattgataaacaatcatttaaaagaaattacgaattttaatcattgaatgaaattaaagtatatttttgttaaaaaaatgaatgctatcaaaagttcaatttagattacaatttcttgtattactttgggggtttacgggagtttttggaaaactagttactatgagtgccttaccgatggtttggtttcgtttactaattgctgctattgccgtttttatctatataaaatttaagaaagaaaaccttaaagtaactaaaaaagaactttacatacttttggggattggaggaattgtagggttacattggtttacgttctatttatcaattaaattatccaatatttcagttgctcttagtacactatctatgggagctttgtttagtgcaatattagaacccattttcttcagaaagcgaatcaatttactagaaattatattagctattgttgtttctacttgtgtgattgtaatatttaatgccacaccagaatataaaatgggaatcatcattggtgttttatgtagttttctatcggcattatttgctgtactaaattcgaaattagccagagctataaaaccgacaaaagttactttctatgaaatgattggcggattaattacattatcacttattattgtatctattcaacatgatgccataacagaaatcataaatgttagttgggctaacttaggttggcttactttacttggtgttgtatttactgcgtttgctcaaatagaatcagtagatcttctaaaacatgtaagtgcatttacgttaatgttaaacgttaatttggaacctatttatggaatcattttagcttgcatcatttttggtgatgcagaacacatgaatattgttttttatattgcaacagctgttatgctatcttctataattattaatggtttattaaaggcaaagtttacaaaaactattcaattaaaaacaaagaattaattgattaacatttcatatttcattctatttaatctcaataaaaacaagtgaataaaaagattaaaaaactaacaaaattcattgtctaaaattaatgtttgtattgatgagtttcgttatatttgtgagatataaaataaattattaaatcaaaataaaaacgatatgagttcttatgatgtagccgtaataggtgctggacctggaggatatgttgctgcaatccgttgtgcgcaattaggatttaaaactgcaattatagaaaaagctaatttaggtggtacttgtcttaatgttggatgtatcccttctaaagctttattagattcttctcaccactattacgacgctgttaatcactttaaagagcatggaattgagattgatgctcctaaagttaattttgctcaaatgattgctcgcaaagctggagttgttgatacaaacgtagctggtataaaatacttaatgagcaaaaataatattgatgtagtagaaggtactggtgcttttaaagatgctactcatattgttgttacagctcaggacggttctacacaagaaatcgaagctaagaatacaattatagctactggatctgtttcttctgaattacctttcgctccaactgatggaaaaagaattatcacttctacagaagctttagctttaccagaagttcctaaacacttaattgttattggtggtggagttattggattagaattaggttctgtttatttacgtttaggttctgatgttactgttattgagtacgcagatcgtgttattcctggaatggatggtgctttatctaaagaattaactaaagtattgaaaaaacaaggaatgaaattccatacttctactggtgttacttctgttgtaaataatggagataatgttacattaaaagctacatctaaaaaaggtgaagaattagaaatcactggtgattatgcattagttgctgttggtcgtcgtgcatttactggttctttaggtttagatgctgttggtgttgaagttgacgaaagaggtcgtatcaaaacaaacaaccatttacaaacaaacgttcctaatatttatgctattggtgatgttgttgctggtgcaatgttagctcacaaagcagaagaagaaggtgttttagttgctgagcaattagcaggacaaaaacctcacattaactataacttaattcctggtgttgtttatacttggccagaagttgctggagttggaaaaactgaagagcaattaaaagaagaaggtgtagaatataaagttggttctttcccattcaaagctttaggacgtgctcgtgcttctatggatactgatggttttgctaaaatcttagccgataaaaatactgacgaaatcttaggtatgcatattattggtgctcgtgctgcagatttaatcgcagaaggtgttacagcaatggaattccgtgcatctgcagaagacttaacaagaatgtctcatgctcacccaacattctctgaagcaattaaagaagctgctttagctgctacagacaatagagctatccactcttaatagaagataaaaaatctatatattaaaacccagtaaataatgtttactgggtttttatctttaagttattttaaactttttaaaaattatatttatttttttggcaatcacttcgaggtgtgctttttgctatatttttacaaacaataaaatctatttttttaaagaaaaaattgtttataaaaggatgccgcgccactaatttaaaagatttaaaaaagctatatattttatttatttttagttttagaattaatctccttaaataaattcaaaaaatcatataatattaaagctaaaatttcataatgtgcaatattttgaggagagttatgtacaaaattgatttcataattatgataaaataaaattctatcttctgaaatatgaattccattattatgaattgtattgcggatattagataaaaccatcattgcagtccaattttcattttttttgaattctaattttttaaaaatttgacttaatatatcataaagactttttttttctatatttttctcaggaaataattctttatgaacttccctaaaaaatgtttcaatcattgaagataaattataaataaaagaagttttagtttgcaaaaaataattatttaaaacttcattataatcatattctgaagctgttggtaaaattttatcaaattttaatttatctgtaagattatcatgaaaattttgaagatttaaattcaagaaaattattgttttatcaattctatttaacacatgtcctttataatcagtttcacttaaattatttttaaaataaacatttttaaaatcaaatcttattttctcaaattgattaattacatgtaatgagtgttgcttcacagaattatttataattaatttatcaatcataaatgttatgtacttttttaattatttgacacatattttcaataataatagtaatgaaaattccgaccatagggaacaccctaaaattatagatataataaaatattatcttctcgaaaattctttcattcgctttttgtttctactatcaagcaaagaggctacagcccaaatagccgctggcaaccaagcaataagtgttatttgtaaaattaaacacaagattccttgaaatagtttacctctcaaaaaaaatgataaacatggaaataacacggctattaaaatcatgggttattttgtgtttttaaggatattgtcatacgtaaaaatattgacagaattttgaacaatttgtttatcaatttctatcattgcttctgccagtttatttgcttttattgccttatattttgataaagaccctaataaaaataaattaataaacggatatatttttgcacctaaatcttctgctaatcttttttctttcctattccctatcaacaaagacggttggtaaatgttaagcactggaacagcggattgttttaaagcaacttctgcttcacctttcattttcaagtaaaaattagacgaattctcatttgctccaatagcagatatgtaatgaaatttctctagccctttattcaaacatcgttttgcaatttcaagaggaatgtcaacttctatttttttatagagtttcaaatctggtgttttcttccttgtagttcctaaacaagaaaaaacactgtctattttattaaaagaacttaaatctattactgactcaaaatctgtgacaatctcaacaatttttggatgttgaaattcttgcttttttctgactaaaactattattttagaatatgatgtgtcgcccaaaagttgattcaatatcatagaaccaattagacctgtacttcctaataataaaactgttttttccattataattccattaacaaccaaaaccatgccccattaacatctccttgatccaataatttggcagcaatttgatgtctaatctctattggtttaaatttttctatttctacacgctctttcaattgtacaataaaattatcaaccatttctttggttggaattttttcttgtgtacccaattgtcccaaatgatttcccgttaaaaacttagacagtttaacgtcatttggtaaactatcaatcccgattccgaatgctttagttgctggtcttgccacttcaaaaatagattcaggaataattcggcaataataatcatcccccaatcgagcaactaaatctaatgtataaggagatacatgattttgttcatctaaaaaattttcttcaacatgaatcctcaaaatttctgctatcaccaaatttgcagcacctggttcatcagaaatagaaactacatttcttactttacactccatctgtattgggctttcctttacgcgaggaggttttactatctctgatggaattggtgttaaacctgctttttcaaattcattaacgccttttttaaactctacacttgctagcgattgttgttgtacaatatcataattgacaatattaataacacattctggatgctctaaaacgttatctaaagtatgtttttttgagccatctctcattttatttacaggagaaaaaacacaaattggcggtgtttgtcccatcaaattaaaaaatgaaaatgggcttaggtttacatttccgtcattatctattgtactcgcaaaacatattggacgtggtgatatggcatgttttaataatcgattaaacgattcactattgggatcaaaagatttagtcattcttataaatgaattgagttattgatcctaaagataaaaaaaatctaaatattcctaattttaattgttaaaataaagtaattataaagttttatggcaattccttcggaccacgctatccgttacaatcttttgtaattggtcattaagctgaagtagaaatgcatccaattacaaaaggattttcactactatcgttattgcgaagtggggttttataagggaatgagaataaaaaaagccccgaagatagtcgaggcactaaatgttttcacaacggaataatccttattgtgagttcctttcaacaacaaatatacaattattttttttatcctacattacggaaaaccgtaaggttaatatttttattaatggtaaattataggcctaattataaagacacatttatgacaaaaaatatacttggtttagatttaggaacaaattcaattggttgggctttcgtaaaagaaaattctaatgataaagcacaatcttctatcgaaaaaattggagttcgtgtaaatccattaactactgacgaacaaactaattttgaaaaaggaaaacctattacaactaatgcaggaagaactcttgctcgttctgctcgacgaaatttacaacgctataaactacgaagagaaaatcttatacaaattctcttaaaaaataaatggattacaaaagaaaacattttagctgaaaatggaaatcatacaacttttgaaacattccgattgagagctttagctgctgaacaaagaattgaaattaatgaattggctagagtattattaatgataaataaaaaacgtggttataaaagttctcgtaaggtaaataacacagaagaaggtcaattgatcgatggaatggatattgcaaaaaaactatatatagatcaattaactcctgggcaatatgtttatcaattactaagtgaaggtaaaaagaaagttcctgatttttatcgttcggatttgcaaaaagaattggatgatatttggaattttcaacaaactttttattcagatattttcaccaataacttaaaagaagaaatccataacaaaagtaaagttacaacttgggctattcttaaaacaccttttaatttaattggaattaagcgtgaaggaaaacgagatgagcaaaaattagaaaattacaaatggagagttgaggcattatcaaaacaattaaatttagaacaattagctattgttttacaagaaattaatagtcaaatttataattcatcaggttatttaggagcaatatctgatagaagtaaagaattagtttttaataatcaaacagttggtcaatttcaatacgagcagttacaaaaaaatccacatgcacgattaaaaaatcaagtattttatcgtcaagattacatgaatgaatttgaaacaatttgggaaaaacaaactgaatttcatcaagagttaacaacaaatttaaaagaagaaattcgtgatattataattttttatcaacgtaaattaaaatctcaaaaaggattaatttctttttgcgaatttgaacaacaggaaattgaaattaacggaaaaaagaaaacgattggtttacgtgtttctccaaaatcttctcctcttttatgggaatttaaaatttggcaaattcttcataatgttaaacttcaaaataaagaaacaaaagaagtttattctctaaatcaagaagataaacaaatgctttttgaagaattaaatttaaaaggaaatttatcagctacagaagttttaaaattattgtatgataaacctaaaaattgggaattaaattataaagaactagaaggaaatcgcactaatcaaaacttatacaatgtctatttatctattctagatatagaaggctatgatattcgtaaagaactaaagttgaaattaaataaagatgatatttcattgtcagatatagataaatcagccaataaaattaaaaaaataattcatacaatttttaatcatcttaaaattgacactaaaattcttgattttgatgctcaactagatggtaaagcattcgaacaacaatcttcttataaattatggcatttattatattcttatgaagaagatgattcaccaacaggaatggattctttgtatcgtttgttgagcgaaaaatttggctttacaacagaacaagcaaaaattttaggaaatgtagcttttcaaccagattatggaaatttaagcactaaagctattcgcaaaatatatcctttcatcaaagagcatgaatatagtgtagcttgtgaatacgctcattatcgtcattctaaaaattcgttaacaagagaagaattagaaaaacgaattacaaaagataaattagatattctaccaaaaaatagtttaagaaatcctgttgtagagaaaattcttaatcagatgattaatgttgtgaatacgattatagatactgaaaatgataaattagaaaaagaaggaaaacctagagattttaaatttgatgaaatcagaatagagttagcaagagaacttaagaaaaatgctaaagaacgtgaggaactaactaaagctattaattctagtaaaattgagcatgaaaaaattataaaaattttacaaaacgaagatggtataaagtatcccacaagaaatgatattattcgatataaactttatcaagaattgaaaaataatggttataaaaacttatatactaatactgctgtaaaacgcaaagatatttttactaaagaatacgatatcgatcatattataccacaatctcgcttgtttgacgatagtttttctaataaaacattagttccaagagatgttaatttaaaaaaaggaaacagaacagcctatgattatattcttagtgattatggagaagataaattaaatgaatttgaaacaaaaatagaatcattatataaagaagaaggaatctcaaaagctaaatataaaaaattattgataaaaggttctgaaattggagaaggtttcatagaaagagatttacgagattcacaatatatagctaaaaaagctaaagaaattttattccaaattaccaaatctattgtttctacttccggttctattacagatcgtttacgccaagattggggtttagtaaatattatgaaagaattgaatttagaaaaatatgaaattgctggattagtcgaaattcaggaagataaaaatggtcaacccaaaaaagttataaaagattggacaaaacgtaacgatcatcgtcatcatgcaatggatgcattaactgttgcttttactaaaaggagttttatacaatacttaaataacttgaatgcgcgtagaaacgatgaatatgaaggtatttctaactctaatgataaaaaatctattgaaactaataatctaaaaatatcaagtaaagatgcattggatattgaggaaaaggaaacacataaagtaaaagatggtaaaggaaattacaaacgtgtttttaatgaacctatttctaattttagacaattagctaaacaacacttagaagcaattttagtttctcataaggctaaaaataaagttgtaacaagaaatataaataaaataaaaggaactgacaaactacaattaggactaactccgagaggacaaatgcataaagaaacggtttatggaaaaataaaacaaccggtattcaaagacgaaaaaatttctgcaaaatttgatgtagaaaccatacaaaaagttgctaatccagaatttagatcattactattacaacgtttacaagaaaatgatggagatcctaaaaaagcctttactgggaaaaattctttgattaaaaatcctattttattaaacgatagaactcctttgccagaaaaaataaaattaatatggtttgaagataattatgttatccgtaaagaagttggaccagatttgaaaattgataaagttatagacgaaggtgtaaaacgtattctacaagaccgtttaaataaatttaatagtgattctaaaaaagcattttctgatttagaacaaaatcctatctggttaaatgaagaaaaaggtattgcaataaaacgtgttactatttctggtgtaaataatgtagaagcattacatcataaaaaagatcatctaggaaatgaaattttagataatgatggtaaaaaaattcctgttgactttgtaagtacaggaaataatcatcatgtagcgatttacgaagacgaaaaaggtaatttacaagaaaatgtagtttctttttatgaagctgtggcaagagtaaatgaagacttaccaattgtagatcaaaatcataataaacatttaggttggaaatttttatttacaatgaaacaaaatgaaatgttcattttcccttcaaatgatttcaatccaaatgagattgacttattagacagagaaaatcaaactataattagtaaacatttatttcgagtacaaaaattttctgaaaaagactattggtttagacatcacctagaaagtaaaattttagatttaaaagaattaaacgaaataactttcataagaaaaagaaatcctaaatctatttcaaatattataaaagtccgtacaaatcatttaggagaaattatagctatcggagaatattaaaaagtaataactatgttaaaacgtaccatttacattggtactcctacttacctaaaactaaaagacaatcaattaaaaattgaagatgcaataaccaaagaaacaaaaggttctgtgcctatagaagatatcgcttttttagttttggatcattaccaaataaccattagtcaccaactaattttagccttacaacaaaacaatgtagcaatttttagttgtgatgaaagtcatttgccgctggggttaatgttacctatgaatggtcacgtagaacatagtgaacgattgaaaaaccaaataaattgttccgaacctttacgaaaacaattgtggaagcaaacggtagaagttaaaatttttcaacaaaaaacattactccaaaaatatggttatctagctgaaccaatgcaagattatttgaccaatgtaaaagttggcgatagtacaaatatggagggaattgcagcacaatattattggcgacaattgtttgataatttcacaagagaaagagatggcgatgtacctaataattttctgaattttggttatgctattttaagaagtattgttgccagagcattagtttgctctggcttaaaccctactatcggtatttttcatcgaaacaaatataatccttattgcctggctgatgatattatggaaccttatcgtgcctatgtagatgaattggttttggaatggataaacaaaccttttcgacctacagaaatgagtaaagaagcaaaagtacatcttctaaaaattgcaacaaaagatgtaaagatagatggtttaactcgtcctttattggttgctgttagccatacaacaagctcgttgtataagtgtatgattggtgaacaacgcttgattagatatccagaaatgtcatgaattttagtcggtacaatgcgtatagaattatgtgggttttagtattatttgatttaccaacagaaaccaagaaacagcgaagccaagcttctcggtttaggaaagaattaatagacgatggttttacaatgttccaattctctatttatttacgccattgccctagcagagagaatgcagaagtacatataaaacgtgccaaagcaaaacttcctgagcatggaaaagttggaattctctgtataactgataaacaatttggacaaatggaaattttcttttctaaaaaagaaacagatttacctactggaccacaacaattagagttgttttaatataaaatagaatgaaaaaatccgatagaaataattatttttctatcggattttttatttttttcaatcctaatttttaatcaaatccctttactacagaaggattactaaatgaggttgtaattactttggctaaattaccaaatttgaaaggaactcacaacatattagaagtgtatttaaaacatcttttagttgtaattactttggctnnnnnnnnnnnnnnnnnnnnnnnnnnnnnnnnnnnnnnnnnnnnnnnnnnnnnnnnnnnnnnnnnnnnnnnnnnnnnnnnnnnnnnnnnnnnnnnnnnnnnnnnnnnnnnnnnnnnnnnnnnnnnnnnnnnnnnnnnnnnnnnnnnnnnnnnnnnnnnnnnnnnnnnnnnnnnnnnnnnnnnnnnnnnnnnnnnnnnnnnnnnnnnnnnnnnnnnnnnnnnnnnnnnnnnnnnnnnnnnnnnnnnnnnntttgaaaggaactcacaacgaaccaacaccagttccagcagttacttgagttgtaattactttggctaaattaccaaatttgaaaggaactcacaacgatatattaatacttttattttctgtaactgttgtaattactttggctaa

SEQ ID NO: 2373 - DNA, 16155 bp, synthetic construct
  misc_feature 1..16155: note = Synthetic
  source 1..16155: mol_type = other DNA
agaagccgtccgccacatcggtgtccatatctctgtcatacactatgttgaacttgtgcttctcaaatatctttttcagcttgtgggcgcgctctccgtacactctcacctcatcaaggaagttataggtgccgtcatttgccgccttgagcatggctgccattgcaaactgtgcgctgtggcttgtgccgcttgacagggcatagagtacgcgatgtacaaacactgtaccaaatgtgccgccgccataacgttttgtgagccctgggtatgcacggtggtagagcttgtccatcatgcagactacgcctatacgctctcctgcatagctaaacgccttggaaccgcttatcagcatggcacagttatctgtgtagtgtgatattgacggctggtacggtggttcgcccggcttgcccaaatctttacggaagtccattgcaaagtacgccaaatcttcaaacacaatagtgtcatatttgttcgcaaggtctgcaattatgcgaagctcctcatctctgaggcatacccatgacgggttgtttggattgctatatacaatggcggctatattcccattttttagataactttcaagtttgtctctcagtttctctccacggaaattatagacgtcaaatgtctcatatttggctcccattaccacaagctgctgcttctgaactgggaatccagggtctatgaagagtatggtgtcacgcccctcaacacactgtgtggctgttaggaatgaggcgtatgtgccttgcatagagcctgttactggtacgcagctctctgggctgacattggtgtttataaacattttaacaaaacgggcagcctcctgtttaagttcaggaataccgttgatgtcagggtagaggcgggctatgccgctcttgagtgcgtttatctgagcctccacacccacttttgacggaggaagtccgggtacgcccatctccattttaatgaactcaacgcctgacttcttttctgcgatggcggctattgccttgacctcacgtatagtggctttgccaaaatcttttatgccaagctcttcaatggcgctatcaattatttctctttctataggggttttcataattatttagttgacagttgatagttgacagttaatttttcaactttcaattatttattgtaacaagcaaatatctcatctgttctctttgcgtctggtttttgtgtgaatgcgctcacgagcggcactattataaatccggcaaccatagcaagcacaccgcagtttattggcgactggaatatggctgggaagtacggacgtagcagcatattggcaatcataattacggtgccaaagatgaagcacacccagcatgaagcaggtgacacccacttgccatagagcgagtagaggaacggagccaggaatgaacctgccatggcaccccatgaaatacccatcagctgggctataaatgtaacagagctgctgtattgtataagtgctattgttgcgctaatggcaataaacaccacaataaacactcttatgcagcgcacctgctttttctcactcatgttttttataaagttgtctttaagaaaatctatagtgagtgtggatgatgatgttatcaccagcgatgacagggtgctcatacttgctgagagtaccagtattaccaccagacctataataataggggagagggtggagagcatctcaggaataatggcatcgtagataatctttccatcggcgttatatagggcaggagaatcaaacaacctgccaaaaccgcctaagaaatagcatccgcctgccactataagcgcaaaaacagtagataccacagtgcctttaagaatggctttctcatctcttatggcatagaacttctgcaccatctgaggcagaccccatgttccaagcgatgtgagaagcaccacaaatgtaagcccaaccaaatcaggaccccatacagaggcaaaatcaccttgctgaactcccatgacagggtctgagatgaggctcatcttgttcacagcctccataagtccgccctgagtctttagcactgcaataataacagttacaatgccaaacagcatgataattccttgtataaagtcatttatggcagtggccatgtatccacctgcaataacgtaaatggctgtaagaaccgccatgattattatacatacagagtagtccatattgaatgccattccaaacaagcgtgaaaggccgttatagagtgacgctgtgtatggaatcatgaacacaaatatgataacagaggcaaacactttaagtgcagggtcatcaaatctgcgtccaaagaactcaggcatggtggaggagtctaaatgctgtgtcattatacgggtgcgcctgccaagcagtatccatgcaagcagagagcctattatggcgttgcctatgcctatccatgtggcagacaatccgtagcgccagccaaactgacctgcgtaacccacaaaaataacagctgagaagtatgacgtgccgtatgcaaatgcggtgagccacggccccacactgcgtccgccaagcacaaatccgcttacatctgtggagtgcttgcggcagtagaaccctatgcccagcaggattgcaaaatagattattagtatagctaatttcatattaattgtttaatcggttattcggttaatcgtttaatcgattcaccggttattcacacttcgtgttcatcaacacgtcaccggttcaccgattcatcgttaaaataactttctcagatccttaactctcactgccttgcctccttctgctgatggaagtgagcctttgggtacaagtttaaccttaggcgttatgagtatctcatccttgagctggtgtgtaacctccttaatcagtgatttaaggtctgttactgtatcagagaaaagttctccaagctcaacctccacagtcatctcatcattgttatcaattgtttcaagagttataaggaagttgcttccaagctccttgaaacccatgagaatcttctctatctggatagggaagatgttcacacctttaagaatcatcatatcatcactacggccttggaaacgtgccagacggcgatgtgtgcgaccgcaagggcagtcaccttttataatgcgcgtaaggtcacgggtgcgatagcgtataagtggcatggcctcacggttaagtgtggtgagcacaagctcgccaatctcaccgtctggaaccggcttgagggttacaggatctacaatctccactatcacattatcctcccagatgtgcatgccgttctgctccttgcactcaaaagccacaccaggaccgcacatctcgctcatgccaaatgagttgtatgccttaacaccaagcatctcctcaattctcttacgctgctcctctgtgtgaggctctgctccaatggcaaaaatcttcagtttcaaatccttgcgcgggtcaaccccctcctctgccataacctcagcaagacgggtggcgtatgatggtatgatatgaaccacagtggttccaaaatctttcatgaacttaatctggcgtttgctgttacctgctgcggctggtactgtgaggcagccaagcctctctgctccgtactggaatccaagacctccggtaaacattccgtatccggatgtgttctggaacacgtctgtatcacgcactcccaccatatataagttgcgagccacaagctcagcccatgcttcaaggtcatgcttgctgtgaagaaccacggtagggttacctgttgttccacttgaagagtggactctgacacaatctttcagaggaattgccgccatgccaaaaggatagttgctgcgcaggtcatcctttgtggtgaatggaagttttgttatgtcatcaatgcttcttatgtcagatgccgctattcctttttccttgaaagccttctgatagaaaggaacattcaatgctctgagaatggtggttttcaaacgctcatactgtaactttttaagatcttccctgctaataatttcaacgggattaaaaaattgacttttgtccattgttttttgattttgtcggtccactataagggtattataattagagcgcaaaaatacaaaaaatgtttgtactatggtaataaaatcctaaaatattgttatctttgcatttcgtagtttttttaagaatcatggaagaatcaaaggaaaaagagttgtcactctctgaaattgtagagcagctgaaagaggctgcaagcagtgatgttacaagagaaaagattgcgcagatcaagtcaaacttctacaaacgtcaggcggctatcctggagcagatgaaacaggcttgggtagagcagggtaatgatataaaggattttacccacacatttgcagaagaagctgagttcaagcaggttctacaagcttataagcagaagagggcggaggagttgcagaaaattgcagaactgcagcagaaagcctacgatgccaagaagagcatagtggagcgtctggaggctcttatcagcactaatgatgacgtggataaaatctacgcagaggtgcgtaagctacagacagagtggaataacgcaggagaggtgatacagaataaatacggagagatagtaaagaaatatcaggctcttatgacacagttctatgatgatgtgagaatcagcaatgaactgagagactatgatttcaagaagaatcttgaagtgaagacacagctgtgtgaggaggcagagaagctcgccgcctctgataatcttaatgaggctttccagtcactgcagaaactccattcagtatggcgtgaaacaggtccagtggcaaaagagtacagagaggagctgtggaacagattcaagacagcaagtgacactattaaccataagcacgcagatttctatcaggccaagaaaacagaggaggaggctaaccttgccaagaagacagagctctgtgagagcgtggaggctattgagtaccaagatgtaaaatcatacaaggtgtgggatgagatttcccagaaggtaatagccctgcaagaagagtggaaaaagacaggtttcgccccaaagaaggtgaacgccaaaatatatgagcgtttccgtgccgcctgcgatgccatctttaaagccaagagtgagttctataagagcaccaaggaggctatggcttcaaatcttgaaaagaaacgccagttagtggctgccgcagaggagcttaaggatagtaaagagtggaaggctgcatcgcagaagtttgtggagctacagaatgagtggaaaaaggtgggaccggtttcccgccgtgccagcgagcagatatggaataactttaaggcggcgtgtgactatttctttgagcagaagaaacaggccacagagggtaccgtatcactatcaaaggagagagaaaaacttgtgcgtgcatacgataaggttgtgtctgagctgaccaccatagagaataacatggagttccttaactttgacgctaagaaaccaagcccgctcatgaagcagatgcaggctcaggttgagaagctgcgcaaagacaaagatagcctgagagcaaaggttaaggaaatagaaaagagaatgaggaatggagaataagaatttcaagcctaaacgcagcgaagaaggtaaaaagccagcgcaaaagctgtttgttcgccgtaagccggctgttaagcacgccactgacggcagtgtgaggcttaaccgctttcttgccaatgccgggctttgctcacgccgtgaggctgacacactgatagaggccggagtggtgcgcataaatggcaaggtggttacagagcttggcaccaaggttatgccagatgacaccgtctatttccatgaccagcttattaaatctcagaaaaaaatatatatactgcttaacaaaccaaagaactgtgtcaccactgtagttgatccgcatggcagaaccacggtgcttgacattatagcaggagcatgcaaagagcgtgtatatccagtgggcaggttagaccgcaataccttgggagtgcttcttcttactaacgatggtgagcttaccacaaaactcacacatcccaagtatgagaagaaaaagatttatgaggccactcttgacaagcctcttgccacagaagattatgacaaaatactctctggcatagtgcttgaagacggaccaatcaaggcggacgcactggagtatgtggaagacactaagcgcatgacagtgggcatagagattcactcaggacgtaaccgcattgtgcgccgtatatttgagcatcttggttacaaggtggagaagcttgaccgagtgtattttgcaggtctcaccaaatacaaacttccgcgtgggcactggcgtttcctcactgaggatgaggtggctatgctgaaaatgggttcatacgaataaaaaatatacacagtgagtaaggttaattctaaagcgatggttgtttttagtggcggacaagattccaccacttgccttttttgggcgctaaagaattttgattacgtggaggctgtaacttttaactacgggcagcgtcatataagtgagattgaatgtgccaaggcaatagcagctgatttaggggtgaagcatcatgtacttgatatgtcgctactgtcacagctggcaccaaactctcttactcgtatggatatacctgtagatgagaagattccagacggcaagtctgtgccaaacacatacgtagagggcagaaatatgctctttcttacttttgcggcagtgcttgccaaggtaaacggcataaataacattataacaggtgtttgtgaaactgatttcagcggttatccagactgccgtgatgtgtttgtcaaatcactgaatgttacgcttaaccttgccatggactataattttgttctgcacacaccgctcatgtggctcactaaggctgaaacatgggctcttgcagaccagcttggcaagcttgactatataagagagaatactctgacctgctataacggcataaagggcgacggatgcggacactgtccggcttgcaccctaaggcgcagagggttggaggagttttttcagttgacagttgacagttgacaattgacagttgacaatagcacgtcatcctgagtggaatgaaatgaaacgaaggatctcataatgaaacgtgagactcttcgctttgctcagagtgacgtttgtaccctatacactgaaaatgattttaggaaataagacagattacccaacgcagtacgcacctgagatgctggaggcgtttgataacaaacaccccgatgttgactactttgtaaagttcaactgtccggagtttacatcgctgtgcccaataacatcacagcctgattttgcaaccatatacatcagttacatacctgataagaaactggttgagagcaaatctttgaaactctatctgttcagctaccgcaataagggagagttccatgagaactgtgtgaacaccattatgaaagaccttgtggccctgatggaccctaagtacattgaggtttggggcaagttcatgccaaggggcggcctgagcattgacccgtactgcaactatggcaaaaagggcacaaaatatgaggctatggcggagcatcgtttgatgaaccatgatttatatccagagaagattgataatagataattatctgaatatatttgagttatgcttatgaaaaaatattttatacttcttattatggcagcagttacatcattagtgggagctcagacttctatacttggtttgaattttggaagtgattatgacgtggtctatagccaacttgcagaccgttttggcaacgcttctgttacaaaacttgacggtgagcatattcaggtaaaagattttgactacacaatagaagatgtaaaagttaataatattacctgtacgttctcttacatagacggtgagcatcatttgtgctccattgcctttacatcggagccatacgtgctatcatacgagtctgacaagaataaaatcaatgattttaacggctatgctgtaagggttagcaataagttagctgtggagctgaacaagaaatacaaagtgagcggggtggagaaacgcattaacaccgccaagccttggaccactctctaccgctttaacgttgatgagaatgtgactggcgtaattgccgcatacttcaacgccaccaagaaactcatgctccagaacggcacatcgtttgcccgccttacatacacagactcccgctatgtgaagaacaagatagatgaactgtagcttgcagcgttactgcgtgagacttttatactctgatagcagatactccttgagctgaggggtgtctgttatttttatgtgctttagcagccccatgcaaaaacggcctacgccacgcaggtcatacacatcggcgtcaaggagccactcatcatcagcgctctggctcacgcacctctgggcttcaggaaactcctccagcagcagattataagccataatgtcaagccttacacgcacacgtataggctcgctgccatggaaaccaaaaatatcaatatcctcactcctgaaactgccggcattagcccactgcttatcaagaatggttacactcttgcaccttgacgggcggaaggtcttgcaatggccgtctttagggtcatagcaccatacaaacttatggttatcagtaatttcaaaaggctccacctcccttgtgcgtatagtgcagctatgccctgatgtatattcctcaatctccacgcacctgtgctgctttacggcagtggcaaactgctctacattgcacagcgttttccactcgtcagtgccgctgataaggttcagcaccatcctgttacggtgagaactcagatcaaggcggaagcagttgctccttaccacaatatccaggccggagttacggaactcatcaatgtagcggtgcacagtgcgtgcagacaccccaagcatctccgcaatttcagcagtcttgtagaacctcacactctgaatcatattcagcacacggaacagcctctctacatgagactgatcatgaatttttgtggttttcataggcggtttttgaaatattttgcaagataatcaataactatgacaaattttgtcatagtagcataaaatctttgcaaaaaaaataatgctatgaaaaaattatttacctcaattgctttatgctttgtgtcagttattgcaatgtcacaaagctggaatgttttaaacagtgaatttaaccttggctcatcagatgtgaaatactctgatgggaaagtggctgttcctatttatgaacagattacaacagaaaaatatgggaaaacttatgttacgggcactgttataaaagattataagtatgtgcaaatgccaaagtctgtttttgaagagtataaatccggaatgacacatgttaaagtgggtagtgtatttattagtattggtgcggctttggctttagctggaacaatcatggtttacaagtcaacaaatacaagactttatcctttagattccgcaagtagattgaatgccgctggttatggccttataggctttggcggtgcttttgttacagtttctattccgttatttgctgtaggcagtgtgatgaaaaaacaagcgaactggaattattctttatacaacgaaattctggaacacaaataaaaaaagcgaggcgctttagacgccccaccttaaatgttttcacaacggaataatccttattgtgatttccttcaaattttgttctgcaaatatatgtgaaaaaacttaatgatgcaaatgaatttctaatatttatatttttttaacaaaacagatgcttatttttattccttggaatgtttgagtttttagcatatttgttaaatttgcaatcgttagattattaattataaacaaatcaagtattatatgaaaaagatattaggactggaccttggcactaatagcataggctgggcggtagtgaatgaggctgaaaatgaaacagaacaatcatccattgtaaaattgggagtacgagttaatccattaactgtggatgaacttggcaattttgaaaagggtaagagcatacctacaaacgcagagagaacattaaagcggagtatgcgtagaaatttgcatcggtataaactacgcagggcaaatctaattgagatcttattagaacatcattggatagacgaaaataccattttatctgagcaaggaaataattctacttttgaaacatatagactaagagcaaaagcggcgacagagatgatttctttatcagagtttgcacgtgttttgctaatgattaataagaaaagaggatataaaagcagccgtaaggctcagtctggagatgaaggacagataattgatggtatgtctgttgctaagaagctttatgaagagaatctaacaccaggacaatattcatatagtctaatatgtgcagggaaaaagaaattacctgattattatcgttccgatctacaatgtgaatttgataggatatggaatttccaaaaacagttttacgatgataagttgactgtagaattgaaagaaaatttagtttccaagaactcaaatcaaacatgggctatttgtgcaaaaccatggaatcttgtgggtctaaaaagaaatcttaaaagagacgagttgaaaaaggaaaattacaagttgcgttgtgatgctttgtcggaaaaacttgatttagaatatcttgctattgttcttcaagaaattaacgggcaaataaatgcgagtagtggttatttggggagtataggtgacagaagtaaggaattatatttcaataatcaaactgtagggcagtatcaaatggcagaacttattgctaatcccaattatagtttaagaaaccaagtcttttacagacaggattatttggatgaatttgaaaagatatgggagaaacaagcgcagcatcataaagaactaacgccagagttgaaatctgaaattagagatgttattattttttatcaacgtccgttaaaatctcaaaagggtcttgtctctttttgtgagtttgaaagccgtcagattgaagttgaagtggatggaaagaataagataaaaactattggtatgaaagtctgtccaaagtcttcccctgtatttcaagagtttaagattctacaagtccttaacaatattattgtatctaataaagaaacaaaagagaagttctttcttaatgaagaggaaagagaagctcttttaaatgaattaaaatataaggataaactttccaaaaaggaagttcttaaattcttatacaaagatgataagggcttagatatgaactttaaggaaatagagggagatagaacacaatttgcattattcaaggtatatcaagcaataatagaaaatagtggtaatggagaatatgatttctcaaaaatgaattctaaaaaggcattggaaatagtgtctgacgttttttctgcaataggagtaaatactgctatattgtctgattttaaatcagaatataacgactttgaaaatcatccgtattttaagttatggcatttactgtattcttttgaaggtgataagtctgtgacaggatatgataacttggtaaatgctttaatgaagaagtatggttttgacaaagatggagcagtaatgctggcaaatgtttctttgcaacctgattatggtagcttgagtaccaaggcaatgcgtaaaataataccttttttacgagatggaaaagagtatagcgaggcctgttcaatggcggggtacagacattctgccaggtctttaacaaaagaagagatagagaaaaaagaattggttgatagattgcagattcttccaaagaattcactgagaaacccagtggttgaaaagattctgaatcagatggttaatgttgttaatcaaataacagatacatacggaaaaccggatgaaataaggattgaacttgccagagagttaaaaaagagtgcaaaggaacgtgaggagatgactaagcagataaatgcaaattctaaattacatgaagattatataaaaatacttcatgatgagtttggacttcagtcaataagtagaaatgatatcattagatataagctttatttggaacttgaaaaaaacgggtatcatacactttacactaacacatatataccaaaagaaaagttgttcagtaaggagtttgatattgaacatataattccacaggctaaagtgtttgatgattcattttcaaataagactcttgaaaagcgagatgcaaacatagcaaagggtaatttaacggctgctgattatgtggcaacgttaggacaaactgcaaaggaagatttctttcagagagtaatgtccctttttaatgctaaagctattagcagaacaaagatgactaatcttctaattaaggaagaagatatcccaagcggttttgtgaatcgtgatttgagagacagtcaatatattgccaaaaaagcaagagagattcttgagagttttgtaaaagtagtggtacctactactggttctgttacagatcgtttgcgtgaagattggcagcttgttgatatcatgaaagaacttaattggaataaatatgataaattaggcttgacatattacgagaccgacaaggatggtaggactattggtaaaattcaagactggacaaaaaggaatgaccacagacaccatgctatggacgctttgaccattgcatttacaaaacatagttatatacaatatctgaataatttaaatgcaagagtacaaaaaggcgtagatgaatattttgatttagatatggttgagatttctaagttggataaagaacaacgaacagccgcagtttatgccatagagagaaaggaactatatagagactccaatcataaattaagatttagacctccattcccacttgatgagtttagaagagaggcaaaaaagcagttggaaaatattttggtgtcaattaaggccaaaaataaagttgtaacaaaaaatatcaatgtaattaaacaaggcggaggaaagaagggcaggatagtacaacttactccaagaggacaattgcatttggaaacagtgtatggtagtcataagcagtattttatcaaagaagaaaaaataggtgcttcttttacagaacaaaagataatgctcgtatctaataaagcatatcgggacgcattaattagaaggctacatgagtttggtggtgatgcaaagaaggcatttactggaaaaaattcacttgaaaagaatcctatttatctcaacgaggaacagactatgcgagtgccagataaggtgaatcttgttacttttgaaactgtttataccatacgtaaaccaatttctcctgacattaagttggataaggttgtggacaaaggtgtgagaagtatacttgaagcacgattggcagagtttaaaggtgatgctaaaaaggctttctctaacctagaagaaaaccctatatatattaacaaggagaaaggaatatctataaaaagggttactataactggtattaataatgctcaagcattgcatgcaaaaagagataaggatggcaaaattatttatgatgctgacggacatagtatagctgccgattttgttaatactggcaataaccatcatgtggcagtatttcgtaaacctaaattagacaaaaataatgtccagattatcgatgaaaaagggaacccgcagtatgaattagacgagcatattgtctccttctatgaagctgtagccagagctaatcaaggcttgccaattgtggataaagagtataagaaggaagaaggttggcagttcctattcactatgaagcagaatgaatattttgtttttcctcggtatgaaacatatgttgatgaaagtggaaataaagttcagaagatgacgttcaatccacttgattataatgaggagtggtataagaatccggagaactaccacctgattagtcctaatttgtttagggtgcaaaaattttcgtcaaaagattatgtgttcagacatcatttagaaacagttgttgatgataataatattttaagagatacaacatggaaaaggataagtaatgttgatggacttaatggtattgttaaagttcgtgtaacccacattggtcaaattgtttcgataggagagtattaatttatgattaagcgcaccctcagtttcaataacccagcctatctctcgcttaccaataagcagatggtgattaagatacctgagatagaaaactcaaatctgtctgagtctttcaagtcaaaatctgtggttacaatcccagttgaggatattggtattgttgtgcttgatgacaaacggattacgataactcagggattgttagaggctttgcttgaaaatgactgcgcggttattacttgtgataaaagtcatctgcctgtgggtttaatgcttccgctttgcgggaacacaatccagaatgagaggttccgtgagcagcttgatgcctctgttcctctaatgaaacaaatgtggcagcagactgtgcagtgtaagattctaaatcaggcggcggtacttgataagtgtagaggtgtggaggttggtaatatgctttcctgggctaagcaagttaagagcggtgatacagataatttagagggcagggcggctgtatattattggagaaatgtattccctgatgttccggattttataaggggtagggaagatgcctctccaaataatctgctcaattacggatatgccatattgcgtgccgttgtagctcgtgcattggtgattagcgggctcttgccaactttaggtatttaccatcataacagatacaatgcatattgcctggcagatgatattatggagccatacagaccttacgttgatgaactggttatacgtcttacgtcagagcgtggctatcctgaagaattgactgtggattggaaaaaggaactgttgcaaatacctgtcatggaggttatgcttgacggtgagcgccgccctttaatggtggcagtggggcagactgcatcatctgtttataaatgctttagcggggtggcaagaaaaattatttatccaactatgtagtaaatggaccggttcagtgaatatagagttatgtggattcttgtgttttttgatttgcccacagaaacaaagaaagaccgtaaggcatacgccaagttccgcaaggatattatgggagacggtttcactatgtttcagttctctatatacatacgccactgtgccagccgtgaaaatgctgaggttcatattaagcgtattaagtcaatgctgcctgaattcggtgatgtgggcgtaatgtgcataacggacaagcagtttggcgcgattgaaatattttctggcaaacgcagtaaggcacaaaaagcagagcctatgcagcttgaacttttttgatattctgttacatctacttccagcgattactatacatacatggcgttgtgatttgctttcaaattttgtatctttgatattctgttacatcattccgctgagagtgtctattacggtttccgttgtgatttgctttcaaattttgtatctttgatattctgttacatccttcgcatagcagaggcgaaggaggctgaggttgtgatttgctttcaaattttgtatctttgatattctgttacatctgtatcttctggagtatctggctgaccgccgttgtgatttgctttcaaattttgtatctttgatattctgttacatcttttattaatttcattatacagctcagctagttgtgatttgctttcaaattttgtatctttgatattctgttacatccatgctgtacttaattttccttgccttactgttgtgatttgctttcaaattttgtatctttgatattctgttacatccactgcacgctggcgctctacatcaagatagttgtgatttgctttcaaattttgtatctttgatattctgttacatcattatagtaagaattaacaagggttacttagttgtgatttgctttcaaattt

SEQ ID NO: 2374 - DNA, 16115 bp, synthetic construct
  source 1..16115: mol_type = other DNA
  misc_feature 1..16115: note = Synthetic
aagcaattaacaataaactatgctttgccaaaagtgttaatggagaagagctttattgaatcggccaatatctatttcactgggcaaaacttgtttgagattgatgatatcatagagggttttgatcctgaaattagtagagacggatttaatggttggggatctggtaaaagttatgcttttgctcgttcatattccttgggacttaattttaccttctaaaatggttaaacttattaaaactttaaaaatgaaaaactatatatataaatgtggattcttgttaatcctcctattgggtgcttgcagtgaccccttggaattggagccagagagctcaatcacagcatcaaacttttttaaaacagatagtgattttgaggtttacgctaaccagttttatgattattttccaagagaagggcgtggatttgttgactttatttggactgcagataatgatagtgacaaccaaatagctcaaaatgatggaaacatttttgcatttggtgcaaatactataaatgataaccccccgagctatggtggaggtggatgggattttggtaatataagatccgtaaatttctttttggataatattgaaacctctacattgtcggaagaagcaaaaaataggtggcgggccgaaggtcgatttttcagagcatacctttattttgataaagtaagaaaatatggggatgttccttggtttgataaggccctttctgagactgatcctgaggtatacaaagcaagggatcccagagctacagttataacaaacattatggccgatcttgattttgctattgcccatctacctctggaaattggtaataaagaaaatattgatggttatgtggcacatgccctaaaagcaagaattgcactttatgaaggaacatttagaaaataccatgagaaatcagagccctatgcagatttacttaaccaagcagtaatttcggcagaagcaataatgaacgagaatggatacgcactgcaccaagatggaggaccggagaatagtttttacaactatttcaccttaccgttaccaggaaccagttctgagaccattttagctagacacttttccacggatctaggtattacgcattggtcgcaacgttttattttattacaagcaatgaccggtatttccaagtctcttgctgatgattttttagctgccgatgggcttcctatttcattaagtccgttgtttgatgaaacaactgattatgactttatagaagacgagatggctaatagagaccctaggatgtcgcaaactatttggaacaaaggcgatttaaaattggcagggccggatgaatattttaatgaggataatgggcgagtacctcctttcaatagtaactggccttctggctatgcaataaaaaagtttagcaacacagataggtctttacaaatccccggtgcggcagatgatggagtatacattttccgtttaggcgaaatatacttgatctatgcggaagcaaaggcagaacttggtacgctttcacaaagtgatttggatatatccattaatcttctaagaaatagagtaggaatgcctcatatgaccctagtagacttggtgcgtgatccagattcggattttgatggaagtattgcagaaatccctgcggtatctgttctaatagacgaaattcgaagggagagaagagttgaattggctgcagagggaatgcgtagggatgatattgttagatggaaagcggggcaacttttagcccagaacccattgggcgccaaatttaatcccgaagtataccccaacgcagtaaacgagccttttgctaggacgaatgctgatggttttatagagccctatcaaggtacatccagaacacgacaatttaatgaggacaaaaattatttatatcccattcctccaagtcaaataggtttatatccaaatggtgaattgaaacagaacccaggatgggaataataatcccgaaataatatcatgatcgttaagatgaacatggattttaaatgtagttttttattagttagttgagttattaaggagaggcttttatcagtctctcctttattcttaatctaaggaagtatccgtcaggcagtgatatagaagttttgggtttatcgcccgaggactaaaataagtgatagttataattttttatatatgagtaaattttatctaaatattgtacttatagcagtactaaatttctgcatttcccatgcgcagaacaatgatggtcccgaaccatacggacctttgcctacagaacgccaattggcatggcacaatatggagtattatggctttattcattttaatatgaatacgttcaccaatatggaatggggaatgggaagtgaaaaaccggcacagttcaaccccacacgattggatgccaggcaatgggtgaaaaccatgaaggaagccggcatgaaaggggttattataactgccaagcaccatgatgggttttgtttatggccatcaaaatacacagaacattccgtaaaaaattctccttggaagaacggtaaaggtgatgtgttaaaggatttgtccgaagcttgcgcggaatatggattaaaaatgggggtgtatttatcaccttgggataggaaccatgccgactatggcaaaccagaatatgtaagctattttcacaatcaattacgagaactattaaccaattatggggagatttttgaagtttggttcgatggggccaatggaggtactggttattatggaggagccaacgaaacacgtaaaattgataataaaacttattatcaatgggataaggccatagaaatagtaagggaattgcagcccaatgcggttatttttggagatggtggtccgggagttcgttgggtgggtaatgaggaaggctgggctaatgaaacaaattggagtttattagaaagaaacaaggtatatccggggtatcctaagtacaaagagttgctttctggccatgaaaatggtacccattgggtgccggcggaatgtgatgtatccattagaccagggtggtactatcatccatccgaagattctcaagtgaaatctttagaacatttagttaacatttattatgaatctgtgggtagaaatgcttctttgttattaaatctgcccgtagataacagagggttgatacacgagaaggatgctgcacaattaaaggcattaaaacagcaaatagataaagattttgctaatgatgtagccaaaggcattaaagtgagcgcaacaaatgttagaggaaatcattctgagtttgtagctaacaatgtaaatgatggggatgagaaaacatattggacaacagatgatggggttaccacagcatccattagcatgtcatttgataaaccaaccgaagtaaataggattttacttcaagaatatattgcgctaggtcaacgggtatatggatttaccgtagaggctaaagtagatggaaattggaaacttatagacaagcaaacgactattggtgtaaaaagaatattaagatttgattcgatcgaagcttcagaaattagagtaaatattaccggatcaaaagcagaaccgattatttcaaacatagaattataccgtgctccaaatttacttacacagcctattatcactagggataaaaaggctatagtaaccatggaggttgccgataaaaatataattatctattacaccttagatggttcggaaccatcagaaaactcccggaaatacgatacagcttttaaattaaataagcctacaacgataaaagcaatttcgtataatcccgaaaacgcggaaaaaacagggattagagaagtttattttgatatcagtaagaaagattgggaggtgcttaaagtaagttcaggaaatcttaaagatgcttataggattattgacgataatcttacaagttcttggactagcggagcaaaagatagtcccaacgaagttattattgatttaggaaagacgtatttgttgcaaggttttacctatatgccaattcagggcagatggccatttggcattatttcgcaatatgaattttcaacaagtacagataataaaacatggacaatagcctctacaggggagttttcgaatattaaaaataatcctatagaacaaacggtaaaatttaaaacatctgaagcaagatacattaaattgaaaggtgttaaaataattgatgatgataaaagattatctgttggtgaaataggggtgtttactaaataaatgacctttcaataaaaataacttgttcttaacctaaagtgaatgattaaattttatcactctatgcttttccaatcctagtcttcaatacctctttttaaggggtaagagcctaggggagattaaaatgatgtctataatgtttggaatgtatttaaaagggtaataacagtaattgctaagcaggaacaatagtttaaaagtaattcaaaaatactagtatgctaggctataaagagcttttttgttactgtgaagaaaggcttttacaattaattttatagtgctaggatatataataaacggctcagttttgtttggcagggatcagtatacaatgaataataaacaaattatgaaatgataaataaatatagcattatacttcttttggcagccttggccaatatgtcttgtgtgcaaaaaaacatagaaataggtgaggttgccattattccacaacccgaacaattgatggtagaaatagggtattttgaaataaatgaaaatacgaccgtttcggtagaatccagagcccaattggctcttgccaatttgttttttgatcaatttacagttgtgtcaggatggaaaccaaaagtggatattggtgacaagggggacatagttttttcaacggacgcaactattgtagaagaggcttataacttggaagtaaaccctaaaaaaatcagtataatggctggttcggaagccggattcttttatgcgctacagtctctaaagcaattattgccggtgtccttttacagtggaaagttgcaacccaacatagtctggggagtcccttcggtgcgtattcaggacaagcccgcttttgaatggaggggttatatgttagatgtatcccgtcatttttttgataaggagcaagtgatggaagtgctggattttatggcagaatccaaactgaaccggtttcattggcatctgaccgatgatcaaggttggcgggtagaaattaagagctatcccaagcttacggaggttggggcatggcgtatggattacaatatcactgacgagaatgtttccaattggtttggaaggcctattcaaaaaccaggggaaaagccttcctacgggggctattatacccaagaggatatcaaagagattgtagcatatgccaaagaacgttttatagaggtggttcccgaaattgatatgccagggcatgcccaggccatggtagcttcctacccagaaattggctgcgtcaattccgaaaaatatgtggctactgggggtgtggtgaaaaataatactttgaacccaggaaaagaggagacttttgtatttgccgaaaaaatgttgaatgaggtgatggacctatttccttttaattatatgcatattggaggggacgaatgcaacaaaagccaatggttaaaagatcccgatgctcaacgtaaaataaaggaagaggggttaaaggatgtttacgaactacaaagctattttataaagcgaattgaaaaaatcatcaacgcccgtggcaaaatcatgattggttgggatgaaatattggaaggtggcctggctcccaatgccacggtcatgagttggcgaggcgaggaaggcggtatagaagccgccaagatgggacatgaagtaatcatgacccccagcaactattgttatatagatctaaagcagggacacgacgacttagagccaaatttaggctattcccaattattattatccactgcctatagctatgatgttattcccaaagatatttcagaagaggaagctggcctaataaaagggattcaggccaatatgtggacagagtctataagcgactggggcaagcttacctatatgacttttccaagattgtatgccatagcagagagtggctggacctctccggagatcaaagactgggacaactttacaaatcgccttcaaacccaatttttacgattggataatcaaggtgttcggtacgccgtaagtgcatttagcccttggatagaccatacaggtcagggagatcatatcgaaatagctttaaaaactgaagtgaatgatttggaaattttctatacacttgacggctcggaaccaaccatggaatcgaagtcatataatgggtcctttaaaataaaccattctacctccattaaagcaagggcttttaaggatggcgaagctgtaggctatacgtcatccatggatttttatgttcataaggcagccggaaaattggatgaatcccctgatttgaaaaagctaacggatctcaactatggtaaattgaataaaagtgatcctaactgggtatccttcaaaaatggtatggaagtaacaatagaatttgattccttgaccgctgtaaaggaggttaaatttgatgcgctacgctttacgattgctggtatttatccgccaaaaaatgtggaagtccatgggtccgagaacggaaaggattattataaattaggtgaaactgataaaatagacattagccatgttcaaggaagaaacaaaataccttttcagattgggtttaatccagttaaggtaaagagtcttaaaattattggaaaacacataaatcctattccgcaagaacatcatatgtccggagccaatgcaactataaaagtagatgagattgtcgttgagtagtttaaacttcccgctagaggaaattcatcttctaaggaaaaaaataataagtaatagtttctagattcacggttggtgttagtagaccagagtttggaaagacttttaaaagaactaaaaaaataagaattgaaacatagctacaagccattaacccttaatcctatagcgaatgatgattaagataaatctcagggtttttctaatcctagcattttattcaactacctacgagctgcaatctcaagagaaactaaaagtgatgacctataatatttggaatggttttgattggggcaaggatatcgaccggaaaagtaaatttatagattggataaatactcaaaatccggatgtatttgcgttgcaggaattgtgtggctatacacaaaaaacactgttggcggatgctaagaaatgggggcataattacgccgaaattttaaaaacgtccggctattccgtagggatcacttccaaggaacccatagtggtcaaagaaaagatcctggacgacatgcaccacggggccttgcattgcaaggtttacgacatagatatttttatagttcatttttcaccatttagccatcaaaaaagaagggaggaggcaaagattattcaaagcaaactatcagagctttccactgggcaaaacaaatatttggtgttaggggattttaacgccctatccccgtttgatgcccacttgtataaaaacaaccctacgctcttggataataaaagagcttcggaaattgaacacgagcatgttaggaacttattggacggtgaattggactatggtgtacttggatcttttctgggttatccactaattgatgttgttcaaaggtttacgtcttcatgggatgatagggtaagctgtcccacccaagtttttgaatctgaaaaaggggagggacgacctattagctccacacgaatagattatattttgagttccccttttttagccgcaaaatgcgtaaaggcaactgtgttaaacaaaaatgacacctattatttatcagaccattatccagttttagctgaatttgaattgtaggtttttaaaagaagtaaatcgagccaacggtgcagttctaccttgacaaaaagatttgacatgcaactcaaagatatttgagatacttgattttatccgctggcttttttaatgtttatcaacctatttgtttaattaagggaattccgtaacacaaggtatacagtgaatgaactaagttttaaacaccataacttttctctttgtgttttcatttgtataatggtcatcatttagggcagtgaattcaaatttaggaaattctgtactttctagtttgaaatgctttagctcggtcaacgatacatttttaatggttttacctcgatagcaaactccgccttttttcctccataaaatttcggcaaaaaagcatcgtaaaaacggtcttggaaacaagccattttctaaagagaaaatcggcttaattccgccgtgatttttcaaggattttggacctatattttttataaaatattttatttttgaaagcaatgttaaatgatactatttggtggtaaattgcagtaatcgtttaatttacagtataaaaagtattttaaagacatctaatgtgttaattaacaggccgacaatacttaccattcaaagtaggtttgagtgtctgaaaacatatttaaaataagaaacaaggcatgtttaagctggttttaaattgatttttcttgctggttttgttaagtgattaaaaaatggtcaagtcttttttatttttctctagagagtttaaatatgtttgttttatgtttattaatgtttgtatatgataccaccgctagtccactccttgtccactgctagtccattactagtttacttctatgcccaaatttggtagtgttaaattagcatataactaaagtgtttttttgagaattaaaacggtatcctttatgggtatatggcattgttttatagctcctttttcatcacaaaaatgaaccgatttcgccttaatcggattgcataatcaggcgctttttttctgcttttttcgaccacttttagcgctctttttataaatcctaaataagccaaaatcgttgtcggatatggatgataaaaaaggatataaaaaaagaattggagtaggggagaaggggataaaaaaaatgttgtttccttatataagatgtacggctctgtttagaactatttgtgagggacaaccataattctaagggtttgtgttttctaatattcttttgggaaccaaaagaggtggaatagcaagagggtaacacgctaaagcgatgttacatattataaaacactaaaaagtagttgtttagagtgaggagggttttcaggaattatatgaattgaatagagaaaaccttcggaacgcctgtgtttattgatgttttttcagtagcaataaacatactcgtttatctgggtgtacaatttatcaggtttttaggatgtaaataaaacttgagatttagaaaacttcccttttttgtgtcaaatagctccgtaaccctagtaaatattgaaaaaaattgacacaaaccggacttcaaagcctaaagcttgtgttattctattattgctaaggtgtctatggcgagaagaattggagattagtgcgttaaaagtgaattgttcttttaaaagcactttttaatggtaaatggtaagaagataggtgctttacaacagttatttatagaattttaattaaatactattagcggcgactgccgttaatattgttctgcaagactttattataaaaaaaagctgattctaaaaacagaaaagtgttaacttaaagaaaattcttcttatattcggaattatcttacatgcactttgttaaattgatgatataaaaaagcccccgtagaaaggcgagggcgtccttgaatgttctcacaacggaataatccttattgtgaattgctttcagttctgtaaatataaactaataaaattaaaaaccaaatatgaaacgaattttaggattggatttgggaacgacatccataggttgggcatttgtaaacgaagcagatagtgaaaatgaagtatccgctatagttagaactggagtacgtgttattcctttatctacggacgagcaacaagattttacaaaagggaatacaattacgattaatgctgaccgtaccctaaaacgtggaatgcgtcgaaatctacagcgttacaaacaaagacgtgaggctgtaatagaaatcctgaccaaaattggttttattactaaggaaacggctctttcagaacaaaacaaaacaactcatagtacttatgaattaagggctaaggctccatccgaaaagatttcaaaagaagattttgcaagggttcttttgatgataaataagaagcgtgggtacaaaagtagtagaaaggccaataatcaggaagaaggacagcttatagatggtatggctgtagcgaaaaggcttaataatgaaaaacttactcctgggcaactttcatattgtttaattaaggaaggtaaaaagttattgccagactactatcgttccgatttacaaggagaatttgatgctatctggaatttccaaaagcaattttatcctaattatttaacggactttcataaggaagctcttcaagggttgaacaaaacaactacaggacaatattttgaaaagaaaataggtacggaaagagctgaaaataaaggggcaactaagaagcttcaagaatacgaatggcgaaccaatgctatctctggaaaattgtcgttaccacagattgcttatatacttacggaaataaataatcaaatcaatcaatctagtggttatttgggggcgataagtgataggagtaaggagctttattttaataacctcacagttggacaatttcaatataatctgatcaaaacaaagcctcatacatcacttaaaaatcaagtgttttaccgtcaggattatatggatgaatttgacgccatctggaaggagcaatctaaatactatcctgaattaactgaggagattcgaaaggaattacgagatattactattttttaccaaagaaggttaaaatctcaaaaaggccttatcaatatatgtgaatttgaatctgttgaacgagatgtcaccgtaggaaatacaactaaaaagaagttagtaggcccaagagttgctcctaaatcttctcccgtatttcaacaagccaaggtttggcaaaatattaatgcgattagagtaagtctaaaatctaatgaaaatgagttttttagcattgaagatgaaacaaaacagttgctttttaatgagttgaatctggtggagtctatgaaagaccgtgattttttgaaatggctatttaaagattcgaaaaacaatgccaaggattggaaaattaattttgaaagtatagagggaaatcgaacacaatcagctttattttcagtgtataaaaagattgtggaattggaggggtatgataaaatagactacggtaaaccaaccaaagaaataatagaaatactacggacttgttttgaggagattggaatcgatcccaaaatatttaatcttgatatgggtattgtagggaataactttagcaaacaaccaggctatcaactttggcatttattatattcttatgaagatgatgattctactaccggcaccgaaagtttactcaataaactccagtcaaattttggttttaatagggaacatgcccaattattggcagcagttacttttcaagaagattatgggggtctaagtgtacgggctttaagaaagatttatccatttttagaggaggggaaaatgtatgatgaagcttgtaagctagctggttataaccattccaattctattaccgctgaggaaaacaaagaaaggttactacaagaccgcttagaaatcttaaagaaaaattctttgagaaatcctgttgtggaaaaaattctcaaccaaatgatcaatgtagtaaatgctatcatggatgacccagatatgggaagacctgatgaaatacgcgtagagttggcaagggaattgaaaaagacagctaagcagcggaaggaaatgacgcaggcaatcggtaaggctacaaaggaacacatagaataccgggaaaagattaaaaaggaatttggtctttcttatgtaagtagaaaagacctgataaaatataaattgtacctagagctcaaatctattgggtttaaaacgctgtattctggaacttatataaaaccggaagaattgtttaccaataaatttgatgtagaacatattattccgcaatctgtactttttgatgactcattttcgaacaaaacaattgaattaagggatgtcaatctggaaaaaggaaatgaaacagcgtttgactattgtgaacgcaaaggttgggcaaaacaatttgattcacgggtacaagaggtgtttgcacaaaaaggaatcttttatgggaaattaaaaaaattattgatgtccaaagcggatatcccagaagggtttttaaatagggatttggggaattcagcctatatcgcaaggaaagcttctgaattattaaaaggtataactcgaacagtatcggcaacctcgggaaccattactgataaacttcgttccgattgggaattgataaatgtattgcaggaacttacttgggataaatatgaaaaattagaccttactttttatgagtacaataaagaggggaaggcactaccacgtataatagattggactaagcgaaacgatcatcgccatcatgcaatggatgcgataacggtagcttttaccaaaccagcttttgtacagtatctaaacaatatgaatgcagatagtaataaggaccctattatttatgccataaaagaaaaatacacctaccgggataacgaaggaggaagaaagtttaaaaaaccatttgatagtatacgtgaggaagctaaaaaacatttggcttctatcctggtttcacacaagactaaaaacaaggtggttacccttaacaagaataaaacaaaaattaaggggaaagaaaaatacaaaacaaagattgagctaacgccacgagggcagttacacaaagaaactatttatgggaaaaaccatatttacgacgtcaaggaagaaaagataaatgcttcttttgacaaggaaaaaattggaacggtaaccaaaccgatttatcgagaagcattgctgaaaaggcttgaattgtttgacaatgatcctaaaaaagcttttgcgggtaaaaatgccttaacgaagaatccaatttttatcaatggttcagaaacaaacgtccctgataaggtgaaaacgcaaacggtacaatctcaatttacaatcagaaaagaaattactcctgatttaaaaattgataaagtggtagatgaaggcgtaaaaaggatacttcaagatagactaaaactgtttaacggtaaacctaaagaagcattcgccaatcttgatgaaaatccgatttggcttaataaagaaaaaggtattcagataaaacgagttacaattacgggcgtaagtaatgctgagcccttacatatagccaaagatttaaacgggaaggaaatttttgatggtgaaggaaaagagatcccagtagattatgtgagtaccgggaataatcatcatgtggccatttatagagatgatagaggaaatttaatagaagaagtggtttctttttacgaggctgtgacccgaaaaagtatgaggcatcctattgttaaaaagaatcacgaaaaaggatgggagtttatgttcacgatgaaacaaaatgaaatgtttgtttttcctaaaaatggttttaatccagatgaactcgatttaatggatttaaagaacaagtctgaaattagcgaaaacatgtttcgggtacagaaaatttcaacaaaaaactatgtattcaaccatcatttggaaacagaggcagtaggggctgaaacatttaaaactaaaaagatgctagcggatgtggcctaccgctcttgtcgaagtgaaaaacaccttgaaggcgcggttaaggttagaataaaccatttaggaaatattgtacatgttggggagtattaaaaactatagaaatgatcaaacgcaccttgttttttgggaacccggcctatctcagtactaaaaatgaacagttggtagtgagttttcctgaggaaggtaagaaggaagcatctatacctatagaggatttggggtatgtggtattggaagatccacagataaccattactaatggacttatacgaaaattggtggagaataaaacggcgattattacttgtgatcaacagcatatgccctgttccatattacagcctttggtggggcataccgagcagaccgagcggatgcggcatcaattgaatgctagcttgcctttaaaaaagaacctatggcaacagacggtacaaataaaagttgaaaatcaggccaaccatttgttacggcgcgaaaagaatgccttaaaattaaaacgatgggccaatgaagtaagaagcggggatagcggaaatcgtgaagctattgccgcggcctactattttcaatccctattttcagaggtcgaaggatttagtcgcaaccaaaagggagtacctcctaataatttactcaattatggttatgctattctaagagcggttacggcaagagcattggttagtagtgggatgctgccctcggttgggatttaccatcgtaataagtacaatgctttttgcttggccgatgatattatggagccatataggccttatgtggatgccgtagtgtatgaaatggtagaaacgggcggcaatattagtgaactcagtactaatttgaaatcacaattactgactattcctgccttagatgtttttcttgacgggaaatggagtccgctgatggtggccatgagccgcaccaccaatagtttgtatgattgttttttgggatcgagtcgaaagattctttacccagagtttcaaaagcaatggtctcccatatagagacacaagaagtataggttgttagatggtataatgggagttaaccatgattgcatcatatataaagaagataatatttaagggcgtttaaaggaatgtgcattagtagtactaaatgataaaccagaaccatttttcgcgtttaaaccaatatagaagcatgtgggtacttgtattttttgatctcccgacagaaaccagaaaggaccgcaaggcagcgactaggttccggaaaatcctgttggacgatggctttaatatgtttcagtttagtatttacttacgcttttgtgccagtagggaaaatgcagccgtacatattaagcgaaccaaaagcaaccttcctaaacagggaaaagtctgtattatgcaaatcactgacaaacagtttgggatgattgagctctttcatggtcatacggaagtggaacccgatactccaggacagcaattagaattgttctgaaataaaaaccataggtagctggtagttaaggggttgcattggatccttgtttttaaatcctaataaatgatgtaataaacaggataccagctagttatagcgggtatcctgtgaataatctctaaaattaaagaactgaaagcaattcacaacagtttccctcggtaaattgtaccgccacttcctgtgaataatctctaaaattaaagaactgaaagcaattcacaacctcttggggtatgttctgggggttgcttacctgtgaataatctctaaaattaaagaactgaaagcaattcacaacgcggaaatgatttacaaaattgacgcaaaacctgtgaataatctctaaaattaaagaactgaaagcaattcacaacgaggatgattggatttgtataagggatggcctgtgaataatctctaaaattaaagaactgaaagcaattcacaaccctcccattgctatattggtaagaaaacgacctgtgaataatctctaaaattaaagaactgaaagcaattcacaacccgatagcattaaaattggcagacaaaccacctgtgaataatctctaaaattaaagaactg

SEQ ID NO: 2375 - DNA, 16113 bp, synthetic construct
  misc_feature 1..16113: note = Synthetic
  source 1..16113: mol_type = other DNA
gtgcgcccacttttagcgttagcttatagtcggcaggatagtttgtttcgggaaatatcccttgcgtttcagctgtgaatgtataggctttattttttatttgtgctaatttttggttgttatagttgtcagctattctgttgtgcgtggtgagtttgatgtagttactgttctcatcttctttaaaattaggaagatagcgtgagtttaatagcttgaaatcctcattcgtaacctttccttctctgaaatgattgagaatatctatgaacttttggtcttgctgtcggaacacttttgtgagttctatggtaacgtactgtatgcgctgtaaagcccttgaaccaaagaaataaggtgtttcatagtatttttttagcaattcttcctcgtctgctgtaaccacaggcgtaagctgttgcaagtcgccaatcattaaaagttgcacgcctccaaatggtttgttgtgttcacgaaatcgtcttaacacagaatctatggcatcgagaatatcggcacgcaccatactgatttcgtcaatgatgagaaggtcgagtgtgcgaaatattttgcgcttctctttaccgtaatcaaatttagattttactctactttcgggtatgaaaggcgatagtgggagttggaaaaacgaatgaatcgtaacaccgcctgcattgatagccgctacgcccgtaggtgctaccactataatacgctttgtgctatgctccttaactgctttaagaaatgtggttttacccgttccagcctttcccgtaaggaagatactgatacctgtatgttccacaaaatcccatgcgtttctgagttcttcgttcttttccatgattggtcttttatgatttccgaacaaatttagtaaaaaatagtgagttggacaaatatggtgggttctaaaaattagctttgttttaatttgcttttccttttgtaagcaaattgtcaatgagtaagggcgcgtagcgagctatgcaactgcacgaattggcgatttgaaccaaaaagaaaccaaagaaaaacaaaacgaaatccatatcctaagtatatttcttgcggtggtaatttttagaatctatcatatgtaattgataaaaatcaaatgaattgacacatggcaataaatcggcaatttgtggagtttcatttcttttctgtgccttcaaatattgtaattgttgtaactttgcacacacaaacaggataatgaatgacggagaacaaagggttctctatttaaatttaggagaaaatagaaatgatgacattaattttagtggtagctgtagttgctacaagtatttttcaggtaataaaaattaataagaacttagtttcatagttttatagatatagtggattgagaaagcaaaaccccattttcgtttttcgaagatggggttgtttttttagggtataaacccttttgaaatgcaaaagagcctgttttgagcttcaaaataggctcttttgtgcttcaaaacaggctatattgaaaaataaagtcgttggtttatctttgtgaaaaaaaaatattttattatcctttggcttgttagttcggaaaatatccttatttttgcatcgtatattaatgtgtacactattcgaaacaaaatggcttaaagtcatatataacggaggtaatttttagaaactaccttttataaatacaaacccataaattgaataatgaaagaagttaggtgcttacgaaaactactattaattatagctttggtgttggtaccattgatagaaatacatgcagatgaattaaaccaaagcggatttccactgaaaaattcacctattgtttgcgattctttgaagcaagcaaacgataccattcccactgaaataaaagatactcttaaaatagataagatttcagatagtcgctttggtcggatagtgagctatactgctccgctttttgtagctggtatggtggttggtgggcaagatgctcatttccgaagtctacgcaatacctatctgccacagtttcatgaccatttagatgactaccttcaatattctcccgcagccgtcttggttggtatgaaagcgttgggtgtaaagggcagaagcagttggacacgaatgtttttgtcagatgctttttcggtagctattatggcaggattagtcaattcgttgaaaatgtcagcccaagtcgaacgccctgatggctcaaataaacgctctttcccgtcagggcacactgctacggcattcatgaccgccaccatgctcaccaaagaatatgggcatcgcagtccgtggataggcattggtgcttatagtgtagccatagcaacgggcgcaatgcgtatggcgaacaacaaacattggttgagtgatgtcattacaggtgctggaataggcatcttatcaacagaattgggctattatattggtgatttgatattcaaaaatcgtggcttatattacaaaagaacggcagaaacattcgagaaaatgagcaaaccttcatttcttagtttaagtcttgcggtgggcattccattaagtagctatgatattgaaggagtaaaattgaaaacctcgtcagactgcatggttggaattgagggcgcttacttcctaaatccttattttggagttgggggtaggacttcgcttagtcgcatgcgtattattgtcaatgatgttaaaactgaagataattcagttgatgccttgaaattgggcataggagcctatttctcttacccactttctaatcgttggttagtgggaagtcgcttgttaccagaatttgtacattatcgccccaacctaaaatccatagaaacaagtactcattcaagaataggaataggcacaggtctttcacttacttataaagccagtaaaagttatgccgttcgtgtcctatttgattacgacctcctgcctccaaatagcaaaaagagtggtgaatacatgcattttttagccattggaacatcatatcttattagcttttaatgaataaaatcttattattacggaaaaacaaaccatttttatatctgtaataaatatgtaataattttgtaggattttgataaaattatagtaacgattctgtaatattgctctcgtacctttgcatcgtcaataaaaattcgataaataaggaatgaaaagcaaaaaaaaattagtagcaatcgctacgctacttttggtaaatttaaacgctatggcacaagagatttgtggcatggtgaaggattctaaaacaaaagaaccattgattggggctactatagaaatggaagggggtaaacttttaggagtaaccgatattgatggaaagtttttgctcaccaatttgaacgagcaaagctatgtattagtaattaaatatgtgtcgtataagccaaaaaaagtaagtggcatacgagcagaaaaagacggtacacaagttcttaatatagagttagaccaagacgaacaaatgttagccggggttacggtaacagctaatggacgacaaacaacccaagcatcggttgtacaaatggcaaagaatagtccatttatgatgagtaacatttcggcacaagaaataacaaaaacacaagattccaatgctggtgaaattatcagacgtgttccaggaatcagtttgatagaagataagttcgtaatggtgcgtggcttatcgcaaagatacaataacgtatggataaatgggggagctgtgccaagttcggaagcagactcacgcgctttctcgttcgatattattccaagttcacaaattgataatttattagtggtaaaaactccctcagctgagtatcctgctgattacagtggcggctttatcatcgttaatacaaaggaaataccatcagaaaactcgttttcgttgagccttggtggtaattggaatacaaaatcggcctttcaagattttaaaagtaacaaaggttcgagtacagattttttaggatttgatggtggtttacgtagtttaaaaggtggaatcaatggggaattaaagaagttatcaggcgatttgaccgaccttttgaataacggttttaataataattggttagttaggactaaaaagccattaggcgactttaagttttctgccaattggaaccatcagtggcatattggtgacaacaagttgggtatgatagcagtggtaagttataacaacgagtaccgaagttaccgaaacatggaaaataatctttttggaatttacgatgctcaaaacgataaggaaaattatctaaggcattcgaaagacgaacaatttaatcacaacgtgagattaggtggtatgttgaatttaacctatctatctgccaatggaaatcacaaatttcatttaaaaaacatctttaatcagctcggcaatcagcgttatacttggcgagagggcgtgaatgcacagtcgaataaggaaaatgctgctgaagagtactatcgtagtagaagtatttttaatacgcaattgacaggaaaacacttgttgaatgaagacaaattagattggagtgtaggatatgcttttgcaaatagaagcataccagaccgtcgtcgttacttgatggacgatgctattgaaactgataaaatgggactttctactggaaacgatatttctcgcgaatggacgaagctaaatgagcatatcgtttcaacaggagtaaactacaaacaccaatttaattttaatggttgggaaccatttttgaaagtgggaggctatggagaatatcgcacaagaaagtataaaacgcgcgaatttatttacaattggaatgtagcatacaatgaaatgcccgctggattcagatatatggatttaccaaccttgctgagcgatgaggctaactttggtgagaataaactccatttgttagaacaaatgcatttccgcaatgattatgacggacacaacaccttgggagcaggctacattacggtatctttgccttttggaaagttaggcgtttatgctggtcttcgcttcgaacacaacaatatggagttggtttcgaacacaaaagacacggaaataagtcatgtaagtacttactataaaaccaatgatttcttcccttctatcaacgcaacgtataagtttaacgacaaacatcagttgagattgtcttacggaagaagtattaaccgaccagaatttagagaagtttcttcatcagtattctatgatttcgacctcgcttccaatgttcaaggtaatccaaatcttaccaatgcttatatcaacaacgttgatttacgttacgaatattatccaagcagaggtgaacaaatttcttttgcagcattttataagaatttcgactctcctattgagtggacttatacggttgcaggtggtactgatttgatatattcttacaagaatgcgctttcagccaataactttggagttgaacttgatattaaaaagacacttgatttcatcggactttctaactttagttggtcgtttaatggagcattgataaagagtaaagtgaactttgagaaaggtgctaaagaagaaaaccgcccaatgcaaggtcaatctccttacttaattaacacgggaatattttataatgatacaaaaaatcagcttagtattgctttgctttataacagaatcggaaaaagaatcattggtgtgggacgcagcgaaggcacttcttcaggtaacgatgtaaattctcgtgttcctgatagctacgaaatgcctcgcaacatgatagaccttactgcatcaaagaaatttggtgaacattttgaagtgaagttaagcattcgtgatttgttggcagagaaggtttattacaaacaatttgcgaacgttacttatccaaatggtaaccataaagagataacagaagtttcacgttcataccaacctggacaaaacataggtatctctgcaatctataatttctaagataaaacttaaaaaaggaaataaaattcataaataaaatctcttatttaaaagcaaatattatgatgaaaaatttgaaaactttaggattcatggcaatccttgccgtagcaacaggattaactgcatgtagtagcgatgacgaaactgttgtaacaccaatccagccaaccgcttatcaatggggtacagagggctctatcaaaacatgtagcaacgttctgtttaccaatggcaaagaagatgctaatggaaaagaaatcggtaatggcgaccaagaattcattttcaaaggaaaacaaaccttgaagcgtggtacctatttattgaaaggttgggtctatattgctgaaggagctgaacttaccattgagccaggaacgattataaagggtgataaaactacaaaggctgctttgattgctgaacgaggcggaaagttgatagccataggaaatcaaaaagcaccaattgtatttacatctgcgcaagcaaaaggtagcagaaaacctggcgattggggcggaattattctttgtggacgtgctgtgaacaaccaaacggaaatgcaaattgaaggtggtcctcgcacaaaacatggtggaaatgacaatcaagataattcaggagcgttgagttatgtacgcatcgagtttgctggcttcccattcgagaaagataaggaaatcaatggcttgacacttggctcagtaggtagcaaaactcaacttgaccatattcaagtttcttactcaaatgatgactcttacgaatggtttggtggtacagctaatgcaaaatatcttatagcttacagaggttgggacgatgattttgatacagacaatggatttagtggtaacgtacagtttggtttagtaattcgcgattctaaaattgctgatacttcacagagtaacggcttcgaaagcgataataatgcttctggttcagacgtaaaaccttacacaacagcaaaattctctaatataacattcgttggtccaaagatggacaaaagttttgtaaattctgttgattatattaatggtggtacaatgaatccaaacaatggttcagcactcggaaaattccaagcagccatgcacattcgtagaaattctcgcttgagttgttacaactctttggcagttggttatcctattggtgtcatcttagataatgaaaagggtgcaacccaacaagcagcaacagctggtgcattgaaattgaacaacatttggcttgcaggtatggatattgttggttcagattacaacaaaatctacaaagatgagttggtaactgattacaaaaacaaggtaaccgacccaacaaagccttcattcacatcaactttctttaaggctcaaagtggtaataatatcttgccaacatgggaaacacttgtaggaatgaacggttacacaccacttgcaacaagtcctatcctcaatgcagcttcattccaaaatcttacaggtttcatctctgttccttacgttggagctttctctgcaaatgacgattggacagcaggttgggctgagttcgacccacagaatgcagactattaatgggcaagaataatttttaactgacataattcaattttttaggcaagcaagtgaggttttaaaaccaagtttgcttgctttttctaatatattgtttgaaagacaaaacagcctgttttgaagttcaaaataggctgttttgaagtgaaaaacagcctatattgatagaatttgtcggattcagatttgggcaatactatcatcttataatagagtcgaaactgaaacccaacgaaaaattataacgtttgacaaaatgcaccagttattctaatttcattaatatcagatagtaaatgaatatttgcatttctaaactttattctatttgcaattggtaactgttacgataaagttcacaaaagcgaaaaatgcccaacaaaatgttgaatttgtgtattttaaattatctgttaaagtttgctaacttataaatgtttgatagcaaattttccctaaccaactaataatttgctacttttgcatcgttaatcaaagatgaaagtaaaaagtcgtaacaacaaattgttggcacgctcaaagtaatgaaaaaggcaatgccaatattttgaaaacgcaattgataatactataaaaagcaaatattaaaatggtgtctacaaccaaggctttgaggtatttttcaataatttttcaccaagaagaaacaaaacatacaactaattaataaatttgcaactaacatggcaaacgaaacaaacaacaaagagttccgtattgagagcgaccttttgggcgaccttcaagtaccagctaatgcatactatggtgtgcaaacacaacgtgcagtgaataactaccacatttctaacacaagaatgtgcgactacccagactacgttatcgcaatggcttacgttaagttagcagcagttgaaactaaccgtgaattaggcgaaattgatggcgctatttgcgacgctatggcacaggcttgccgcgaaattattgatggtaaattccatgaagatttcgttaccgacatggtacaaggtggcgcaggtacttcagtaaacatgaatgctaacgaagttatcgcaaaccgtgcttgtgaaattctcggacaccaaaaaggtgaacacaaatattgcgctcctaacgaccacgctaactgcggtcaatctacaaacgacgcatatccaacagctatccacttggctttgattcgcatgaacaagacattggtagaaaaacttcaactcctcgttgcttctttccgcaagaaggctgaagagtttaagaaggatattaaaatgggtcgtacacaactccaagacgctgttcctatgacaagcggtcaggaattcaatgcttttgccaacttgctcgaagctgaaattagcaacttgaaccaagctgccgacatgttcttagaaatcaatatgggtggtacagctatcggtacaggtttgaatgctgctcctggtttcccacaaatctgcgctcgcaagatgagtgagtttacaggttacgccttcaaagcaagtgaagacctcgttgcagcaactcctgatacaaccgatttagtaaactacagcagcgcaatgaagcgtttggcagttaaactttctaagatttgcaacgaccttcgtcttatggcatctggtcctcgttgtggtcttcacgaaatcaacttgcctccaatggctccaggttcaagtatcatgccaggtaaggtaaaccctgttattcctgaaattactaaccaaacatgcttcaaggtaattggtaacgacacaactgtaatgatggctgcagaagctggtcaattgcaattgaacgtaatggaaccagttatcatgcaatgcttggtagaagatattacatggatgggcaacgctatggatactctccgtgagaagtgcatcgatggtatcactgtaaaccgtgaacataacgctgaaactgtaaagaattctatcggtatcgtaactgctcttaacccatacatcggctataagaacagcacaaagattgctaaggaagcactcgaaacaggtggttctgtttacgaccttgtactcgcaaagggtgttcttgcaaaagaacaactcgaccaaattctttcaccagaacacatgttggattcagaagaaagagtaaagtaagctgaaaataataattatattattataaacaaaaaagttccatgcaaaccagcatggaactttttttatttatcttattgctactgagccatatacttttaaaatatcgctccaaatttaattaaaaatagggcataaaaaatgccccgttaaaggtcgaggcaaacctaatgttttcacaacggaataatccttattgtgaatgctttaaaattagtattgcaaaaatacgcttttttatgacatttgcaaacttttttatgttaaatgttgctatttaaaatgtttttcgtaattttacacaaaacattaatacgttaatcatgaagaaaatcttaggtttagatttgggaaccacaagcattggttgggctttagtgaatgaagcagaaaccgaaagtgaaaaatcgtctattatccgtcttggagtaagagtaaatccattgacaatagatgagaaaggtaattttgaaaagggaaaagcaattactaccaattctgatagacaacagcgacatagtgcgagaataaatcttcaacgctataaattgcgtagacaaaatctttgtgattgtttacaaataggaggtttactcggttcagaatctatgtatgaagaaggaaaagcatcgacttttgaaacttataaacttcgtgctaaagctgcaacagaagaagttgctttacacgaatttgcccgcattctgtttatgctcaataagaaacgtggctataaaagtaatagaaaagctaatagtaaggaagatggacaggttttcgatggaatgactattgctaagaaattgtatgaagaaaatttaactcctgctgagtattcgttgcaattgctaaataaaggcaaaaagttttcgccaagttattatcgttctgacttggaaagtgaattaaatagaatatgggaggagcaaaagaagtattaccctgaaatactgaccgatgatttttatcaacaattagaaggcaaaactaaagtcaatacaactaaaattttccttgctaagtatggtatttatactgctgatttaaaaggattggataagaaaatgcaacctttaaagtggcgtattgaagcgttgaataaacaagttgataaagaagttttgacttttgtcgttagtgatttgaaaggacaaattgaaaatacaagtggacttcttggagaaattagcgacagaagtaaggaactttatttcaataaacaaacagtgggacagtatgtttgggcttcattgaaagaaaatccacatgtaagcattaagaataaacctttctatcgtcaagattatttagatgagtttgaaaagatttgggaaactcaagctgcttttcataaagagctaacacccgaattgaaaaaagaaattagagatattattattttctatcaacgcccattgaagagtaaaaaaggtcttatttcaatttgtgagcttgaacagaaaaaagaaaaagttataattgaaggcaaagaaaaagaaatacttattgggtcgaaagttgctcctaaatcttctccaatgtatcaagagtttagaatttggcagaatttaaataatgttttacttattgatacagaaataaatgaaagtcgtccactcgacgaagaggaaaaagcattgctctacaatgaattaagcgttagagcaaagttgagtgaaacagaagctttaaagacgataaataagaaaggtaagcattgggatttaaattttaaagagttagaaggtaatcgtacacaagctgttctctttgaatgttataatcgtattattacacaaacaggacacgaagaatgcaattttaagaaaatttcagctgaagatattcgtcattatgttgcaacaattttcaagaatttaggtttcaatacagatattcttgattttaatccatcgttagagaaacatgagttagaaaagcaaccaatgtatcaactttggcatttgctgtattcgtatgaaagcgacaagtcaagaacgggtaatgaatcgttattaaataaactggaagcaaactttggattccctcaagaatatgcttctgtgcttgccgatgctacgtttgaagatgattatggtaacattagtgtgaaagccattcgtaaaattttacctcatcttcatgatggatatgattatagtgaagcttgtgaaagagctggctataatcattcggttcgttcgcttacaaaagaagaattagcacaaaaggtttataaagatagattggacttgttgccaaagaatagtttgcgaaatcctgttgttgagaagattcttaaccaaatgattaatgtaatcaacgctattattgtcgaatatggaaagcctgatgaaataagaatcgaaatggcacgtgagttaaaaagtagtgctgctaaacgtgaagaaagaaccaaatcaattaatcaaaatgctgctgaaaataagcgtattactgaaattttgcaaacagaatttggcttatcttatattagtcgcaatgatattgtaaaatataaattgtatcaagaacttgaggctaacggatttaaaaccctctattcgaatacttatattcctaaagaaaaacttttttctaaggattttgatattgaacatattgttccaaaagcacgtttgtttgatgattctttcggaaataaaactattgaagcacgagatgtaaatcttgctaagagtaataagacagcttttgattttgttaaagaaaaatacggcgaacaaggaatagaagaatataaaaagaaacttgatacgctcttaaaagagaatgcaataagttcagggaaatacaaaaaactgatgatgtcggaagctgatattccttctgattttatcaatcgcgaccttcgtaatacgcaatatatagctagaaaagcctatgaaattttgggtgaattggttaaaacaataacccctacaacgggaaaaataactgaccgattgcgtgaagattggcaattgattgatgtaatgaaggaattgaatttcgagaaatatgatagattaggtctaaccgaagtcatagaagatagagatggaagaaaaataaagcgaataaaagactggacgaagcgtaacgaccatcgccaccatgcaatggacgctctgaccattgcctttacaaaaccttcttacattcagtatctgaacaatcttaatgcacgaagtgataagagtggaagcatttatgcaattgaaacaaaagagctacatcgtgaaaataatactcttcgcttcaatgctcctatgcctttaaacgaattccgcaaagaagctaaacgtcatcttagtgccattcttgtttaaaaaagtgcaacttacaccacgtggagcgttacacaatgaaactatttatggtacaaagatgcgtccaataataaaaatggtgaagattggagctgcgttagacgaagctacgataaacaaagtgagtaatcctgccattcgtgaagcattgcttaaacgcctcaacgaatacagcggaaacgctaaaaaggcgtttacaggaaagaatacattagagaaaaatccgatttatctgaatgttgaacgaacaaaagtagtccctgcattggttaaaacggtagaatgggaaaactaccaccctatccgcaagccaatcacaccagaccttaaagtcgataaagtaattgataaaggcataagagatattctgaaagcccgcttagaagaatttaatggagatgcgaagaaagctttcagcaacttggaggagaaccccatttacattgacgaagcgaagaagattgccttgaaacgtgtaagcattgaaggagttttaagtgccattcctctgcatacactaaagaatcaggcgggcaaacctattactggaaaagatggaaaacctgtattaggcaattatgttcaaacaagtaacaaccaccatattgcgttttattacgatgaagatggcaatttacaagacaatgcagtatcgttcttcgaagctgccgaacgtaaatcgcaaggtgttcccgtcattgataaagactacaaccgcgataaaggttggcgtttcctattcacgatgaagcaaaacgaatacttcgtattccctaacgaagcgacagggtttatcccttctgaagtggatttaatggacgaagctaactatggcattataagcccaaatctatatagagttcaaaaggtatcaaggattgataaaggaacatctgcttcaagagactattggttcagacatcacttagaaaccgttctgaatgatgatttaaaacttaaaaaccttgctttcaaacgaataacttctctaaaatctttaaacgatatcattaaagtgcgtattaactctactggaaaaatagtagcagtaggagaatacgattaatatagttggtttatgataaagaaaacattatgttttagcaatccagcctatttaagtttgcacaatgcatgcttgacaataagcgtataacaatcacatcatcggctttagaagctttaatagaaaataattgtgctgtcattacttgtgatagtaaaaatatgcctattggtcttcttttacctttatgtggaaatactacgcaaaatgaacgtttcagaactcaaatagacgcatcattgccaataaaaaaacaattgtggcagcaaacgataaaacaaaagataatcaatcaagctaagattttaagtatttacaccaatactgacgtggcatgtatgtacgtttgggcgaataaagttagaagtggagaccctgataattttgaagctcgggcagcagcctattattggaaaaatatttttactgatattcctaattttgtaagaggacgtgatggtgaacctccaaacaatcttcttaattatgggtatgctatattgcgtgcagtagtagcacgctctttagtaggaagtgggctacttcctacattaggaattcatcaccataacaaatataatgcttattgccttgctgatgatattatggagccttatcgcccatatgttgatggattagttttagatgtcatggagtcaattaaggattacagcgagcttacaaaagagataaaaatgaaactcctttctattcctgtacttgatacaacgataggaaataagaagagtccattaatgatagctacccaacaaaccactgcatcgctttacaaatgctttagtggtgaacaaaagaaaattgcttatcctgaattataaacacaaattgtggaaacttatagatttagtcaataccgaagtatgtggttaatagtattttttgatttgcccaccgacacaaagaaagaacgaaaggcagctgctgtttttcgtcaaaatcttttgaaagatggatttactatgtttcagttctccatctatatacgccattgtggcagtaaggagaatatggaagttcatacaaagcgcatatctacttttattccaacgtatggtaaagttggaataatgggaataaccgacaaacagtttgaggaaataaaattattttatggaaaaaagccacaaaaaccaaatgcaccaggagcgcaattagaattgttttagcaaaaataaagttccacctttaacaagtgaaactttattttgcttgcatttttcttttccttgaatctttcgtaatacatctattcgccagtgtattatacgatttaggatggttttgctaatgcaaagatactaattttaaagcaaatcacaactgttatatcgcataaacacgcctggcgatggatggttttgctaatgcaaagatactaattttaaagcaaatcacaacttcataggattgagtacgtcattgacgtatgatggttttgctaatgcaaagatactaattttaaagcaaatcacaacctagttgctccttgtttgtttcaagtgtttgatggttttgctaatgcaaagatactaattttaaagcaaatcacaacaattagctcattctctactttagagtataggatggttttgctaatgcaaagatactaattttaaagcaaatcacaacaggacaatcgaattgaaaaggatttcttcagatggttttgctaatgcaaagatactaattttaaagcaaatcacaacaacaaaacagcaagagtacatggattcgctgatggttttgctaatgcaaagatactaattttaaagcaaatcacaacgatagcagaacaaacaacaggacacaagctgatggttttgctaatgcaaagatactaattttaaagcaaatcacaaccataatgccaactacagcatttaatgcagcgatggttttgctaatgcaaagatactaattttaaagcaaatcacaacaccatagcttgctcaacacccatgttttttgatggttttgctaatgcaaagatactaattttaaagcaaatcacaacagg

SEQ ID NO: 2376 - DNA, 16049 bp, synthetic construct
  misc_feature 1..16049: note = Synthetic
  source 1..16049: mol_type = other DNA
tggtaggagatctgtttggtagcggaaaaatgtttcttccgcaggttgtgaaatcggctcgagtgatgaaaaaagctgtcgcttatctcactccttttctcgaagaagaaaaaaagaaaaacaaaagctcgaaaagcgcttctaaagttctcatggccactgtaaaaggtgatgttcatgatatcggaaaaaatattgtttcggtagttttaagttgcaatggttttgagattattgatttaggggtgatggttccggcagaaactattctcgaagaagccaaaaaaaataaagtagatgcaatcggactttcgggactcattacgccatcgctcgacgaaatggtgtatgtagccaaagaaatgcaacggcttcacctttctattcctttattgataggaggcgcaacaacttctaaggcgcatactgcggtgaaaatttcccccgaatatccagaagctgtccatgtgattgatgcttctcgatcggttaatatttgttcgaaactgattggcgaacacaaaaaagaattcttagaagaaacccaaaaagattacaataaattacgagaaggatttctcaaccgtgctgtaaataaagattatcttaatattgaagaagcaagaaaaaataaattggttttggatttttcgaatccaaaaccgaaagttccgaaacaattcggcgtgtaccagcaccaagcaaatgtagaagatttgattccatatatcgattggacacctttttttagaacatgggatttacatgggaaatttcctgaattgttacaagatgatttgattggcgaacaagcacagattctttttaaagatgcacaaaaaatgttgactaaaattgccacagaaaaactcgcccgaccgaaaggtgtttatggttttttcaaagccaatacagttgatgatgatacgatagaagtttcggatgaaaacggaaaaaaattagccgaatttatttgtcttcgccaacaaagtaagaaaagcaaaaacgctcctaacctttctattgccgacttcatagctcccaaagatgctgctatccaagattatattggcgcatttgcagtaactgccggaaaagaaattgaaacgtttgccaagagtttcgaactggctttggatgattacaattctattttggtaaaagcattggcagaccgtttggcggaagcttatgcagagtatttgcattttttggttcgaaccgatttttggggatatgatgcacacgaaaatttaagcaatgaagctcttatcgctgaagaatacaaaggaattcgacctgcgccgggctatcctgcttgtccggatcatcttgagaaaacgacgattttcgatcttttggaggttgaaaaaaatgcaggaatagccttgacaagttcacttgccatgtatccagtttcgtcggtttcgggatattattttgccaatccgaaagcacagtatttcggggtcggaaaaataaaagaagatcaagtagaagattttgcatgcaaaaaaaacctctctttagaagaagcaaacagatggctaagtccaaatcttgcctaaaaaaaaagtaaaaatcttagggtgagtttgcgttagggattgacgtggaaatcctttgcgattgagcaaagattgcaacagaaagcccgcccgaagggaacgcccaaaaaaagaatcaacaagcctaaaatgaaaagaaatgaaagttactgaacatatagaaaaagcgaacggaaaacctttattctcggtcgaaattttacctccactcaaaggtcgagatgtgcaatgcacatttgcgacattggatccgttagtcgaaataaaacctgcatttatcgatgttacgtatcatcggcaagaatttgtgtacaaacagcaaggcgatggtttgctcaaaaggcatcaggtgcggaaaagacctgggacagtggcgatttgtgcggccatccaaaatcattataaaattgacgcaatcccgcatttgatttgtggtggttttaccaaagaagacaccgaagatgctttaatcgatttaagttttttgggtattgataatgttttggttctgagaggcgacccgatcaaatcggagaaaaaatttgtccccgaaattggcggacatgcgcatgcatctgagttagtgagacaggtacagtcgatgaacaaaggagtgtatttggatgatgaattgcaagaaacacatgcgacggatttttgcgtgggagtggcggcgtatcccgagaaacatttcgagtcgcctaatctttcgatggatttgcattacctgaaaaacaaagtcgatttgggagcggattatattgtgacacagatgttttttgacaatgagaaatattttgagtttgtacgaaaatgccgagaaatggaaattaatgttccgataattccgggtgtgaaaccgttgacaagccttaatcagttgacgacaattcctcagaatttttacatcgatttgcccgaaactttatcgatagaagttatgagagccaaaaacaaagaacaagtcaacgaaattggtcgagaatggtgcattgcacaatgcaaagaattgattgattttggcgttgctggcttgcatttttacacgatgagcaactcagaaaatacattatcaattgcacgagcacttttttaatttaggattgactctgtttgttttaagaaatagttaaatatttattgataggatttactaaaacacttaagatgagcaattaggattttttatgatcgagacatcaaggcggagttagataaatttttagtaattttacgtattgatttttttaggattgtttttcatcctaccgaaagaaaaaaagaatagataatcgaaaaaataataaataaaataccatgttgaatactaaaaaagccttgattactggaggcagcagaggtttgggaaaagcagttgctttggcttttgcaaaagaaggaattgatgtagcgattacaggaagaaacgaagatttactgaaaggagtggtgacagaattgcaaggactcggtgtacaagcgacttatgtagtttttgatgtgaaaaatcgggaagaagtccatacagcacttacgaaattaagccaagaatttggaccatttgatattttagtaaacaatgccggaatttctaagtttggtactttcatggaaatggaagaaagtgattgggaaaatattttactcaccaacgtactcggaatgtattatgtaacgcgtgaaattctcccacaaatgatcgagaaaaatgaaggcgatattttcaatgtttcgtcaacggctggtttggctggcaacccaacaacatcggcatattctgcctctaagtttgcggtaattgggatgagcgaatctctgatgaaagaagtacgaaaaaacaatgttcgtgttacaacccttactccatcgacgattgcttctgacatgagcaaagaattagggctaacggacggaaacccagaaagtgttttacagccagaagattttgcagaattaattgttgcaaccctcaaatttccaagaagagctttactaaaatcagcttctttgtggagtactaatccttaatataaagtataaaaaaacatcttcttcggaagatgtttttttatactttatattttcttcctaccaattgattttttcttttttatgtttttctaaatacgtattggtctgagaaaagtgatgatttccaaaccatttcccttgattggcactcatcggcgatggatgtccagatttgaggattaaatgttttgaaggatcaattaatttttcttttttttgtgcatgatttccccaaagtaaaaaaacaacatgttctttttcggtcgaaatttcttgtacaatggtttgggtaaaaatttcccaaccatggtttttatgacttcctgccgacgcttcacgaactgacaaaacatcgttcagtagaaaaactccttgttgtgcccaagataataaatcgccagaagttggaattgttttttgtacatctgtttccaattctttaaaaatattccgtaaactcggcggaattttcgcagatggagaaaccgaaaatgctaaaccattcgcctgtccttttccgtgataaggatcttgcccaagaatcacaacttttattgcctcgaatggcgtttgggtgaaagccgaaaacaactcatttttgggcggataaatcgtttgttcggcatattctttttcgatgaaagcagttaaatttctgaaataatctttttgagcttctcgatgaagaatttccaaccacttttcatcctgtatattatcgaacatagatttgatttttgaatcgtaaaattatcgctaattttgcatggatgcaagtaagtaaacagactttaaaagatttagaatttccggccgtattagccgaaatcatccaatatatttataccgaaaaagttgccgaaagaacagaaaaccttgttccttacagcgatcgggacgagttattgaatgatttacatacgacaaacgaatacttatcgacattggaaagcggaaatagtttaccgttttctgaatattttattttggatgattatctgaaacgcctttcgattgaaaattattatctgccagcggaagaatttttcaagataaaatcgaataccttacagataaaagaaataaaaaaatatacgcaaacttttatagaatactttccgcatttgcatgcaaaaactgagcaaattgggtacgagaaagagattgtgaaaattatcgatcaagtattcaataaattcggagaaataaaagatgatgcaagtccagaattgagaattgttcgacaacaaattcgtgatatcagttctcgaatcacagaattattcaacaaatcgatgagttatcattcggatgttttggacgaaattcgagaatctgtggtaggaaatcgtcgcgttttggctgtgaaatcggctttgagaaaacgtgtaaaaggtcaatttttagggacatctaaaactggatctatttcttatatcgaacctgaaagcgtactgaatccgagaagacaactcgatgaattgcgcgaagaagaaaagcatcttatcatccaaattctattgcaattaacatctgagattgctgtttatcaaccgcttttagaagaatatcaagcctttttagagtatttagatcttacgcaagctaaagcaaaatatgcccaaaatatacaggcagttttaccgatcttgaaagaggatttgcaactccaattaatcgatgcataccatcctgttttgtatttgaataatttacgaaaagaccgcaaaacaattccacaaacgctttctttgacaaaaaaacagcgcatcattattatttctgggccgaatgctggaggaaaatcaattaccctgaaaacagtcggacttaatcagttaatgttgcaagccggaattttgattccggttcatccgaagagtgaaattggtttttttgataaaatttttaccgatattggtgacaatcaatcgatagaaaatcacctttctacctatagttaccgcctgaaacaaatggcctattttctgaaaaatgctgatgaaaaatctctgttgttggtcgatgaatttgggactggatctgacccagaattaggaggcgcgttggcggaagtattttttgaagaattttatgaaagaaatgcttttgggatttttacaacgcattataccaacatcaaactaagtgcagaacgattggaagaagcgttgaatgcgagcatgctttttgacaaaaaaagtttagaaccgatgtataaattagaactcggacaagccggaagttcgtttacatttgaggttgccgaaaaaaataaaattccgtttcgattgatcaatcgtgcaaaaaagaaagtagaaaatgacaaagttcgtttggataaaacgattcttaaattacaacaagaaaaattcgaaatccaaaaaacaaaagatcaggttgtagaactcaaagaaacgcatgaagttcatcaagaaaagttggaagaaatgcaagataaaatccaacaaaaactttatgatttccaacaattatacgataatgaacagaaagttttgatgatgggaaaacgcatcaatgaaatggctgattcttatctgaaaagtaaaaataaaaagcaattgattagcaatttcctcaaaataattgaaatggaaaatgcgaaaaaaaccaaagaaattcaacaacaaaaaaagattcagaaaattgttgccaaagaagttcagcgcgaattaaaaaccaatgctactgaaataaaagagcaacaacacaaaaaagaacaacgagaaaaagaagcagtccaaaagaaaattcaggctctgaaagttggtgatcgtgtaaaaataaatggatcgacaagcgttgggacaattgataaaataaaagatgatattatttttatcaactacggacttttcactacacaaatctctgtagatgaagtatataaagtgtaatttttcttttagatttttattaaaataacaggcgaatgtgttttcatgtaaaggtgagtaaaacgaaaaaggaattagaaaagaaaactaaaattccttttctatccaaccaaaatttcgaacctagtgagcaattcaatgggtttgcacatccgtatttaccgattatcaaaacagaacaagaatctatagaacttttgcaatggggacttttgccaagttgggcgcaggaagattttgacaccaataacaccctcaatgcacgtgtagaaaccttagaagaaaagccgtctttccgcgaatctttcaacaatcgttgtgttttggtggtcgatggattttatgagtggcgacatgaaggtcgaaacaaaataaaatatgaaatcggacaagaaaatggactcctttttttggcagctttataccaaaatgacacattttctgttgtgactaccgaagctttaggagtgatgaaatacatccataaccgtaaacaaagaatgccaattgcttttgattctttgcaaaattgtgagcattggttgcgtggggaaaattttgttccgtttatcgatttttctacgcaaagagaagacaaccaaattagtttattttaagttgcgctgctctcctactcttttttacgataattaaccgcctctaaggttccgtcttttttagccacaaaagtttccattcctttctggatttctgtgttttgtgcggcaacacaaatccaagaattttctattttttggaccacaaacgtaaaaatcgtttgcctttcttgtggagtttcttgctcacgaaaagaagtctgttccgtcagagcaattttggtatgtaccaccgcaatttcatcggtaagataatcgacggtttgcttttttatttgcaaagtggacgaaccaaaaatcacacgcaatccatattcatgcgcgcgataaatcgcctctctatttctccaccacaaacccgtaacattgacaaagtttgcattctcagaaaaaagttgggctaatttctgcgcatcatagcggttccatgctgccacaaattcttctccgatttgttcgggtttttcaattctcatcgacaatcgattcatcgtgtcatgcgaaattatttactaaccacatcttgccattcggtcactttctcgaaaacacttttggcaaaaggacaaagcggaataatttttatatttttttctcgggcaaaatctacagcggctttcaccatttcttttccgactcctttgcctttgaaatcagcatttacctctgtatgatcgataataattttgtcgtcacctgcccaagaatacgtcatcagacctgctcgaatttcttcttcttttgcttcgaaatgtcctttattttcttgattgttttgttctattttcatcctatcaatatgttttactattctttttcaagatacagttttatttttttatattaataaacttcttatttttttggttggatggattacttccacaacgacttagttcaacttatttccggaaacgtttcagttctcgaataatcgtcgaaaccactcctaaacaaactactacatcctctggttgaatgattaaacaatctttgaaatctggatttagcgcataaaacatttttttatttgcatcccatctttttagggtgaaatctgaattattgatcgataccacagcatcatcgccatgcatcaattgataatctgatcgattgaccaaaacatcattaatttggtaataaggatgcatcgaaagcccgactacccgaaccaaaaaagtgctttctggtttattgagaaaccgttcgtctaaggagattctttcttgtcgaaaatcttctgcaggagaaggaaatcccgccgatacatcgccataataattggcataataccgagaatctattttttctatcgttaagtattcaagttcatttccgaactgtatattttggattaatttcattgtaccgttaatatttcttgccaatttgtggtgtaattaggcgaaagtcgttcttgtttcattttccattttcgttgtaaatcttgtgatcctaacaacaatttatgccctccatatcgtgcatttattttatccattacctgcatcaaagctttatgtttaggcgattcttcacagaaaagattcagctgtttttgattgttgggtgtaatcccagaaacaataactcctgcttttttataggccggcacctttccttctgacgggactaatttgtcgagcaaaaacaaagccgctttggatagaatgatgctcgaattagaatcaaactctaaagttgtactcaaggtttcggagacaaaagacaaacgttcatcaaaacgattggtcatcacaaacaccgtaataatcttacaattcgattgttcttgccataatttttctgcacaagaaatggcaaaagttgctacacgttctttgagttcttcgtaattatcaatcgtatgctcgaaacttcgcgtggtggcgatactttttttacgttctacctcatccaattgcaaaacactctctcctaacaattcttttttcagacgaagttctaccaccgagaaatttcggcgaatatacgcatcatccaaccgagaaaaatcgtaggctgttcgacaaccgatatagttgagccgtttagaaagtcgtcgcccaatcccccaaatatcctcacatttcagccatttcaaagccttgttttttttgatttctgtatcgatgatatacactccttggtgatgattcggaaattttttcgctattctatttgctgcttttgccaatgtcttggtaggagcaattccgacacaaaccggaagtttagtcaattgataaattgtgtcttttatttgttgtgcatagctttctaaatcaatcgaatcgaagccctttaaacacaaaaaagattcatcgatagaataaatttctacagcggaagaaaatgtttttagaatcttcactactcgattactcatatcggcatacaagacataattagaggaaaagacctgcactttatgaagtctaaaaattccatcatactcaaaagccggtgctcccataggcacccctaaggcttttgcttcctcggatcttgctattacacaaccatcgttattagacaaaacaacaattggtttacctcttagtttcggattgaaaactcgttcgcaagaagcataaaaattattacaatcaatcagcgcatacatcttacaaatttggaaaatataaacgctataaggtgtcgtggtaaatgttaaatcttatgattttgaagaagtataaaaaagaaaaaacctcctgattctggacaagaggtaacccaaatgttttcacaacggaataatccttattgtgaattcctttcgaagcccaatatattgaaaaaattatataatatccaaatttttacttatgtttaacatttagactaaaacttattcattatgaaaacgatattaggactagatttaggcaccaactctattgggtgggcctatgtgaaagaagcagaaaataatctagaaatgtcttcgattgaaaaaatcggggttagagtaaatccactaacaacggatgagcaaaccaattttgagaaaggtaaaccaatcacgacaaacgctggtcgaactttagctcgttcggctcgtcgtaatcttcaacgcttcaaattacgtcgggaaaatctgattcaaattcttaaaactcatcaatggatttctgatgaaactatcttggccgaagatggcaacaaaaccacgtttgaaacctttcgattacgtgctgatgcagcagagagaacattagaactccacgaactggcacgggtattacttcaaatcaataaaaagagaggatataaaagttccagaaaagtgaacaatacagaagaaggttctttgattgacggaatggacattgcaaaaaagttataccacgataaccttactcctggtcagtatgtgttgaatttattagagtcgggaactaaaaaaacacctgacttttatcgttcggatttacaatctgagtttgataaaatatggcattttcaacagcaattttacccagaattgatgaccgaaaccctaaaagaagaacttatcggtaagggaaaagtagccacttgggctgtgcttaaaactcctttcaatttagtaggcatcaaacgaaatggaaagcgtgatgacatcaagctagaaaattatcaatggagaaaccttgctttgtctgtccaaatggatttggaacaaatagcgattgttttgcaagaaattaacggacagctggccaattcttcaggatatttaggtgccatttctgacagaagtaaagaattgtacttcaatcaacaaacagtaggtcaataccaatatgcacagctcaaaaaaaatccgcatgcacgattaaagaatcaagtcttttaccgtcaggattatatggatgagtttgaaaaaatatgggaagtacaatcgaaaggtcgagaagctattttcagtaatgctttaaaagaagaattacgcgatgtgattatcttctaccaaagaaaattaaaatctcaaaaaggcttgatttctttttgtgagtttgagcaaagagaaattgaagtgaatggaaaaaagaaaacagttggcttacgtgttattccaaaatcttcccctctatttcaagaattcaaaatttggcaaattcttcataatgtaaagctgaagaataaagaaacgaaggaaatctatattttatctcaagaagagaaacaaatgctttttgatgagctgaatgtaaaaggaaatctttctgcttccgaagttttgaaactattagttgataaaccaaaaaattgggaaatcaattataaaacattcgaaggcaatcgaacaaatcaatctttatacaatgcatacttaacaattttagaaaatgaaggttatgatgtgcgagaagaactaaaattaaagatgaataaagacgatatcactttggctgatattgataaatctgcaactgaaattacagaaatggttcgaatcatttttaaggatttagggataaaaactgaactattagattttaatgcagaattagaaggaaaagcatttgagcagcaattatcctaccaattatggcacttattatacgcttacgaagaagataattcgccaacaggtatggaaactttgtatcatttactcgaacaaaaattcggcttcaaaaaagagcaagcgaaagtgattgggagtattgccttgcaagatgattatggaagtttgagtagcaaagccctccgaaaaatctatccttttattaaagagaatgaatattctgtagcctgtgatttggctggttatcgccattctaagcattctttgaccaaagaagaattagacaatagagaactgaaatctcgtttggatattcttcccaaaaacagtttgcgaaatcctgtggtagaaaagattctaaatcaaatggtgaatgttgtcaatacgattattgacacagaaaacgatcaactcgaaaaagaagggaaacctagaaacttcaaatttgatgaaattcgtattgaattagcacgtgaattaaagaagaatgccaaagaacgtgcaaaaatgacaagtgaaattaatcgtgcaacaattgaaaatgaaaaaataaaaactataataagtagagatttttctcatattcaaaatccaactagaaacgatgttataagatataaactgtatcaagaactttcgtctaatgcgtataaagatctgtatacagataccaagattgattatcataaattatatagtaaagaatacgatatagatcatattatcccgcaatctcgtttatttgatgatagcttatccaataaagttttagtgccaagacaatctaatttagataaaagtaacaacactgcgtatgactatataagttctaaaggagaaaatagtcttataaagtttcaagcagtcatagattctttattgaaggaaaacaaaatctccaaagcaaaatataaaaaactattgatgaaaggctctgaaattggcgaaggatttatagaaagagatttgagagattcgcaatacattgccaaaaaagccaaagaaatattgtttcaaattaccaagtctgtgctttctacatcgggatcagtaaccgatcgtttgcgcgaagattggggattgatcaatgtaatgaaagaactgaatttggaaaaatatcgtttggctggtttaacagaaatgcgaacgacaaaagaaggaaatccgaaagagattattatagattggacgaaaagaaatgatcatcgccatcacgctatggatgcgctaacagttgcttttaccaagcattctcatattcaatatttgaataatttgaatgcgcgtagaaatgaacaatccgataaaaagaaaaatatcgaaggaattgagttaaaggaaacgcatgtcgtaaaagatgggaaaggaaattcgaaacgaatttttaatgaaccgattccgaattttagacagattgctaaacaacatttagaaggagttttggtttctcataaagcaaaaaacaaagtcgtaacaaaaaacatcaatcgcatcaaaggaagcgataaagtgcaaatagcgttaactcctcgtggacaaatgcacaaagaaacggtatatggaaaaatcaaacaatacacttttaaagaagaaaaaataggcgctaaatttgacgaagctacaattgcaaaagtttctaacccacagttccgtactctgttattgaagagattggcagaaaacaataatgatcctaaaaaggcttttacgggcaagaatgccttatccaaaaatcctattttactaaaaaacggaaacgaattaccagaaaaagtaagattgatgtggctggaagatgattataccattcgcaaagatattggtcctgacctgaaaattgacaaggtaattgatgaaggcattaaacgaattttacaagctcgtttgcaagaatttggaggcgatgccaaaaaagcattttcagatttggagcaaaaccctatttggttgaataaagaaaaaggaatttcaataaagcgagtaacaatttcgggcgttaaaaatgcggaagcattgcacacaaagaaaaaccatttaggcaaccctattttggatgaaagtggccaggaaattccggtagattttgtaagcacaggtaacaatcatcacgtggctatttatgaagatgaaaaaggaaacttacaagaaaaagtagtgtcattctatgaagctgtagcaagagtcaatgaaggattaccaattatagatcaaacctataatgcgcatttgggttggactttcaagtttaccatgaaacaaaatgaaatgtttatttttccatcagatgactttaatccacaagaaatcgatttattagaccgaaaaaatcaaaccctaataagtaaacatttgtttagggtgcagaagatttcatcaaaagattatatgtttaatcaccatttagaaacaaaggctattgatggagaaattttgaaaacaaaaaaaagtttaatcggagttacacattattatatccaaacaccgagtaaattaaaaaatattattaaagtccgaaccaatcatttaggagaaattattcacatcggtgaatattaaatttgaattatcatgctcaaacgaactatttatattggcaatccggcttatttgaagttcaaagatcatcaacttaaaattgaagatcccgaaaccaagcaggagaaggcttctataccgatagaagatttaggttttttggtcctcgatcattatcaaatcaccatcagtcacccactcattgttgctttgcaacaaaacaatgtagccattatcagttgcgacgagagtcatttgcctttaggtttgatgctgcccataagtggacatgtagaacatagcgaacgattgaaacatcagctcaacgtttcggaacccttgcgaaaacaattgtggaaacaaaccgtagaagcaaaaatttttcaacaaaaagaagtgttgcggctgaacaatttaccacacgaccgtatgattacgtatatgaattcggtaaaatctggcgatagtaccaatatggaaggcattgctgcacaatattattggtctaccttgtttgatgattttattcgtgatcgaaaaggtgatgcccctaataatttcctaaatttcggctacgctgttttacgaagtatggtagctcgagcgattgtcagtagtggattgcatccaacaataggcatctttcacaaaaacaaatacaatgcctactgtttagcagatgatttgatggagccttatcgtccgtatgttgatcttttagtggtcgaatggatgcaaaaacctttttcaccctaccaattggataagaatgccaaagctcatttgctacagattgccacccgagatgtaaccatcaacggcttacaacgtcctttgatgactgccttaagcattaagtagttctttgtataaatgctttacgggcgaaaatagagtccttagttatccgatgttatcgtgagttttagtcgatataatgcatatagaattatgtgggtattagttttttttgatttaccaaccgaaaccaaaaaacatcgagcaattgcatctcgatttagaaaaaaattgttggatgatggatttgccatgtttcagttttcgatttatatccgacattgtccgagtagagaaaatgcagatgtacatataaaaagagtgaaaaaaggtttacctccggaaggaaaagtaggaatcttgtgcatcaccgataaacaatttggacaaatggaattattttttgccaaaaaagaaaccgatttaccccaggttccccaacaattagaattgttttagaaaataaaaaaatgcttgcagaaaaatatcttcaagcattttttaagtttttttcatttgtagaatctcttataccctattcataatcaacctcttaaatgaggctgtaattctactgagtaaatctacaaaaatttgaaaggaattcacaacgcatatcccattaactttgctaattctttagctgtaattctactgagtaaatctacaaaaatttgaaaggaattcacaacaagttcaaagtgaatcttttgttagacaacgctgtaattctactgagtaaatctacaaaaatttgaaaggaattcacaacgatgtaatggtccaactaagaaatgtaatcgctgtaattctactgagtaaatctacaaaaatttgaaaggaattcacaacgatggagctgtattatcttcaatacctactgctgtaattctactgagtaaatctacaaaaatttgaaaggaattcacaacacagtcgtcgcacatcatctcatctgcttcgctgtaattctactgagtaaatctacaaaaatttgaaaggaattcacaacattccgcctttcatcaaataaaatgatcaagctgtaattctactgagt

SEQ ID NO: 2377 - DNA, 16038 bp, synthetic construct
  source 1..16038: mol_type = other DNA
  misc_feature 1..16038: note = Synthetic
atggttgccactgatcacaaataccggtttcccaaagcgtgacagcctgtcaaggcaatcgctgaacagcatcattgaatcagcagaggggatggacttgtcatatacatccccggcaataatgattccatcgggattctccttctcgatgataccgtaaatctgttggaaaataaatttctgctcctccaacatcgagacttcgttgaccctctttcctatatgaaggtctgcaagatgcaccaatttcataaaaatcaaatctgtcttctcggatttatactgcctgccggcagaaatgttacatgaaaatacaaaaataatctgatgttttcagagcattttttgaaaataaacgtgaacaatccccaaaaacgtatttatcatatgactgaaatcgcggaatagggcagatggcagctctttgggcccataagccggaggccgctccttcccttttctgatcaatctgaatccagtacatccatttttggaatatatagattatctttgcacagatgtatccgatcgaatcaaaccgaacggactgtaaattttatatgcattcatcacttgacaacaacataacttatgattgatttcatccatccggaatatctgaaattcctttgggtcgttccaatcttgaccctcatctacggcatcgtccgcttcgcaaggaagcaaaatgcgaaaaaaaaaggaatgtcactgaatcccaatagaaaaaattcgaaattgacagtcacagacggctggttcatcttttctgtatctatggttgtctattccatcctgatcctgggattggccgccccccaagatggcatggaactagtcaaagaatcctggcaaccagacattaatgcggcagcctcccaacagacgggttttgtcccattcatcaactatttcctgctgaccatcttcttcatgctgaccccttctctggccatctgcctctgtgaccgctacagttggcttggaaaactgggcccgatcatggtgctctatggcatcggcctttttctgggcagtatcaagatcaacggagacactctgtttccacacgagatcggcaccatgcaagacatcatgtccacggcaatggtaccgttggccatcccgttaatgctctacagctgcactttcaacaaaaaagaaataggcaagcacctcacagccatgattaccggcctggcaggagttgtcggtgcagtgattatcggctacatcatctgcggaaagcatgtaccggaagccaacaaggtggccggcatgctcacaggtgtctataccggcggaaccatcaatatggccgccatcaaggaaagccttcatgcagacacccagacctacatcctcatgcagacctacgacatcgtcatatgcctggcctatctggtcttcctcctatcgggcggattcaaactgttccgcaaatggctcaaccacagcaacttcaaagctgtagagaagaaacatgaacaagagaccttcaccccatatgaaaaggccgagcgccagaaactggaagaagaactcaagtttgaagaagtcggcttcctgtccatctttaccaaagaaggcatcaagaacacctttttcctgctagggttcaccctgttgctggttgctctgtccgccggcatcaccctgctgatttccggcggacagctgaacatgaccatcttcttcctgctaatcaccactttgggcatcatggcctcttatatcaagaacatccatgaacgcaagcagcactacaacattggcttatactgcatctatatattcagtctagtcattgcgaccatggccgatttcgacagtctgaaggaatccatcaccaccgatttctggctaccttcctttgtcttcatcgccgtattcggctccctgttgctgagcgccctcttggccaagattttcaaagtcgatgcagacacaatggtcatcacctctgtcacctacatcaactcccctgccttcgtgccaatgattgcggccgccatgcacaacaggaaagtgctgattccaggtctgatgatcggtgtaatcggatttgcggcaggcaattatctgggcactcttctggcctttcttctgccataaaatggagaatatcaaaactgagcgggagatttcagttctcccgcttttttcattttcctttttgtaagaaaataggtatttttgcaaatgttttaaccaattaatccaactgtaataaatgaattttgacaaaatcttcaaagcacacccttggcatggaatcagtcttggcgaccaagttccagacgaactgagggcgttcatcgaaattgtaccgactgatactgtcaaatacgaagtggacaaggcgaccggctatctttctgtcgaccgtccacagaaattctccaatatcgtcccttcattgtacggattcatccctcagaccttctgcggtccccaaatggccgaactgaccaacaaagccttggctcgtacagacatcgaaggcgacagagacccgctagacatctgtgtcctgaccgaaaaagacgtcacccatggtgacatcatcgtaaccgcccgcccaatcggaggtttgagactgttggaccacaaccaagcagatgacaagatcatcgccgtactgaagaacgatgcagtctatggcgagatcaaagacattgaagaagtaccgacccctatcatacgccgactcatccactacttcaccacctacaaggacattccaggtgagcagaagacccgcatgaaatttatcagcacctatggggctgaggtcgcacacgatgtcattctccgttcattggaagactacaaagactacatgaaagacaaataattgcaaccccacaatacattttacaagaaaaaaggacaacttatcgaaataatgtgtatatttggggatacaaaaacgggatgtagcgcagttggtagcgcactacgttcgggacgtaggggtcgggcgttcaagtcgcctcatcccgaccaaaaaagcggattggaaattccaatccgcttttttcattccaatccagttttctttcaatccatccgcttccgtcaggcaattctattgctgccacagacggctggcgatagaatacatctttccaaaaatcttccccggacgataaatgcctttgcggacagtaacgtccacacctgattccagtttcctgcggaaaatgacgaaccagccataaaggacaatacctttgaaaatactggaaagcgtgatactgagccagataccattcaagccaagagccgggatggacatgagggcataagccatcggaagacgcagtcccgtcagcacaatgccgacaatcgccggcggagtagtacggccacaaccattgaaggcacctgccgtgacactctcaatggacacgaaaatctgggaagccgccagaatgagcatatagtcccgaccggcatccaacacaaccggatcctgcacaaagacattgaacagttccctaccgtacaggatgaacacaatggtcgccgttccggaaatggccatcgccagcttcatcgtgtaggagaagcccttcttgatccgcccaaaatttcgggctccataattctgccctacaaaagaagccagcgccgtcgagaaaccagagcctgtcatccaggtgatggcctctatctgggcaccgatactctgcactgccacaccggcatagccccaagtcgcggccatacttcccaatgtcatggagaacatggagaacagcgcactctgcgcactgaccggcacacccagctgggcaatcctcttgatgaagaagcctctcgggatcgtcaggaaatgaagcttgcccaaagcggaacgcttgcagaaaagtgaaatggcgaaaatcacatacacaatcatttgggacaaggcagtggcgataccggcgccagccgtctccattctcgggactggccccagaccatagatgagaatagggtccagaatgatgttgaagaccagaccgaccgcaacaatcttgagcggagtcttgctattgccctggccattgtagagtccgctgaacgtattgttgttgaaagtgaagaagatacccggcgaaatgatacgcatatattggacagccatttcagaaatgtggtcctccagccggaaaaaacccaccagtccaggagcggcaacaaatatgaaaaccgcatacacaaatgcaagaatggaagacaaggtagccgcctgattggcatagacacaagccagacgcttcttgccggcccccaaactttgtgaaattgtcacttccgctcccacctttccgataaatgacaaggcattgcacaaccaagtgaagaaaccggcgacaccgacagcagccacactttcgctgctcaaatgtcccagccagaacatgtcggtcatattgtaggtcatctgcacaaatgatgctgtaatcagaggaattgccatggaccaaatgcccttcctgatgctgcccgttgtaagatctctcatctcaatatcaaattaacacacaccaaacaaaaaccaaaatcccctgaagcaggggattttcatgaaaattgcgcgaagatacaaaaatattccgcatttcactatatcatacgacggtcaatttcttctgcaatatctgcctccttcacccctgacatcatttccatgtccacactacagacgggctgggactggacatcattaatcgtattccaaaaatggcacgagtcctctttggactgatacaaagcagaagacaaggtctctcccagaaaagactctttcctaaactgtatgcagaccgacttgggataagttccctccgcatgagaccgtggcatcgaagacatggccaaacccaaatagttacgattactcatgtgtccgttgaaatcgacatcgttgttgttgatgtgatgccgggtaacttcgatcagctgggcatcgtccggaacggaacagttgcggatccgatgtggcctcccctccccgacaatagctgtccggttcatgaagtctccggcatcaatcggccggcgggtcgtcttgtccagaatcacccagctgctggtcccttccacaaataccttgtctttcacagacatcttgaaattgacatattcacgaacagcagaatattcacagaaccagatttccacctgaatcttctccatccagaaaggtctctcccccaccatctgcatctcaatgcccgtcatcgcccaatacaggttctgctggctcaaatcaaacggagaaagatgattgatggccatgtaccgggccagacaatcctgaaaatacaaagacactgccaccatattcatcctataattgacatcaacgtcagagactgacaagacatattcagtactataacgactcataatccaactttttttcaattgttcataattctaacctgccggaggaagaccggcacttgttcagtcggccgtccgaccgattccatctccaaataaaacccttcccaaaacagaaagggcgaaatgtccccaacacttttctatggcaccaagatattgatgatgtcgtcaaccgaagcttcgtcgcaaccgcagaacttctgtatctgcaaaccatcaatcaaggcaagaatcaccgttgccaaactttgattattcccttgttgcggcaaaatccggtcgagtgactctgccaaaacctttctccaagaagcatacatcttgaaaaacttttctttcaaggcttcgttggtggaaacgtcattcagcaaatacagatgaagacggccacgcgtatcggatgcaagaatcttctcgaacaaggtcttgaggatttccttgacatcgacattgcccgaagactccttcacgaaatgaagcagttcatcggtgatttctgacagattgctctctgcaatgtcgtagatgatgtcctccttggcggaataatagtagtacaaggtgcctttgctgattccagcttccttggcaatgtccttcagcgaagtctccttgattcccttcttcgtcatcagggaggaagccactgtgaggatgtaccccctcatatccacaactatgactttgccgtcaccattatctatcttgatttcttttgtactcattttccttgctcccttacaatatcggtcggccgaccgactaaactttatgcaaatctaaagaaaaaaaatcaaggagcaaatttctgaggatttattttcactttttgtccagaatcccctacaggagactatctttgtattgagataaatcggatgaaaatgaacattgaagcaatcatatttgacatgggcggtgtcctggtcgatctggacatggccgccggcaagaaagaattcaaagagaagctgggctatccgcacaccgatgagatgctggacccctgccatggacaaggcctcttcatgaagaccgaggcaggagagctctccggcgcggaattccgccgtgccattcttgccgaatccagaccgggctgtacggaagacatggtcaatgaggccatgtggagcatgctggtgggcatccgtcccgaaaaagccacgctcctgaaggagttgtccaaacagtacgacctctatctgctgagcaacaacaatcccatcatgatgatcaaatgcagaagacttttcgaggaggcagggattccgctggaacagattttcaagaaatgtttcgtctcctgtgagatgaagctgatcaagccccatccggaaatctttgaaagggttatccagcagattccggagcaccctgccgatcggatgctcttcatcgatgactccttgaaaaatgtggaaatggccgcccgttccggactgcgcattctgcatttcccgcaaggggaaaatctggcggagcgtctgaaaaccgtgctggactagcggcattccgtgctgccgaccgtctgcgaaccggttatggtctggccgtggcccgtgctgccgaccgtttccagatagggggatcgggagaggtcgttggggttggttcccggcaccccttgcggcaccggctgtccctgttggcggaaaagttgttcccagaattccggcaggctcccgtcaggcgcacgaaagttcatcggtcgggaggggaaaatcggctgcccagccttgtccagataagaaagctgcaccaattccgagcaatagagccggccgttgtcggggaggtaggcccagtcataatcctgtccaataaaggatttggcgcggctgacggcttcctgaagcggaaaatcccctttcatgcgcatgatcgtcagtgccggatattgcgtccggaaggcctcccaggactgcgcccataccccttgacggtcatccgcttcgatgatgcagagccgtccctccaccttggcggcaatcccgacatggacatagcctccgccggtagattccccgatcgcttccgaaaagtcagactcccctccccggacgaaaacgaggtccccctctacgggaaatgcccatgtctggggcgaagtggctactgatggggcatctgagagggcctttgaggtggcttttgaggtgcggcattccttctcatagaattcttccagagaggtgaaaagcggcacgccgtaatattggcaggtgatccggacattgtcgaaacggtagaaatcgggttcgcagatgacctccatctttccgctccgggcatgcaggcccatttcgagcagcgaaatcggggatttgctggttgcgatgatatacatgatgatccggtccgcctgctccagatggctcagttcccaattgacctgatagtccatctctccgggtttgctggcatcccaatgttcctgtctgggggaaaagaagatgaggttccgggtggaatcctgcagtcgggccaccatttcggactgccagtctctcgaaacgcccatgtcgatggttccggcgaggaaaatgcgtgcagcgtccttacagtcaagcagttcctgttccaattcttcctgatggggacgaatcagatacgtcttgcattcggtggtgttctccgctgtcggggagccggcaggaccgcaggaagcgagcggcaggagcgccgctgccagcaggaagatggtggatttcagtgtattttgcatgtctttttacgtctttttgggcctctggggagccttccctttcgggcgatttccagttttggagccattcgggcacttgcagtgtcctggggcttgcaagcttttggggctttcgtagccccctcaagtattttggcctctcgtggcacattcgggttcttggtctctcgtggcacttgcagactgcaaatgtaatgaacctgtcccgtcctgcacaaatttctccaatatttttgctcgtccccctactttggcacaaggtcgccgtatcttggcggaaaacaaaatttcctctatatttgaggtacattgaaaagaaactattttaaaatcatgaaaaagatagatgtacagagcatgactgacgtttggttcagcatttccgtcacagcgaacgctgtcaaaagaatcaacgcttcagcggctcaccccacgctgaccgaagtggctgatacccttgaagaaatcgccctcaatctgggcagaatgggattcaacgacgaatacaccgaggagctcagcgaagaagccattgaaaagacgatcaccggcttcattcctgccggcgagattgaagaaagttaccgcagcaaccaggccgccacgctcgaggtgctggcgaagatgctgggagactgcaaggaggtcttcttcgagaagctggaagcagagcagctttccggtaagaatttggtcgaggacgaatcggacgagaacgagctggacctcaccgaagagttcaacaagatgattgactgccaacaggacctgctggaactcgcctagcgcattccagccggggaatgcgcccctattgaaatgatgtcccctgcggattcctccgttctggagcaatcgatttcctcctgaatccggtaaaatttccgctcggatttatggggagttccttaatatacttacttcagattttccattcattcggcttatgaagcgaaacaacaatacattgtatacagccctatttgtcataacaatagctgtcatcacattatttacgctggtttatacgtcttcaagaggcttcacggacgaagagcggactatcatccatgccgcttcgccagcagctcgtgcccaagaatacgatgggaagctgatgagagtgtggaaaatcacccagctggatgactcccttctactgagacagaccgcagagcctttgaccaaagagatgctggagacagaagaattccggacacttgtcgatcggatgctcatcactgtcaaagacagcttggatgaaggggtcggcattgcagcgccacaggttggcatttcccgaagggtcgtactggtccagcgcttcgacaaggacggagaaccgttcgaagcgttcatcaatccggaaattctgtcccaaagcgactccactgttttcggaatggagggctgcctttcagtgccggaaatcttcggcaaggtggagcgtgcctccagcatccggctgaaataccgcacgatgcagttcaaggacaccaccgaaacagtccagggattcaccgccgtcatcttccagcatgaaatcgaccacctcaacggcatcctgttcattgaccggatggtggaataagccgcccggcttcttccccgcctcaactcccggcccatccgcatttggcgaatgccggcccctccctcatggtctctggcctggagacattgcattgttcccgttacgaaaatgaaaaagggcaacaccggagtgctaccctaatgttctcacaacggaaaaatccttattgtgaattgcttcaatttgttgatgtaaatataattgaaacattccaactttgcaaaataattcgtacttttaacaaaagaaactgataacattatatttcttcaaccatgaaaaagatattaggcctggacttaggagtcacatcaattggctgggcactggtcaatgaggcagaaagtaaaagtgaaaagtcctctatcatcaaactcggagtccgagtcaatccgcttaccgtagatgaacagaataattttgaagaaggtaaaagcatcacgacaaacgcaactcgaagatccaagagatgtgctagaagaaatctccaaagatataaacttcggagagaacaactgatcaacattctcaagcagaataatctgatcaccaatcagacaattctctacgaaacagggaacgcctctacctttgaaactctaaaattaagagcaaaagcggcagcccaagagatttcattggaagaatttgcacgtgttctgctcatgctcaacaaaaagcgtgggtacaagtccaaccgaaaatgcagcaattccgaagagaatggtcaggcaatcgacagtttttccattgcccaacaaatgaatgatgaggatctcactccaggacaatgcatactctctctgatccaatctgggaaatatcatttcccggatttctacgcctctgacctgaaagcagaatttgacaaaatctggaatgtgcagaaacaatattatccagctctccttacagactccttacatgaagaattggacaataaagaaagcaaagcgacctggtcaatattgagcaagtcctttgatcttgtcggaatcaaaagagagacaaaagggaaagagcaagtcaaagaaaactacatttggcgggtacagggactggaagaacagctggccccagaacagttggcaatcgttctgcaatcaatcaacggccagatcaagacagccagcggttatcttggtaaaatcagtgacagaagcaaagagctgcatatccaccacatgaccgttggacaatttcttgtttccaaacttgaaaaagatcccaattgcagcctcaaaaacaaagtcttctatcgtcaagactacatggatgaatttgaaacactttgggaaacgcaaagaaaattccacccggaattgacagaagacctgaagaaagaaatcagggatgtcatcattttctaccagcgcagactaaaaagccagaaggatcttgtctgtttctgtgaactggagcaaaagatggtcgacaaaaagatcaacgacaaaaccgtcaaaatcaatattgggccgagagtctgcccgaaatcttctcctctcttccaggaattcagaatctggcagaatctgaacaatctgaagattgatgaaaaatatctttctctgacggacaaacaaactcttcatgacgaattagagttcagatgcaagttgaagccagccgacatctataagattctcgggctttccggaaaaggccattccatgaactttgaggaaatcgaagggaacaggaccatgtctacactttataccgcgtatgcccaaatgattgaggccagtggtaacggagaatatgacttcagcaaaatcagacatacagatgcagaaaagataacgacggaggtcttcgaatgtttgggttggaacacagacattcttcacttcgacacgactctggaaggcagcaagctgttacaacaacctacctgccaactctggcatttattatattcctatgaaggagacaattccagaacgggcattgaaaaactcatcaacataatcaaagaacgttacaacatcgcagaggaatatgcacaaattctagccaagatcacttttgagccagattatggaaggctcagtacaaaagcactccgaaaaatacttccgtacatgcaacaaggtatggaatactccgaagcatgctcttctgcaggttatcaaccttccaaatcatcctgcaccaaagaagaaaccaaccagaaaatatatctggacaaactggaggagatccgcaaggacagcctgagaaatcctgtcgtcgagaaaattctcaaccagatggtcaatgtcatcaatgccatcatcgacgagtatggcaaaccagatgaaatcagaatcgaattggctcgggaattaaagaaaagtcagaaagaaagagaaaaagacagcaaatcagtcagagacggccacaagcggaatgatgaaatcacaaaatatctcaaagaacatttcggatttgaaaatccgtcacgcaatgacatcatccgttatagactgtatcaggaattggcaggaaatgggtacaagactttgtattcagacacttacattccagaagaggaagtattcagcaaaaatttcgatatagaacacattcttccacaggcacgtttcttcgacgactccttctccaacaagactttggaatccagaagcatcaatcttgaaaaaagagaccaaacagcttatgatttcgtatctctcaaatacggacaggaaggactcgcgaaatatgaaacgaaaattgaaacattgtacaaaaatggtacaattggcagaataaagaaagaacgtcttctgactacccagaaagatataccgcaggattttatcgagagagatttgagagattcgcaatatattgccagagaggccaagagaatgcttgaggaactggtgccaacagtcgtgtcaaccagtggtgccatcactgcacgcctgagagaagattgggggctggttgatgtaatgcaagaactcaattggagcaaatatgagaaggctggacaaactgccgtcatggaaagacatggacaaaagttcaatcggattgagaactggaccaaaaggaatgaccacagacaccatgccatggatgctctgaccatagccttcaccaaaagatcctatatccaatacctcaacaacctcaatgcgaggattccaaaagaggaagaatgggacggatatgtggacctttcagcctactcagtcaataatcttcccgacgctgacagcagcaaggttgtaagatacattgaaagcaaccagatgtatcgtgacaataaaaacaaattgcgtttcattgcaccactcgaaaacatgagggcagaagcccaaaaagagctggaaaatattcttgtatccataaaggcaaagaataaagttggcactatccatacctattataatcatggaaaaccctactcacagataactccacgaggacagcttcataaagaaaccgtatatggccgttcaatgagatatgtaactgaagatgtcaaaattggcagtaaaacaacttatgaggtgctctcttcagttgccaagaaaatatacagagaggccttgacaaacagactttctcaatttgggaatgatccaaagaaagccttcacggggaaaaatagcctggaaaagaatccgatctatttagataatgcacataatgaaaaggttccttctattgtcaagatggtgaagatggaacccatctataccattcgcaagccaattgacgctcaactcaatctggaaaaagtcgttgatgtcaagattcgcgaaatccttctcaagagactggaagagtatggaggcgacaaacagaaagcattcagcgacatggacaagaatccaatctggttgaatgaagagaaaggtatccagatcaaaagggtggccatcaatagcggagagaaaccggaagccatccactccaagagagaccaatcaggcaacttgatttacaatgcgagccaccaaacgataccttccgattacgtatgtacaggaagcaatcaccatatcgccatatatgaagatgcagatggcaatcttcaagaacatgtcgtctctttcctagaagcttctgtaagggtaaatgagcttcatttgccagttgtaaatgaagattacaacaaagacttgggctggaaattccagtttaccatgaagcagaatgaaatgttcgtatttccagatgaagaaacagacttctatccggaggacattgatctgctcgatgaaagaaactacagcagaatcagcccacaccttttccgggtacagaaactgtcttctaaattttacgtattcagacatcatctggaaacgaatgttgaagaaaacaagaatctcaaagacactacatggaaagcgttacgtaactgcaacgccctgaagggaatcataaaagtaagaatcaatcatctcggcaaaatagtacacattggggaatagtcaatgatcaaaaggactctatactttgggaatccagcctatctatccttgaagcttgggcagctagtcatcacgttgcccaagccggaggattcttcggtggagaaaaaattcccgatgacaattccaattgaagatattggcaccgtcatattggacaatcggcagatcaccatcagtcaggccttgatagccgaactgctggacaacaactgtgccctcatcacttgtgcggaaaaccatctccctacaggactcatgctgcctctctatgggcacaccctccaaaatgaacgtttccggcagcaaatagaatcctctcttcccctgaagaaacaactctggcagcaaactatcaaatacaagattctcaatcaggcctccgttcttgagcatgcgacgggacatgttcataagaacatgattctttggagtcagaaagtcaacagtggagatacgaacaatctggaagctcgagccgcagcatattattggaaaaccatctttcaagaccctacttttacacgagggcaattcgaaggaggcatcaatcctcttctcaactatggctatgctatattgcgggcaatcattgcgcgttcactcgtaagcagcggcctattgcccacgctgggcatccatcatcacaaccgatacgatgcctactgccttgcagacgacatcatggaaccatatcgaccttatgttgatctgctggtgcttgagatcatggaagaaaagatgatttcaccacaagaagaaatcatgctgacaaccgacatcaagaaaagattactgtccattcccgttctggacacaaagataaacggcaaggcaagtcctctctcaattgcagcaacaaccacctgttcatcactggtcaaatgttttgaaggatctgccagaaccatcgcatacccggaactcaaataaccaaccatgtctgaagacagattcagcgaatatcgtatcatgtgggtactcgtatttttcgacctgccgaccgaaactaaaaaagaacgtaaagccgcagctgatttcaggaaacaacttatcaaagacggctttgtcatgtttcagttttcaatttatgttcgacactgtccaagtgccgaaagtgcagaaatgcatatacgtagagtcaaatgttttttaccaccgcacggttccgttggccttctcacggtaacagacaagcaattcagcaaaatggaactattttatgcgaagaaagaacaggagccacctgaaatgtatattcaactggaattattctaggaaggtcatttcaatttagaaataaagaattcagataaaaacaatgaaatcctgccggtcattgcaggatttcattattacaagaaacaacataaaaacaattatagttcaatgagttacaacaactctcctgttgtttcagtcacaaatttaagaaattgaaagcaattcacaacaactcctatagttcagtaagcctgtatagcctgttgtttcagtcacaaatttaagaaattgaaagcaattcacaacgtattatctacctgacctgcgaggagatggcctgttgtttcagtcacaaatttaagaaattgaaagcaattcacaacgagattttctctcttcaagaaatcaatcgcctgttgtttcagtcacaaatttaagaaattgaaagcaattcacaaccgaccgaagcagcgggtctgcaagatttgcctgttgtttcagtcacaaatttaagaaattgaaagcaattcacaacggagttggacgagtagccgtaatattttatcctgttgtttcagtcacaaatttaagaaattgaaagcaattcacaacaaatttgtacaagaaatccaggaacaactggaacaggatta

SEQ ID NO: 2378 - DNA, 15990 bp, synthetic construct
  source 1..15990: mol_type = other DNA
  misc_feature 1..15990: note = Synthetic
actaaattggtacaacttgaggttactagaaagcctccgttgtttagtaatttcattccccttaaattaatttctttataaccagtaagtgctttattaatattctcgcggctcttggtaaatgcaggcggatcaagcattacaacatcgtattttctgccgtctttgccccattgttttaaaacgtcaaaagcattcatggtttcgaacttgcaaatatctgataagccatttaaagctgcgttcttattggcttgtgcaacggcttgttccgaaatgtcaattcctaaaacagacttcgcgccatattttgctgcatgaatttcaaaagtaccagtataagtaaacgcacctaaaacatcggctccttttacaatatgttgaatggctcgtcggttgtcttgttggtctaaaaagtatcctgttttttggccgttttctatatccaccaaaaagttcaaaccattttctttgattaaaatatttgtatcaaattcggcagttaaaaatcctttttgttgtgcaagtccttcaaggccgcgaacaggcacatcattgcgctcgtaaatgcctttaggatgaaatatgctttctaaactatttacaattgcttgtttccatttatcaattcctaacgataaagtttgaatgacaaaatagtcattgaacttatcaataattaaagcgggtaattcatcggcttctccaaaaaccaaacggcaattttcggtataacccaattgttggcgatacttccatgcttgtaaaatctttttatgaaaaaaggcttcgtctattggttcgggctttcgggtaagtaatcgaactaaaatctgtgattgaggattgatataacccctgcctgcatatttttctggactataataaacgtctacaatatcgcctgggacaacctcgccttcaattttatctacttcatttccgtatacccaaggatgtccgttggcaattcttggtgcgattttttttctcaaaaacagttttgtcatttggcaaagataggcgaaggctacttgcaagtgttagttaaagctaatttggccttacagaaaagggcagaagcctgtcaaattaagttttaatgcttgttttagtgcctagattgctataaaacctgtcattttttccctttcttttgcttcggcaaaatttttgacaagggatagttcaatgtttttttatgaaccaagccgataatgagatgacgcagcccacagaaaccaacgaaaacaatgcttcttttaatggagccgaaatgaatactgacgaaaatgcagccaccaatgaaactgctgcagaaccagtaattgaattaacggaacttgaaaagcttgatgctgaattaaaagagcaaaaagataaatacctccgtttaatggctgaatttgataattttagaagaagaacagccaaagagcgtttagatttaattcaaacagctggtaaagatgtgattgtttctttgttagatgttttagatgactgcgatcgtgccgaaaagcaattgcagtctaatgtagacattgaagcacaaaaagaaggcatcctactcgtattcaataaaatccgttctaacctattcaacaaaggtgtaaaagcaatggaaagtattcatgcggagtttgatgttgagaagcacgaagcaattaccgaaattcctgcacctacccctaaattaaaaggcaaagtattggatgaagtgatgaaaggctattacctaaatgataaaataatccgttttgccaaagtggtggtcggtaactaattgaatatttacagcacatgaagagagatttttacgaaatactaggggttactaaaagcgcttctgccgatgagataaagaaagcttatcgcaaagtggctatgcagtttcacccagatcgcaacccaggcgataaagaagcggaagaaaaatttaaggaagctgcaaacgcttacgaaattctgagtgatgctgataaaaaagctaagtacgaccgtcatggacatgctgcttttggtcctggaactggcggaggtggatttagtggtggcggaatgaataccgaagatatttttagtcagtttggcgatatttttggagacgatatgtttggtaatttctttggtggtggatctcgttcaaggtcaagtgctggaagggctagggggcaacgcggaagtaatttacgcattaagttgaagttgacttttgaggaaatggccaagggcgtaaccaaaaatgtaaaagttaaaaaacacgttgcttgtactacttgtggtggaagcggggctaaagataagagtagcgttcaaacctgtgcaacctgttcaggaagtggtcaagttcgtagagtaagcaatacctttttaggacaaatgcaaaccgttacaacttgccctacttgtaatggagaaggaacaagtattactgcaaaatgtactggttgtaaaggcgaaggaagggtttatggagaagaaacaattagcattgatattccagcgggtgtgcatgaaggcatgcaattaagcatgagcggaaaaggtaatgctggtgagcgtggtggatcaatgggtgatttaattattcaaattgaagaagaaccacacgcagaattacaccgcgatggtttgaatgtggcatacgatttatatattagttttccggatgctgcatttggtacacaagttgaagtgcctaccattgacggacgtgctaaaataaaaattccaccaggaacacagagtggaaaaatattccgattaaaaggaaaaggatttccagaagtacaaggctataataaaggcgaccaattaattcatgtaaatgtttggactccgcagcatattggtgcagaggaaaaagagatgcttgaaaaattaaatgctagcgataatttcaagccaaatcctaataaatcagacaaaagcttttttgatagagtaagagaagcgtttagttaattattcaacgcgttctttttctttttagaaggagcattcaattgttttgatttttctacaagtaccaaaaattctttttgaaatttatctgttggttggtaagaggatgaagctagttgcaaaatttgatcgtaattaattttgcttttaaattttgaattttttagtagcgtaccaaacatgcatactgctgtaccaaattgataatttgaattggctgtattgatatctatcaattgattttttgcatcaaacaattgtttaatcagttgctgcgtttgcggaattttataattaatttgaatgcttgctaaagtgctacttatttcactactgtcttttttagttggtgtgatttcaaacacagcaagcatatgatgacctgtaccaacttctcctccttccatttgggtagtactatctgatagtgcatcttttttattatcgaagccaattaggcgataagtattaacgcgtgaaggattgaaattaatgcttaaataagcgtcattggcaaccgaatagattgtttgtgttagttcggtgaccaatactttttcggcttcttgaaggttgtctaaataagcaaaatttccattgcctttttttgaaagtaattctagtttactgtctttataattgcccattccaacgcccaagcaggttaagtaaataccagataaacggtaagtgacaattaggtcttccattgctttttccgacacttctcctacattaaaatcgccgtctgtagcaatgattacgcggttattccctttgcgcataaaaaatcgtttagcagtagcataagcaattctaatagcatcggtaccaggggtgtctccgccagcttcgagtgaatcaattgcttgattaatttttgttttctccttgccgctaacaccgtataatcgaatgtctactccgccgccataagtaaccaatgatacggtatctttttctcgtaaattttcaaccaataatttaaaagcagattgtaacaaaggaagtcgattgggtttgtccattgatccggatatatcaattaaaaaaaccaaattacttggagcaatactatctaggtttaatttgggagcagcaatactagtaaaaaaaagttgcgaatgttcgttccaagggcaagtagttagcgctgtattgcaattgaaaaaagggcgtgcattattgctactatctttatttaaattaaaatagttgagcatttcttcaatccttaccgcatcggttggaacaggcatttggttgttaatgaacctgcgaatattactataagatgcatggtctatatttagcgcaagccctgtttctggaaattgtttggcatcaataaattcattttctacatgcgaactatagctttcgcctaggctcataaaactgttggaagttttatttaaatttttggtgattgagttgagcttttttttgaattggttggcagtacttggtaacatttgcaatacaaatgattgcatttttctagtgtctatgctagcttttaaaatttcatagccatttaattgcaaagtgatggtatcgtaaatttggttagaaggtatgccaaaagcgccaccattgccactataaaaaggattgagccctttagaactgagttgaattaaaacgccttctaagagggttcctcgttcgttttttatttcgccccggagataatattgcccaacggctgaaccgataattaaaataaataaagaagccaggaaggcttttttcattctgatattaattgatatatctctttaatatttctaccatatccatcaaaatctaaaccatatcctaatacaaatttattagggatgctaaagcaacaataatcaataggaacttcaaaaacagtagcttctggcttgtgtaatagaattgctgtttttaaggatgcgggttgttggttttgtaattgcggtaaaaaatgactcatggtttttcctgtgtcaataatgtcttctaatataaccaaatgcctattagtgatatctatatctaagccaatagccgttacaacttggcctgtagattttgtgcctttgtaagaggctagtttaataaaacatatctctgcttcaatagttaaatatttaaaaaggtcggaagcaaacatgaaagacccatttaatatagcaatgaacaaaggttttttatcggcgtagtcgtggtttaatttttctgctaattctttcaccttttcaagtattaaggcttctggtaaatagggctcgaatgatttattatgtagatgaatgatagacatacgctaaattattttttagtttcttttgctggtttttttgaaggagttgtaggtgcgcgcaacaatattttttcgcctttagttagagggcgttctttttttaattggttgtattctaataaactttctaaacgaataccttctgtttggctaatgctagcaagggtttcattgttttctgccacatgaaaatcagtagcgcctttttttaatttagtttctaaaaacaataattggtcatcctctaaaatgtccatttctttaagttcattaaaactaaatagtttgcttaaagagatgccatatttgtttgcaatagaaagtaatgaagttcctgctgttgcataaattactttcgcatggttaatagtaaatgcggctgccggatatggtgatgttttttttgtttctactatttcaggaattgatacggtcgttttttcaacttcaactgtatcttctttttctgtttcagttgttgtggttgttggaatgtcttttacaggtgctttttctattattggtgtttctacaattggggcttttacaaaatcaatttctgaatttgattgattgattactttgtattttttgccattatcaacagtagtggtagggtttgtgtttttttgtaaggcgattgaactatactggtgtaattcgtagtcattgattaaattaagcaacctgtatggatagtctttttcagtagcatagcctgctttttttaaaccataggcccagccaatatcatccgttttatctagcttaaataaaaattgataaggatctctagaacgtaaaaaattagaatggtcgcgataagattcttcggcacttgcgtataccctaaagcattcttttttttcatcatcatcgtgataagtttttgggccagtccattctgttttgcatttaatgccaaaatggttattagaaccttttgctaaatcactctcgccagattgagattctaaaatgccttgcgccagtgtaatagaagcaggtacgcctgttctgcgcatttcttctatggccaagtctttgtatttgtttacataggccactgcttttcgcgctgtgcttgcaacagtgtagtaaatcctaaaaatataattagtaataattgcttcattccattttcttttttatcagtaccaatccatcacgtatggttaataacacttgttcggtacgttcgtcggcttgtacatgttcgttaaaagcctgaatagctttggcatttttgcctgttacggggttttctagcacctgcccgtgaaacaatacattgtctgcaataatcataccttttttgcttaatcgaggaactattaactcgtaatagtctatataggctgttttatcggcatcaataaatactagatcccattcaaaattaaggctaggtataatgtctaatgcattccctatatgcaaatgtatttgcttatttcttgttgatttgctaaaattgagtgctgcggtttcggcatctgcctctctaagttctatggtatgtaatgcgcctgaatccgttaagccattagccaaacagagtgcgctatagcccgtgaaactgccaatttctaaaatgtattgcggttgaatcattccactaataaaagacaatagttgtccttgcacaggtccgcttatcatatgtgcatgcggatgatttagcaaggtacttgcttgaatagattgcaacaacgcattatctggggtggtaaattgttgtgcgtacgcttctgctaaaggttgcacgagttccattgaatatattttatgcttctattctttttggtgaagaaataataagtaatcctaaaaaagttagtagtccgttgatgattaataactctaatccaatttcaaaatttccaaaaagaactttctggtatttgtcaatgataaaacaaataataggtgctgctacacaaataataggtacaaaattgtctttaacatttctgtttaatagaatgccaaaagtaaataatcctaataaaggtccgtaagtataactagcaatttttaatattacaccaatcatactagggttgttaattactttaaacactagtacaaatagtaagaaaataaatgcaaatgaaaggtgtactctttggcgaattcttttctttttggcttcatcaatatctgttcttctttgcatgcctaaaatatcaatacaaaaagttgcagtgagtgctgtgatggctccgtcggcactaggaaacaaagctgaaattaaagcaataataaatattacagaaacaaatggtggcatgtgtttcagggcaattgcaggaaataatttatcgccaatttcggttacttgcatttggttagcatacaagtataataagccgcctaggtataaaaataaaagaatagataacaacaaaataaaagacatggtcagaatatttttttgcgagtctttaagtgtttttactgaaatgtttttctgcatcatttcttgatccatacccgtcatagttagggtaatgaatgcaccggcaataatttgttttgcaaaaaatagtttgctattaggatctgtaaaaaatatttttgaataaccttttgtttgcatggcttcaagactacctgcaaaacctatatgtaagttgctaagaatatataccacacaaatacctaggcctaataacatacaagaagtttgcaaggtatctgtccatacaattgttttcacgccaccttcaaaggtgtacaataaaatcattcctaaaataattagggtagtggcccagaaaggaattccaaaactatttaatatagcatcttgcaaaatatttactactaaatacaatcgagcagttgcaccaagggttctagataaaatgaaaaatgaagcgcctgttttgtaagatttaataccaagacgggtactcaaataattataaatagaagtgaggtttaatcgatagtagagtggtaataaaacaaaggcaattagcacatatcctattaaataaccaaaagtaatttgcaaataagcaaagctttcttttgctacggcacctggtacacttacaaaagttaccccactcaatgaagtacctaccattccaaaagcaaccagcatccaattgctgtttttgttgcctatgaaaaacgattcattggtactgttttttcctgtgattttagcaaccactaaaaggataataaaataggcaattacaaatgaaaaaagtaaaataggcgacatgtctaaaccattagtgaacaataaaaatagagaattaaaatctagtacgaatatttgccctaattttcagctgtaaaccttagtatatgattgaaaaaagcttagcagtattttgtggttctcagtcagggattgacccaatgtatgtgcaacatgcggttgaattaggcgaaatgatggctaaaaatcaaataaccttggtttacggcgggggcaataagggaatgatgggtgctgtagcgaatggggtgattgataatggggggaaagtgataggggtgattccagaattattactagcctgggaagcagcacacaagggcttaacggatttacgcgtggttgccgatatgcatgtgcgcaagagaatgatgtacgatttgtgcgaatcggcggtgattttacctggtggacatggcaccctagatgaactttttgaaatggttacctggaacaacttaaaaatccataataaaaagatctttatacttaataccaatggctattacaacccattaataggacatttacaaaatatgtttgaccaagggtttttatacgaagcctggcaagaccgaattattgtttgtacaaagccagaagaagttattgcttacgtggtttgaggtaaacgccaaaacctgctctaaatacagggatggggtcgttaaattgatcgcgataaggcgatttggtatcttctagtatatccatcattaaagtgacataagagtaacggctgcccaaaaaatgcgaaccatatccaatgcccaccaataaactgccagcattataattattttttatgttgatgccagtagtagaatttttatcggaactattaatccaattaaattctggttgtatttgaatatggaaaaaattcacaggccaaattctaataaaactacctgccccataactcagtttctgagatttatatggactattgtctataggactttgagaatagtagttaaggttggtaacaatgcctgcatcgagccatttggtaatgctatagccaatttcgggattgatgcctaggttgaaacttcggttggcaaacccaacattcaagccggtccctataaaaatatgttcttgtttgaatttgcctttattgccgtctgattcgttttgggccattacgctaatggaacaaagcaataataaggaaagacaaaaatatttaaacatatccgccaattttttgcaaacctaatgaatgcgactagtaaatggtgggtggaatttataaagtattgttagattttggggtgggatgacctagaaatgtgaatttagaatattctaaaaagtaagtttatctttttaaagtgaaagatttacgtatgattaaaaaaaatatcataacttaatagtgcaaaaaaatacccccgttaaagtcgagggtaacttaatgttttcacaacggaataatccttattgtgatttgcttcattgtaaatataagtactttcttttaaaacataaacatgaaaaaaatattagggttagacttaggaacaacgtctattggttgggcttttgtacaagaaggtgaaaacaatgattcttcaattgtacgattaggagttagagttaacccgctaacaactgaggagttaaacaattttgaaaaaggaaaagcctttacagggaacgctgaaagaacaatgaagcgaagtgcaagaaggaatttacaacgctataaacaaaggagagaaaatttaatttctattttaaaagaaaataatatcatttctaaagatacaattcttgcagaggatgataaaggatctacacattctacttatgctaatcgtgccaaagctgtttctgagcaattatctcttgaaagttttgctcaattactattgatgatcaataagaaaagaggatataagagtagcagaaaagtaaataatgaagatgaaggtaaaattattgacggaatgggtgttgctaagcgattgtatgatgaagggcttactccaggacaattgtgctttcaattattaaaagagggtgttaaagctttacctgatttttatcgttcagatttgaatagtgagtttgataaaatatggaaaaaacagggtgaatattatccagatatttttacttctgatttcaaaaaagagattcaaggtaaagctcaaagagctacaaatgctatgttttggagtcaatttggatttaatactgcagaaaataaggggacaagggagcaaaaaaggttacaggcatacgaatggagaagtaaaggaattaatagtcaattatctaaagaagaggctgcatttgtaattgctgaaataaataataatttaaacaattctagtggatatttaggcgcaattagtgatcgtagtaaagagctttattttaacaaagaaacaattggccagtatttatacaagcaattacaaaataatccacatacaaaatttaagaaccaagttttttatcgacaagattatttagatgaatttgattgtatatgggagaaacaaaatactttccatccatctttaactccaattcttaaaaacgaaattagagatgtaattattttttatcaacgaaaacttaaatctcaaaaagggctagttagtatctgtgagttagaaaatgaaacagtacaattaaataacaatggcgttaaaacttctaaattaataggcagaaaagtagcgccaaaatcatcgccattatttcaagaatttaaaatatggcaaaatcttcatagcctacgcataaaaaacaaaaacactgatacggttcatgaatttgatcttcaggcaaaagaattgctatttaatgaactaaacttaaaagggaatctcacaaaaaatgcagcactaaatgcagtaggctatttatcgaaagactgggagttaaactacgcaacactagaagggaatagaacgaatttttcgttgtatgaagctttttttaaaatgatggaattagaagggcaagaagaaatcaaatgggttcaaatgaatcctgttgaaattaaaagcattgtttctgatttttttgaagttcatggtataaattctaatattttgttttttaatggagaattagaatcaaaagaatttgaaaaacaagcttcttatcaattatggcatttattatattcttatgaaagtgataattctaactcaggtaatgaattgctatatagtttgcttttaaaaaaatttggttttaaaaaagaatttgcacaaatattagcaactattccccttcaacaagattatggaaatttaagtgcaaaggcattacgtaaaatgtttgtttttattaaagagaacaattacagtgaatcctgtaaggctgctggttataatcattcatcatttttaactaaagaagaaaacgccaatcgtatacttaaagaaaaattagaaatactacctaagaatagtttaagaaatccaattgtagagaaaatattaaatcagttagtaaatgttgtgaatgctataattactgatccttcattgggtaagccagatgaaataagaattgaattagctagagaacttaaaaagaatgcaaaagaaagggcagaagcaacattaagtataaatcaagccaatatattgcatttgtcaattgcatctatactacaaaaggaatttaatataacaaatccaacacgtaatgatataatacggtataaattatatgaagaattaaaaaacaatggatacaaaacattgtattccgatacatatataccaagagaaaaattattttcaaaagaatttgatatagaacatataatacctaaggcaaggctttttgatgacagtttttctaacaaaacaattgcacctcgtcaagaaaatattaataaaaaagatgaaactgcatttgattttgttagtaatactttagggaatgataaactagttgattatttagccagaattgaaatgatgcataattttaaagaaggtggtataagtaaggctaaatacaaaaaattacttttaaaaggtgtaaatattggagaaggatttattgaaagggacttaagagatagccaatacattgcaaaaaaagcaaaacaaattcttgaagaaatttgcagaacagttaatactactacaggcagcattaccagtaaattacgggaagactgggacttgataaatgtaatgcaagaactaaatttcgataagtataaaaaattaggtcttactgaattgattcagcaaaaggatggaaatacaaaagaaagaattgttgaatggactaaacgtaatgaccataggcatcatgctatggatgcattaactgttgcttttacaaaaagaagccatgtacaatatcttaataatttaaacgctagaagtgacaagtcaggaagtatatatggtattgaacaaaaagaaacatataaagattcggatggaaagaggcgttttaaattgccattaaacaactttagaacagaggcaaaaaaacaattagagaatatattggtttctattaaagcaaaaaataaagttgtaacgaaaaataaaaataaaacactatccaaaaaagacgaaaaaattaaaattgaattaactcagcgtgggcaattacataaagagactgtatatggaaagattaaacaatatgttacaaaagatgaaaaagtaggtgcaaattttgatgagacaactatacaattagttgcagattcaaaacaacgtagtgccttattgcaaaggcttaaagaaaataataatgatccaaagaaagcatttaccgcaaaaaacagtttggataagaatccactatttattgacaatgataaaacaaatccagttccagttaaagtgaaattagtttggtttgaggatgactatattattagaaaagaaattaatccagatttaaaaatcgaaaaagttatagatacaggaataagaaggatactgcaagctaggcttgatgcttttggaggtaaagcaaaagaggcgttctcgaacttagagatgaatccaatttggttaaatgaaaaaagtagaattgctattaaaagagttgctataagtggtgtaaaaaatgcagaagcattgcataataaaaaagataatttgggtaaaactattttggatgcaaatggaaatgctttacctgttgattttgtaagtactggaaataaccatcatgttgcaatttataaagatgctgaaggcgttttgcaagagaaagtgatgtcattatatgaagcagtagaacgcgttaatcaaggattaccagttattgacaaactatttaatgcagatttggggtggcagtttttgtttacaatgaaacaaaatgagtattttatttttccaaacgatacctattcattgaaagatatcgatttgttggatcctaaaaattataagttaattagcccttatttatttagagttcaaaagatttcttcaaaaaattatttttttagacaccatttagaaactaatgtcgaagagcctagattattgaatggtgttacttataaatctcagttaggcataaaaggtttagttggaattagtaaagttagtatcaaccatattggacaaattgtaaaggttggagagtattagtttatggttaaacgtactatttgcatagaaaatccttgtcatttaaagtttagtaataatcagatggttgtaagctttagccatataagggggttagaattatatgcagataaaactgttgcaatagaagatatcggaatattggttttagaaaaccaacaaattacattatcgcactttttattggataagttggttgccaataatgttgcagtaattacttcaaacgaacatcatcttccttctggaatgttaatgactttagaaggtaatactttacaaagtgaacgatttagggcacaaatagtagcaacggaaccttttaaaaagcagatgtggcaacaaactattattgcaaaaatatcgaatcaagcaagtgtattacaaaaatggaatggcaataataaacttttaattaatcttgcaaaaacagtaaagagtggagatagtagtaataatgaagcgattgctgcagggcattattggaagaatttattccctcctgcgtggttgtttttaagagacagagaaggtccaccacccaataacttattaaattatggctattctattgttagggcttctatggcccgggctattgttggtgcaggcctattgccaactttaggcatttttcatcgtaatcgttataatgcttattgtttggcagatgatattatggagccttataggccatttgtagatgaaactgttagagaaataatccaccgaactagtaatattgattttttaacaaaagaactaaaagtagaattattgaaaattccagcaatggatgttttaataaatggagaaagaagccctttaatgattgcaatgcaacgtacagctacttcacttgcaaaatgttataatggtgagattcgtaaagtgacttacccaagcgtatcatgaattctgaacgttttaatgcatatcgcgttatgtggatacttgtattattcgatttgccaactgaaacaaaatcagaaagacgaatagctcagaattttagaaaaaaaataatgggctatggttttgtaatgtttcaattttcaatttatctaaggcattgttccagcatggagaatgcaatagttcatattaatcgtgttcagaaaatattgcccgagaaagggcatattggaattatgtcaattaccgacagacaaatgagtatgatgaaaatttttcatggaaaaaaggcaacaattgccatgaaggggccacagcaacttgaaatattttaagacaatgacaacttgtagaaacgagaaagtcttcctagcatagctaaaggaagacttttgaactcatttttcaggtcctatttttctctgaaacacttgacatcaaaggatattagcgatagctgttgttgtcaaagatcgtaataataaaaattgaaagcaaatcacaactaggctgcgtcattgcttccccagtcttgtgttgttgtcaaagatcgtaataataaaaattgaaagcaaatcacaacatattctctgcattcaacaaatctaaatcggttgttgtcaaagatcgtaataataaaaattgaaagcaaatcacaacaggtgcagataagcaaacagtagcggaccagttgttgtcaaagatcgtaataataaaaattgaaagcaaatcacaactacaaataaacaactaaacgacacagtcgggttgttgtcaaagatcgtaataataaaaattgaaagcaaatcacaacaaactttgtgataaaacaagtaccactatagttgttgtcaaagatcgtaataataaaaattgaaagcaaatcacaacaatgtttgattgtctaagtgcttcaagtatgttgttgtcaaagatcgtaataataaaaattgaaagca

SEQ ID NO: 2379 - DNA, 15896 bp, synthetic construct
  misc_feature 1..15896: note = Synthetic
  source 1..15896: mol_type = other DNA
  variation 499..784: note = n is a, c, g, or t
gcgaataattgttataggctcgggaatcataggctgtgagttttccacgatattctcaaacttcaagcaaaccgaagttcacctgcttgaccgcgcaaaacgggttttgccctatgaggatgaagatataagtgaatatgtggcacgcaatctcgccaacaacggcgttattactcatcataccgctcagctgcgtgaaataataaaacatcccgattatttggaagttatccttgattacgatgatggacacagcaaagtaattgaggttgacgtggctctgattgctatcggacgtgtttctaccctcgatcgccttaagccccaaaacgcgggcttaaaacccactgaaaggggaaccctcgagatagacggatcttgcagggtactgataaacggaaagccctcacacatctacgcggcaggagatgttaccggacattcgcagctgtacagcgttgccgaactacagggacgcagggctgtcgaacaaatggcnnnnnnnnnnnnnnnnnnnnnnnnnnnnnnnnnnnnnnnnnnnnnnnnnnnnnnnnnnnnnnnnnnnnnnnnnnnnnnnnnnnnnnnnnnnnnnnnnnnnnnnnnnnnnnnnnnnnnnnnnnnnnnnnnnnnnnnnnnnnnnnnnnnnnnnnnnnnnnnnnnnnnnnnnnnnnnnnnnnnnnnnnnnnnnnnnnnnnnnnnnnnnnnnnnnnnnnnnnnnnnnnnnnnnnnnnnnnnnnnnnnnnnnnnnnnnnnnnnnnnnnnnnnnnnnnnnnnnnnnnnnnnncaggcggccggcattccttatatcgcggcatattactccaacaaactggtcaacagaaacatagctatgcgcagtaccacaggctttatcaaaataatggtaagcaacgaccacgagcatcgcctgctgggagttagagcctccgggccgcaggcctcggcctacatagtatctgtggctcaccttatcaaccgtggagattctcttggcgaagtgcttaagatcttttatcctcaccccagcgtagccgagggcatccaggaatgtcttcgtgccatcgtaggacgctcaatatacaagcctatcgctttccccgatgatataaaaatacgtgagtggaaacccgaaactcacaactcataactcataactcataacttcttaacagtacgccctttggttgcgtccttctatgtagttgataaaggcgttattgaccaccttatttccgccgggtgtgggataattgccggtaaaataccagtcgcctgtatcgttcgggcaggccttatgaaggttctcaacgctttgaaacagtatttcaacctccgcttcagaatcttcaggtttgagcatctcggcaatcttggcagaaatctgcttatcactaaaggggcggtaaatatccttgacgtaattaacaacctcttctttcggaatattctgctgagccttacactttttataaacctcatcgataactgactgcttgccggtctccatgagcaaactgattgcagccgtaaaagcgcaaaaatcagccatcttagccatatcaattccatagcaatcagggtacctgatttgcggcgccgatgatacaacaataatcttttttggatgaagcctgtcaagtattttcaaaatactccttttcaaagttgtacccctcacaatcgagtcgtcaattatcactaaagtatcaacatgatttttgacaataccgtaagtaacgtcatacacgtgtgccaccatatcatcgcgtgaggcatctgcagtgataaaggtgcgcatcttaacgtccttaacagcaatcttctcaacacgaggctcaagcgacaaaatctcctccaacttcttcgcatcgggatttgaccctaaagctttcacctgcttcatgcgccagtccaccaaatagctcctgataccctcaaccatgccataaaaagccgtctcggcggtgttgggaatatatgaaaacacggtatcttttaaattgtaatcaaccatctcgagcacctggggcgccaattcacgtcccagctctttacgctccaggtagatagtcttatcgctgccgcgcgagaagtaaatacgctcaaaggaacaagaacggcgctcctggggcacagccaccatttcttcgctaatcttcccgtccttcttgataattaaggcatggccgggttttaattcatgcacgttgcaagcccttacattcaaggccgtttgaataacgggacgctcggaggctacaaccacaatctcgtcatcataatagtaggacgccggacgaatacctatcggatcgcgcgtaacaaaggcatcgccatggccggtcattccacagataacataacctccatcccattttttgctcgaacgctccaggatcttcctgatgtccaaattgcgttctatcagggctgatatctcacgattgttatatccttcatttttaaactgacggaaaagcaactggttctcctcatcaaggaaatggcctacattttcgaggatagacactgtatcagtataatccttaggctgttgccccagctcaatcagggcattaaatatctcgtcagtattggtcagattaaaattaccggccaataccaggttgcgcgaaagccagttattctcacgcatcacgggatgtacaaactctaatgattctttgccaaaagtaccataacgcaggtgacccatataaagctcgcccacaaaaggcagatgttcttttgcccatacagggtctgcaaaaagctccggattgtgatcgcaatcgtaggcaaaatgcttatgaatcctggcgaaaacatcctgtatgggattgcttagattggaacgctctcgaaaaagatactttttgcccgcaggctgatttattttcaggcttacaactcccgctccatcctgaccacgattgtgctgcttctccataagcaaatagagcttatttaatccatattgccagctgtcgtatttttccttgtaatactctaagggcttcagcagccttatcaatacgatgccgcactcgtgtttaagctgatcactcatactttttcttactccttatgttattcgctaataaaacagattagccccgaaaacccgtctcgaaagagacctttacattttagaactctctgaaaggtattgaagaatccctgactatataacttgagggaaaacttgctttaagttttttcaaaagcggcaatgcctcatgtttgtggcgaaaactgcccgctctgactcgcataaaaggtgcactgtattctacaaaaaccttctcgtggggaaatagcgacagaaatttcgacctggcttcctgggcttcctgcttggaattgttgcctgtgcccgaatacaactgaatacgatagccctcaaccccagccaggcgactgttgctgacaacataatcattcattgccctttcgacatcaggcgactgcttaataaaaatttgaccttcacccaaagaacggcttttcaccttttcgaaaggagaagattgtccatttacattgattgaagtcagggatactaataatagcaagctagctctcatgcgatcttcggtttttgtaaattaccgatacaaaagtagccattttattaaaaaatactactaaagctagcgcacaaaaattgtacctgaaccctcgtattccggaattgccaaaaccggaagatcagacatgttcaacaactcattggcaaaaggataaaatacattctcgaagggattgccactacgcttgaccggtaaggctattatggtaacgccatgcgacttggcgtaatcgagcatatcctttggtccctctgtgccatcaatcatctgcgactcaaaatcatcaatatagcttttgcgtaaaaagcgttctacctgacgcacgtaagcagcaataagaccggggatagaccatcttgagcggcgcgttactccaacaattaagagcttggcatttatgatttttgcaaaaccggtaacattgggaactatcatacggctcactttctgcgaatcgataggtatcaaaatcttatgatcgccacttacatccatctctttgcgaacggctaataccgggcagggagcattagatacaagccggtaggcattactgccaatccaccgatcttcaaagcccgaaacgccatgcgtaccgcaaacaattattattgaatcatcgtagtgtgcctgattagttatctccttcaccacatttccctgcctgaacttataatccaccaccccattttcaacatcatacctggctttggctctatccaccaaatgagccatataggcctcatcattatcttcaataataaaacgcggattatccttagcaaaatcaggaaagtactgcttgccggtgcgaacgtgcatcaggcgaagctttgacttcaatgaattggctatccgtactgctatatcaacagcaaaaacagagttttccgaaaaatcgaccgggaccaggattcttttcatatctatgatattatttattaagatcttaaggcgttttgttttgaattaaatataaaatcatacataatttcacactttgtacgcttcactatgtctaaaggttgtataataatacgccaaaaacagcgaatatccaactttttccttagggattaattaacagggctacgaacatcaagatttattaacgctatatattttaaaaacttaattgtttgatgtaattttgtgtataaccatcaaaatagataatggggcataaacaacaattgaactttgaatctataagaccatacgaagatcatgaggttcaaaccgtattcaatcgtctaaaaaatgaggagtcgtttctaaaattaatcggatttctatatcctgattcgccccctactctatttctcgacagcttaaagaatgtatcaacaatacggcaatttcaggaagaagtcatttctgcctatgttattgatattattgataaaacgaccaacggtgttagtgtagaaggcttggataatctcaaccaggatgtggctcacctgtttatctccaaccaccgtgatattatcttagaccccgcgatcttaaatgttttgctgttcaaaaacggcgcaaatacaactgaaatagctataggcgacaacctgctgatttacccctggattacggatttggtaaagcttaaccgcactttcattgtgaaaagaaatctgcctcttaaacaaatgttggaaagctcgcgactgctatcacagtacatccgttatacactgacagaaaaaaaacacagcatctggatagcccagcgtgaaggacgatctaaagacggaaatgacagaacccaggttagcctcctgaaaatgctcaatataagcggacaggagtctattatgaaaaacttcaagcagcttaatattgttcctgtttcgatttcctatgaatttgacccctgcgactacctgaaagccaaagagtttcagctcaaaagagacgaccccaactatcagaaaacaaaggacgacgacctgatgcacatgggcacaggactgcgaggacgaaaaggaagagtgcactttgcctttggaaagcccctacaggaagaactcaaccctatcgacgcccttacggtgaaaaatgaccaattttcggcccttgccgaaattattgactcccacgttcaccaaaactataaactatggccttccaactacatagcatgggatattttcaacaatagccgacagtattctgacaactacagcgacgaagaaaaggcaatctttcttgaatacgtggaagaccatatcagcagaattcctgaaatggacagggactttattttcaactctctgatggaaatgtacgctaatcccctcgaaaacaagcgatcctacaataacgattaaacatcttacaaaaaatgcccggcattgaaccgggcaattttttataagtttttgattctaaagactaacttttaatatcaagcctgatacttagttcttctaattgtttgctgtcaataggcgagggcgaatcaatcatcacatcgcgtgctgcattgtttttggggaaggctataacgtcgcgaattgaatccagaccggccattagcgacacccagcggtcaaaaccgaaggctatgcccccgtgcggtggtgcgccatactgaaaggcgttcatcaggaagccaaactgcatacgagcctgctcatcagtgaatcccaaaacctcgaacatccttttctgcaacttatcatcatgaatccttatcgaacctccgccaagctcaacaccattgattaccaaatcgtatgcatcagctctaacttttccaggatcgctatccaatagcgccatatccttcttaattggagatgtgaatgggtggtgcatagcaaagaagcgcccaacctcctcatcccactcgagtagcgggaagtcaacaacccaaagaggagcaaaaacatccttatcgcgcaaacccatacgactgcccatctcaaggcgtaactcacacaaggccttcaaggtcttgagcttttctccagccattatcagaagcaaatcgccgggcgtggcttccatctcgtcggcccaagtcctgagcttttcagctgaaaagaacttatcgaccgaggatttaaaactgccatcttcgttgtatttcacataaataagaccctgagcccctatttgcggacgtttgacaaaatccgtaagcttgtcaagatccttgcggcttagctctgactggccttcggcacaaattccgcctacatattccgcttcgtcaaaaaccttaaaaccgctatcccccgttaagccggtaagatccttaaaagtcatcccaaaacggatatcaggtttgtcagaaccgtaaaactcaagggcattagcataagtcatgcgaggaaaagcttcgaccatgtcaatgtcaagaatctgcttaaaaaggtgcttggtaaggccttcaaaagtattcaggatatcctcgcgctccacaaaagccatctcgcagtctatctgcgtaaattcaggctgacggtcggcacgaaggtcttcatcacgaaaacacttaactatctggaaataacgatcgtaaccggcaatcatcaaaagctgcttaaagacctggggcgattggggcaaagcataaaactcgcccggatgaacgcgtgaaggaactacaaagtcgcgcgccccttcgggagtggattttatcagcaccggagtctcgatatcaagaaatccgcgatcgttcatgtagtttcgtatctctatacccattttgtggcgcaattccagattgcgacgtaagggattacggcgcaggtcaaggtagcgatacttcatcctcagctcatccccgccatcactctcatcctcaatagtaaaaggaggaagcgcggatttattaagcacaacaagcttctcaagggcaatctcaatttccccggtggctagcttcaaatttttgctgctgcgttcggccacctttccgctaagctgaaccacatattcacgtccaagctctctggcccggctgcttaactcagcctgagtctcgctgttaataactatctgagtgatgccgtaccgatcgcgtaaatcaataaaggtcatcccgccaaggtcgcgcacacgctgcacccagccgcttaaagttacttgctttcctgcatctgtaagcctaagctcaccacatgtatgagttctgtacatttaactaatctttttaagatccaaaccaagggttcttacaaattcaaatatctttgcgaaaatagaaagaaattatggacaaaatagatttttctgacaattactttatgcaacaggctttgaaagaagcccgtgaagcctaccgaaaagacgaagtgcccgtaggagcgattattgtaagcggggaaagaattattgcacgtgcccacaacctcacagaaactcttaatgacgttacagctcacgccgaaatgctcgcgattacttccgcggccgaatatctcggcggcaaatatcttaatgactgcactctatatatcaccctcgaaccatgcaccatgtgcgcgggagcccttaactgggcgcagatagcaaggatagtcataggagcacccgacagccaacggggatttacccgcctctcaccttctccccttcacccaaaaacggagcttagcacaggtatcatggccgacgagtgcagcagccttattaaggagttcttcaaaaaaaagcgctaaaaaagtcaagaagtcaacagtcaacaagttataagttataagttttttcttagccaaataacagtgattcattaatttaaaagcattgatgtccggtaaacgtttcacaacgacttaacttatagatttctcacttcgctcgaaatgacaatcagacatttagcttgttggaggtctatactttgcgacctttgtgtaagccattgtgtactttgtgcataaaactcacaaagtcttcttccattttggatacctcttaagcaccttggcgccttgctccgtgtaccaggcatatccgccacgtcgctcctgacttatttcctccatgctccatttcttaactccatcacgatcacaaaagaaaggtttcccattgtcaaggtcataaaaacgagcccatagaggacccgaatcaggatcggcaaccagcttacggtccatctcgccgttttcatccataaaccaatcaacacggaaaccttcaatcttattcgtctcaaaccagctaacagcagcttcaacggcagctatcaccttatcggaaggcttatcaatatccataagaagaagagtaataccggccgattcagacccgctgaaagatggaagctcataagccctggcctgcacaggaagcatggtctcgcggtgatgctgggcacaccagacagtgggctcaccattgacgacaatttgcgtagccaaaatcgcctcaactcccttgtcaaaggacgctcttgcctgctccatgtaatttgagggaagctgcaaagccgcgaactccttgccttcatatacatccttgagcagattcataacattaaccatcgcgttatcattataggtaatatgaaccgagtagtgcttctggttacgaaccgggtaaaactgaggccagccaccgttatcatattgcgcctccagaagatagtccaaaccctttataaacgaacgacgcagctcttcccctccttgcagggcatataccctggccaaaaatcgcatctcaagagtagtagcctcattatctatcgtggcgccataatccttagccgaagccttaatcagcgatttagcccgtctgcttagagcctggtgcatcgccaaattcttaggccaaccacccacatccttctgatattttattacattctcagcaaccttcgcggcatccacacttccataccactcatcaggcatcttacgggcaacttccttccagcttaactcaagatagtcaggctcctcagccctcacttccataccaaaaatcagcaaaaacacacaaaacaaataacttatatttttcatggtgatagattttttattcaacaagcacaatatccggaatcaaaagtaggagaaaatgactacagcaatagcgaaaagtcgaccaaaaacaatagaagaattgatatgtagcaaaaaacaaccggcaaaaaagcgatttaagaaagtaataatacatgcccgaaatggaaaaaccttgaagacgcaaataaacaaagcgagacgaattacttcgtcccgcctttaatgttttcacaacggaataatccttattgtgaattgcttcaaattgtaaggcaatattacaatatttttattacttttccaattattaataaaaaattcagattgttatggaaatgcaaatatgaaacagccataataacatcaaaaagtatagtaaaatattgtgaactttatacataactctaaataaaaaggcaacagatgaaaaaggtattaggattagatttaggaaccacatcaattggttgggctttagttaacgaagcagaaaacactaatgaaaaatcatcaattgttaaactaggcgttagagtaaacccactctctgttgacgaaatttccaacttcgaaaagggcaaaagtataacgactaatgccgaacgaaccttgaaacgtggaatgcggcgcaacctccaacgttacaagttacgtagagaaagtctaattgaaactttaaaaagcaacggctttatcagcgacgccacaaccttatctgaaaacggaaaccatactacttttgaaacctataatttacgcgcgaaagcagctaccgaaatgatctcattggaacaattagctcgtgtgctgctaatgattaataaaaaacgaggttataaaagtagtcgtaaggtaaaggaagtagatgagggcagcttaattgacggaatggaagtagcaaagaaactttacaatgagaaccttactcccggccagttttgcttacaactattacaagccgggaaaaagtatctacccgacttttatcgttccgatttacaatctgagtttgataaggtatttgataaacagctgtctttttatcccaatttcctttcagtagaactaaagaatgagcttcaagggaaaaagcgagatgccgtttgggctatttgtgccaaagaatttaaggaaaaagggtttgaacttgtggggactaaaagacaaggaaacgcttcgcagcagaaattcgaaaactacgagtggcgtgcgaaagcactatctgaaaaactggatcttgaacagctagttatcgtgttacagcaaatcaatattcaactaaataattcaagtggttatttgggggcaatcagcgatcgaagcaaagaactctatttcaatcaacaaactgttggtcaatatttaatggaaaaacttgatgctgaccctcattacagcttacgcaataaagtattttacagacaggattacttggatgagtttgaaaaaatttggcaaactcaatccatatatcataaagagttaacacctgatttaaaatctgaaattcgcgacattataattttctatcaacgcagacttaaaagccagaaaggacttatcagtttttgcgaattcgaaagtcgcgaaatagagcttgtagttaatggcaaaacgatacgcaaaacaactggattaagggttagtccaaaatcctcaccagtttttcaagagttcaaaatatggcaaaatctaaataacacgaaggtaactgacaagaaaaacagcgcttctcgatttttagatcaggacgagatgaacaccttagcgcgagaactattcataaaaaaagagttaagtagctccgaagcattaaaaatcctctttaaaaaccataaagacttagaactcaacttcaaaaaaattgaaggtaacagaaccatctcagaattctttaaggcctatcaaagcattatagaattaagcgggcatggtaagcatgaattttcaaaaatgagcgctgatgaaattatctcattggttcaggatattttctctgctttaggctataatacaaacattttactctttgatgctttaactgaaggtcatgacatccagcaacaagctctttttaagctgtggcatcttttatattcttatgaaggcgacaattcgaaaaccggaaccgaatcccttatcgaaaaaattagtgcaataactggattcccaaaagaatatgctgccattgttgcaagcatttcgctgcaagacgactacggaagcctgagcacaaaagctatgcgtaagatattgcctcacttaaaagagggatttgcctatggcggaaggaaagaaagacaggaagagccaagtgcatgtgagtttgcaggttatagacattcagcaagttcattaactaaggaagagattaaaaataaaacctacaaaaaccgtttggagaatcttcctaaaaactccttgcgcaaccctgtagtagagaaaatattaaaccagcttgtaaacgttgtcaatggcgttatagacgcttatgggaagccagatgagatcagaatagaattagccagagaactcaaaaaaagtgctgatgaaagagaagaaatgactacggcaatcaataaaacaacaaccgaaaacgaacaaattagaaaacttctgaaaagtgaatttggtcttgatcatgtcagccgtaacgacctgattcgttacaaactatacagagagctggaaaccagggggtgcaagactctatactccaacacctacattcctaaagagaaattatttacaaatgatttcgacattgagcatatcattccacaatcaagacttttcgacgattcattctcaaataaaacgcttgaaaggagagatatcaatattgagaaaggaaacgagacagcttatgattatatctccaataaatatggagctgaaatgctttctgagtacactcaaatagtagatgacttattaaaggccgggaaaataagcctcaccaaatgcagaaagttaaaaatgaaaggcaaagacattcccgatgatttcatagagcgtgacctccgggattcgcaatatattgcccgtgctgcaaaaggaatgttggaaaaaatcgcaaatgatgtagttactaccacaggctctataactgaccgtttgagggaggattggcagctagtggatgttatgcaggaattaaactgggaaaagtatgacaaacttggactcactgaaattatcgaaggaagggaaggacagcgcataaaacgcataaaagattggactaaacgcaacgaccatcgccaccatgccatggatgcattaaccattgcttttaccaaacgcagccacattcagtatctgaataatcttaatgctcgcagcgataaaagcggaagcatatacggcattgaaacaaatgagttattccgcgacgacagaggtaaactgagatttaaaccacctatgcccattgggcagtttagggcattggccaaaaagcaccttgacaatacacttgtttccattaaggcaaagaacaaggtagttacaaaaaacattaatatcaccaaaaagaaaaacggaaccaacaaaaaaatacaactaacaccacgaggtcagttgcataacgaaaccatttatggtagcaacaaggtttacacaactaaggaagtgaagattggtgcttcatttgatgaaacattaattgctaaggtatctaaaaagatatatcgggaagcacttctaaaaaggttgcacgaatttgggaatgatccaaagaaagcattcaccggtaggaatagcatgtccaataatcctgtttacgtggatgcagccagaactattgttgtccctgaaaaagtaaaaattgttgatattgaaacgatttacaccattcgcaaagatgtagggcctgatttaagaatagacaaagtcgtggacaaaaaggtacgtcaaaaacttgaagaaagacttagagagtatgacaacaacccaaaacaagcattctctaacctggatgaatatcctatttggctaaatcatcaaaagggcatagcccttaaaagggttaccattaccgggatcgcaaatgcacaggcattgcgcgacaaaaaagataaagatgggaatctcattctcgacgaaaacggtaaaacaattcctgccgattttgtgaataccggaaacaaccaccacgtggcagtatatcgcgacaaggaaggtaatttgcaggaaaacgtggtttcgttttttgaggccaccacacgggcttcattgaggttaccgattattgacaaagattatcggaaagatgaaggctgggaattcctttttagtatgaaacaaaacgagtactttgttttcccaaatgaaaaaacagggtttaagcccaatgaaattgacctgttgaacccagagaattatgcgctaatcagcccgaatcttttcagagtgcagaaaatagcaacaaaagactatttttttcgccatcacctggaaactactgtagaaaacaataataatctcaagggaattacatggttgcgctgcggattaaattcaattgaaggtatagtaaagattcgtattaatcatattggtctaatcatcgcaatcggcgaagaatagatcttaagcaattggaaaaataacaccttattcaacaagtaaaaattgttggctaaggtgttattgatttaatagcataccaattctaagtaaatcgcccttattgtacgaaaaataattcttatcataaatctccaaaatcaagctcgctaaagatgtaacctattaattataaccaccgtacacaaagggcaacctataatctccaaattcaggacttttttcttgttgcctacatgataaaaaagactttgtacttcggaaatccagcttatctaagcacacgcaatgagcagttaattataaatctgcccgatgctcaaggaatggacaatcaatcgggacaaaacagcatccctattgaagacattggcgttgtgattactgaccatcagcaaatcacccttactcacgcccttatagacaagcttctgacaaataattgcgccttgattagctgcgacagtacgcatcacccggccggcctattacttcctcttagtgggaacactgttcaatcagaaagatatcgcacgcaaattggagcctctctcccgctcaaaaaacagctatggcagcagacaataaaggcgaaaatagggaaccaggctgaattgttaaaaaacacaagctctgtaaatgtagaaaatatgtatcattgggcttcaaaggtcagctctggtgacggagaaaaccatgaagcacgggcagcagcctattattgggcaaacatctttcccatccaaagctttaaacgaggaagggacgaagatcctcccaacaatatattgaactatggctatgcaatactaagagcgctcgtggcacgtgcccttgttgcctccggccttttgccaacacttggcatccatcatcataatagatacaatgctttttgtctggccgacgacattatggagccctaccgccccttcgttgacaaaatcgttctggatattgtaaaaagcggtgttgattattcctctctttcaaaagagataaaatggcgacttttaagtattccacaagttgacgtaattatcaacgaaaagaggagtccgctaatgatcgcggtatcgcaaaccacggcatcccttaacgattgctttgaaggctcattacgaaaaatttcatatccccaatttcctgagaaatggaacgactaaacgaatatcgagttatgtgggtaatggtgctatttgatttgccaacagagaccaaaaaggatagaaaaatctattccgacttccggaagaaaatgctgaaagatggttttattatgttccagttttcgatttatatccgacactgtccaagtcgtgaaaatgctgatgtgcatatccgcagagtaaaaaacagtctcccagtaaaaggtaatatcgggatagtaaaaattacagacaaacaatttgcagacatggaaatctattacggaaaagagcctaaagaaaaacacactccatatatgcaacttgagctcttttagctcaaaggtgaagtgctagtgctataaaacagaaaagccctgccacagggcttttctgcttaatgataacatgcatttttcaatcctgaaatcagccataagcgcctctttgttagtgaattaatttgaggtctgctgttatcagttcctcaaagatacaatttgaaagcaattcacaacatgcctgtattcggagaacccggactaattgctgttatcagttcctcaaagatacaatttgaa

SEQ ID NO: 2380 - DNA, 15866 bp, synthetic construct
  misc_feature 1..15866: note = Synthetic
  source 1..15866: mol_type = other DNA
gtttgccgccgaagacacgcaggcgcatcgtgctggcaatgctcgccgcattcgccacgcttgccctctacactttcggtaaagccgtctatgacatcggcaggaatgacggtagccggatggtgacagaccatgccggacaggtggaactgtccgtacagcaaaaaacggaaaatcacttaataccttatttatatggaacagacaaagaacgaaacgaagattgagaacaagacggagagcaagcccgaaaacaagacggctcccggcaacgacaagccgaagaaggagcgcaagccgctgaccgaagcccaacggctgaaacgtcagaaaatgatagtgcttcccgctatggtgctggtattcatcggggcgatgtggctgatattcgccccgtcctccggcaaggagcaggaaccgggaacaagcggctacaacatcgagatgcccgacgcggacaaggagaaccgccggattatcggtgacaaggcgaaagcctacgagcagggggcaatggaggaacggcaggagaaccgcagccgcgccatgcagcagttgggcgacctgttcgaccgcgaaacggcggcagcggatggggacagcgacttcgaccttgccaatcccggcggaacggaagaggcggtgaagcccgcgccgaaaaccatccagtcctcggcagctgcctaccgtgacctcaatgccacactcggcaacttctacgagcagccgaagaacgacaatgcggagatggacgaactgctggaacgcatcgccacgctcgaatccgaactggaaagcggaaaagagagaagctccacgatggacgagcaggtggcactcatggaaaaatcctacgagctggcggcgaagtacatgggcggtcagaacggcacgcaggcggcgggacagaccacagagccgtcccccgtgcagaaagccggaaagaatacggcaaaacccgtcaggcaggtgacgcatcaggtggtgtcctcgctcggacagcccgtgagcaatgccgaatttgtcgcttccttctcgcaggaacgcaaccgcagtttcaacacggcggtgggcattacaaccgtatcggacaggaacaccataccggcatgtgtctatggggcgcagagcgtgacggacgggcaggcggtcaggttgcgcttgctggagccgatggcggtagcagaccggatcattccccgtaatgcggtggtggtcggcgcagccaagattcagggcgaacggctcgctatcgaaatcacctcgctggaacacgacggtacggttatcccggtggagttggaggtctatgacacggacggacagcccggcatattcatccccaactcgatggagatgaacgctgtccgggaggttgccgccaacatgggcggctcgctggggagcagcatcaacatctccaccaatgccggggcgcagctcgcctccgacttgggcaaggggctgatacaaggcacgagccagtatatagccaagaagatgcgcaccgtcaaagtgcatctgaaagccgggtacagggtcatgctctatcaaggagtgaattaaggaaataatcaaatttttatttaccactaaaaatccaaagtaaaatgaaaaaagtaatcatgatgtttgccctcgctatgggcatcgcaactgccaacgcgcaggaaaacgtaaccgttgggcaaagcaacggaagtgaccaaccgaccttgacaaaggaggtctatccgcagaaggaggcggacggcgacctgtatcacgggctgtcacgcaagctgaccttcgaccgcatgataccgccgcacggtctggaagtgacctacgacaagaccgtccacgtcatttttccggcggaggtgcgctatgtcgatttaggctcgcccgacctgattgccgggaaagccgacggagcggagaacatcatccgtgtgaaggctaccgtaaggaattttcccaacgaaacgaatatgtccgtcatcacggaggacggcagtttctacaccttcaacgtgaagtacgccgccgaaccgctgttgctcaacgtggagatgtgcgacttcatccatgacggcagcacggtgaaccgcccgaacaacgcgcaggaaatctatctgaaagagctgggcagcgaaagcccgatgctggtgcgccttatcatgaagtccatccacaagcagaacaaacgtgaggtgaagcatatcggctgcaagcgtttcggcatccagtaccttctgaaaggcatatacacgcacaacgggcttctgtatttccacacggaaatcaggaaccagagcaacgtgcctttcgatgtggactacatcacatggaaaatcgtggacaagaaggtggcgaagcgtaccgccgtgcaggagcgtgtcatcctgccgctccgcgcacagaactacgccacgttcgtgccgggcaaaaaaagcgagcgcacggtcttcacgatggcgaagttcaccatccccgacggcaagtgcctcgtggtggagctgaacgagaagaacggaggtcgccaccagtctttcgtgatcgaaaatgaggatttggtacgtgcaaacacgattaacgaactccaagtgcgctgaccatgagaaagcacatcgcaataatcatcgcgtcgcttgcactcttcacggggcaggcgcacgcccagcgatgcctgccgaagatgcagggtatcgaggtcagggcgaatctggcagacggcttcaaacccggcggtaacgacggcgggtacagtttcggggcggctctctccacctacacgaagaagggtaataaatgggtgttcggaggtgagtatattctgaagaacaacccctacaaggacacttccatacctgtggcgcagttcacggcggaaggcggctactatttcaagatactttccgatgcccgtaaaatcgtgttcgtctatgcgggggcttcggctctcgccgggtatgaatcggtgaattggggcgaaaaggtgctgcatgacggctcgacactgcatgaccgggacgccttcgtctatggcggtgcgctgacgctggacgtggagttttacgtggctgaccgtatcgccctgctcgccaacctccgggagcgttgcctgtggggtggcgacacgaagaaatttcatacgcagtggggcatgggtataaagttcatcatcaactgatgcgccgcatggaacggacggatatagacactatgaggcaaatatccctcgcggactttctcgcacggttgggacatgagcctgtccgaaggagcggaaacgagctgtggtatcatgcgccataccgcaatgagcgcacgccctctttccgcgtgaacgtggcgaaacggctctggtacgacttcggcttgggcaagggcggtgacatcttcacgcttgccggggagtttgcccgaagcggtgacttcatggcgcaggcgggattcatagcggaaactgtgcgtatgccatttgtctcagcgaaaaagccgttgtacctgccggaaccgtccgaacctgcctttgagggagtggaagccgtcccgctgctccgctcaccactgacggactatctggcggaacggggcatcccttatgccgttgcatcccgccactgctgccgcctgaactatggcgtgcgtggaaagcggtatttcacagttggcttcccgaacgtggctggtggctacgaaatccggagccgctattttaagggttgcataccacccaaagatgtgtcactgataaaaccggaagataccgcctctgacgtatgcagcgtgttcgagggtttcatggactttctgtccgctgacacactcggcataggcggcaatggcgacagccttgtgctgaactccgtcgccaacgtaggcaaggcggtgaaacacttggacgggtacgggcgcatcgactgcttcctcgaccgtgacgaatccgggcggaggacgctggaagtcctcaaaggacactacggcggacgtgtctgtgaccgttccgcactctatgacggttgcaaggacttgaacgagtatctgcaacggacagcaaaaaaagaaatgaacaataacttaaaaatcaaaggacaatgaacatactgaacaacaagaacaagagaacatccatcttcaaggcgttggcactctgcctgttcgccgccgtgtcgctcacgctcgcatcgtgtgacgatgacatggacatccagcaatcctatccgttcacggtggaaacgatgcccgtacccaacaaggtgacaaaggggcagacggtggaaatccgctgtgagctgaaaaagacaggcgaatttgccaacacgctctacaccatccggtatttccagttcgagggggaaggcacgctgaagatggacaatggcatcactttcctgcccaatgaccgctacctgctcgaaaacgagaagttccggctgtactatacggctgagggcgacgaggcgcacaacttcatcgtggtggtggaggacaatttcaaaaattcctacgaattggaatttaacttcaacaaccggaacgtgaaggacgacattcagaccgtcatccccatcggcaattacaaacctctgccaagatgatgcgtgtattcatggctatcctctgttcgctactggcggtctgttccgtgtccgcacgggacagccgtcagaaggggacggacgggcaggcggcaatctaccgcctgccgcctttcgagcgggcggttcggtgtacgaagtatttcgagggctggcattcggagaaacaccacccatacgtgggctgggggcatcaggtgcagccgggggaaaggtattcggcacgcaccatgacgaagcggcaggcggacgcgctcctgcggaaagacttgcggaagttctgcgccatgttccgcaagttcgggcgtgacagtctgctccttgccacgctcgcctacaatgtcggtccataccggcttttggggagcggaaagatacccaaaagcacgctgatccgaaaattggaggcgggcgacaggaacatttaccgggaatatatcgctttctgcaactacaagggtaaacggcacgccatgctgctcaaacggagaaaggcggagtttgcactgctgtacattccgtaacatggcaaatgcctgacaaatgaaaatccgatgaagccgcaacttcatcggattttccgcttttcatacattcgggatttttcccttgccgattacttcaccgtccctgcaatgctctatgatgccgggcgaaaatcccatctccccgattgcgatgtgccggatatactctgcatatttctgaccttgaaaattcttccccgtgaggtttttgaaaatcatctttatgcttattccgtcatcgctgtgcaagatgatttttccgttttgtctgatttcttccatgattgaaacttgtttttgtgaatactatcgtagattgggacagcggtttctttgctactttctttgtccgccatcatgctcaccgaaagaaagtagggcggcttttgccgccgccacttaaaaacgggtgtagagtcccgttaccatcgtgaacatttcttccagcatatcgcagtatatgccctcgtgcgtttcgatgtccttcgtcttgcactcgaatgtctttttactgaacgttttgcggtagaaacgcatattgtaaaggtctaagccggcatcgtagatgatgtcaagacggtttgcgctcgtcttgttcctcgcaaggctcatgcgtaagccgttgcccatgtctgtaaaatccttgcttcccgtcatggcgacaaagcgtctgccgcctatctgctgtaaaatcgtctttgctatcatgcttttcttggttttaggttggcggtgcggacaccgccaacttgtttaacattctgttatctcggcaatgggggtgtttcgtttcagccattccatcaggcactccatattgtactcgcttgtgatgactgccgtatggctgttgatggcggtaaacctgctgctctcgtagtcgtctatccacccttttagggtatcaactccccacgcttcggcatcgtcaaagatgccgtccaatactttgataggctggctgaacttcactatcagcgtttgataggctgctttcatcggttgtcctccttttcttccttttccgtgagccacttgtcccgtgcggctcggcactcgtccaatgtgggtttgacacaagagaacaactctccgtctgtggggtggcggtagtcgtactgcacaagtgtccgcttgcgtctgccgatacctaattggaaacgctcgtatttctccgtacctgcttccgtgcaggtgcttattccgttgatggtcattcgtgttgccataatcgttgattttagggtggttaaaaatgtactgacagaattctgttcttcatcaccatttcggggtcactcgtatagcgttggtgcaggtagaaatggtgggagccgaagccgtaaaggaaaaacctgtcaagttcgtgcttctcggcaaagtcctttacactccgtcttaactgctcctcactcgttgcaagagtgaggaggtttacaaattcaaggaacatcgtggggattttatcgtcccacagacaaatcatgctttcaattcttacttccatactattgggtattataggttgatactatgccgcttccatccgctggcggataaggttcacgttgctgttcacaaggtttacaatgcggtcgtggtactcggtattggaattgtgcaagccacgactttgcaccacctccaatgtcttcaaggaaacctccaccgtttctatgcgcttgccgtcaatggtggcggataggataagggagttcttttcaaggaaataggagttggaaaacacgcaatggtgcagttccgtcccttccgctgcaaactccgccacgctctccaacacacgcacctgcaaagtgccgtccgtaaaggcaatgccgaagaatatgcctttgagtttgcggtatgccttctcgtgtttcttcgcttggcggatgcgttcctccaacttcttgcgctctatctccttgttgcgcttgtgcataagtctgtcgtgttcggctttgaggtcggagggacagacgtacttcgggctgttcgtgtccttgccgaaatgacgcaggaggtctatggtgtcacgccacatggagccgtccgaaatggtgtaaccgttacggatacatatctttatggatgcccaatacctctctatgtcaaaggaactgcggatgtagtggcgcaacatgggatattgccctgccttcaacagcgtttcggctcggctgtcggaaaggatagccgtgaaaaggtcgtaaggcagtatgttgtggtattcgccattgaagccgttgcgtttcagttcgggtatgaaacgctgtcggggataggtgcagacggggtttatatcgtatgcacggagtttgttgttcttgcgtacctccatgtcgctgtattccgcccataggtcgtagtaaagtatggacattcctcgcagtcgggcgacagtgacggttgtgcctttgggcgaaatccacctttgcaccacttcataaatggaatactcggctgcctgccctgccttgtatcgggatttgacgaagaagaagcgtatcacttggtactgcttgcaggtggtgatgatgcagaaatactcgttctcgctgaacacgctctttcgggtgcgcaacgcttccagcttcatgccgcaatgggggcaggtgcatccgcaaacggtgtccgcaaggtcgtgttcactcctccacgaatgtccacactcggtgcagatgttcgtgccgtccgccctcttgatggcgtaatgcttgaagcaatgacggaaagcgtatgccctctgtgtggcggtcaatttgggcagtcgctcgcttaatcgtgcgacttcctgctgtatgggtgttctcggtttcataatcagaaattgaataggttgggttgttgtacttcttgtgcggtcgctttggtggcggttctcggcttgctgcggttctgcaacttgcggagttcttcttcttggtatctgcggactgcgttctgccgtgcttccgccttttcctccgccgtgagttccacaacatggttcaccgccacgtggcactgaatgggcttgcctacctctatctcgttctcgtcatagtagtggacggcttgcccgaatatctccccgtccgtgaagccgttgcaaccgctccgctgcacgtagttgagaatgtaggtgacgcaatcgtctatgttcttagcagggttgcggtagttcttcgcaaagagcgcatcttccgctgcacgctgctccagatacatctgtatcgttctcttgaaatgttctgttcctttcatatcgctgtcgtttttagattgtctgtttcagtatctctctccaataggtcggctctacctcgctcagaaggaagtctgtaaaatccctccgtgcgtccttgttcagttctcggtagagttcacggaacacggatatgttgccgttgatgtacgtttccaccatgtacacgaagatgttgtccacctcgtagtatctgcattgctgcgctaccgttttgctgcttctctttgccatgtcggtaggggttaaagggtgaataaccaaaggatgaaaccgaagaaggcgatagtggaaaggatagccacgattacgcctatcgccactcggaacactccgtttacaatctctctaatgatgcccaaaggatgccgaacaccccgaaggcggtgcgcaccattaagccgcatatcgcaaaccctatgtactgcgccatttgtctgaaatttgccgttgccgtcatatcttcgctgtttttgattttttatttttttaatgcggattcaagagctgagggagttgagtttcaaactatcttatctgcctctcgtttatccgacattttttttatgcgtctttctgtcgcatcggtcgttttcgtttcgggtgcttgaaaaggtagggattagggaatgcaaggtttttcgggaaaaatactacccgcagggctggagattttttccgaaaacaggaggcttgaccttgcattcccgtccaatcccggaattacctttgcgcccagaacggaaatgactgcctgatgcggctcactgaaagacgcgaaaatggaggtaaacggaagtggaggcagattagacaggaaaacttcaaaagagaaatccgtgaaaaagggaaaacgccaaaaaggaaaagggacatagccggaagcgtggaaccgggtaaaccaccggcaaggaagtatgattttatatgtctgtccgagcgtgtccggtctgacggataaaatcattcttcccggtttgcctgccgtgcatgacggcttgttccatttatggatcgggcggtcagacacggctttccgcttacggctcaaaggaacagcggaaaaagaaatcatctgcgaacccgtaaaagcacctctttggcataagcacaaaagaaatgggccttgcatcatcagtctaaactgttgtttaggcgtgaggcaaagcccttttcgccgcttatgcggcagtcggcatacgtccgttcaaaatccttttgggcgatggtgtaccgacggataaaaccgcttttacggaaaaacttgtatgagaagaaaaaaattagggagattcatttcaaaatctcccgttttattgttacttttgcatacgaagagttctttgaaggttacgcaatgcgcagaaggatgatgcagtagataactaactaaatcgtaacctattactatcatgagcaattaacctacgctcatttccaataaattacactcttttcgtaacttacagaaacaattttatccagattccttaattgataaagtcaaagacgaagtaagaggaaagaataagtcacagacttgggctatattagcgaagtattttgtatggaaagaagttgaaaatagttggaatgaagaagaagcccaaactagaagagtagaaaaagaatacagacttgtgggaattaaaaggggagtaaagagagaggaattgaaacttgaaaacttccaatggcgagtaaaagcactttccgagaggatgaatcctgaagaacttgcaatcgttttgcaagagataaatgagcagattagtaattcgagtgggtatttaggtgcaattagtgatcgaagcaaggaactatatttcaatagacaaactgttggacagtatcaaatggctgttttggataacaatcctaatataggcttgcggaatatggtgttttataggcaggattatttggatgagtttaatacgatatgggaaaaacaggctgaatttcataaagagttgacggaagatttgaaaaaggaaattcgggatatcgttatcttttatcaacgtcgtttgaaaagtcagaaaggtttgataaatatttgtgagtttgaaaggcggcagatagaggtggaaatagatggtaagaaaaagattaaaactattggtagtcgggttattcctcgttcttcacctctattccaggaatttaagatatggcagactttaaacgatatagaggtgtcggtgcttggtgtgaaaaataaacgtaaaaagcaagatgataattctactacactgctcgattctgccgaaaatattgattctttgaaattgaatgttagccgtcctctggatgctgatgaaaaaagcttacttgctaaagaactttttatccgtgataagctgactaaatcagatgtgctgaaattgctatttaataatcctcagaatctgaatctgaattttaaaaatattgatggaaatagaacaggaagtgccttatatcaggcatttagtaagattcttgaaatatctggtcatgagtctattaatttcaaaaaatcagctgacgaaattgtagaacaagtaaaaacgatattttctgctttgggttggaatacggaagttttgtgttttgattcggaaaaagaattggacaagcaaccttactttaaactttggcatttattgtactcttttgagggtgatagtacgccgaccggagatggaaatctgattcaaaagatagcagatttatgtggttttgaaaaagattatgcttcaattttggcgaatataacttttcaagaagattatggtagtttgagtacaaaaacaattcgtaagatattacctcatctaaaagatggaaatcagtatgatgttgcttgtgaatatgcagggtataaacattcaaaatcctcattaaagaaagaagaaattaagaacaaggtattgaaagataaattagagcttcttcctaagaatagtttgcgtaatccggttgttgagaagatactgaatcagatggtcaatgtgattaatgcgattattactacttatggcaaaccggatgaaatccgtattgaactggctcgcgaattaaagaaaaatgcaaaagagagagaagaactgacgaaatctattgtggatacaacaaaaacgcacgaagggataagagctattctgcaaaatgatttcggaatgtctcatgtaagccgtaatgcaataattcgttataaattgtatgaagagttgaaagataatggttataaaaccttgtattctaatacctatattcccaaagaaaaattgttcagtaaggattttgatattgagcatattattccacaggctcgtttgtttgatgattctttctctaacaaaacattggaagtgaaaagtataaatattgagaaaggaagtaaaactgcttatgattttgtggaggagaaatatggcgaacaaggtttgcaggaatatttaaatcgttgcgaggtactgttcagggataagaaaactaaacttagaaaattgaaaatgcaggagagtgaaatccctgaaggatttattgatagggatttacggaatacacagtacattgcaaagaaagctctttctatgttgaatgaaatttgtcgtcgagtggttgctactactggggcgattactgatgaattgcgtgaagattggcaacttgttgatgttatgaaagaattgaattgggaaaaatataaagtactgggattagtcgaatattttgaagataatgatggaaggttgataggtaggattaaagattggactaagcgtaacgatcaccgccatcatgcaatggatgctttgacagtagcatttactaaagatgtatttatccagtattttaataataagaatgctagtcttaagcctgatacgaatgaagctgcaataagaaataagtattttcaaaatggaaaggctattcctcccatgtctttagatgaatttcgtgctgaggcaaagaagcatttaaatgatacgctaatctctattaagaccaagaataaggtagttacaattaatctcaatagaacaaaaaagaaaaatggaataaacaaaaagcagcaacaaactccacgagggcaattgcatttggaaactgtttacggtagtcataaacagtatgtggttaaagaggagaaagtgaatgcctcgtttgatgcagctaagatagccactgtaaataaacctgcttatagagatgcattattgaggcgtttgcaagaaaatggcaatgattcgaagaaagcttttactggtaagaattcattggacaagcaacctgtttggttagatgctaagcagaacgagtgtgttccggaaaaggttaaaacagtaatgcttgaaacggtttatacggtacgaaaacctattgatgaaaaattgaatgtagataaagttgtagatgcgagaattcgtaaacttttgcaggatcgcataaaagaatacggtaatgcgaagagtgcatttgccaatctggatgaaaacccgatatggctcaataaagagaaaggtataactataaagcgagtgagtgtttttggtatcagtaaagcgcaatcacttcatgaaaagaaggataaggatggtaattttattttagataaagacagtcggaggattccggttgattttgttaatacaggtaataatcatcatgtcgcaatttatcgtaaaccagttttagacaaaaagggacaggctgtatttgatgaaaatggtgaattgaagtttgaacttgaagaggttgtagtttctttctttgatgcagtgacgcgggtaaatcttagtcaacctattattgataaagattataagagaagtgaaggttggaagtttctttttagtatgaagcaaaacgagtattttgtgttcccaaatgagaagactggctttgaccctaaagaaattgatttgctgaatcctgagaattatgctttaataagtccaaacttgtttagagtgcaaaaaatagcctctaaagattatgtgtttaggcatcatttagaaacagttgttgcagataggaaagaattgcaggagattacctggaaacgaatttcttctctaagtatattgaacagaattattaaagtccgagtcaatcatattggtcaaattgttatgataggggaatattgagatggagaataaattgaaattgtttcaaggcaagagtattcgttccgcctggaatgaagaagaacaacaatggtatttttctattttagatgttgttcaggttttgacagataatgcaatgctaagcaatatacaaagcgaatgtgttcaagagatgaaatgttgaatttgaactggggtacaaattgtaccccagttcaaatgactgctgaagatggtaaaagaaggaaaatccaagcggcaaatataaaaggactttttcgtatcattcagtctattccttctcccaaagcagagctttttaaactgtgatcagcccagattggctatgatcgtgtacaagaaattgagaccccagaattagctcaagagtgaatgaaagaactttatgaacagaaagggtgtctcctcagttaccgtttgaagaaggtgatgaataatattcactaaaattgaagtactatgattaagaaaacactctattttggaaatccaatttatttatctttaaagaatgcacagttagtaataaaactaccggaagtagtgaaaaatgaaactttaacgggaggatttaaacaaaaggcagaagtgacaaaaccaatagaagatattggtgtagttgtattggataataagcaaattacgattacctcaggagtactggaagctctacttgaaaataattgcgctatcataacctgcgatagtaaaagtatgcccgttggcctgatgcttcctttgtatggcaatacaactcagaatgaacgttttcgtcaacaattaggtgcttctcttccattgatgaaacaattgtggcaacaaaccattaagcaaaagatagagaatcaggcagctgtgttgaaaaaatgtgcaggggaagaaataagatgcatgaaagcatgggctgctgatgtgaagagtggggattctgataatctggaagctcgggctgcagcttactattggaaaaacctatttaaaatagatggtttcacgagagatagagagggcattccacctaataatttgttgaattatggggtatgcgatattgcgtgctgttgtggcacgtgggttggtatcgagtggacttttgcctacgttaggcattcatcatcataatcgttataatgcgtattgcttggctgatgatataatggaaccttatcgtccgtatgtggatgaactggtttgtgatattatgaaaaaaggaggagattatgggatgttgacaaaggaactgaaaggacagcttttgacgattccgtcgttagatgttattatttcaggtaagcgtagtccgctaatgatagcagtgggacaaacaacagcttctctttataaatgttttaatggagagttgcgtaaaataacatatccggaaatgtaatggaccgttttagtgaatatcgcattatgtgggtactggtgttatttgatttgcctactgataccaagaaggataagaaggcgtatgcagacttccggaagaacctgcagaaggatggatttactatgtttcagttttccatctacgtacgacattgtgccagcagtgaaaatgcagatgtgcacataaaaagagttaaatctttcttaccggagtttggacaggtgggaattatatgtattacggacaaacaatttggtaatattgagctcttttatgggaaaaaagttcaagatgtgaatacaccggggcaacagttggagttattctaaaagtaaaaatcccacttgttggtgggatttttagtggaaaactgtttgctttttgtgattcaaattgattgtttaaccatttgattattagattataatgaatagtctactgtttccaatggttcaaagatactaaaatgaaagcaaatcacaaccaaccagcaagaacttattgacaagtataaactgtttccaatggttcaaagatactaaaatgaaagcaaatcacaacgtccttttccccgttcttccgcaaaatatactgtttccaatggttcaaagatactaaaatgaaagcaaatcacaacgagggagcgctgacgtaggtaccggtattaactgtttccaatggttcaaagatactaaaatgaaagcaaatcacaactctgtgaggtaattaccatcaagcaacacactgtttccaatggttcaaagatactaaaatgaaagcaaatcacaacagtttctgcaggacggtctgaattctttccactgtttccaatggttcaaagatacaaaaatgaaagcaaatcacaacgtgtgtgcgtgtctgtgtgtatttgttttccaaagatagtgaattgtcttatcctgatataggtagacacatttacaaactaataaatgtgttactatt

SEQ ID NO: 2381 - DNA, 15827 bp, synthetic construct
  source 1..15827: mol_type = other DNA
  misc_feature 1..15827: note = Synthetic
aaatacggaatcgcttccttatattgcatggtgtggtaatacgattctcctataacacgagctatttcaggtgcacgtttaatatttatcgtatccaaaatcgcaggggcatatgcaattacttcgtcatactttttttgtaaatagtataactgtgcaatgtaaaaaggaacaacagatccaaatgtttcatttttctgaagttttaaaaaatccttcaaggccgtttcataatttttttcgctataagcaatgtgagcaaaataatattttgcgggagcggcgtactttccttctatgtctttaatttcatacaggtctttttttgccagttcatatttttccgttgaaaaataactgtaaccacgcttaaaataaaattcggataattcatccgtcgttaaatcatacacatcaaccttttcaaaccaatcgagcgcatctttgtatttattttttcgaaaattatatttccctaaataaaaataagctgtttttacttttggactttcaggatgattcattacaaattgttttaaaaacaattcgccatctttattaaataactctatggcacaaacagaattatagtattctgcatctatccgcacaagggaatatacgtcacgattggattcaattatttttacaaaacttttttgggctgcaccgtatttttctttttggaataactcgataccggttttaaattcggcatcaggctgaacatatatcatcgatttttgggcaaatacaactgttgtacttgttatcgaaattaaaaacacaactgcacaccttatttcacgcagattgcgcagattttcgcagaaaacacaaaatagatatctgcgtttatcagcgaaatcggcgagacaatctactatttttgttctgttcatcagggattttgaaagtatgaatgtggtaaaattacttaggataaatccatttaatttggttcgcgtttggaagttattaacgcaacaatgttgaaagtattgaaataaaagaaggaatgcctaaagactaataattaattttacctcacccccaacccctctccatacgcttgcgccgaagcttcagcgtaggagcattggagaggggagaaataaacgtacaccaaatggcaactgacagcatcattcatttaaataaagtaaacatattccaatcccataatttagtgcttactgatgtttcattggatattaataaaggtgaatttgtttatttattaggaaaaacaggaagcggaaaaagcagtttattaaaaacattatacgccgaactagacctgatacaaggcgaagcaagcgttgccggatttaatttagcaacaatcaaaagaaaagaaattccatttttacgaaggaaattaggcattgtatttcaggatttccaactgctgaccgaccgtacagtaaatgataacctattgtttgtgttgaaagctaccggctggaaagacaaacaaaaaatgcaacaacgtatacaagaggtattggaaaaagttcaccttgcgaacaaaggttttaaaatgccccatgagctttccggtggcgaacaacaacgcatttccattgcacgcgcacttctcaatgaccccgaattaatacttgcagatgaacctacgggtaaccttgatcctgaaacatcggaaggcatcatgaatgttttgcttgagataagtaaaagcggacgtgccgtgcttattgccacacatgacattatgatgtttgataaatttccttcgcgcaccattaaatgtgaaaatggtaaagtcactgattcggggaattaggatggttcagaaatttacagagtcggaaatttcaatcggatagtgaacatcctcgtatgcagacacgagcgttccgattacatcgagttcatcatatgctgttgttccactttttggattgatggcgattaactcatctacccttttaagtgcagctttataatccgctttggtgcgtataggttttatagttttcattttttaatgtacgttttttcacaactaacggagagtattcaggtaattgaaaatgtagcaggcagcagccaatactcaattatgcagatttgtccaccctttaatgctaaccgactaccaaaccgactaccgaaaataaaaacccctcgaaaaatcttgtttttcaaggggtttagcttaattgtagaggtcccgagcggacttcgataattttttgatttatcctataaataataagcttttcagcgatttaatttcaataattgttaaacaaattgttattatataaattcaaatgtacaaatatttattataatccattacttcaaaacataactcgtacttctgccgccttcaggctctttctgaagaatgtttttatttattaaatcgtttatatcacgaagagctgtatcaggcgaacacttagtaatttttgcccacttggaagatgttagtttgcctgtaaaaccgtcaaataatttattgatcaatgcacgctgtctttcattaatgggtgtttgagcatgtttatcccagaactttgttttgtttaaaacacgttttagaatttcatctgtggcgtttaaagcacggtctaaacaatgtaggaaccactccaaccattcagtaatatcaagttttcctttttgggttctttctaatatgtcataataaacatttctttccaatcgtatttgcgccgacatactataaaaacgctgatgatcgccatctgcttttgccaattgcatatctgctatggcacgtgcaatacgaccattcccatcatcaaaggggtgtatggtaacaaaccataaatgcgcaatcgcagattttaatacagcatctaatgagttattggaattaaaccagtctaaaaacaacttcatttcttttttcaagcgagttgcttcaggagcttcgtagtgaatcttctctttacccatagctcccgaaactacctgcataggacctttttcgttatcgcgccaattacccactactattttatgcgccccgcttctccctgttgggaacaaagctgcgtgccaatcaaacaaacggtctttatttagtgctttgttataattttgagtagcatcaagcatcatttctacaacaccttccacattccggtcggcagacaccaatccggcaatatccattcctaagcgtctggcaatagaagaacgtacctgttcgggatttagaatttctccttcaatttcggtagatttaagtacatctaaggttaaagtctgtaaagtggtctcatttctcaaggcaaatcctaaaacctccatataaccttttaatcgaccttgtttgtgccttacattagataatataggcaatatgacttcatgattccaagtaaaatcaggccatttgcttaattgatggatatatttagacatttatctccgcatttgtgcggtaaaaatagtgattattctccgcacatacaaattattctccgcaattttacggtaattaaattaattattctccgcacattactaacttatctataattcccaaagataacggcatgttaaaattcacattaaaatattatatttgtcatataaacaccataaaatattgaaataaagaagaattaataaagacatataaggatttgcgttaaactgattctcgacacagaaaactggtaattttcaaaaaaacgaacgaggaaaatgtaaaacgctcacgcaatgcgtgggcttttgcttttttcgttcgtgggtataccagtacctctgtgtcggattgagtagaatgacccacgcagattttttgtggctggtaacacaaaaaacacaatgcagaatttatacaatgaattaattgaattgctggagcaagatcctgcattgattattgaagataaattaaataaagccctgattattgacagagctttaaaattagatgtgggattaataaaactactcttgggtagcccctcaataaaaaaacatttctttcaacaacttgaaagtatacaggtattcgataaaatcgcttttcagcgatttgtaaacaccaaacaatttttgcccgacaattacactcagtttaaaaacaaaataggactaagcaccaacaacgaaaactatttaaccgatagcagagaagttgtattggtgtggcctcataaagattgtgttttagaaggagggcaaacaaaagaagatgcaaagcgggatgaaattttttacaaccaaacacttgcccctgacgatatagaccgtcttactgcaccaaaagttttaaccagttggaaacgttatgataaagacggcgaacatccagtaactaaaataagtaagcaagacaacctaattattaaaggaaacaatcttgtagcactgcatagccttaaggaaatttataaagggcaagtaaaacttgttttcattgaccctccatacaatactggcagcgattctttcaagtataatgattcatttaaccaatctacttggcttacatttatgcggaataggttacaggttgcacataaactgttaagtgaaaaaggagcaatatatgttcagattgaccatcatcaattaggatatttaaatgttttaatggatgagatatttggtatagaaaacaaagtacaagtaattgctatcaaaactgcttctccagcaggttttaaaactgtaaatccgggaccaatagatgtaactgaatacatacttttttacacaaaaaataaatcatcgtttaaatttaaaaagggatatgtgcctgttgattataattcaaactatgatctttatgtagaaaaaaataaagatgtaagtaaatggaaatttacagctattaaagaaaaagtaataaatcatgccggatatacttctgaatcagatgcaaaaaaaaagtatggtgaattatggaacagtattttaaaagtcatgattgcagactttgcctataagaattcttcaaatattgtaagtattagagatccccataaaccaactgaaaagttgaaagtgttgatgacaaaatctaaaaatgaagaaaaagttattgaataccaaagagaagatggtagtattatgtacttatatagaggtggcgcattagcgttctattcaaacaaaatgcaggaaattgatggcaaaatgcaagttactgaattacttactgatttttggggtcatatttcttgggcaggaatagcaaacgagggtggaataaaattaaaaaacggcaagaaaccggaaaaattaataaaacaaattattgaattatcaactgaggaaaatgatattgtacttgattttcatttagggagtggtactacagcagcagttgcacataaaatgaaacggcaatatttgggaattgagcaattagattatggtgataatgattgcgtgaaaagattgaaaaatgttatcaatggtgattcatcaggcatcagtaaatctgtaaactggcagggcggaggcagttttatttacttagaactattaaaaaataatcagcaatacattgatgaaatacaggatgcaacaaaaacagagcaattaaaaagaatttgggagaaaatgcagcagtccgcttttatcagttacaaagtattgccacaaaaaattaatactgaaataaaagaatttgaagcattgagttttgaagaacagcaacgttttttagtagaagtgttagataaaaatttgttgtacgttaatttcagtgaaataaatgatgccacacataaagtaagcgatgttgacaaagaacttaatgtaaaattttattcactgctttcaaaataatccttaatgagtttcgatttattaaatacattcgatatcctgcaaaacgcagtagagcaattttcaggtgatttgcccgattctattccgcaaaacatcaatcctaaatttgctatccgtgattatcaggcagaagcattaaaccgttttgatttttatttaaccggatataaaaaaaggataaagccgacacacctgttatttgaaatggcaacaggcagtggcaaaacacttgtaatggcaggctgcatattaaatctataccaaaaagggtatcgtaactttatcttttttgtaaacagcacgaatattattgaaaaaacaaaagacaattttctaaacccttcatccggcaaatatttatttaattcacaaatacagtttggtgataaacctgttacaattaaacaagtagaaaactttgccaatgctgatgacgaatgtataaatattcatttcactaccatacagggcttacacagtcgcttaaatacgcctaaagaaaattcgttaaccttcgaagattttgaaaataggaatgtagtgttactttcagatgaagcccaccatatgaatgtagatacattgcgtgaaaatggtaagcaattaaaaataaaagagtttgaagaatacgacagttgggaaggtacagcaatgcgcatttttcgcagcagtaataataacttattgttagagtttaccgccacagccgaattgcatcaagaagcaattgcaaaaaagtataacgataaacttatttttgactactcattaaagaaattttaccttgccaaatacagcaaagaagtaaatgttttacaggcaagccttagtaaatttgaaagggcgttacaggcaataatactaagccagtatcgcttattaatgtttgcgcaacatggattattaattaagcccgttgtaatgtttaaatcaaattgcgtaaatgtccccaagcaaagagatgaaaataaaattgtttcatcagagtttaaaacagaatttttacaaaaactttcaacgcttaccgctaccgatttagaacgcattaaaaataatgcctccgaaaaagggataatcaaaacggcttttaaattctttgcgatcacgggtacaacactcgaaaatttgataatacaattaaaagatgcgtttgctgatgataaatgtatttcagttgacagtacaagcgataagcaggcaacccagttagtaataaattcattagaggaatcggacaatgcagtaagagcagtatttgccgtagatgctttaaatgaaggttgggacgttttaaatttattcgacatcattagactttataatactcgggatgctaaaaacggaattccgggcaaagcaacaatgagcgaagctcaattaattggtagaggtgcaagatattgtccctttgtaacagccgaaaatcaaactaagtttcaacgcaaattcgatgatgatgtaaacaaccaattacgagtttgcgaagaattattctaccatagtgaaaccaacagccgatatattgatgaattaaacaaggctttagataccattggtatcaagccttccaatgcagtaaaacgtaagcataacctgaaagatgtttttaaagaatcggagttttataaaaaaggagttatctatacgaacgagcaattagaataccgtaacgaagatgtaactgaattcccacaacatttaaaagacaagaaattttattacacaatcaaatcaggctttagcagagaaaacacattactaaaggaagaaaggttggatcaggcaatggagccggtacagccctatggctttaatgtaaaatctttaggtgttccggttattcttaaggctatgcagcgtttacctttttatacgttttcaaatcttacaaaatactaccctaatatttccactatacaagaatttataatctcagaaaaatatttaggtgagcgcctattggaattaaagggcacaaaaaaacaagttgatgaaatgagccagcaggataaactggaatgtgcagttagtattttacaatccatacagcccgatattgaaaagggaagtttggataaaaaaggctcggaagttttcacgcctaaaggcattaaatctttatttgtggataaagaaatgaactttgttttagcagaagatggtgatgcagaaacaggatacccaatgagcagaccaaaattagaggcacattatttagacctgaaaaacgaagactggtacgcttacgaagaaagttatggtacatcagaagaaaaaaaattaattctgttcattcatgcagccatcggcaaactaaagaagaaataccaacaggtatatttattacgtaacgagagatactttcagatattccgtttcagcgatggtaaaccatttgaaccggattttgttttgtttctcaaggagaaaaaaacaaatgaaaatcttatctaccagttattcattgaacccaaaggcgatggctatttagataaggacgaatggaaagaacgatttttaaaagacattcaaaatagatatatcattcaccaaaataccgagtataaattagtcggcttaccattctataataatactcctgaaagattaagagaatttactttatcatttgagaaatatctataataaagatgagacgtattttggcatttgagccataggtttttattgtaacctctccaagacctcccattttttcattgtgtgaaccctttctttgttaaaatctgagagtttatatgctttagggtatgctacgccattttaacaagcattcgccagtgttttgccggaaaaataattatatcatgaagcaaaacgaaatagatgcacctaaaatccagcttagggcatactcattaaaggaattggctgcactatatgaatgcagtgcaaaatccatgaaaacatggttagcgccatttaaacaggagatcggacagagggttggacgattttatactccaaagcaaatgaaaataatttttgaaaagttaggggttccaggcacattttattggaattaaagattcctgttaaaaaatattaatgtgaaaatagataatcccaatctatccaaatttgtccttttgaatccctttcttgcccaaagtggaaatcagtattttaaatggtttttactttgcatccgaaaaaattataaggatgtacaacataagacatatacttcgccttcatactcagcatcaaactacctctgaaatagttatgcagactggaataccgcgtagcgtgctaaaaaaatgtcgtgaggaatttaatgaaagcggattgagctttgaagaaataaatgaattaagtgatatagatctggcagaactttttacaaaacctgaagaaccgcccatcagcgaaacaatgcaaatattattaaatctttttccttcaatagataaagaactcaggcgcaggggcgttactcgtaaactactatgggaagaatacagaaaaaaatatcccgatggtgttagtagacaagaatttaacaagcacttttgcaaatggaaaaggcgaatagtacctattatgcacaatggagcgcaccgattagaacttaaaggagaatccatgagaaaaaaaaacttagtcgaaactgagaaaataaaaagtaaaggaacacctaaaatgctattacaagttgataaagattagatttcattgctctgctcatcagttatttttctgattgatttttctgaagtatggaacacactaaattccattcctttttccttaaacctattttaggtagtagcaataccgcttccaaccttaaccgctatatcgcagtcgtggactatctcataggagctgcacatcttaccgcctttggttgaatgggagatggggatgcgtgccgaatttttataccaactgcattaaataaactgcatccggcgcttgtatccaattgaaaaggttggaacagaaaaaagtgagtttccccgactataatatttccataacggaataatccgtattgtaatttgattagaattttgaatgttgtatgtttgagggaaataaaaaagcctcccactttatggcggagaggcttaccagatgttttcacaacggaataaatccttattgtgatttgcttcaaaatgtaatgcaaatatagaaattaaataataacacgatgaaaaaaattttaggacttgatttaggaacaacttccatagggtgggcatttgttaatgaatcagacaacaatgaagaaaaatcttcaattgtaaaattaggtgttagagtgaatcctttaactacagacgaacaaactaattttgaaaaaggaaaatctatttcaagcaatgctgacaggactttaaaaagatgtgcaagaagaaatttgcaacgatataagcttcgcagagaaaatctaattgagattttaaaagaaaataaatttatttctaatgaaactttgttgtcagaaaatggaaactttacaacctttaaaacctatgaaaacagggcaaaagcagcaagagggttatacaaagatgaagaaaaaataacactggaagattttgcaagaacccttttaatgataaataaaaagagaggttataaaagcagccgaaaggcgaaagggcaagatgaaggtcaattgatagatggaatggaggttgctaaaaaattatatgaagacaatcttactccgggacaatttgttttggaaatattaagtaatgggaaaaaatatattcctgatttttatcgttccgatttacaaacagagttagataaaatatggaattttcaaaaacaattttttaatgatgtattaactgatgagtttaaagagcaacttagaggaaaagggaaacaagctacttcaaaaatatttttaggaaaatataaggtctatactgctgataataaaggtgcagaaaaaaagaaacaagcttatcaatggagagttgatgcacttaccaaagaagttaccaaagaaattcttgcttatgttatcacagaggttaatggagatttgaataactcaagtggttatttgggtgccatcagcgaccgcagtaaggaactttattttaataaacaaaccgttggtcaatatttttggcaacaacttactgattggaaaaatgcttgtgaaattgctcgcaaagaaaaacaaagttgtccacctgctcctcgttttaagaatcaagttttttatcgtcaggactatttagaggagttcacaactatttgggagcaacaagcaaaacactataaagagctaacttctgagttgagagatgaaattaaagaagtaattattttttatcaacgtaaattaaaatcacaaaaaggattgattagtttttgtgaatttgaaagctttaaaaaagaaattgtagttgataaaaaaaagaaaataaaaactattggagcaagggtttgtcctaaatcttcaccactatttcaagaatttaaaatttggcaagtattaaataatcttaaaattgaaaacaaaaaaacgaaagaaaaatctgttccatccatagagttaaaacaattactttttgatgagttgaatatcaaaggcaattttaaaaaagcagaaggtttaaaattaatgtttgataaacctaatgaatgggatttgaactttaaagaacttcaaggaaactcaactaatgctgcattatacaacgcttaccaaaacataattaatgtaagcggacacggggaatatgattttacaacaatgaaggcaagcgaaataaaggagcttgttcaaggtgtatttaagggttttaaaattgatgctgaaatattgaatttcaattctgatagcgataaaattgaaaatcaactctcttatcaattctggcatctgctgtattcttttgaggaagacgattctaaacttatcgaaaagctaaaaacaaattttggttttgaaaatgaatacgcacgaattattgccaatattacttttcaggatgattatggaagtttaagtgcaaaagcaatcaaaaaaattctaccccatttaaaagaaggaaatacttatgatgttgcttgtgcttatgtgggctacaatcattctaactcattgaataaagaagaaaaagaaaatagaatactcaaagataaattagaagtattatctaaaaatagtttacgcaatcctgtggttgagaaaattcttaatcaactggtaaatcttgtaaatacagctattgtagaatatggaaaacccgatgaaatacgaatagaacttgcaagagaattaaagaaaagcgcaaaagaaagagaacaactaaccgaaagtattactaacgcaaaagcggaacacgatgagcatcgtaaaatattaaaagcggaatttggattaactaacgtaagccgaaacgatattatccgttataaattatacaaggagttggagcatagaggatataaaactctttataccaatacatacattgcccctgaattactcttcacaaagaattttgacattgaacatatcattccaaaatcacgattatttgatgattcattttcaaataaaacgctggaaaaaagagaagcaaacattgataaagcagatgaaactgcatttgattatgtaagtagaaaatttggtgatgcagaattagaaaaatatttatcaagagttgaagatttatttaagaacgaaaaaatcagtagaacgaaatataaaaaacttcaaatgaaagtgagtgaaatcccaaaagattttattgatagggatttgcgcgatacacaatacattgctaaaaaagcaaaagcaatgatggaggaagtgtttaaggaagttactaccactacaggaagcattacagatagattaagagaagattggcaattagtagatataatgcaggaattgaattggaataattacgaagtactcgggatgactgatgaatttaccaacagagatggaaatgtaattaagcgaataaaagactggacaaaacgaaatgaccatcgccaccacgctatggatgcacttacagtggcatttacaaaaagaagtcacgtacaatatttgaataacctgaatgcacgaagtgataaaagtggtagtatatatggtattgaactaaaagaactttacagagatgaaaaaggaaaattaagatttaagccgccaattccgttaaataattttagaaatgaagcaaaaaaacatttagaaaatattttggtttctaataaggcaaaaaacaaagttgttacaaaaaataaaaatgcgtttaaaataaaaaatggagaaaaaataaaaatagaacttacgcctcgcggacagttgcatttggaaacagtttatggtagcgtaaagcaatacaaaaccgaatttgtaaaagttggaagtaattttgatttggaaaatattaataaagttgcaaaaaagaagtacagagaagtgcttttgaaacgattagaagaatttgaaaataatcctgtcaaagcatttacaggaaaaaatagtttatctaaaaaaccaatttatctagatgaattacaaacaaacaaagtacccgaaaaagtaaaactattatcacaaataattgtttatacaaagcgtgttgccatttcgcctgatatatttaaagattcaaaaaagaatgatgattttataaatagagtggacgatatttacgataattccattaaagaagcattgaagaaacactatgaacaaaccaaaaaagaagttgaattatttaaccaaacagtaacaaaagataaagataaaaaaaaagttttggaaactgctttttcaaaccttgatgaaaaaccaatttggttaaatagagaaaaagggctttcaataaaaagagttacaactactggtatcattaatggtgaacctttgcactacaaaaaagataaagaaggaaattttatattggacgagaaaggaaataaaattaatgttgattttgttagtacatccagtaatcaccatacttcaatatatattgatgaagaaggaaacttacaagatgaggtaatatcattttatgaaacagtaataagagtaaatcaagagttgccaatagtagataaatactataacaaagataagggttggaaatttttatttacaatgaagcaaaatgaatacttcgtttttccgaatgaaaaaacaggttttaatccgaatgaaacggatttgataaatccagaaaattatcatttgattagtccgaatttatacagagttcaaactatgttaaaaaaaacatatggtgccagtgtgataagagattatcaatttagacatcatttagaaacagtagtacagaggaaaaacaatgatggtagaagtatcaatgaaacaccgttaaaagatataatttatagacgatacaaaacattgccagaattggaaaaaattgtaaaagttagattaaatcatttgggtaaaatagttcaagtaggggaatattaatttttcaagttacaatgataaaacgcactctttattttggcaatccatcctatttgagccttacaaatgctcaattagttttacgtttgccggaagtagaaaaaaacaatacagtacctgagcatttcaaaaaagaagcatcggcaagtattcctatagaagatattggcattgtaatacttgaccataagcaaataactattacacaagcattgatggaagccttgcttgataacaatgcagcccttattacttgcgacagtacccatcaccctaccggattaatgcttcctttatgtggtaatacaatacaaaatgaacgctttcgcgcacaattggatgcaaccgaaccattgaaaaaacaattgtgggcgcaaactatttcgcaaaaaataaaaaaccaagctgcgatgttcggtagtaaaaatattgataatagttatttagttccactttaccgcaatgtaaaaagtggtgattccgacaattgcgaagccacagcagcagcgcattattgggggaatatatttaacactcttcccgcagtaagttcttttaaacgcttcagggagggcttgcctcccaacaactatttaaactatggctatgctttattacgtgctactatggctcgtagtattgtaggtgcagggttgcttcctacactcggcattttccatcacaaccggtataatgcttattgccttgctgatgatttgatggaaccttaccgtccatatgtggataaagttgtctattctattattgaggagaagggaattaatgaagatattccaaaggaaataaaatctttattattgcagattccggcaatggatgtgcttatggatggtgaaaaaagtccactaatgaatgcaactcagcgaactgctgtaagtttggtaaagtgttttgccggagaacaacgtaaacttttgtatcccgaatttatataaattcattttaaaatgtcaataagtaccgaccgcttaaacgcataccgaattatgtggacacttgtaatgtatgatctgccaaccgaaacgaaaaaggaacgcaaagtagcttcccgtttccgcaaagaattacagaaagacggattcagtatgtttcagtttagtatgtatgtgcggcatagctcaagttccgaaaatgccactgtacatagcaaaagagttaaaaaaaacttacccgaacacgggaaaataggaatcttacaaattacagataaacaattcggtgaaatggaattattttacggttcaaaaccagtagaattaccccatgtaccacaacaattagagctattttaagctaattagaaacaaaaaatccgggacaagcccggataattgtttgataacacttcatttttttattgataaatcttccttaaaacactattgttgttgaattgtatcttgatatggtgtttatcaataagtcaaagatacattttgaaagcaaatcacaactgaagcgttcgattgcagcaggtggaggaaaggtgtttatcaataagtcaaag

SEQ ID NO: 2382 - DNA, 15823 bp, synthetic construct
  source 1..15823: mol_type = other DNA
  misc_feature 1..15823: note = Synthetic
cgcccgcgcccagctgaagcaaatggatattccttcggatgtaagctggcagttaggcggtacgtatgaagaccagatggatacgttcttcgacctgaccatcctgatgatcctgatcattatcctggtatttatcgtaatggctgcccagttcgaatcgttgacagacccgtttgtgatcatgttctccataccgtttgcctttacgggtatcatcctgggactgtcaataacacagactccattgggtgttatggcactgatcggtctgattatgttgatgggtatcgtagtaaagaacggtattgtgctgatcgactacacgatcctttgccgtgaacgcggcatgggaatcctgacggcagtcgtggcagccggtaaatcccgtctccgcccggtattgatgactacgctgacaaccgtattaggtatgattccgatggcgatcgggacaggcgaaggttcggaaatgtggcgttcgatgggtatgacggtggcatggggactttcggtatccacattgatcacgttggtgatcgtaccggtcgtgtacagtgtatttgccggaaacggagttcgccgcagacggcggaagctggcaaaaagcagataaataaagctctattcttttagataaggtattatcttacaacatagataataccctatctaagaggatgaataatatgtcatctacagagataagcagtatgctatctaagcatatagatgaatatacatttaaaaaaaagagtaaattataatagaaataacatatatgaaagctatatttgtatcatttaatcaagcatattacgaaatgatccttagtgtgatggaccgaaataatatccggggcttcacatactgggacgaagtgcagggacgtggcagtaaaacaggtgaacctcattacggaagccatgcctggccgacattaaactcggcaatcctggcaatggtggacgatgaaaaggtcgacaatttcctggaaatacttcgccagatggatcaaaagacagaagcccaagggttacgggctttcgtctggaacatcgaaaaaacaatataaaaggagataatggacgatcactcaaacattcttatttttagtaaagacaatgaccagggagctattattcaagacaatttgaaagccgccggatacgactcacaggtatttgaccaggaaacaaccgcgtacgagagtttcctctccggtcatttcaatttttgtattatagataataatctggccgtaaaagaaacgcgaacatttgtcgctatgatgaagagttcggagaaaataatccctgttattttcttatgtgatcacccaaccagagaagatatcagtttattattttctttccatgccgatgacgtgatacgtaagccgctggactttgaaatcctgctggcacgtatgaaagcgatacaaaagcgctatcatccggaagagaagaaagagacaaaaatctacatcttcggtaagttcaaattcaacatacaaaagcagctcttgtctatcgaagacaaaacgaccaagttgacaaccaaagaagcagacttgctcacattcttgtgccagcatgccaaccagacgatagacaggatgcaggccctacaagtcatttggaaaagcgacaactatttcaatgcccgcagtatggatgtctatatcaccaagttgcgcaaactgttacaagacgatccgacaatccggatcgtgaacattcacgggaaaggatacaaattatcaacatacgatgatgatgacgactgaacatttcaccttatttctaattgtaatggcagccattgccgccattgttttcatcacgctctactttatagaagccggctacggaatgctgttcgacaagaaatggggctttccaataccgaaccgaattgcctggatttgtatggaagctcctgttttcatcgtgatgttcctattatggaacggctcggaaaggcagtttgaaacggtgccgttgctaatattcctgttcttcgaactgcattatttccagcgggcttttatcttccctctgctgataaaaggcaatagcaagatgccggcgggaattatgctgatggggattactttcaacatattgaatggatatatgcaaggagaatggattttccacctggccccgcaagatatgtacaccgaaagctggctgtacagtccgcaattcatcatcgggacaatccttttcttcaccggcatggggatcaatattcattcggaccatatcgtccgccatctgcgcaaaccgggcgacacaaagcattacctgcccaaaggaggaatgttcaactatgtaacttcggctaattatttcggcgaaatagtggaatggtgcggttttgccatcctgacctggagcgcaagcggagccgtattcgcctggtggacctttgccaatctggtgcctcgcgccaacaccatctatcataaatataaagctatgtttggaaacgaactgggaaaccggaaacgggtgatcccttttatatattgaaagataaacacatacagttatggaaaaagaatctgttctattcacacctgcaaagatcgggccgttgaccttgcggaaccggacaatacgggcggcagcattcgaaagcatgtgtccgggaaacgcgccttccgatatgttgtacgactaccacacatcagtggcagccggcggaatcgggatgacgacattagcttatgcggccgtcacccagagcggactttcctttgaaaggcaattgtggatgcggccggagatcattccgggattaagacgtatcaccgatgcgatccataaagaaggtgcagccgcttccgtacaactcggacattgcgggaacatgtctcataaaaatatctgcggatgcacgcctatatcggcatccagcggtttcaatatctactcccctacgcttgtccggggcatgaaaccctccgagatcgtagcaatctccaaagcattcggccaggccgtgcatctggcacgcgaagccggcatggatgcagtcgagatacatgccggacacggctacctgatcagccagtttctctctccttacaccaaccaccggaaagacgaatatggcggcagcctgcaaaaccggatgcgtttcatgaaaatgtgcatggacgaggtgatgaaagctgccggttcggatatggccgtgctggtcaaggtgaatatgcgcgacggattcaaaggcggaatggaactcgacgaaacgatcgaagtagcccgcaccctgcaggacgaatgcggagcgcaggcgttggtgctgagcggcggtttcgtcagccgtgccccgatgtatgtgatgcgcggtgcgatgccgatccatacgatgacgcattatatgcctttcggttggctgccgatcggcgttaaaatggccggacgcctcatgatcccgtccgagccgttcaaagaggcttatttcctcgaagacgcgctgaagttcagggctgcattgaaaatgccgcttgtgtatgtaggcggactgatctcgcgcgagaagatagacgaagtcctgggcgacggtttcgagtttgtcagcatggcacgcgccttgctgaacgacccttcattcgtcaataagatgaaggaagacgagcatgcccgttgcgactgcggacacagcaactattgcatcgcccgcatgtattccatcgaaatggcttgccacaaacatattcagaacttacccaaaagtatcatcaaagaaatagaaaaactggaatataagtaatggaaaaaggattagccatcataaccggtgccgacggaggcatgggacaagtcatcacgacagcgctcgcaaaagagggctatccggtgatcatggcttgtctcaacccgcagaaagcaacccttgtttgcgaacggatcaaaaacgagaccggaaacacgcagatagaagtacgccctgtcaacctcgcatctctgtcggccgttaacaccttcaccgcccgattgttgaaagaaggccgccctgtcagccgtttggtaaacaatgccggaatcctgaccactccggtacgcagaaccgaggatgggctggaaacaatcgtaagcgtcaactacgtagcgccttacatgctcacccggcaaatattgccgctgatgcaacacggttgccgtatcgtcaacacggtatcttgtacatatgccatcggtaagatcggtcccgacttctttgagaaaggaaagagcggacgtttctcccgcatcccggtctacggaaataccaagttggctttattgctgttcacacaggaacttgccggacggatccgggaaaaaggaattacggtaaacgcttcggatccgggaatcgtcagcaccaatatgatcacgatgaaagcctggttcgacccgctgaccgacatcttcttccgcccgtttatcaaaacgccggcacaaggagccgctacagccatccatctcgccctatcggatgaaccaaaagagaaaagcggttgttgttatgccaattgcaaagagacaaaagttccggaacgcatcctgcatcatattcagcaaaaacaactctgggacgacacggaaattttgctcagacaaaagggattccatttttgaaccggcatgcctttttagttccatgccgacgaaacttttgttccatgcccatggaattttagtttcatgcctatggaactaaaatttcatgcagacaagattttgcagatataaatataaatcgtacctttgcaccgcttttaacccccgtacgtgtgatgggaaattagaaagcataaacatctaattttgagtaacacaaaaattaaaaaagaatgaagacatttcaattagaaggaaagtcaagagaagtagcagctacttctgcagaccagaagagagctttgaaagctatgcgtaagaacaacgaaatccctgctgtactgtacggcggtgaaaaagtaactcacttcatcattacaaaagacagcgttcgtaacctggtttacactcctgaaatctttgtcgtagaattgactattgacggcaaaaagacgatggctatcgtaaaagacatccagttccagcctgtaacagatgctatcatgcacatggacttcatggaagtatctgataagaaaccggttgtaatggaagttccggttgttctggaaggtcacgctgaaggtgttaaagccggtggtaagttgagcctgcagatgagaaagctgaaagtaaaagcgatctacactgcgatccccgaaaaattatttatcaatgttgaccacctgggcttaggaaagactatgcaggttggttcattgcacttcgaaggtcttgaactgatgaacgctaagaacgcagttgtttgcgccgttcagttgactcgtgccgctcgtggtgctcaggcaaaagcacaataatcagtattgtatcaaataatcgaaggggaggatattctaacggagtattcttccctttgctatatataagatacctgatgtacatcccaaaataaacagacaatgaaatatctgataacaggacttggtaatatcggctccgaatacttaggaacccgccataatgtcggattccgtgtggtaaacgcactggcggaagatgcaggcgttccttttacagaagaacgttatggcgcaattgcccggatgcgtgtcaagaactgtgagctgattctactgaagccgaatacattcatgaacctgagcggcaatgccgtccgctactggttgcagaaagaaaatatcccggtagaaaacctgctggtcgtggtagacgacctcgcactcccgttcgggacactccgcctcaaacccaaaggcagtgatgccgggcataacggcttgaagaacatccagcaattgttaggcacacaagaatacagccgcctccgctttggtatcggcagcgacttcccgcgtggcggacagatcaactatgtgctgggcaaatttccgccggaagaactccagcttatgccggagaaaatgaaacgggccgtagaaatcatcaagagtttctgcctggccggagtacagaatacgatgaacctatacaataataaataaatggacaatgaacaatggacaattgacaattaaagagagttgtcagttttccaattgtcaattgtcaattatcaattgtcaattattatgaacgaagtccgtatagataaatggatgtgggctacccgcatattcaaaacacgtacgatagccgccgaggcctgcaagaaaggccggatcatgataaacggcgtcacgataaaaccttcccgcatgatcaaagtcggggaagtgatacaggtacgcaaaccgcctatcacctactcattcaaagtgctcgacttaacggagcaccgcatgggagccaaactggtgccgggctttttggaaaacgtaacgacacccgaccagtatgaaattctggaaatgaaccgcatctccggttttgtagaccgcgcacgcggcttaggccgtccgaccaaaaaggaccgccgcgaactggaacagttcactgatccgggaatggccggtgacggtttcgacttcgactttgatttcggagatccggacgaggatgaataaattacagcaatggtttcaattccttctcaaatatatccttgctgacaatacggtaatgaggcgagtaggtgtcttcaaagactttgctgtgatgtccgacatactctcccctgtccaaccgttcttcaatctctttccggtcggcttcgtaaccaggtaaagccagttccatggaacggataatcgcctcgatctgaagccactcctttttccattcggcaaccgttactggctgaataccgtttacactgcggacaaaggcatcgaaaaaggtcgcatacggaatctgtccggttttgataaccgagaggttcacccgaagaaaattaccttcccagccggtcggctcggcaatatcgccggaacattccgtgtaggaagcaagttcacggcgcagataaataccggcagccgccgtatcgccgatgatatgcccggggccgaacttatcctgaaagaaattcttatacaggtctttcaatgtcgatttcggataagtctgcatctgacgggatacggcggcacgtaccgccgtctcaaaatccggcttctccgccgccgaaagagagaggcagagaagcaggaataaagtcataacgctatacgtacgcatcgttctacttgattacttccttcagtttctgatgcaaatcctcaccggttatattcttggcgataatcacgccgtccgggtccaacaagacattggccggaatgccacgcacaccgtagagcgccggtatttcggaatcccaatatttcaagtcggaaagatgtgtccaagtcaggttatcatcggcaatcgctttcagccatttgcttttatccttatctaaggaaatcccgataatggtgaagttcttatccttatattcgttaaaagccttgacgacattcggattctcgcgacggcagggcggacaccaggatgcccagaaatccaacaagacatatttgccccggaaatcggaaagcgataccgaaacgcctgccgtatcaggtaaagaaaactccggtgcggtcttaccaatctgcacattttcaagctgcttgataatgccatccaaatctttcacatacgggcaatcggccaatgccggcgaaatccgggcgcgggtcgccttcaagtcgtccagcggcaattgataggtaaaatagcgatagaggtagaaggcggcggcaggtgaatccggatatttggcaatcaggctatcaatatcgtagccatcctcaaaaaccttgtcggcattctcctgaaagacggcgtttaccgatgagttctgtaccgtaatcgtttctccgtcatcaccgatctttacatccatagtcgtattctcgacaaagagctgaaccggataatccatattttcggttgccagaccaaacaataacggctgttctacttctcctttaaacgtgaacttcccgtctttcacctcggctgtgtcgacatcaaaaaacattttattccggaatgacttgaggtagattttaccttccggcatgccggctacctcaccgtttatcacataacctttcggcgtttcctggcaacttgccaacgtcagggccaccagggctgttactgctaatcgtttcattttatctgtttatttattatttaacttgcggatgatgatatcttcctttcttcagcgtctctttgccatactcgattgcccggacgggacaacggtggatgcaagcgacacactgcacacaggtattcgaccagaccggcttcccttcctgtaaggtaatcgttccggtaggacaaatgcgttcacacaatccgcaggaaatacaggcatctgtcgcccggaacgagtttctcccgattgccaaatgggcaaaaagaggatagacaagccggcttttcaggaaaggcatgcttccttgcgtatataaaccggaatcttgcccactacagatcgcttcaatgatttccccaacccgtgcaggcgcttcctgcaacttctgttcttccacctctttactgtccacatcgaaaccgggcagcaggatatagttgttcggcataatcacggaataggcggcagtaagcggtaaacgccgtttgcgcaaggctttctccaaaagctgatctgcatatccgcattcatctccacaagtagaaacggaatagacgggctgtccggcatatccttccaacaccaaccgggagataaaacgggccatcggcaccgctggtccccaggaatgcacaggatagacaaacagtatcttttcatcccggcggagcggataaaccaagtctttgtcctccttacgcaattcatctgcaatcggaatcaacggttctcctaatgcctctcccaaggcttttgccacccaaagcgaattacctgttcctgtaaagtaaaatatcatattcctattttgtttcaaatgcaaaagtaggtataattcaagaatatatcttaccctttccttattaagaaacctaaataacagtgttatgactacaatggaattaaatttaggctcacccgctaatcattggggataaataaattcattatttgacaaaagagagcctgccgcaggggggacttattgtataaaacgcatttttcaagtctaaaagacatccaaaacaaaacaaatgttaatccactttttgggcctcaaaaaaggactttttcctctttttcgagcgttttccgccattacgaccgtcctaatctccattacgaccgtgctaatgtgtagtgcactcggcacctcgcgaagattagaacggtcgtaatggcgatttggacggtcgtaattgaaaagaggaccgttataaaggcaaaaaggcccctgaatttccttgggatatttggaacgccgtccgttttattttcaaatattcgattctccgggagttaagctttatcactttgctgccatatccagttctcggctatcaaattgcacgttttttggaatgggctcggcacctcattttatctattgtcatccgatcaggttaaaaccatgaaaaaagtcaatccaaaatcgatcagaatttcggacgaaatagaaaaacggctaaaaagggagttattgtaatcttcaggtttgcggaagattcgaaacttgccagaaactgatctgcatcacctacctcatccttgtgtttatctccaatgattatcgggtgagaggataatatcgggtgaacctccatttccccataaaacaaagagggcgagttgccccgccctaaatgttttcacaacggaataatccttattgtgatttgcttcaatttatctttgtagaggcaaagatattcatattttcgtcaaaaacaagtgcttatttgtttttattgtttatttttgaaaaaaaatacaaataaacaccatgaaaaaaatattaggactggatttagggacaaatagtataggatgggcattggtaaacgaggccgaaaacaaggaagagacatcttcaattattaaactaggcgtcaggattatccattatgataactttgttaacacaaaaacaggtaaagaagtaaaaggggaccctgttgattcttttaagagtggaaagggtatttcgcctaatgctggacgaactcaaaaaaggagtatgcaccgaaaattacaacgctacaaacttaggcgtaaaactcttgttgaattattgacaaaatatggttttattacagatactacagtctgttccgaaaatgggaatagaactacttttcaaacttatcgactacgttcgaaagcgactacagacaaaataactttagaggaattctcccgtgttcttttgatgataaataaaaagcgaggatataaaagcagtcgaaaagttcaatcaaatgatgaaggacagctaatagacagtatgtctgttgctatacaattatatgaaaatgagcagactcccggccagttctctctatctttattaaggcaaggcaagaaacatcttccagcgttttatcgttctgatttacaatcagaattaaatagaatatggaattttcagagacaattttatcctgatattctgacggacgaatttagggaacaaattaaagcaaagggtaaattagatacttctaaaatatttttaggcaaatataaaatctatactgcagataataaagggagagataagcaattacagacctatcaatggcgttcagaggcactaagcaagcaactttcattagaagaaattgcatttgtaatcagtgatgtaaatggagcaatccataattcaagcggatatttaggcgacatcagcgacagaagtaaagagttatatttcaacaaacaaaccgttggacaatatctaatggcagaactggacaagaaccctaattacagcctaaaaaataaagtattctatcgccaggattatttagatgaatttgaaaaactgtgggaaacacaagcattgtatcatccggagcttactcctgaaataaaacaggaaataagggatatcatcatcttctatcaacgtcctttgaaaagtaaaaaaggattgattgatttttgcgaattggaaagtaaacagatagaagtgacttgtgacggaaaaaagaaattaaaaacagtcgggctccgggtatgtcccaaatcgtctcctttattccaggagtttaaaatatggcaagtgctcaacaatatccaagtatcggaaggaaaaaatcacaaacgttttctcgagcaagaggagaaagaacggctttttgctgagttgaactggaaggaaaaattaagcaaaactgaagtttcacaattactatatgtaaaaccgacaggtatagatttaaattttaaagaaatagaaggtaatcggacacaagctgcattactcaatatttacctgaagatcatcgaagcaagcgggcatgacatagctaatctatctaaagcgtccatgcctgaagtaataaaaattgtaaaaacaatcttcaatggtttaggatacaatacggatattctatctttcgattcctcattagagggtaaagaattcgaagagcaacccatgtacagactatggcatttgctttattcatttgaaggagatgagtccaaaaccggaaacgaaaaattagtaaataaactgaccgaactatacggattcgagaaagaatatgccattttacttgccaatataactttccaatctgattacggaagtttaagtactaaagccatgcgcaaaatattaccattcatgaaatccggacatgaatatagtttagcttgcgaatatgctggatatcgtcattccaaaagatcattgacaaaagaagaattggataaaaaagtctatatcgataagctatccctcctgcctcgcaatagtttacgaaatcctgttgtagaaaagattctcaatcaaatgattaatgttgtcaactctattgtagacacttatggaaagccggatgaaattcgcatcgaattagcgagagaactgaaaaagagtgccaaagagcgggaagatatgacaaacaacattaggaaaacgacaaatgagcacgaagaatataaagttattttacaaaaggaatttgggcttgcaaatgtaagccgcaatgatattatacgctataaattatatctggaattaaaagacaatggctataaaacattgtattcaaacacttatattcctcgtgaagatctttttaccaaaaagttcgatattgaacatatcattccacaagccaaattatttgacgattcattttccaataaaacacttgaaagtcgtagtattaatatcgccaaaagtaatgccaccgcttatgattttgtaaaaaacaaatatagcgaacaagagctgtctgattatgtggaaagaattcatatattattcaaaaatggttctatcagcaaagccaaacatgacaaattacttatggaagaagccaacattccaagtggattcattgaaagagatttacgggattcacaatatattgcgaagaaagcgcgtgaaatattggaagatttagtaaagtttgtcgtacccactacaggctctattacaaatcggctgcgtgaagattggcagttagtgaatgtcatgcaagaattaaattgggagaaatataacaaacagggtctcactgaaatttatgaagataaagacggtcggaaaatacgccgcatcaaagactggacaaaacgtaatgaccaccgacaccatgcaatggatgccttgactattgcttttacgaaacaaagcttcattcaatatttaaataatatgaatgccagaagtgacaagtcagggagcatctacggtattgaacaaaaagaattatatagagacgaacataataagctaagattcaatccgccaatgccattaaatgtgtttagagcagaagccaaacggcagttggaaaacattctggtttcaattaaagcaaaaaataaagttgtaacgcaaaacaccaataaatcgaagaaaaagaatggcttaaatacaaaagtacagctcactccacgcggtcagttacataatgaaaccatatatggaagcataaagcaatatgttaccaaaatggaaaaagtaggttcaggctttgatgccgaaaaagtttcacaagtagccaacaaagaatatcgagaagctttattgcatcgtttaacccttttcggtaatgatcccaagaaagcttttacggggaaaaacagtttggataaaaatccaatctatttaaatgaacttcagacaaggcaagttccaacaacgataaagacagtttcattggaaactatttatacgattcgtaaagagatttctccagatttaaaaatagagaaagttattgacgttcaaattcgtcgaattttagaggcgcgattaaaagaatatcaggggaatgcgaaacaagcattttctaatttggaagagaatcctatttggctaaataaagaaaagaatattgctattaaacgagtaacaataagcggtatcagtaatgctacctctttgcatgacaaacgagatcataatgggaatctgattcttgacgaaaaaggtcggaaacagccggttgactttgtaagtacaagcaataatcaccacgtagctatttatagagatgcaaacgataatctacaagaaaatataatttctttctttgaagcgacaacccgcgcatctttaggattaccaattgtggataaagaatataaaaaatcagaagggtggacattcctgttttccatgaaacaaaatgaatattttgtctttccaaacaaagaaacaggttttgatccaagcgaaatagacttgacggatcctgataattatgcacgaattagtcctaatttgttcagggtacaaaaaattgcgacgaaagattatactttcagacatcatttggaaacaactgtaaacacaacaaaagaattacaaggtttaacatggttaaggatatcttcattaaacaatcttgataagttagcaaaggtccgaataaaccatattggccaaattatttcagtaggagagtattaaaatacaaattatttcaatgataataaggaataaaaatctattaatattgatacaaacatgataaaaagcacattatacttcggaaatccagcatatctatcattgagaaataatcaattgataataaaacttccggaagtagagaaaaatgatactttaccggatagtttcaagagagacacggtcagaagtaagcctatagaagatatcggagttgttgttttagaccataagcagattacaataacttccggggtattggaggctcttcttgaaaacaactgtgctattattacatgcgactgcaaaagtatgccggttggacttatgctgcctttatgtggaaatacgactcaaaatgaacgttttcaggatcaattggatgcatctttaccgttgaaaaaacaactttggcaacaaacggttaagatgaagattgagaatcaagcaacagtcttatctaaaagtcgaaattgtggaattaagaacatgcgtgtatgggctaatgatgtccgaagtggcgacccggataatttagaagcacgtgccgcagcctattactggaaaaatctttttcctaagattgagggttttaccagagatagagaaggtattcctcccaataatttattaaactacggatatgccattttgcgtgcagtggttgccagaggacttgtttcaagcggtttacttccaacgttaggcatccatcatcataatcgctacaatgcctattgtttggctgatgatataatggagccttatcgtccgtatgttgatgaattaatagtcagcattataaacagtaattgtgacattgcagatctatcaaaagaaataaaagcaaagttattaacgatcccgactttggaagtttctgtgaacgggaaacgtagtcctctcatggttgctgtaagtcaaacgacagcttcattatacaaatgttttagtggtgaacttcgccacatagcatatccggaaatgtaatatgaatagatttagtgaatatcgtattatgtgggttcttgtattttttgatcttccgacagacacaaaaaaagaaaagaaagcctatgctgatttccgaaagaatttgcaaaaggacggttttactatgttccaattctccatctacgttcgtcattgtgcaagcgcagaaaatgcagatgtacacataaaaagagttaaatcctttcttccccccaatggtcaagtcggcattctatgcataacagataagcaatttggcaacatagaactattcttcggtaaaaaagagcaaccaataaatactccaggtcagcaacttgaacttttttaaaataagaaatcctgccttacaagcaggatttcttactgaacaacaactacttttttattttctaattgcaaacattaagtactgaaccacaatcaattgcacacaatcagttgttttcagtatgtcaaagataatagattgaaagcaaatcacaacggttaaaaggtatcttgtcttgcctccattgttgttttcagtatgtcaaagataatagattgaaagcaaatcacaactcttaacttgttcttcgctgccgctaatgtgttgttttcagtatgtcaaagataatagattgaaagcaaatcacaactggtcggttgtgctcctgattacgcacgcggttg

SEQ ID NO: 2383 - DNA, 15802 bp, synthetic construct
  misc_feature 1..15802: note = Synthetic
  source 1..15802: mol_type = other DNA
agctataccttctgacgaataccaagtaactactatggtggattttggtaccaaagttttaggtactcaaaatgcttctataaaaagtttgtcagaatttaaagatcaaatagccaatgcgaggacttttagttttttgcatgaaatagaatatttattagatgctggtttgatcaaaggaggagatttgagcaatgcaattgtatatgtcgataaggaaattactccagagaccaaagaaaaattgaccaaagcatttaataaagacgatgtttctatacgtcccaacggtgttttggacaacatcacacttcattatccaaatgaagcagcaagacacaaattgttagatgtagttggggatttggctttgataggaactagattgaaagctaaaatcatcgccaataaaccagggcatcaaatcaacacaaacttcgcaaagaaattgagcaaacaaatcgctatagcaaaaagaaaaaatgtaccggaatttgatttgaccaaagagccgatttacgatatcaatgatatcatcaagattcttccacatcgctatccatttttattgttggataaagtgattgaaagaactgatacaactttggtcggagtcaaaaacgttaccatgaacgagccgttcttcgttgggcatttcccacaagaaccagtaatgccaggagttttacaaattgaagctatggcgcaactgggaggaattttggttttaggtgaaatcgatgatccggaagattattcgacttatttcatgaaaattgaaaatgttaagttcaaaaggaaagttattccaggcgatacattgatcttaaaagtagagttgatacaaccgataagaagaggcatagtacatatgagaggatatggatatgtgaatgataccatcgctgtagaagcagaaatgatggcattggtaaccaaagataaaatttaatatgaagaccatgaagcatagtttggcatatatccatcctgaagcaaaaattgcagattcggcaattatagaaccctttagttctatttctgccaacgttgaaatcgatgaaggtacttgggtaggtccaaatgttacaataatggagggagcgcgaattggtaaaaactgtaaaatttttccaggtactgtgatatcggccgaacctcaagatttaaaatacgaaggagaagagactctgacttttataggtgataataccgtcataagagaatgtgtaactgtaaataaaggtaccaatgctttgggttatacgaaaattggagacaattgtttagtcatggcaacggctcatatcgcacatgattgcgtcattggaaacaatgttattttggtcaatggtgtaggtttggcaggacatatagaagttggtgattatgcctttgttggaggaatgagcgcagtgcatcaattcacaaaaatcggagaacattctttcatagccggtggttcacatgtgagaaaagatgttccgccttttgtaaaagcagcgagaaatccattgtcttatgctggaattaattcgataggactgaggagaagaggatttgaatcggatgaaataatggagttgcaaaatatctaccgaattttattccaaaaatcaaaaaacgtttctcaagcgttgagaatcattgaagcagaatttaaagctacccctgaaagagaccaaatcattcaattcattcaaagtagtaagagaggtgtgatgaaaggctatactaccagaggagaagtttaataatcaatataataaaaattaatggcaactacagcagatattagaaaaggcttatgtatcaattggaacaatgatacttggaaaatagttgattttcaacacgtaaagccaggaaaaggaccagcctttgttagaacaaaattgaaaagtatttcaagtggaaaagtagtggacaatacatttcctgctggacataaaatcgatgacgttagagtagaaactcgtcaatatcaatatttatacgatgacgaaaatggatttcacttcatgaataatgacgatttcactcaagtgtatttaaataaaaatatgattgaaaatccacagttcatgaaagcaggtgatgatgtgacaattatgtttagagcagaagacgaaactcctttgtcagcagaattgccacaattcgtaatcatggaaatcacttatacagaaccaggaatcaaaggtgatacagctacaaatgcaactaagccagcgactacagaaacaggtgctgaaattagagttccattgtttatcaatgaaggcgatagagtcaaagtaaatacagaagatggctcttatatggaaagagtaaaagactaaataaaataaaatctatacaacctaagccgtttcatcccttgaaacggcttcatttattttttgagaaaatactatgatcgatcaaatgatacaattccaagtgtttttgtattaaatcaattaaacctaaatttgtaacagttaacttattaaaagatgaaaaaatcaattataacaggtataggacattatgtgcctgaacaagtcgttaccaatgacgatttgtctaaagtgatggataccaatgatgaatggatcaccgaaagaacaggtatcaaagaaagaagacatctcggaagaaattcaggaataaatacttcagatttaggtacaaaagctgcccaaatggcaattgaaaatgctggcctaacagcaagagatattgattttatcatctttgccactctaagtccagattatttctttcctggttgtggagttattttgcagaaaaatttaggatgcgataccataggtgcgatagatatacgtaaccaatgttcaggattcatttatgccttgtcaaccgcaaatgcatatataaaatcaggcatgtaccaaaatatattggtcgtaggtgcggaaaatcattctttcggattggacatgaccaccagaggacgtggagtttcagtgatatttggcgatggtgcaggtgctgttgtggtttctgctactgatgaagaaaatagaggaattatctcaaccaatatgcatagcgaaggtgaatatgcagaagaattggcggttttgtatccagggactaaatatggttgggcagacgaagctttaaaagaagatagtcaaatcggtcccgaacaaatttatcctcatatgaatgggaatttcgtgtttaagcatgcagtgacgcgtttccctgaatccatcaaagaagcattcgaagatgctggtgaaaatcttgaagatttgaaattattcattcctcaccaagccaatctaagaattagtcaatttgtacaaagacagttaggattgagcgatgaaaaggtttacaacaatattcaaaaatacggaaataccactgctgcatctattccaatcgcactaagcgaagcttatcaagaaggaaaaatacaaaaaggagatttgatatgtatgaccgcatttggaagtggattcacttggggaagtgtattgatgcgatggtaaaccaaagcatagttgcaaatatcattcagactaattcctgaaattcaaaaaatagaattacatttgcaacctcaaacagagaggtggccgagcggtcgaaggcgcacgcctggaacgcgtgtatacggaaacgtatcgagggttcgaatcccttcctctctgcagaaattataaggcacagtttggaactgtgcttttttttgtaggtaagggcggccaaatgaattaaattttgagcttgtgtagtttaaattaagaccttttacatcggatgattttttatgtattgcaaatttattctctataatacaaactattataactcccttctgtttaattgttaagtttattgaaatcatgtagttatgtatatttgtgaattattaggctgaattaggaggttcttataaacaatcaaatatgacaccgaagcaacaagaaagaattaaaaataagatcaagaaaattaaaactgcactagctgctgacaaaagaaattggggtggtcaataccatgatggaagtggactgaggtacttgccgccacagttctatattcaacttgaagacttctccggtgggcttcgttacttcaattggtttaataaaaattttccggatgatagtggctttccagatttcttgtttgagtggacaattatactttttaagaccggcagactgaaagaggcggagaaaaaagcatttgatactttttgtagtaacacttacttatttgataaattttttgggagaaaattgactaaaattgaaaagtgggaaggttcaaatcttcaaactttggactttgcagaaaatcatttttcgtacaatagcaggcaagacaatttagctgacttttcagtgtggttagacgacttttcaacttcagaaaaattcctctatttaagcaatcggtttctcgatatacaaatacaattgaaaacaataaaagacaaggaaacaagattttatttaattcaacaagaaagacaattgagaggagaactataacgaaggactagaagataacgcagtgacttaaccgaaatctagcccagagaacttagcgaagccttctcatcgactaaaaggggataaattttcccattcaaaaatattctctattttttttcggatttttatcttcattattcaaatgaaatgttgatcaaacatttttctatttaaatttttaagaaattcaatataaattttatctatttgataagatctcattttgttattaagcttttaattctatagtatttaattctccttaaatccattcacaaaatgttttccacaaattgaaaaatttaacggaatttagacagaatatggcgcttgtggtgtttaattttgcaatctatgtatgcactgatcgattgtaataatttttacgccagttgtgaacgggtcttcaaccctgaattgataggaaaaccagtggtggtgctttctaataacgatggatgtgtagttgcacgttcgagtgaagccaaaaaattgggcattccgatgggcgctcctgcgtttaaatttgaaccactttttcgtcaacaccatgtggaagtattttcatccaattatgcgttgtatgccgatatgagcaatcgagtaatgaatattctgaaaaagtttaatccagatgtcgaaatttattcaatcgatgaagcctttttgtatttcaaaggttttgatcgattcgatttggtgcaatatgcaagagagattaaacaagaaatttataaaatcactaaaataccagtttgtataggaattgctccaaccaaaactttggcaaaagtggccaataaaatttcaaaagatttctcaaattaccacgatggtgtttatgcaatagataacgaatacaaaagagagaaagctttgaaatggctcaaagtcggtgacgtttggggattaggtcctcgtttgtcaaaaagactgtcttatattggttgcaatacagcttatgagtttactcgtttgagcgatcaatacattcgtaggaacttttcgatagtcgaattgcgtttgaaaaaagagctgttgggcgaaagtgttttagaattgaatcaaatcactcgtaaaaaaagtattgctacaacaagaagcttcgaaggaacaataaatgattatgaagaattgagagaaagagtttcaacttttgcggtttcttgtgcagaaaaattgagaaaagaaaaatcgaaatgcaatataattacagtttttatcaagaccaatcgatttgataccgtaaatccgtatttttctcaagcattgagtacgactttgccgtatgacagtaattcgagtatagttttatccaaaaaagcttcctttttgttgagtcaattggtttcatccaaagaaaatatgccttcttataaaaaagctggagtcgtagtttcagccataacaccagatgatcagacacaactcaatttgttttatgaagattctgaaaaacacaaagctttgatgaacgttatggatgaattaaacgcttattatggtggacataaattggttttgggttcccaagatttgaaacgtaaatggaaaatgaaacagcaaaggctttcgcctgcttatacaactaagattaatgatattttaacagtcaattgaaatggtacagtttttaaaattacctaagttttcgagcgaattgatcaatattcctttgaaaaaagagggagaaaaaaggtttgttcaatttttcggtgatgtagctgccggatttccatcgccagcagcagattttgaagaaaacaatatttccttggatgaaattttgatacaatacccagaagctacgtatctcaatagagtaggaggtgatagtatgtcgcccgaatacatcaaaggggatttgctgattgtacgatcggatttagatccacaacacaatgatgatattgtagtttctgtgaatagttccgaatatacctttaagcgattcgataaaataaacaatcgtttgatttctctaaatccaaagtatgacaactgcatacaactggataaagaggatgttgtgattgtattaggcgttgtgactgctatggtgaggcagaagaggaaattttaaaaacttattggctcgatttattcttcccatccccatggctttttatcaaattcaattggatttgtcaaatcaaattcaactgtgaaaactctgtcagatccaattcttcttaaattataagaaaaagaagtttcgtcaatggtcatccaccaaacattgtgacatgcataatcaatcatagcacaagtttcttgatctgctgggaacatttgtaaatcagcgtgtccaacattggtagaagttccaccgtacatagttacttcttcatcgcttccatcggggtttctatggtcgtgtttgagttcaattctattgttttcaaaagtaagtatccaagttctggattgatcttcgcctacataaaaaggaattttgatttgattttcttcacaagataaaacttgcatcacaagacgttcacctgtaaatccatcaccttcttgtgcacccgcagttatcactccttcgtaagcttttccacaatgtttttcgatttcctttttgaaatctaaatttggataatttgccaaatcttcagcttctgtaatttctacttgagaatcaacagaagtttccgcaggaccgatgttttgttcatcttttgattgacaactaaaaacgaagaaagcgactaataaggtgtaaaaagtatttttcataatgtgaattgattaaaaaaaagccctgataaataatcatcaaggctcaaatatagcatttattattttaaattatttaagtgtacattccaccatccacgcttaaaacttgtcctgtaatataatccgataagtcagaagctaagaaaaggcaagcgttagcgatgtcttctggagttccaccacgtttcagaggaatgctatttctccattcttcaacaactttctcatccaatttttcggtcatctcagtttctataaatccaggagcaataacgttgcaacggatattcctcgaacctaattcaagagctacagattttgtaagtccgataagtccagctttggaagcagcataattggcttgtcctgcatttcctcttcttcctacaatagaactcatattgataatcgaaccttttctttgtttcatcataggtcgggtaaccgctttggtcaaattgaaagctgaattgagattgactcttatcacttcttcataatcttcaatgctcattctcatgatcaaattgtcacgagttattccagcattgttgactacgatatcgattgctccaaattcttctaaaacatcatccaccaatttttgtgcagcttcaaagtcagctgcatcggactgatagcctttggctttaattcctaaagctgaaagctcctcttccaaagttttagctctttcaactgatgaagcaaatgtaaatgcaatattgcatccgtttttagcaaaaacttcagctattcctttaccaattcctcgagtagcaccggtgatgatcgcggtttttccttttaaaagttccatacattttaagtttaaatgctaaaatagtaaattcatacaatgaaaatcaaatttgaataatgaatattcataacagaacaaaaaacctatataaaaagctattgaaacacgaataatagactgaattcaccgtgttgaaaatcaataggaattgtgattgacttgttgggtttgggtcaatatataattcaaaattttatttttctcttttggtgagaaccattctctacttttgtcctttctattccaagtcaattggcgttttgaatatctgcgtgtattttttttgatttcctcaatggcagtttccaaatctgtttttccttcaaagaaattaaataattctttataaccaactgtttgtaaactgtttaaatgtttgtgaggaaacaattccatggcttcttttaaaagaccttcattcatcatcacatcgactcttcgattgattctctcgtaaatttcctctctgggtaaatccaaagaaattttcacgattttaaaatctcttttggttttattttgaattctaaaagaagaaaaaggttttccactacttctgtaaacctcaagtgctctgatgattcgaataggattctttaaatcgacttcttcataataaactggatcaacttcttctaattcttgttgaagtttttccaagccaaattctttccattctgaatttaatttttcacgaatgctcgaatcgacttcaggaaattcatccaaaccttcagtaacagctttttcgtataagccagaaccacctaccatgatgagtgtatcgtgagttttgaacaattcatcaatttttttcaaagcatctctttcaaagtcgcccaccgaataattatcaaaaatactcagatgttgaatgaagtgatgaggaactttatcgagttctttttgtgaaggtacagcagttccaattttcatttccttataaaattgtcgagaatcacatgagatgatttctgtagaaagctgttctgctaaaaaaatagcaagttttgtttttccgatggcagtagggcctgatatcgatattaaatattttttattgtgcattatgaattcgatgaattaactacaatagtagtttcaaatttttctgattttttccaattgtaatagtctattaattcttttttgaaatatttcaaagcaaagattacgactacagcgtcatccaatataagtccagggattaagtcaatcggcgaaattacataaattaaaaccaaagttccaatcaataagttttttcttttaggtttatattttccattgaaccaatcccaaagcattttgaaaaaaactttgatagattctatagaagataactcatcggtttttgcttgactaccgattatattagctacccttaaaaatttagtagtcttcatattattgatattagttttagcattaagtcaaaaaacattccaatttgcaagttgctgtattttatgtggttaagtaaatgaattggatgtgtaattatgtttgatttgctaaaaacagtgtaaaagtataaaatatattaatcatattcaacgcaaagatttagctaagaataattataagatcgatagagaatacaataatatattttttatagaataatacgtaaaagatataaaaactaaaatttatgacttgtggattgatttaataaagttgctgcgatttaaattcaacaagtaataataaaaaagccccgaagatagtcgaggcgctaaatgttttcacaacggaataatccttattgtgaattgctttcaaattgtgggctaaatttaaaaatattctttaaattaaacaaattttcaaaagttaaaatttaaatgacgtattttgacgtattgaatgtttattattgaaatttattaaaaattaaggcatgagtaagaaaacaattttaggactggatttagggacaacttctatcgggtttgcacatgtaatagaaggtgaggatatacaacaatcagaaattaaacagattggagtaagggtggtgccactaactgtggatgaagaacaaaactttgagaaaggtagaagtattactacgaatgctgagcgtacattgaaaagaggtgctcgtagaaacttagaccgctatcaagacagaagagaaaatttaattgaagttttacaaaaggcgaaaataatagataaggaaacacctcttgcagaggatggaaaaaacactacgcatcaaacttgggcattacgtgcgaaagcagctgttgaaaaaattgaaaaagatgagttagctcgtgtgcttttagctatcaataaaaaacgtggttataaaagtagccgtaaagccaaaaatgaagatgaaggacagattattgatggaatggctatcgcaaaacgtctttatgaagagaacattacaccaggacaatttgtttttcagtgtttgatggaaggtaaaaaatctattcctgatttttatcgttcagatttacaagctgaatttgacaaagtatggaattttcaaaaacagttttatccagagattcttacagaccaattttatgaagaattaaaaggaaaaggacaaagggcaacttctgccgcattttggagtacttataaattcaatactgctgatataaaagacttggaagatagtttgaaaaatgaacaaactattaagttaaataaaagggaacaaaagagattacaatcatataaatggcgaagtgatgctatttctaaacaacttgataaagaagaagtggcttatgttctgacagagattaacaataatttgaatagctcgagtggttatttaggtgaaatttcagatcgtagtaaagaattatattttaaccaacaaaccgttggacaatatttgtatcaacagcttcaagaaaatcctcacacacgattaaaaaatcaggttttctatcgtcaagattatttagatgaatttgagaaaatttgggaagttcaatcaaagtatcaccctgaattaactgaagaacttaaaaccgaaatacgagacattattattttttatcaacgaaaattaaagtctcagaaaggtttgattagtttttgtgaatttgaaagtaaagaaattattgttgacggaaaaaagaaaacaattggcttaagagtggcaccaaagtcttctcctttatttcaagagtttaagatttggcaaaacttaaataatgttttgattcgtaaaaaaggaagcaaaaagagagttgctaaaaatgaaaatcaaacaagcattttcgaagatgaaaaagagatctttgagcttgacttagaagccaaacaacaaatttttgaagaacttaatttaaaaggtaatcttacagctaaaaaaataattgaactcttaggttacaagcctgctgattgggaaatgagctatagccagttagaagggaatagaactaatcaagcactttacaatgcctatttgaaaatattagaaatcgagggttatgacattaaagatattttaagggttaagtctaataaagatgaagtagagttggatgatttgaaggtttctgcttctgagattaaaaatatggttcgagatatttttaaagtattaggaattgacactgaaattcttgaatttgatgcggaattagatggtaaagactttgaaaaacaggcatcttaccaactatggcatttgttatattcttatgaagaagatgactcacacagtggaaatgaaaagttatatgagctattagaaaagaagtttggctttaaaagagaacacgcagaaattttagccaatgttgcattgcaagatgattatggtaatctgtcgaccaaagccatgaggaaaattattgttcatttgaaacaaggttttgcttatggaggaagaaaagatcgtccatttgaaccaagcgcctgtgaatatgcaggttaccgacattctaaacattcattgaccaaagaagaaattgcaagcagagaattagacgatactttagagctgttgaaaaagaacagtttaagaaatcctgtggtggagaaaattcttaatcaaatggtgaatgtggtaaatgccttgattgagaagaatagtaagagagatgaaaatgggaaaattgtagagtacttcaaatttgatgaaattcgtatcgaattggcacgtgaattaaagaaaaatgccaaagagcgagaggaaatgactagtggaattaacaaagcgaaatcagaaaatgacaaaataagagaaaggattagaaaagatttcccaaatgttccaaaccctacaagaaatgatatagttcgatataaattgtatcaagaattagcatttaatggttataaagatttatatactaactctaaggttgagtaccataaattatttagtaaagaatatgatattgaccatattattcctcaatctcgcttgtttgatgatagcttttcaaataaagttctagtgccaagacaggcaaaccttgataaaagtaaccaaaccgcttttgattatatgtcaactaaaggtgaacaagatttttcaacatacatttcaaatgttgaggctttatttaaagagaaagttatcactaaagccaaatatcaaaagttacttaaaaaaacaactgatattggtgacggatttatcgaaagagatttacgtgaaagccaatacattgctaaaaaagcaaaggaaatgttgttgaaaatcaccaaatcagtggtttcaacttctggaagtattacagacagattgcgtgaagattggggattaattaatgtgatgaaagaattaaatctaccgaaatatcgcgcacttggtctaactgaaatgcaagaacgtaaatttggtcaaaaagtcgaggtgattaaagattggaccaagcgaaatgatcaccgtcatcatgcgatggacgctctgacaatggcgtttacaaaacacaatcatattcaatacctcaattatttgaatgcccgaaagaatgaaaatcacaaattgcatggaaatataattgcgattgagattaaggaattgcacagagatgaagaaggtaaattacgatttaatttaccaatacctaatttccgacaagctgcaaaggaacacttagagaatgtattaatttctcataaagcaaaaaacaaggtcgttaccaaaaacaaaaatagaataaaaacaaaaaaaggtgagaagattaaaattgaattaactccaagagggcaattgcacaaggaaacggtgtatggaaaataccattattatgatagcaaagaagagaaagtgagtgcgaaatttgatttggaaacgatacaaaaagtttcaaatcctgtttataaacaagctttacttgaacgtttgtctgaaaatggaaatgatccaaagaaagctttttcaggtaaaaattcaccaagtagaaatcctatttatttgaatgaattaaaaacagaaactctaccagaaaaagtgaaattggtttggttggaagctgactattccattagaaaagatgtaactcctgaaaattttaaagatgaaaaatccatcaataaagtacttgatgagggcataagacgaatcttaaaagataggttaaaacaatttgatggtgatgcaaaattggccttctcagatttagagaaaaatccaatttggctgaacaaagaaaaaggaatttctatcaaacgtgtaagtataagtggtgtgaaaaatgcagagccactgcattataaaaaagatcattttggtaaagaaattttggatgatgaaggtaataagattccagttagctttgttagcactggaaataatcatcatgtagcaatttacaaagctccagttttagatagaaaaggtgagattgttttagatgaaaaagggcaaccaaaatatgttttacaagaaaatgtagtttctttttttgaagcagttgaacgagtaaaccaaggcttgcctattattgacaaaacatttaaccagcatttaggatggaaattcttatttactatgaaacaaaatgaaatgtttgttttcccaaatgaacaaacaggcttcaatcctgatgaaattgatttattggatccaaaaaacaagaaaattattagtccgaatttgtttagagtgcagacactttctattgtaaagtatggaaatagtactgtccgtgattttaaattcagacatcatctagaaagtacacttattgatgataaaagtttgcaaggaataacatacaatcagattaaaagtctttctccattagataaaattgttaaagtccgcatcgatcatctgggcgacattgtaagtgtaggagaatattaatattatttctaaaccatgctcaaacgaaccatttacatagggaatcctgcctatttgaagttgaaagacaatcaaatgcaaatcattgatcctcaatctcaggaattgttgggtaaggcaacgattgaggatatggggtttttggttttggacaattatcaaattacaatcagtcatcaactcattcttgctcttcaagccaacaatattgctatcataagttgtgatgcacaacatttaccttttggtctgatgttgccgatttatggacatgtcgagcattctgaacgattgaaagttcaaatgaatgtttcagaaccgcttagaaaacaactttggaaacaaacagtagaggcaaagattagtcaacaaatgttgcttttgaaaaagcttaaaaagcaatatgaacctatggttgaatatttgaatcaagtaaagtcgggcgatagtacaaatatggaaggaatagccgctcaattttattggaaacaaatgttcgagggatttattcgtgagagagagggcgatatacccaatgcttttttgaattatggatatgcaattttgaggagcttggtcgcacgggctttggtgagttcaggattgaatcctacaataggaatttttcatcgaaacaaatacaatccttattgtttagcagacgatatcatggagccttatcggccttatgtagatgaattggtgtttaaaatttatcatttacctacaagacctactcaaattagtagagagattaaagcagaattattgaaaattatgagtgctgatgtgatgatgatgcaaaaattaagaccaatgatggtcgctgtgagcacaacgacttcctctttgtataaatgttataaaggagaattgagagtgatacgatatccaatgatgacttaatataataaagatgctgacacatcatcgattaaatgcatatagaaccatgtgggtattagttttttttgatttaccaaccaatactaagaggcaaagagcagctgcaaatagctttagaaaaaaattgctgaaagatggttttactatgtttcaattttcgatttatttgcgtcattgtcccagtcgggaaaatgctgaagtacacattaaacgaaccaaaaataatttaccaaaattaggaaaagtcggcatattgatgataactgataagcagtttgggcaaatggaattgttctttgcacaaaaagaaactgatttaccagtcggtccacaacagttagaattgttttaatttaggaattaaaaacaaaagataaaaaagcaagtcttctaaataaagacttgcttttttaattctaagaattcgtttcaaacttactgatacaaagcgttcacaaattgaggttggaacgaatccggttaaaa

SEQ ID NO: 2384 - DNA, 15788 bp, synthetic construct
  misc_feature 1..15788: note = Synthetic
  source 1..15788: mol_type = other DNA
ctttggcctgttttttggtggcaacaaagagtattttctttcccgaacgggcaaaatttttcatcgcctcggcagcctcgtccagtttggtaattgttttgtgcaggtctataatgtggatgccgttacgttccataaatatgtacggagccatggcggggttccattttcttttaaggtgtccgaaatgcactccggcttccagtaattgatcaaaattagttcttgacatgatggtttattaatttcgtttacattcttttggggctcattcaatcgtccggtagttctcggcctgagccggaagtcctgaccatttagatactaaacgctactttttcatttatcgagcagtggtatcaaaatattaacgcttgctgaactggaatttcttccttgctttgggacgacccggttttttgcgttccacaatgcgggaatcgcgggtcataaacccttcggccttcaaagcaggcttatcttcgggattgattttaacaagggcgcgggaaatggccaggcgcaaagcctcggcttgtcctttgaaaccgcctcctttaaggcttacgttgatatcgtatttcccgtcaacttccagtttttttagcggctgtttaaccacatactgaagaatatcggaaggaaaatactccgacagatcctttttgttgatattaatggttccgtttccttcagtaacaaatacacgggcaatcgctgcctttcttcttcctattgcatttactgcttccataatttatttaagtgagtttaaatcgattgcctttggcttttgtgcctgatgaggatgttcgtttcctgcatacacatacaaattgttgataatagcttcacccaaacggtttttgggaagcataccccttaccactttccggtatagacttaatggatccttggccattaacgatgccggagtaaattttctttgcccactcggatatcccgtgtggcgcaaataaatgcgatcattccatttcgaaccggtaagcctgactttatccgcattgataatgatgacattgtcaccacaatccacatggggtgtaaagcttggtttgtacttacctctcagcaacttggcaaccttcgtccccaaacgtcccaatacttgatcggttgcatcaactacaacccattctttttgagccgttgccttgttaacagaaatggtcttgtaactcaaactgtccactgctttttttggattttaattgttaattaattatcgtataaaataaacaaatctcaaggctttcgagcttaattccttatgaactaaaatcttattaaaaaaccatagagaattggcctgcaaaagtacggcgaattttcgtatctcacaaaagaatctacgtttttttttgactacctttgcgcctgttattttgaattacgcctatgaaacctttgtttttgatttcgaacgatgatggtattcacgctcgtggaatacgctgccttattgatgtattgagacctttgggagatatgttggtagtggcccccgaaaccgaacgatccggtatgtctacggcttttaccctaagagagcctctcacctgcaaaccggtatcaaaagaagaaggcctgatccaatattcgagcaacggcacaccggtagattgcatcaaactggcactgaatctgctgaccgacgagcgtaaacccgatctgatcattgccggcatcaaccacggtttcaacggctccatagccatccattattccgggaccatgggagccgtactcgaaggctgcatggccggctacccgtcgataggcttttccatagacgaccacagagaggaggctaattttgagccttccctgccccacattcgcaacattgtgcaggcagtgctcgacaatggcctgccttacggcgtctgcctcaacgtgaacattccaaagcacgacgaaatcaaaggaaccaagatatgccgccagggcaagggacgctgggtcgaagaatttatcccctgttcgcatcccgacaatgccaaacgttactggctgaccggcaaatttctcaaccttgaagaaaatgccggcgacaacgacctgacatccatgcgccagggttatatttcggtggtgccctcatgcatcgacgtaaccaaccattctcttatcggtcaactgcaaacctgggggttttgagttattgagcctttgaactgatgaagtactatctaattgccggtgaagcttcgggcgacatgcacgccgccaacctgatggcagccttagtcgaaaaagaccccaaggccgaatttcgctttttgggaggagataaaatggccgccataggaggaacgcccttgattcattacaaaaaaatggcctatatgggcatcctgccggtaatacttcacgcacggactctgctccgcaatatgagaatctgcaaaaaagacatcctgagctggcaacccgatctactcatactgatcgattatccgggcttcaacctgaatattgccgcttacatcaaaaaaaagcaacccggcctccccatacattattatatctcgcccaaactctgggcctggaaaggctaccgcatacgcaacatccgccgcgacatcgaccgactgtattccatactccctttcgaaaaaacctatttcgaccggaaaaattaccgggccttttatgtgggtaatcccagtctggacagtatagaagccttcaaaaacagcaagcccgatttaaagggctggcgcgaaaagcagcaactgacacaaaaacccattattgctctgctggcaggcagccgacgccaggaaatcaaagccaacctgcctctgatgctcagggtggcctccgcctatcccgatcatcaacttgtactggccggagctccgggcataaacaaagatttttacgccccctacataaaaaactacgactgccggctggtctacgacgaaacttattctttgctcgcccaaagcaaggcagccctggtagtttcgggcacggccaccctggaaacagccttgttcggagtgccgcaagtggtttgctacgccctgtggattggaggttttttatacaaaatagggcgtaaatacctgattcgcactccctttatttcgctggtcaacctgatcgctgaaaaagaggtggtggtggaattggtggccaacgaatacaactatgaacagctcaaaaacgaattgaataaaattttgtacgattcggcctatatcgcggaaatgcaagaggcttacggctttatgcgtaaaaaactaggcgaaccgggagctgccggccgaacagcaagcctgatttacaaccacttgacctaaagtaagctaaaaggaatcgacctagattttgcacaaagaaaaagacagacacaattattttttctatctttgtagcttgaaaaaaatctgcgttggtttatggggaaaattatagcattagccaatcaaaaaggcggtgtaggtaagaccaccaccgccatcaatctggcggcctcgctggctgtacaggaaaagaaggtcttgctggtcgatgcagacccgcaggccaacgcttcgtcgggactgggcatagacatcaggcaagtcggcatcagcatttacgaatgcatgatcgacggagcaaatcccgccgatggcatacaaaaaaccgccatagaatacctggatattttgccctctcacatcgatctggtaggagctgaactggaaatgatcaacatcgaaaaccgggagaagattctgtctgctgtgttgcagcctctaaaaagttcctacgattatattctgattgactgttctccctctctgggactcatcaccgtcaactgcctgacggctgccgactctgtgttgattcccgtacaatgcgaatacttcgccctggagggtatcagcaagttgctcaacaccatcaagatcatcaaaagccggctaaataccggactggaaattgaaggctttttgctgaccatgtacgaccaacgcctgcgctcggccagacaggtggccgatgaggtccgccggcattttcaaggcctggtattcaaaacagtcattcaacgcaacgttaccctgagtgtggccccgagccacggacagccggtgatgctctacgatgccgactccagaggagccatcgaccacattcaactggctctggaaattattcgcaaaaacaagtaagccccttacgctatggcagcaaaaaacagactgggaagaggattggatgccctgatcagcaccgaagacatacaaaccgtaggctcatcgtccatcagcgaggttgagctggaacttatcaggcccaatcccgaacaacccagaaccgattttgagcccgaagccctcgaggaactggccatttccatccgggaaatcggtattatccaacccatcaccctgcgcaaaatggacgatggctattaccagatcatctcgggagaacgccgtgtacgcgcttccaaatccataggacttaaaaaaatcccggcctacatcaaaaccgccgaagacgactcgatgatggaaatggctctgatcgagaatatacagcgcgaagacctcaatgccatcgaaatcgctttggcttaccaaaaattggccgaagtctacaaactgacccaggaaaaactcagtgagcgcataggcaaaaaaagaaccaccatcagcaattacatacgtttgctcaagttgccggccgaaattcagatggggctcaaaaacaaaaccatcgatatgggacatgcccgggcgctgatcaatgtaaaaagccccgctctgcagctggccatttacgaagaaattctgaaacaaggcttatcggtgcgcaaagtcgaagaattggttcgcaacgaagaaagcggcaaatcgaaaaacttcaaaaagccccttccccgcaagacttccgaagaatacctggacttacaaaaacagctttcacagaaactgggcaccaaagtgcgcttcagtataaacgaaaagggcaaaggcagcatcagcattccctttgactcggaaaaaaagctcgaagaaatactgctcagtctcgacaaattgtttaactaaacaagacctgaaccggatcgataagaagatgggctatttcgccaaaatcataccaatactgcttttttgctgtctggcctgccggtcggcaacccaagacagcacggtcctcgtggcggacagtctttcttcggtacttgccgacgatctctctcgcgacggagcagacggcttccttactgcagacagcctctttttgaggcccgacatggaaagctttatgaataccgatactgccgcccgggaacggcaattgttcaagccccttccctccaaagctctgtggtacgccgccctatgcccgggtttgggacagttttacaaccggaaatactggaaactgccgattgtagcgagcggggtcgtggggcttgcttacgccataagctggaacggaaaatattatgttgcctataccaacgcctacagagacatcagcgacaacaaccccgacaccaacagttttttggacttactgccgccgggctattcctataccgagtcgcaattgcgaacggtgctcaaaaatcgtcaacagacctttcgcaggcaacgcgatttgagcatcatcggagccgtgggcttttatttaatttgcatcctggatgcctacgtcgatgccgagctgttcgatttcaacgtcagtcccgacctgagtatccgcctgcaacctgtccggcaggcccccggaatagatcacgcaatggaagtatcctgtttattcaggttttaacaacaacgagaaaaaccgattatgaaaagaatcatctatatactgcttattttaggcttgtctgcgtcgcccgcattatccgcgtcgcctgaatcatctacgtcgcctgaatcttctgcatcatctgcatcgcctgaatcttctacatcgcccgcagccggacaattttttaagaagatattcactaaaaaaagctcaatggagcaaaccgagggcctccccggggaagcaggcaatctgccgcagcaaaaaagagtgaacggcaaacagaccggcaaaaaactgccggacagcttgtccaacccggagaaaaccgggcaagacaacctgttggccgaagaggacgcaccggccattgaaatgaatctcgattcaatagaaaacagcctcttcagcgaagggctgaagatactgatcgaaatggattccagccattatttcgacgatcccggcctggatccctcttttcatttcaatgccaacaccgacagccttatttacgaatggcaaaggcagtccctgctgatttttgacgaaaactgccgacccactcttacagacagctctgccacacccgaaacgacctacattcaacggcttatggatttacccaacatcatcgaaatgccctacaacagaatagtaagacgtttcatcgacctctatctgaacgaaaggaggatgcaggtagaagccatgctgggagcgggagtctattattttccactgtttgaacaggtactcgaccaaaatggtttgcccatagaactcaaatatttgcccgtcattgaatcggcgctgaatcccaaggctgtttccagagtcggcgccaccggtttatggcaatttatgtacgccaccggcaagatgtacggactccagatcaacagccttaccgacgaaaggcgggatccggttaaatcgacttatgccgccgtcaaatacctgaagagtctctactctatgtttggcgactggaacctggccatagcagcctacaactgcggcccgggcaatgtgaacaaagccatacaccgctcaggcgggaaacgcaatttttgggaaatctactattacctaccccgggaaacccgcagctatgtgcccctgttcattgccgccaattatgtgatgacctattattccgaacacggtatttgtccggcccaaaacaattttcccccggtgattgatacttttatgatccatcaaaacatgcacttccagcaaattgccgaagtctgccagataccgatgcaggaaataaaattattgaatccccatttcagaaacgagattgctcacggcaccgccaccaaggccggcatactctatctgcccatggaatattcgcccgtctttacagaattgcaagacagcattccccgttataaagaacaggaattgctggcttcgaggctggtttcggttcaatcgggacaagcggggccaaccgatgccattgtttacagggtaaaacggggcgacaacctctcggtaattgcatcaagacacaacgtaagtgttcaaaagctgaaaaactggaataaccttaagagtaatacgttgcaaattgggcaacgactgcttatttattaacgattaaatagtaccttcgcataaaactctgcacagaggccgattatggatattttacaggcaacaaatcctgaagaagaaaaaatctttgagcaatttcagcttttgctcaacgattacctgaattcaaaccatcgcaaaaaagtggatttgattaccaaggcatttaagtttgcttacaatgcccatagaggtgtcaaacgccgctcgggagagccttatataatgcatcctctggccgtagcccgcatctgttgcgccgaaatcggtctgggttccacctctatctgttccgctcttttgcacgacgtgatagaagacaccgagtttaccgtcgaagacatccgaaacaacttcaacgacagaattgcctccatagtggaaggtttgacaaagatctccggaggaatctttggggagaacgcttccactcaaaccgaaaatttcaggcgcctgctcctgaccatgtccgaagacatccgggtaatcctgataaaaatggccgaccgcctgcacaacatgaggaccctaagcgccctgtcgccaagcaaacaatacaaaattgccggcgaaaccatgtatttgtatgctccgctggcccaccgtctgggattgaaccggatcaaaaccgaactcgaggaactgagtttcaaatacgagcatccggaagcttacgaacaaatcacacataaactggccatcacggccgaatcgcgaaaggcactatactattcctttatagaacccgttaagcacgaactggataaactggacttgaaatactacatcaaggaaagagtaaaaacagcctactccatctggaagaaaatgaccaccaaaaacatccggttcgaagaaatctacgaccttttggctgtccgtatcattttcgattcgcccgatatcgaggacgaaaaagagatgcttgccctcgaaaagaaacaatgctgggatatatattccaccatcaccaatatttacaagcctcaccctgaccgtttacgcgactgggtaaacaacccaaaagccaatggttatcaagctctgcacaccacggtgatgggctttaccggcgattggatcgaagtccagatccgcagtaccagaatgcacagcattgccgaaagaggttttgccgcccactggaaatacaaactgggcgaaatcgaagaagacaacgagctcaaccattggatactcaccatcaaggagattttggaaagccccgagcccaacaccctcgatgtgctggacaccatcaagatgaacctgttttcgtccgaaatcttcgtatttacccccaagggagagatcaaaaccctggctcagggagctaccgccctggattttgccttcgaggtgcacagcgagttgggctaccgttgcatcggtgccaaagtcaaccatcaattggtacccatgagccatgtgctcaaaagcggcgaccaggtggaaattctcacctccgaaaaccaaactccccgctacgaatggctgaagtttgttaccaccggcaaggctcattccaaaattaaagcccgttttcgcagagacaaccgcgaaacaataaaaaaaggtgaagaactgctcaatgaatttttcaacaagtatcacttaacggccgacgccgacaatgtccaggtgttgctgaccaactgcaattgcattaataaggaagaacttttgatgaagctgggtaccggcgaattgacactaaacaacgccgaagccgaactcttcaaaaaagacaatcagaacctgctggtcaaatattggaaactcaccttcggatcgaagaacagcaaacaggaaaaggaaaaagggaaagaaaaagaaaagggaaaagaaaacaaaaccatcgacttaaaatcgacacaccggcttaccgaagaatctgttctgaacgaataccacctgtcggattgctgtcagcccataccgggagacgccgtactcggtttcgtagcccaaaacggcattatccacgtacataaacggcaatgccccattgccatgcgcctgaaaagcagctacggcgaccgcatcgtttctgccgaatgggccacacacaaaaaattatctttcgccgtcgaaatagaaattaccggcctcgacaccgtaggcacgatcaatcagatcacccgcatcgtctccgacgaattttcggtaaacatcaacaaactcaacttcgaatccaaagacggcgtattccgaggctccatgaccgtttacgtccacgacgtagaaagccttaaccacctctgcaacaaaatctccaaactcaaaaacatcaaatccgtcacccgcgtagaacgccaaaataagttgatgggggtggaagagtgagtttttggagggggtggtgggaggttttggagagcaataaaaaacactaacaacggcataaaagaaaggcgaggcataagccccgcctttagtgttttcacaacggaataatccttattgtgatttgctttcaaaactataggcacaaaagtaaacgtttaattttagaaaacaaatatttttttagataaaatcttgtttttacttttacagctaaataaacaaagacatacatatcatgaaaaagattctgggcttggacttgggaaccaacagtatcgggtgggcactggtcaacgaagcagaaagcgaaaaagaaaaatcatccattattaaattaggcgttcgtgttaatcctctgacagttgatgaacaacaagactttcaaaaggggaaaagtataaccactaatgcaagccgtacattaaaacgtagcatgcgcagaaatttgcaacgttataagctacggcgtgaaaatttaatcgaaattcttaaagaaaatggttttatctgtgatgatactattttgtccgaaaacgggaactttacaacattcgaaacatatcgtctgagagccaaagctgcaacggaagaaatttcattagagcaatttgcccgtgttcttttaatgattaacaaaaaacgcggctatagatcttcgcgtaaagtgaagggtacagaagatggaacagcgatagacggaatggatattgctaaaaaactatacgatgaaaaccttacaccagggcaatattgtatgcagttgataaaagccggaaaaaaacaattgaccgatttttatcgttccgatttacagacggaattcgatcgactatttgacaagcaaatgtctttttatcccgatatcctttcctacgatttaaaaaaggagcttcgtgataaaaagcgagatgccacgtgggccatctgcgcaaaggcatttaaagaaaaaggtgttgaattggtcggaattaaacgccaagggacaacaaatgaacaaaaaattgagaattacacatggcgtgtaaaaggattgtcggaaaaattggatttggagcaattggttattgttttacaacaaattaatactcaaatcaacaattcaagcggttacctcggagccatcagcgaccgaagcaaggagctttatttcaacaaacaaaccgttgggcaatatcagatggcaattttggaaaaaaacccaaatgctagcctgaagaatatggtcttttaccgccaagattatatggatgaatttgatactatttgggaaaaacaagccgaatttcacgaagaattaactgatgagttaaaacgtgaaatacgcgatgtcgtcattttctatcaacgcaatctgaaaagccagaaagggctgctcagtttatgtgaattcgaaagtcgaaaaatggaagtagaaatagacggaaagaagaaaataaaaaacgtcggcagtcgagtaatcccacgaagctccccgcttttccaagaatttaaaatatggcaaaccttaaataacatcgaagtcttcggtaagggcaagagtaagaaaaaaagtcattcgtctttgtcctatgaaaccgaagatccactagagaatggtggacagcgcgagctttttcaagaagaaaaggaattgttggcggttgaactttctattaaaaaagaacttaaaaaatccgatgttttaaaattacttttcaaaaatgccaaggagttagatttaaatttcccgtctattcagggcaaccttacacaggcaactttatttgatgcttacaaacaaatagttgaatttagcggacatgaaatcgacgttgaaaaacgacccgcagcagaaattattcgttctgtggaagaaatattcaaagcattaaatattgataccgatatactgtattttgattcagacaaagctcctgatcagcaaaagatgtataaactctggcatttgctttattcatttgagggcgacaattccaaaacaggcaacgaaaatttaattatcaagctgtcagaattgtacggattcaatagagaatatgcttctgttttggcaaacttaacgtttcaggacgattacggtagcctctcggctaaggcaatccgtaaaattttgccttatttaaaagcagggaataaataccacttagcttgtgaatatgctggttatcgacattcgatgagctcaatgacgaccgaagagttagaggcaaaaatatacaaagaccgcctggagattttgcctaaaaactctctacgcaatcctgtcgttgaaaagattttgaatcagatggtaaatgtagtaaacactcttatcgacaattatggaaagccggatgaaatccgtattgagctggcgcgggaattgaaaaaaagtgctaaagaacgggaggaattgacaaaacatattgccgaaacaacgaagttacacgaacaatatagggatatcctgtcaaaaccgccgttcaacctatcatacattagccgaaacgatattattcgttacaaactgtacgaagaattaaaagataacggctacaaaactttctattccaatacttatatttctccgtcagctgtgttcagtggagactttgacgttgaacatattattccacaatcgcgtttattcgatgactcattttccaataagactttggaactgaggagtattaatcttgaaaaagggaacaaaaccgcacacgactttgtcaaagaaaaatacggtgaaacaggtacagaaaacagccttgatagttacctggttcgcattgaagacttgttaaaaaaaggtgtcatctcccgtgcaaaattcaacaaactcaaaatgcaggaaaaagacataccaaacggctttatagaacgtgacatccgtgacacgcaatatattgcacgatatgccaaatcaatgcttggagatttagtgaaacatgtcgtttctaccacaggttcaattacagatcgcttgcgcgacgactggcagctgatagatgtgatgaaagaaattaactgggaaaagtacaatagtctcggtttgacggaagagttttccaacgaggaagggcacagaatacgaaaaataaaggactggacaaagcgcaatgaccaccgtcaccatgcgatggatgctcttacggtcgcatttacaaaaaggtcgtatattcaatatctcaacaatctcaatgcacgcaggaccaatgatgaactgggtatttctagcgccgaaaaagacgattctgataatttctcgatcagttcggaagatatgcgactgaataccagggatgtgttgggtattgaaaaaaaagaattagaaagagacaaaaagggaaaactcaggtttaaaccacctatgcctttaaacgagtttcgtgaagaagccaaacgtcatttaaagaacactctgatttcaataaaatccaaaaataaagtaacgacaaagaatataaacataacaaagaagctaggcggtgtgaataaaaaagtacaattaacaccccgaggcgagttacacaaagaaaccatttatggaagcaagagacaatatgtggttaaagaagaagccgttaacggaacattcaacgcaacgaaaatcggaacggttactaagcccgcataccgcgaagctcttctaaaccgccttcaagaatcggcaaacgatccgaaaaaagcttttaccgggaaaaacaatctctcaaagaatcctttatggataaatgaacaatgtaccaaacaggtgcccgaaaaggttaaaactgtcaccttcaaaactatttacaccgttagaaaggatgtttcgcctgaactgaatttggacaaggtaatcgataaaaaagtgaaggcgaaattagaagaacgattgtttaaatataatggagacgcaaaaaaggccttttccaatttggaagaaaacccgatttggttggataaagaaaaaagaatcgccataaaacgcgtaaccatatctggcatcagtaatgcggtagcattacacgaaaaacgcgacaaagaaggaaaaccaatcctggatgaaaacggaaacgggaaacctacagattttgtaaacacaggtaataaccaccacgtggccatttacttggatgccgaaggaaatttgcaggaaagcgttgtttcgttttacgaagcagtctgtcgaagaaatttgggcttgcctataatcgataagagctataaggcaagcgaaggctggacttttcttttcagcatgaaacaaaacgaatatttcgtattcccgaacaagcaaacaggattcaatcccaatgaaatagatttgctcgacccggacaattataactcaatcagtatgaatttatttagggtgcagaaaatatcgactaaaaattatttatttaaccatcattctgaaacaagagcaatcacgggcgatgatttgaaaaacaaaaagcaattatctggcataacatatcatcttatccaaagccttcctcccattgcatcaattgttaaagtccgagttaaccatattggggaaattgtgtcggtaggtgaatattagtaaatctgcataatccttatcatacaataaacgcgcaaaggattatgaggaaattaggaacacttttaagacaataattccgcacctgtaaaaaatcatgataaaaaaaactctttacttcgaaaatcccgcctacttaagcatgaaaaatgctcagttggtgatcaaactgcccgaagtagagttgaacgacacgctaccggaatcattcaagaaagaagcagtgagtactatccccattgaggatataggtatggttattttggaccataaacagattacgctcacacatggactgctcgaggcgctgcttaaaaacaactctgccatagttacctgcggcagcaatcacatgcccattggattacatttgcctttagaggggaataccacacaaagcgaacgaacccagacacagattgaagcttctcttccactcaaaaaacaaatctggcaacaaaccgttcaggcaaaaattaaaaatcaagcgtatgtactcaagacttgtcgcggaaaaatcgtaaagaatatgctcgcctgggcgcgcgacgttaaaagcggcgacagcgacaaccttgaaggacgtgcagcagcctattattgggctaatatgtttcccaatatcgaaggtttccgccgtgggcgagatgaggttcctcctaataacttacttaactacggctatgccgtacttcgagccgtaattgcccgttcgttggtagcaagtggattattccccgcgcttggtattcatcatcataatagatacaatgcattttgccttgccgacgatattatggagccatatcgtccgtttgtagataaattggttgtagaaattaccgaaaccggcaataattatcaagaattgtccaaggacatcaaaatgaaacttttaactattcctattcttgatgtctatatcaatggtcaacgcagtccgttaatgattgcagcagggcatactaccgcctctcttgcaaaatgttacttgggagaaataagaaaaataatctatccgacatttgaatagatttagtgaatatagaattatgtgggtactcgtttttttcgacttgcctactgaaacaaaaaaggagaagaaagcctactccgactttcggaaaaaactgattaacgatggatttaccatgtttcagttttcaatatatttacgccattgtccaagtaaagaaaatgctgatgtacatataaaaagagtgaagaatgctctcccaccattgggaaatgttggtattttgtgcattaccgataaacaatttggacggatggagctttttcaagggagagaagagaaacccatcagtaccccatatcaacaattagaattattctaatagaaattaaatcccgctttaagggcgggatttaatgatgaaaaacagctgaatttttaaacctagttgttcttttaagtatctgacgcagtatcagttatgaatattgtgctgttaatcacgtcaaagat

SEQ ID NO: 2385 - DNA, 15776 bp, synthetic construct
  misc_feature 1..15776: note = Synthetic
  source 1..15776: mol_type = other DNA
agattgcaatcctagataacttactttaatgtcataggtaattcctgtagtaagatcaagacggtatcttcctaacgcatctgtaattccataagattctaatgtgccttctgctttgtttgtagcaatgatatttgctagttcaagtggcgaccctattgagtcttttacaacacctctaagtgttatagactgggcaaagagcgtcaagggtaatgcgagaagcattaccaacattaatttttttagtatcatttggattggttggattagtcacacctgttatcaaaaaatagcagctatgatttttatattgattgatgttattgtttgctcgctatcatatttcgataagctccgtataaacttcagcaaactaaaagcttactttgtttgttaaaagcgtcttcctccttgctgccctcttctattacctccgctaaaacgttctgccatttcttttgctttttcctcaacgatggcttgatattcctctctgctcacttctttaccttttacaggcggctcgatagcgataggctccttaggattaagcaccacttttgtacaaaggatggtcgtattgtttgtgcttaactctaaaatgagccctggtaaaccaccaaactcatctggtccatgacttgcagggatcataggtgtgtaccaggcaactatagtttctgtcttaggttcctcttctgctatttccatgttgcttgttctacttgcagtagctatactatcatcttttttctcacgatctctctgtccttgtctcgctcctcttcccatgcggctccacatgttctgctcaatatttctagttgctactgctttaaaaactggatattgccctattactttactctcttttacaagttcccatgtaagattgtttaaagtatcttttacgagaaaggtttttcccatcatattgttttcgcgggcataatcattagttgcacggttagcgtaggtacctccttgtgtaaaacctccgccaaaaccacgacctcctgcttgtctgggagcttgaagttgttcttcttccttatagtaagactcgtctttattaaagctaagtgtatattccttttctaaaaagtttttcatgcgctgtgcaatctgctttttacgagcttctgtcatttgttgcccaccacgattaaagcgtgacatatctaccgtagtcttagtttggtaagtagcaacaccttctattctctgagcttgaacggctgtacttactgtaagtgtaaaaaaagcaatacacaaccactgggatattttaagagtcataattctaattatttatactttagacttttaaagtgccgcatagtttgacgggcattcagattttaagaaaatcttaagaactctagtttcgtataatttcagtagttgtaaacacacgacctccattttttcctcttttacctccgtgacgctccatcatttcgtccattttttcttcttgaatcttattaaatttatcctgagttacttctttacctttttctggtaaagttatttgcacttccttttttgggtttaaaactacctttgtacacataagtgaaaatttgccgtcgctcacctctagtattaagccaggtaacccccagtactcatctggcccatgatttacgggtatatctaaggtataccatgcggtagttgttcttgtctttgtaacagattcctcctcctctccggtctcttcattaaatgatggctgctcatactcttctgagatggtagctttaaaacaggtgtatactcctatgtttttgatttctttttctaatatccatgttggtttaggcagtgagtcgttcactaagaactcctttcccataatctgagtttcctttaatagccttccctccgcagtattgtgataggtaacgcctttagctccagaaactgaaacagaaacagaaactccattagtagatggcgcaggggcagcgaggctttcttcttgttggtaagtagattctgcacctacaaaagcgagtgtatactcttgctgaaactgctttttcatctgagcttgtagttgcttttgaatttcggcgctcattccgttgttcttatcatcatccattttaaagtcaaaagatcgttgtgattgataggttgctactcctgagagttgttgtgagtacgctttcgcgaaagcaaaaacagtaactaacatggtaataataagtgatttcataattgattgctttttgattgatatgatttattgatggttcaaatatctgaaaataaataaggtaccaacgttaactaccgttaacgagtgttaaccgatttgtttaagaactccttataaagcatctttgaagtatggaagacaagaggtactcttatatcatatactttatcgttaccgtaattatactgacgctagctatccaattttattggaactataaaaactatgaggtcggaaaagtacagctagtgcgtgatgtgcaaataggtcttgatctagcggtagaccaatattatgaggaactagctgcacaaaacaccataggtattttctcaaagtataacaaaggcacaggggattatcttgaatccgatagttttaaagattttctaagaaagaaaacggatagtagcgttctgagcattgaacatatacgaattgaaaataatctggatagcttaggtcttcttacgatagaaggtgctcatccagaaaaaatagattctataatacagagccagcaacaacaagcactcaccaagcactttgaatcaaatagcaccaatacatcaacgcttgtgattaatggaagctcaaataaagacagcataacgaataacggcaatatattgcagcgattctttgcaaagcaacattcaaaaacagatagtgtcgcgagttatgacacactagcttctggagaattaaggttgcgcgatagaaaaaacgctctagaaacacttacctctaaaatcgttatatcatttaatgatgataccattgacataaaaaaattagatacacttgtaaaacagcaattactcacattaggaatagatcgcgctgcgcatagtcttacatatagcccaaagggagacaccatatcacgtcccattccagtggttcctaaacacctcagtccaacctatgattttaatgtggttgcaaattcaaaattactccctgcagaaagtatactctctctaggttttaatgacattaccaccattatcctaaaacgtaatctagcaggcatattactttcatttatactaattgcagctgtaattgctagccttctctaccttctcaaaattatacgagaacaaaaacaactcgccgaaattaaaaatgattttataagtaatatcacacacgagtttaaaacacccattaccaccataagcgcagctatagaagggatacagcattttaacaaagaaaatgataaggaaaaaacagaaaaatatctagccatgtctaccacacagttgggcaagcttaataccatggtggagcgcatacttgacaccgctacacttgataagaatgatttatcgttacaaaaagagcgttgcaacctagtggaagtgcttgaacatttgattaaaaaatataaagaaattgcacctgacattcctataacacttaaaagttcaacatcttctatatgggctacggtagatgtttttcatctagaaaatgctattgacaatcttgtggataatgctaccaaatatggaaaacctccagtagtaatagcactaagtaatacaaatagtaacattcacttatcaattacagatgctggtaaaacactcacaaaggatcaggcggctcagttatttgagaaattttaccgtgtgcccaaaggaaatacacatgacgttaaaggttttgggatagggctttactacaccaagactattattgaaaaacatggtggctccatagaggtgtctactattcctcaaacctcatttaaaatcacaattccagatggcaataactaaaccttatattttgcttgcagaggacgagccagcactagggcttattgtaaaagaaagtctggaaagtcgtgattttaatgtaacactctgtatcgatggtgtgcaagccatgaatcaataccaacttaaaaagccagacatcttagtactagatgtgatgatgcctaaaaaggatggatttacggttgcaaaagaggttcgtgagcaggatgatgagattcctattattttcctcactgcaaagtcacaaacggcagatgtggttgaggggtttagtataggtggtaatgattatctcaaaaaacccttcagcgtagaagagcttattgtgagaattcagaatttactgcaacgcaaaacgttacaacaaaaggcagaagctattcatataggtgagtatcactttgattttacaaggcaagaattacgctttcgcgaaagcgtacaaaagttaacccatagggaggctcatctgctattccaccttcataaaaaccgtaataccgttctagacagatcgcttattcttaaaaaattatggggtgatgatgatttcttttctgcgaggagtatggatgtttttatctccaaattacgcaaaaaactagccgaagataataatgtcgaaatcgtaaatgtgcgaggatatggttataaacttatttgttaaccaagaattactagcgcaccttattgcataggctttgcgtggaacatatttactagaaaaaacgttcctattttacgcgcacggaattttgccatttctgctagctctcccttataaagttcgtctactgtttgcacccagtgattgagccacacgccaaagtgttgctcattgatggtgtaaccctcatcgctatctacacgtttatgtgtttgtaaaggtcttccgttaaaaatctttttaaagaataaattaccttcccagaaatctgtaagatgctcaacatgttgcggccagtcttcaatatgcttattaaaaatggggcctagataaacatcactacgtatacggctgtaaaaagtggttacaagtgtatgtacatcctctctgtttgtaatatcttttttcacgttgcaaaggtattaactataacggctagatttttgtactttgcttcctcatgaagcatttcctttttttactagtattcttaatgtacggatttacagctgcacaagaatatgtgcttgaaaacatagcgtccaaaacgctcaatgcagatcaattttatggagtagatgattatggtgctacctactattctagggaagcggttttttataaagtaagtgctaggggtgattatcaatttacggcattacaactagggcctattacttctgtagatattctcaatccgcttaaaattacagtcttttatgagcaaactaataccgcagtgatattagacaacaccttaactgagattactcgcattaatttttctactataaatgattttagaaatataagccatgttaccacaaacggcgatagacgattatggatatttaatacagacttacagcagctagaaatttttgactggaatacaggtcaaataacgacgcaatttccacctatgcctgttaatgcactgctacttgcaactaattttaattttgcctgggtagcttatgataaaggacttttttactataataattatggtagttttttaaatagcacatcacttcttaacatcactcacctggctcaaagtaacggcgctgttatcttgctatcacagggaatactgtactataaacctcgagatttaaaaatatttaccctactagaaggtctagattttaccataaaacaactttctttaagtggcgaaatcctgtatctttaccatggtcaacagttaagcacctttaagcttaaaatacctaaataatcttagtatgcacattgcaattgccggtaatatcggagcaggaaaaactaccttgactacgcttttatctaaacattttaagtggactcctcaatatgaagatgtagtagataacccatatctagacgatttttataatgagatggaacgatggtcttttaacctccaagtttattttttaaatagccgttttagacaactactggagatacgtgatactaagaaaacaatcattcaagaccgtactatttatgaagacgcattcatatttgcacctaaccttcatgcaatgggtctccttactaatcgtgattacaataactacaaatcgctatttgacttgatggaaagtgtggtggatgcaccagacttgatgatttatttacgcagctccattcctaatcttgtatcacaaatacacaaacgtggtagagaatatgagaattctatctctatagattatttaagccgtcttaatgagcgatacgaagcatggatacatggctataaaaaaggaaagcttctcattatagatgtagatgatattaactttgtagataatccagaagacttaggcaatatcattaatagaattgatgccgagttaaacggcctttttgattagaaaatatcattgctatctactatcattcagctatttatattcagaaaaatatttactcaagaaacataaaagattagtctatttcatataaataaactagttttgcgcgttataaaactaacaaacattatgaaaaatcttacatttattttattccttgctatttctgtaatggcaatttcttgcggtggtgatgacgatggtggaccagcagaacctacattaactacaacactactagcaggaacgcataacctaaacttttttgtaagtgaagaagtaatagaagaagtagtaacgggaggtacagcaactactacgataactgcagtaggtgatacttttggatcgtcaaacattgtgttcaatgcaaatggaactttcacaagaagctatcaataccgtgttgaaacaacgactcaatttgaaaataatgaaactacagactcacaaatcattacagagtctaacagtggtagttattcagtaaataatgatgaccaaacaataattatggatggtaaaactggagacgttaccgtattcaacaacagccaattaagaattgagttcacagaagtagctatagaaggcaacagaacaactacaactaatgaagagttgcgttttacaagacaataggtaatttattcttaacatattaaaatcggctgctttacataaagtagccggttttttttggattattttataagtcctatagaccttgcatgctcctctgcaaaagcacttttttctactagtacagcggccgtagtctcatactgactcaaaacactctttactctaagtactcttttcttgtgttttacactacgcaaataaaccgctattatttgctctggatattcccttgctacctctaggtagatatctacatcgtgctctccactatctcctataagaacaaacttaagattaggataggtgtctaatatatttctaatctcctgctgtttatggggcttttctggcttaggtgttttctcaaaaggaccacgtaaatctctcaataaaatagggcctttgggaaatttttgatttctcacaaaagattctaggtagttatataaattccaagggctgttactcacataaaacataggatttgtatcatgtccagacttcccattatgtaatttttgataaagtgctggtgcaccctctagggaggtgcgcttacccacatttttaaagaatgtatttacaatgactctccatttaagaagtgatgccacaccagtgtgtaaaatggtatcatctatatcacttatcaccccataagaagcattttgagatggaataagcatttcaataggaaatctattttctcctaaaacaatggttccttgttgtacatcatcaaagcttatcaccatttgcaaccagccttcttcattagttaatgctcctagcccgtccactcgctcatcaactttaaagtaaccttcggcatctgttaccgtatacaatgatctattatctggtagcgtcactcgtaattttgtgtgtcgtaactcatcactcgcaaactgtttgtatgcattcttaaaggcagataaaaagcttgttttcttgagatctacaccttcatgttctaacgccctacctattaaatataagtgatttgaacgtccataagattgatacccgtctatttgaataggatctgatgttgatgagaaaaacatagtctggcggttttttataaagttacgctttcgcgaaagcgtacactatacagttcataaaaaaggcgtacacataatatggtacgcctatatacttttattgtattgaatttatgacaattctggaactccttgtacctctcctcgtgcggggtagcctttcttcataataaagtcaatccctcctaacaagtcatcaaactgtggtcttgcaaatggcatagactgcactgatgagaaaaacaaggtgccgtctggctttattaaaaacaatccaggctctacaaaatagtctggctccttgtctgaaattgccttagaaatatacaatccgtattctcttgctttttctaatgatagattatatcctataggtagcgatgggatatcccattctttaccagctatttttgcacgtttctctgtatctccacttattgcaatcacattaatcccacgctctgtaaatttatcaagatgtgttgctagatcttctagttgtgctttacatatagggcagtgtagccctctatagaaaataacaagtgtaaagttttctgcattttgctcgcttaatttccagttagtatcatttattaagggcacttctagagaaggcactgtagatttaggtaataacatagttttaatttttttacaaaagtaaaagagaggaaggttaaggtatattaaggtgaccataaacctttgttaagatattgtcacatagatctgcatattaaaaatatcgccctcctacttgtgttttatagaaaccataataaacaaaaaaaagcagcctaatggctgctttttttcactttataactatgtaatatatcatgtatttacttgatagtaacctcttctacaggcacatctgaagcttcataacgctcaatacatttttgaataatcgcttttgcttcatgaacgtctccccatccacctacgtctaccttcttttcttcaagatctttgtatacttgaaagaaatgctcaatttctttaattaaatgtgggttacagtcagataggtcttcaagcttacttgccgaaggatcacttactggaacacagattactttttcgtctggtcctttctcatctgccatgtgaaatacgcctataggctttacttctattacacatcctggaaaagtaggctctgtaactaatactaatacatcaagaggatcaccatctagcgcgagagtttctggaataaaaccataatctgctgggtacatcatagaagaaaaaatcatgcgatcgtaacgcattcttttcaatttaaaatcatactcatacttgttacggcttcctttaggaatctcaattagtacgtcaaatgttgttactttctctgctgtcataatatattatatttcaagtctcattgtggtaaacaaatgagaaatgcatccatttatttcaatttcttactgcaaggtttactttaaaaatatgcaaaagaattgattacacatcgtaaatccactattacacttttacggcttgcaaaaatacactgaaatagcgatgtagccaaattatgctaggttaagattaggttaggaattttatttatgagactagctgtcataaaaaaagaaaggtgatactaactaaagtaccaccttgaatgttttcacaacggaataatccttattgtgaattgctttcagaattataaagatagtaaacatttttcaattccctttatgggaaaccatagcgactctatttttctttttaatagctttatagaaatttcttacactgtgagtattatgaaaagaatattaggattggatttggggactacaagcataggatgggctttagtggaggaagcagaaaatagcgaagaatcgaaaattataaagcttggggtacgagttaatccacttactgttgatgaaaaaataaactttgaaggcggcaagcctattactaccaatgctgataggacgttgaagcgtggtgcacgtcgtaatttagacagataccagttacgccgtgactatcttattaaagaattaaaaaacgcaggttttattaatgaggaaacacctttaacagaaataggtaaggacacgacacatcaaaccttagcgctaagagctcaagcagctcataaaaaagtatccctaaaagatctcgcaaaagtgttgctagcaataaacaaaaagcggggttataaaagtagccgtaaatctaaagatgaaaatgagggagttgccatagatggaatggcagtggcaaaaattttatataatgataatttgacacctggagagtatgcttacaatcttctccagcaaaataaaaaacatattccagacttttatccgtcagatttaaaatcagaatttgacgcggtatggaaaaaacaaaaagagttttacccagaaattcttacagaaattctctataagaatctagagggaaaaaataaaggacaaagctggactatttgctctaaaccctttgaaattgaaggaataaagctcgaaggtgatcgcactcagcaaaaagcaaagcgttatgaacttagaaaagatgccttattagaaaaaataagtctagaacatctagccattgttctacaagagataaacaatgatatcaatggtacaagtggttatctcggaaaaataagtgaccgcagtaaagtactttatatcgactctttaacagtaggtgaatacctatataatcaaatcaaaaaagatcctcatacttctctcaaaaatcaagtcttttatagacaagactatctagatgaatttgaacaaatttgggaaactcaagcaactttttaccctgaattaacaaaggagcttaaagtaaaaataagagatattattattttttatcaacgtcctcttaaatctcaaaaaggattgttgagcttttgtttgtttgaaagctggcaacaagaatactttgataaagtaaaacaaaaaaatagaaagcgtaccataggacaacgagtaatcccaaaatcttctcctctatttcaagagtttaaaatatggcaaaatatcaatgatctagaatttaaatatactggaaaatcaaaagatagcttagacaaacaaaattcaatgtataagctagaagaaggtgacagaagcttgctttttgaggaagtaaacttgagaggtgatttaaccgcggctgctgtgcttaagcttttagggctttcagcgaaagattggaaaattaatttcaaggatggcataaaaggaaatactagcaatgaaaaactttttaatgtctaccaagagattgccgctagagagggatatgggattgattggaaaaaaaatactgcgcaagaaattcttgaagaattaagaaatgtatttcctatcattggaattgatgcctctctactagaatttaagggtaacctaaaaggaaatgaatatagtaaacaatctagttatgaactttggcatttactctactccgctggtgatgattctaaggtctcagaagaagacaagcttatttacggtaattctgatgttaatctcaaaaagaaattacatcaaaaatatggctttgctcctgtgtatgcgggaatgcttgctaatgtaaattttccaaatgattatgggaacctctctgctagagctatcaaaaaaatgcttcctcacttacaagatggtgacaactattatgaggcctgcgataaagctggatacaatcattctaacagtataaactcagaaaaaaatgacaaaagagttttaaaagataggttagaaattttaggaaaaaacagtttgcgcaatcctgtggttgaaaaaatactcaaccaaatgatacacgtcattaatcaggtgtgtgacacgtatggtaagcccgatgagataagaatagagctcgcacgagatttaaaaaaatctgcaaaagaaaggcttgaagctacaaaatatatcaactctgcaacaaaattaaatctagacattgctaaaaccataaagcaacagtttggctttacacctactaaaaatgatatagtaaagtataaactttggaaagaactcgagccaagagcttataaaagcttgttttctaatgtgcaaattaaactgcaagatttgtacagtggtaaaatagacattgagcatatcttaccgaaagcccttatttatgacgactctttctcaaataagaccttagcctatcgggaagtgaaccttaaaaaggctaatcgcacggctatagattttataactcaagataaaaatgcagaagtagataattatatcgaacgcgtcgaagctctttacaataaaggaaaaggctccataagtagaggtaaacgcgatcgccttttaaaaagtgctacagatatcaaagaaggttttatagaacgtgacctacgcaacagtcaatacattgcaaaaaaggggcgaactatgttgctcgaagtatttaagaatgtgacacccacaacaggaagaatcacagataagctcagggaagattggggtattattaatgtcttaaaagaattgaatctacctaaatacagagctgctggattaatagagatcgaagagcgtaaaaatgataaaaaaatagagaaaataaaagattggactaagcgtaacgatcatagacatcacgcgatggatgctctagccgttgcttttacaactcataatcatatacaatacattaataacctaaatgcccgcagagataaaacccacgacaaacatttcatcattgcaaatattgaaaacctcatcacccacagagtggaggatgacaaaggaaatagtaaacgtacatttataaagcctatgccaagctttaggcgtgaatcaaaaaagcaccttgaagccgttttgatatcttttaaagctaaaaacaaggttgtaaccagaaacgtaaataagaccaagaaagatggtggctataatacttctctagaattaactcctagaggacaacttcataaggaaacagtgtatggtaggtctaaaagatcgaaagatcaacctacaaaaatcaataaaaatttagctttcgcggaagcaaaacaaattattcattttggacaaagagtgttagtcttaaaacaccttgaagcatttgataataatccgaaaattgcttttgatacaaaaacaatcaagaaacatcccctgctctggaatgatgagcccttgaaagaagtattgtgttttgaagaaatttatactattagaaaagatattgctccaggtttaaaacttgacaaagtagttgatgaaggtatacgagatattttgaaaaaacgtaaagaggcctatggtggcaatgataaagaagctttttctgatttaggtaaaaatcctatttggcaaaataaggaaaaaggaatcgccattaagagagtgaccattacaggagtgagcaatgcagaagcactccattataaaaaagatcatctgggtacagagatactcgataaaaatgatgatcctattccagtagatcacgtgagcctaggtaataatcatcacgttgctatttatgaagataataaaggtaagttacaagaaaaagtagtctccttatatgaagctgtagagcgggcacgccaaaaattaccaattatagataagcaatacaacgagcatttagggtggaagttcaagtttaccatgaaacaaaatgaaatttttgtttttccatcagaagaatttaatcctcaggaagttgatttaatggatcaaaaaaatgcttctttaatctccaagcatttgttccgagttcagaaaattgcaagtaaagattatttcttccgtcatcatttagaaactgagttaaacaacgacaaaaatcttaataacttggtatatcatagatttcaaagtactacaggtttagaaaatttggtaaaaatccgattaaatcatattggtcaaattgtacaaataggagaatattaacttatgatcaaacgcacgctatttttcggtaatcccgcttacctcagcacccgtaatgaacaattggtggtcaactttcctgaagatggcaaagaggaaaaaaggattccaatagaagatctaggctatgtggtgctagaagatcctcaaatcaccattaccaatggtcttcttatgaaactggttcaaaataagacagcggtcattacctgtgatcagcaacatttaccttgtgggtttttacagccgctggtagggcatacactacaaacggaacgcatgcgacaccagcttaatgccagcgtaccgcttaaaaagaatttatggcaacaaaccgttactgccaaaatttataatcaagcattgcatctagaggctagaggtaataatgcgctcaagctacgcaactggagtactgccgtaaaaagtggagatgcagataatcatgaggcgtatgcggctgcctactattttcaacatttattcagtgagctagaagattttagccgtaaccaaaaaggaatagcacctaataatcttcttaattatgggtatgccatattgagagctattgtagcgagagcactagtgagtagtggtatgctaccatctgtgggcatcttccatcgcaataagtataatgccttttgccttgcagatgatattatggaaccgtatcgtatttatgtagatgccgttgtatatgaacttgtagaaagcggttgtgacttgagtgagctcaatactaagttgaagtctgaactcctcttaatccctgctctagatgtctatatagatggaacctggtctccacttatgaatgcggtaagtagaacaacaagtagcttatacgattgttttgcaggaacgagccgtaaaatactctatccagaatatgcaataagcagactttaaaatcgtagcatgtctaacaactttacacgtcttaatcaatatcgatctatgtgggtacttgtgttttttgatttacctacggatacgcgtacagaaagaaaagtggctgctcggtttagaaaagagcttcttaatgatggttttgccatgtttcaatacagtatctatatgcggttttgtgccagtagagaaaacgcaagtgtacatatacgacgcactaaaaataatttacccaaaaaggggaaaatttgcatcatgcagattaccgataaacaatttgggatgatggagctctttcatggtcagaaagaagtagcaccagaaacacctagccagcaattagaactcttttagaaataacaatctcgccttaaactagtcaaggacttgagttaaacctccatttttttaatgctatacgtatacgtaaaaaacagtataccagcattttatagccggtatactgtgaatacctatctaaagatatgattctgaaagcaattcacaacattaagttgtaataaaataagactttttagactgtgaatacctatctaaagatatgattctgaaagcaattcacaactggacgatgccacgatcaataaccctaactaataat

SEQ ID NO: 2386 - DNA, 15737 bp, synthetic construct
  misc_feature 1..15737: note = Synthetic
  variation 12454..12455: note = n is a, c, g, or t
  source 1..15737: mol_type = other DNA
ttcacgccgcgtgactcgttgttgcagtggtcgacggcggtcacaatataggtgaacttgcccttggcggtttctacataggaggcttgatcgcttatttgcacgatggcctcggcgcggctggtatcgattttctcgcctttcttgaagcgatacaccacatatttcacggcgcgttgcatctcgtcgctggcagccggggcttgccaggtgagcgtgttgtgctttttcttgagcttcaccacatcgcctggagccttgttgtcgagccagggatacatgggcggcagggcaagcgtcgactgctggcgggccatgagcgagtcggccacgcccttgtagttgcctgtgaggtcatagcagggccaccacaccacgccgcccacgtgggcgaggctgcgcatcttgtccagtttttggccgagctgagtgggaatgttgctgtcgtgggtattggcatagttcatggtgttgcgtatggccaggccatagtacatgtcgcggccgttggcgttgtcgttccaccagtccatgagcaccgagtcgctggcggctttgtgctccatctgccagtagagttgcggcaccatgtagtcgacccaccccatgcgggtccacttggggcagtcggcatagagggcatcatagcattgcaggccgttggtgtcgctgcccttggggtcggttttcttgttgcgccatattccgaaggggcttattccgaagcgcacccagggcttgatgctggcgatggtgcggtgcatcgaggcgatgagcgagtcgacattggcccggcgccagtcgcccttgtcctgcccgttgccgtagcgggcgtagctggtggtgtcgggaaagtcggtgtccttgatgggatagggataaaaatagtcgtccatgtgcaggccgtcgatgtcgtagcgggtcacgatgtcggccaccacgcggttgatgaagtcgcggcactcgggataggctgggtcgaagtagtattgcttgccgtatttcaagaaccactcgggatgcttgcgcaggagggcactgtcgcatatttgcgactccgagcccactcggtagggattgatccacgcgtgcagctcaagtccgcgcttgtgagcttcggtcaccataaactccatagggtcccagtaggggtcgggggcttgtccggccttgccgctgagccacagactccagggctccagcttgctggggtagaaggcatcggcctgtggccggcagtggaagatgatggcattgcagtgtgtgagctgggcgctgtcgaggatgttgagcaggtaggccttgttctcggcagtggtgtggttctggtagtagcggtcgcccacggtgggcagccacacgccacgaaactcgcgtttcgggttttgtgccgcagtgtgcatcgttgctgcacatgtcgcggcgatgaggataagcagtaatgtttttaatttcatcgttttttagtgttgattgtattgtcgggattgattagtcgcaatgggcgtcttctatcttgaagccgcgcaggaaagcatcggcaggcattcgcttcttgccagctacttgcaactgtgtgatttcgaggcgtccgtcggcgcaggccacccacaggtgccggccgtcgcttgtgacggtgccaggcagttcaccctcgggcttggcttgaggctggcccgtggcaaacaccttggtcgagtgtgccttgcctgtggcgtctacaatctcggtccaagctgcagggtagggcgagaggccgcgcacgtggttgtagagggcttcggcagtgcggttccagtcgatgcggcaggtgtctttgaatatcttgggtgcaggtgtgggttgctggccggcggtgagcatttgggcctggggcgtggtcttgacggtcccgtcgataattgagtcgacggtgtcgatgaccatttgggctcccaggtgcatgagcttgtcgtgcacgatttccacattgtcggtgcgggcaatgggtatcttgcgttgctcgatgatgtcgccggtgtcgatctcgtgcttgagaaagaaggtggtgacgccggtctcggtgtcgccattcatcacggcccagttgatgggagcggcgccgcggtacttgggcagcagcgaagcgtgcaggttgaaggtgcccagccgtggcatggcccacaccacctcgggcagcatgcggaaagcaatcacgatttgcaagtcggcccgcaggctgcgcagggcttcgacaaaggcctcgtctttgagcttcacgggttgcagcaggggcagcccctgggcgagggcatagcgtttcacgtcgctctggtacatgtggtggccgcggccggccggcttgtcgggcatggtgaccacgcccacgatattgtagccgccttccacaagccgctgcaggctctcgacggcaaagtcgggcgtgccgaagaatacgattcttaagtcttttttctccatgttgtagtgttgttgtatattgttgtagtcgaatgtttgttgccagcaggagccagcagttgcggccgggctttcttggcccggtgtatcatctcgcgggtgaagatgcgcgcgccgcggtcgttgaggtggccggcatcgtcccagcaaggggctttccccacaaggttagggtcttgggcaagatagatgtagggcacgtggtgcgccttgcacaagtctactacgggcttgtgcacgctcagcatgtcgggttgcgggtcgaagtatggcgatgtgaccacgatgagccgcgactggcattgttccacaagtttcttgaggtagctcattttttttgcatcgagctcgcgggtgaacctggggtagggctcgtgctggggcttgatgacgccgaattgcggcacatagccgttgtcggccagcttgttgttgtaggggctgtcgctccggtggctggccagccatatctcggcaatgagcgagttgtaggggtatatgcccgagagcatgcgcacgcgctccatggggtcgatgtcggccagcatgctgtcgcgacacctgagctgcctcatggggcgtatcttgttgacgggattgtcggcctggctgtggcgcatggcgtcgtagccgtactgcagctcgtagacgaccaccctgggcctgtagcgttgcagcagtgcacgcagcagcgcgtagttgagaaagatgttgctgccctcgatgccgcagttgtagcagctcatgccagtagagtcggtgatgatgcgtggcacatagtggtgcaacgcgcgcgacgagcccagtatcacgatatcggcccgggcgctgtcggcaatatagttgagcttgcctatctcgtcgcggtgcacacggctgtaggcatcgcccagcacgggccccaatgcctggtcgcaggcggcaatcaccgccagcatgatgagaaatgtgccaataaaccgtcgcatgcgctaaaattttacatatataaattgcccactgtcgatgacgccgatgagcaagatgagtatcacaacgaccccgtagcctgccagcgagactggtcgcggcagcttcagcacttgccactcggcttgcacgtcgcgcagcatgaccaccacaaaggtgaaggccatgtagcacatcacgcttgtggcgtgtaccgagtaggcaggcagcatgatgtggaatgcattgaatggcgctgtaaacagccgggtgaatatctggatatagttggactggaaaaatgtcaagttcatggacatgagcaccagggtgactgctgtcacggccacgcgcgccggcacgtgacgcctccactgcttgagcggcagcgcgtggctcagggtcaccagcacgccgttgaccaagccccaggccacatagcacacagtgccgccgtgccagcaaccgctggccacaaaggtgaccatgatgttgaaacaggtgcgaactcgcctgcacccattgcaaacagcggctgtgagaagttggccttcaagtcgatgcccagcaggcggccgcatccttgggcaatgtaggagtaaccggcaaagtcgcaatacatctggaaaagatagcacacttgggcaaagagcagcgagaagccgttgtggctcatggcgtggccaaacacgccgctggtgtagatgccaaagcggtcggcaactgccaccttcagaaacatgccccacaccaccagccgggcgccgctgccagccagtgtcttgtcgaaacccagccggtgctctctgaactgcggcatcaggtcgaaagagcggttgatgggacccgaaagcaccgttgggaagaagctcagatagagggcatggttgagcaacgactgctcgcgcggtaccttgccccgggccacatcggccacgtagcccacggcctgcagcgtgtagatcgacaggcctgcgggtatcatccagttcagcccgttgaagtcaagccccagcccgcaggcgtgcaacgctgccagcacaatggcatcggcaggagcgataaacttgtagaaggcaagcggcaacagcatcagcgccaggcaggctgccaggcccgcctggcgcctcttgccgcacttggtggccagcaggcctccagcgtagctcacgcccgcaatccacagcagaaacacactgcacagcgggcgccacatggcatagaaggccaggctcactgccagcatgaaggcattgcgccaccgccgtggcaatatccatgtcacgagacacacacagggaaaaaacaatatgaacttaagcgtattgaatgccacgtcgctgcatcgttgtcttgcactgtaaatgctctctacagtttcccatgccgtcagtcataactgtagtgcttgagcacctgcctgtaggagttgaatatcttggattttgacacaaagcccacatacttgcccttgtcgaccacaggcaggttccaggccttggtgtcgtcgaaggttttcatcactttctccatgggggtgcccagctccaccttggccggcggcatcgacatgaagcgctccaccttcatgcgacggtacaagtcgggacggaacatgatgttgcgtatgtcgtcgagcagcaccacacccagcaggttgttgttgttgtcggtcaccggaaacaggttgcgcttgctcttggatatcacgtctaccatttgcttgaggcacatgtcggggtgcacgggtatgaagtcggtctcgatcacactgtccatcttgagcagggtgagcaccgactggtccttctggtgggtgagcagctcgcctcgcttggccaggcgcttggtgtagatgctgtagggcgtgaacacgcggcaggtgccgtaggagatggctgccacgatgagcagtggcagaaacagcgagtagccgcccgtcatctcggccgtgaggaagatggccatgagcggcgcctgcatcacgccggccatcacgccagccatgcccagcagggcgaagttcttgatcgaaagcggcacgctgggactggcaaagcccacggcgttgagcgtgtaggcaaagaagaagcccgccatgcagcccacatagagcgacggggcaaaggtgccgcccacgccgccgccgccgttggtggcactggtggcaaacgacttgaagaggcacagcccgcccacaaagaggatggtcgacatcgtgttgttgcggaatgaataaaacaggctgttgtcgaatatcgaggccacatcgccgttgagcagattgttgatggccccgtaaccctcgccgaagagtggcggaaacaggaagatgagcacactcagcaccacgctgcccaacatgaatcgctgccaccggccctgcatgcgcccaaacacgtcttccatcaggcctatggtcttgttgaagtagagcgacacaaagccgcacatcactccaagcacgatcacataggggatgcgcgaggtgtagaacggctcgctctggctgaagaaaaactccacattgtagcccgtgaacacatagctcaccgtggcacctgccaccgaggccatgatgagcggcatcacactgccggccgtgaggtcgagcatgagcacctcgacggtgaacagcaccccggctatgggcgccttgaagatgcctgcaatgcctgccgcagccccgcagcccacgagcatcatgagcaggtggggcgacaggcggaaggcctggcccaggttgctgcctatggctgccccggtaaacacgatggggccctcggctcccaccgagccgccgcacccaatggtgatcgacgaggccacgagcgaggcatacatgttgtgggtcttgagccggctcttcttctgcgcaatggcatagagcacacgcgtcacgccgtgcgagatgttgtcgcgcaccacatagcgcacatagagccccgagagcagaatgcccacgatgggaaacagcagatagtagtagttggcctgggtggtcacgcccacactgttgatcacggtcgagatggtgcttatcaagaacttgagcagcacggcggcaagacccgaggcaatgccgatgacgatggccagcatcaccacaaaggttttctcgggaatgtgcttctcgcgccacagtatcaggcgcaagtaccaccccttgctttctttctcgctgctgctcgctgctgctgttgttatttctggttcagccgttgttgtcatcgctttttcattttattgagttaaacaccccggccggtgaatacaatcttcacggtgtagactatgattttcaagtcgttgatgagcgacatgttctcgagatagagcaggtcgtagcgcagccgctcgaccatctcgtcaacattttgggcatagccgtatttcaccatgcccatcgaggtgatgcctggccttatctggtgcaccagcgagtaggctggctcgcgctcgagtatctgttgtgcatagtatcgcctctcggggcgcgggcccactatcgacatgtcgccgcgcagcacgttgaaaaactgcggcagctcgtcgacgcggtacttgcgcaggtagtggcccacccgggtgatgcgcgggtcggcatcgctcgagagctgcggcttgccttgctgctcggcgttttccaccatggtgcggaacttgatgatgtagaacggcttgttgtgccgccccaggcgctcttgcttgtagagtaccggcccgtgcgagtcgcacttgatgatcaggcctaccgcaatgtagaccgggatgagcactaccatggccacggccgagatcaccacgtcgcaaaaccgcttcatgttctgccccccggcgctcatgttgctgctcgagatgtcgatgagcgggtcgccgtagaggtcgctcaggcgtgcgcgcgagagcaggatgttgtacttgtcgggggtgatcttgatgggcaggttgatcgaaaacaggcggttgatggcactcagcagctgggccgagtcttgcttggtgggcaccacaatgagctctttcacgccctcgcgctggcacaccccggccacctcgtcgaggctgtagcgaggcttctcgatgtctttcaccccgttctcgccgggtatgtgcacatagcccacaatgtcgtagcccagcgaggcacgcatgtgctcgagcttgcccacaaaggcataggccgcagccccgtcgcctatgatcagggtcttgaaactccactgccggctctttatcttgtgcgaggtgtagcccgtgatcacggcccgcaccacataggtgagtacaaacatgatgcccagcagcacaagcacgctctcgttgttgaaggcgcggttgtcggcggtcatgtcgttcatgagtgctatgaaaaaggtgatgagcgcgttcacgcaggtcgacgacagcgtggtcatgagctcgctgagccgcgactttctgaacacctcgttgtagtagcccgagaggtagtatacccccatcatgatgagcggaaacaccacttgctcgagcttcaccacatcgctcgtcaagaaggtgtgcagcgactggtagccgcgcacgccccccatcgcaaagcgggcgcagttgtagcccagccatgcgagattggcagtgatgtagtcgcctgccacatatttcagccgtgcgcgcgcgttagcgctatcgattgctcggcaaggagctatcgcagtatcttgaatgtgccgtcgctgctcagcatgataatgttggaggccgagtgcggcgccgtgtcgtcttgccggtacttcaccacatagtccacaccctgcacaatggcagggttgatttgggcaaatgtcgctgccgctggctcgccgctcacgttggccgaagtcgataccacaggcttgccgaagcgcgcgcacagctcttgcgagaacttctcgtgcgatatccttatgcccacgctctcgttgtcgcccagcaggttgggtgccaggttgtaggccccgtcatagatgatggtgagcggcttcacggccacatcgatgagctcgcgggccatctcgggcacgtcgaccacatagtggtcgagatgctcggcactgtcgagcagcacgatgagcgccttgttgtcggccctgtgcttgaggcggtacactttcttcacagcctcgggattggtggcgtcgcaccctatgccccatatcgtgtcggtggggtagaggatgagaccgccccgctcaagcacttcgatacacgttgtaatgtcttcttccattcagtttctttgtcagctttgagagaggcctgtcctggccccgatacaattaacaaaggtaactcaaaaaccggacataaaaaaaacaaaaattggtttttgacggcctgttaacagtaaaaatgttaaatttcttaatttcctgccgcctgccatgtccaccggcaaggattattgtgttatctttgtactccatgccggctccatgtggctgccacgccgcatgcgggctgcaagagcgcgtgaaatctaattttttatgtcagatagtaacattttaaagaaaagaaaggtcaaaaaaatgaaaaacattctatcggttgccctggtggccgccgccctgtgggcagccatgccagccacggctcaaagcaaagttatctacaccggcgacattgccaagaaagtgatgggctaccagggcccaacgccattgaacatcaccataagcaatggcaagatcgagagcatcgaggccctggccaaccaagagtcgcccaaatacatgcgccgggccgagcgcggcatcttcccgcactacataggcaagaccgtgagccaggccctcaagctcaaggtcgacgccgtgactggcgccacctatacctccaacgctctcctgcagaacatcaagctcggcctggagcaggcccggcaaaaaaacgggcacagccgccaagaagtcgcgcaagcgctcctcctcgcgccgccgctagccccccagcgccgtcagcccaacctcacagccccgacgccccccagtgccggggcttttatataagccttaattgcaaaaaaagagcgagtaaaacccgctcttgatgttttcacaacggaataatccttattgtgaattgcttcaaatttgtactgcaaatatatacttgaatttgatatattccaaaaattttccaagaaaaatgcattatcctcaatgattttttttatttttgtaaaaaatagaaacacaaaacgatcatgaaaagagttttaggcctggacttaggtaccaccagtataggatgggctgtagttgaccaagctgcatctcaaaatgaaaaatcaaacattattcaactgggagtgagagtgaatcctatcacggtcgatgaacaaagcagctttgaaaacggcaagagcatcaccacaactgccgatcgcaccctcaagcgaggcatgcgtcgcagcttgcaacgctacaagcagcgtcgcgagcatcttgtcggtctgctgaagaaacatggaatcatcaacgatgatacgctactgaacgagaatggcaatgcaaccacgtttcagacctatcggttgagggcaaaggcggctcacgaggaaatctcacttgaggaatttgcccgtgtattgcttatgataaataagaagcgaggatataagagcaaccgtcgcgccgacagtcaagaagacggcgaactcatcgatggcatggcggtggccaaaaagctctacaacgagcatctcacacctggagagtttgcctaccacattttgcagagtggcaagcgctttatcccgagcttctatcgctccgacttgcagaatgaatttgataagatatggaattgtcaaaatcaattctatccacaagtgctcacggccgaactcaaagataaactcaccgaccgcagcaagaaagataccgaaaacatcttttttgcaatacatcacatctcttcagctacagtcaaagaccgcaagacggccacactcaccgtttacaagtggcgtgtgcaagcgcttcggcaacagctcgatttagagcaggtagttgcagtgcttgccagcttgaacggcgcaattgcaggagcaagcggttacctgggccacatcagcgacaacagcaaggagctctacttcggtcacatgacggtgggggagtacttgatgcgcggtcttgagcaagatccgcatttccgcgtaaagaatcgcgtgttctatcgtcaggattacttgaatgagtttgaacagatatgggagactcagcgtagatttcatcctgagctcactgctgagcttaaagaaaaaataagagataccgtgatcttctatcagcgtaaactcaagtcgcagaagggacttattgcctattgcgagctcgaaggtagagaaatcactgtgaaggtcgatggcaaggagaaaagagtgatgactggccccaaggtgtgtcctcgcagcatgccgctgtatcaagagtttaaaatgtggcaggtgataaacaacctgcgcctgcaatccaaaatcgatggtacccaagtgcctctcaccatggagcagaaaaaactgctgcatgacgcactcaacgttgagggcgacatgcaggctgcccgtgtgctcaaggtgcttgcattgaagcccaaggattatggcatcaactgcgacgaggtgccaggcaacacaaccaatgccgctcttttcaagaagtataagagtatcgtggaatggacaggccacgacgtggaaaaatttgacaagctgtcggccagcgagaaaatcgcacttgtagagtcggttttcaaagcgctcaagttcaataccgattttctcggtgacggctgtgacgagcaaagcaaggcattcaggctgtggcatttgctttattcctatgagggcgacaactccaacacgggcatcgacaagcttgtcgaccacatttgctcgttgacagcgctgccggccgactatgccaaggctgtggctcaagtgaaatttgacgacgattacgggtcgcttagcgccaaggctatcaagaagattctgccctacatgcagcagggcatgatgtacagcgaggcttgcgaggctgcaggctaccggcattccaagtcgtcgctcacgcgtgaggagattgctgctaagcaactgttgcagcatcttgaggtgttgcccaaaaactcgctgcgcaaccctgtggttgagaaaatcctcaaccagatggtgcacgtggtgaatgcttgccaagatgcctatggccccttcgacgagattcatgtcgagatggcccgtgagctcaagctcaccagcaagcaacgcgaggagcgcaccaaggccttgaaccagcgcaccaaggagactgaagaaatcaagcagaaactgataaaagatttcaacgtccctcatcccagccgcaacgacatcatcaagtatcgcctttatatggaacttgctcccaacgggttcaaaacactctataccgacactcctatttcgcacgagaaactgtttaccagggagttcaatattgagcacatcattccacaagccaagatgtttgacgactcgttcaccaacaaaacgcttgaaacggccgaggccaatttggacaagtcaaagatgacggcctacgactatgttctctcacgacaaggcgaagagggtgccaagcgctacaaggctaagattgaaaagctctttggcgcctccaatcccaagaagtgcgagcgcctgctcatgcgcgaggccgacatccccgatggttttctgaatcgcgacttgagcgactcgcaatacattgccaggaaagctaaagaaatgcttgggaaaatcacgcgagtggtggttcccaccacaggtgcaatcacagcccggttgcgtgaggactggcaaatcgtcgatgtaatgaaggaacttaacctcgaaaaatatgagaagcttgggcttgtcgagacctatagtgatcgcgacggccgttgcgtgaagcgcatcaaggactggagcaagcgcaacgatcatcgccatcatgccatggatgctctcgccattgcttttacccaacccagccannaaggccaacgcctatgcactcatgcgcaggaccctcaccaagggcggcaccttcattcctcccatggagggattcagggccgaggcacgcaggcatctcgcggctgtgctggtttcgatcaaagcaaagaacaaagtggtgacgccgcatgtgaaccgcatcaagggtgtcgcgacacaccaggtcacactcacgcctcgtggccagttgcacaatgagacggtgtatggcaaacggcagttctacaatacaaaaatggagagagtgggtaaaaattttgatgtcgccaaaattgctactgtgtgcaagaaagcttatcgcgaggccctgctgaaacgcttgcagcagtacgggggcgacccggccaaggctttcacaggaaaaaactcgctggagaaaaatccgctttatctcgacagcaggctactggagactgtgcctggtagtgtaaaaaccgtaactgtggagtcggtctacacggtaagaaaacccatcgatgccaagttgaaacttgacaaagtggtcgatgcaggagtgagaagaattctccagaagcgtgtcgacgagtatggcagtgtcgagaaggcattcagcaatctcgacgagaaccctatttggctcaacaaggaggctggcatcgccatcaagcacgtaaccatcaagggggtgaacgtggctaccgccttgcatgaaaagcgcgacaaccgaggccagtacatagaggatgccgatggacagcgccagcccaccgactttgtgagtaccagcaacaatcaccatgtagctatctttgaggacgagcagggtaacctgcacgagcacattgtgtcgttttacgaggctgtggcccttgcccagttgggtctgcccattgtcgacaggctttacaacagcgacaaggggtggaaattcctgtacaccatgaagcgcaacgagctcttcgttgtacccgacctggagcatggcttcaatcctgctgagattgacctgatgcacctgtatcgtgtgcagaagttggcaacaaaatattacgtgtttaggttgcatctcgacacaaaggtcgaagagttcaaagccttgagagatattcattggaagcgtatcactaaagaaaatgatttaaaggggtttgtaaaagtgcgagtcgaccacattggccacatcgtggcagtgggcgagtacaattgacaatagaaagactgccaacgatgattaagcgtacgttatatttcggcaatccggcctacttgagtctgagaaacgctcagctggtgcttcgcctgcccgaggtggtgaaaaacgacaccttgtcggctgtggtgaagaaggagtttgagcgcaccattcccatcgaggatataggtgttgtcattctcgatcacaagcagatcaccattacccagggcttactcgagaaactgatggaaaacaattgtgcagtcatcacgtgcgacagcacgcgcatgccagcaggactgttgctgccgctcgatgtgcactcggtgcagagtgagcgtttccgtgcccaagtcgacagttccaaaccgctgcgcaagcaattgtggcaacagacggtggcagcgggcaacatgatggcttgggcacgtgctgtgaggagcgacgatgccatgaatcttgaggcccgtgcggctgcctactattggcgcaatttctttcctgagtgcgagggctttgtgaggcatcgcgagggcgatgcccccaaccacctgctcaactatggttatgccatcttgcgtggagttatagccagggcacttgtgggatcgggactgttgcccacattgggcatccatcatcgcaacaagtttaacgcctattgccttgccgacgatatcatggagccctatcgcccctttgtcgacgaggtggtgaaacgcatggtcatgaagtatggccttctcgacgacatcacaaccgaaatgaagcgcgatttgcttgccattcccactctcgatgtgaagattgagcgcaagcgaagtccgctcatggtggcagcatcgatcaccacgtcgtcgctggcccgatgctatgcaggtgaatccaggctgatatcctatcccgaattggcttgatcaacaacatctatggaccgccttagtgaatatcgtgtaatgtgggtaatggtgttctacgacttgccaaccgagaccaaaaaagagagaaaggtggcagctcggttccgtaaggacattatgaaagatggtttcacaatgttccagttctccatctatctgcggcattgtccgagtcgagaaaatgctcaggtgcacatcaaccgtgtgaactattttatggcaccaaggagaaaatcaaggagtatggtccccagcaattggaattgttttaaaagaaaaaagcctgacacgttcaggcttttttcttttaatgacacgaaattttttttaatgcgaaatctttgtatcactttgattagtaataatttgcgaccatcgaggctgtgtcatccgatacaaagatacaaatttgaaagcaattcacaacctgtccttaggcgtgtgcagtgctgggttgggctgtgtcatccgatacaaagatacaaatttgaaagcaattcacaacaggtctcggcgaggttggagctcatggtgtgctgtgtcatccgatacaaagatacaaatttgaaagcaattcacaacagccatcgccaacttcgagaacgaccgcatgctgtgtcatccgatacaaagatacaaatttgaaagcaattcacaaccaaggaatttaaaggctcgaagaccgaggagctgtgtcatccgatacaaagatacaaatttgaaagcaattcacaactctgcaaggcataggttgtgcgtatggcgtgctgtgtcatccgatacaaagatacaaatttgaaagcaattcacaactcacaaagcatgacctggaaacgctcaagggctgtgtcatccgatacaaagatacaaatttgaaagcaattcacaacagaagtgcgacgaatgcgcatcaagaatttgctgtgtcatccgatacaaagatacaaatttgaaagcaattcacaacctcaagctctggcacataggagtagtaatattttatcaaccagagtcaacctaaaacaggaaaggacacatccatctcatatccctgtcgccggatgtctcggaggcctctgccggagtcatcatgccgatgctcatgtgcggtcggcggttgttgtagaagtctgccgccagagccgtggccgcgatgacctcttccagggaatggaagaccttgccc

SEQ ID NO: 2387 - DNA, 15729 bp, synthetic construct
  source 1..15729: mol_type = other DNA
  misc_feature 1..15729: note = Synthetic
taacaattatttaaagtggcctttgcttaaacaggtggcggatgagcgaaatatttattatttgtctacaggacattatgtgaataaacgtcagattgacggtttttaccatattacctgtggggaagataaagataaggaccaatctttctttttatggggattgccccaagaaattcttcagcggatgttactgccgatgggaaacaagacaaaagcagaagtccggcagatggcagccgaacgtggcttttataaagttgctcggaaaaaagacagtgtgggcgtttgcttctgtccaatggattatcgtagtttcttaaagaaaatagtgaatggaaatgaacggattgttcagcattcggctacatcagatctctcagttccggagaaacagcctctcgaaaggattaatttgctttctcaaccatccgtaccgttatgtcgtgaatcgttcctgacagataattcaagggctgcttcccttgctttgccaaagggaacaagtcataagcgtttaccgatgattacacccggttacttttatgatgaggatggacgaattgttggtcgccacgaaggtttcccgttttacactattggtcagcgtcatggattaggattgcagcatttgaaccgtgctgtatttgtcaaggagattcttccagaagaaaataaggtggtaatagctcctttgacatcattgaaaaagcacgagatattgttaaaggattggaatgtgacgaatccttttttgttgtttgggcacgatgatattatcgtgaaaatacgttatcgtaaacaggccaatcggtgtacagtaatacttactccggatcgcttgttgcatgtaaagcttcatgaacctcttacttctgttgctgttggacaagccgctgcattttataaagacgatgtagtgttgggtggaggtgtgattgttgattcgtggtaaaagttaaggtttggtatctgttgatttttctaatatttgctttaactgaggatattcagaaaacgttctaaaaaaatagaatggcatgtgtaaatgattacagtttatcctttcacctgccatttttatagtcgattcacttcttcgtggatccattttgttccatcgacgcatgatgtttccggagaaaccgtaagacttctccattttcctcagcaaatttatgtcacgcaacttgagtctgtctattttctgaatgtccttaactgttttaatttggctattaatagtatatactttatcctttttacactattctctttcttgatgtagaagtcacttggttagttagagtgatttatgtgtagaattgcgttggatcacttttttttaaaacgactctatgatacttggtctttcatatgttcggatgggtctatttatgtttccggtttctatcaggaggataacttgtttttccatttcggacagcttatctgtggtgatgcaaatagattttttgatgtaattcatttacttgtcatgttttaacagtcaatggtttgccacaaagattgaacatggatttattgcttttcacgctttttgggctcgcctaatttgtttgtattcttttggtaatgctttcgttatacaattcacactcatttccctctatataaattacagaacaaagcactactttataaataaaagaatgtgactttaattgtagagagtagacaattaaaattaatattgtttttatggcatttaatcaatatacattttaatgactctttaatctgttgttgagggaggggatatgtatctcccctccccaacaacagcattttgtatgtatttaagtctgttagtctaccgataaaacttcgtcatcttggaaattgattgttccaggagaaccatttgtatcgccccatcctatagtttgtcccagccatgggttcttagtaagggctgtattgttgataccactaatgtaataattggatttccaactcagaagaactggattgttgttgctatctttgtcaccaggagtcggaggctctttcagttgaaagttttgctcccagaattcggcaactttttttaattccttctggaaatctggggaatctggatctgcccctattgtttctcttgcgtttaataatgggtcagctgtcaagttatcgtcattgtttccggggatgtagagttcactttttacatcaatataacgcgatgtgcgacatgttcctattaaaggagtgagacctaatatttcacaagtgttttcatcgcttaaatacatcctttcgccgttgccacaatagccttgtcctccatcatagagtaaccagcgccaaatatcccaatagcgttttccttcgtaagccaattcgatgagccgttcgtgcagacaaccagcaatagctgattcacggctattaatgtaactgtcgaggccatagttttggttccctttgggaatgcctactctggcgcggagcttacctagttcctgtttgcataactccacttgtcctgttgcagcatagcattcagctaagttcaatgccagttcagcgtaacggtattcgtatacgttgattccgctgtattcgaattcttcttttgccgcttgtatatttgtcatttttcggataaataccggactaggcacattgttttcttcgctatacccataagtggctaaataggtatttggtgtttcagcattttcatcaggaacaagtgattttatccatcggtaagcccatacggtatcgttagggagttccttgtatccccaaatcataccgttaaaagcgaaagtgcgatagaaacgcgggtcgcggttttccataaagtgcatgttgccattggctagtttatcggcttccttcactaaagtaccatcggcattgggaaatttatcaattaattctattggtactttgattccgccacttccaccttgtgaggtgaggcgtgccgactgttcccaaccattataagtagcaccactttcttttccctgatggttgagccgaaggaaaatagtttctttgttgtcttccgtgttacttgacttgcatagcatattttcccattcctttgctgaactgatgccgtcgagtcctttgtcaggcatggcagcctgtgcatcttgggcggcttttaacgctttcttccaacggatgttgtcgggattgttccaattacggttgaatatgggactggcataagtaagcagtacgcggctttttaaggctaatgctgcaccgcgggttacacgcccgtagtcgtcacctgaccaataatcaggaagcatttcggcggcagtattcaggtcttttacaatttgttccacacactgtgtgacggaagaacggggtagtccggtgtccgaggcttcagcgttaagtacggtggtgacgataggtacgggtccgtagatacgtactaagtcgaacatttgtgtggctcggaggaaataagcttgtcccttagctttcttaatgtaatctttattaaacgatgacgcattgttatccagttcttctaataagttattgcaatagcgtatctgatggtagcctgaggctggcgatttttttccggcagctaaactggtgccgaaataagaagccataaaggagctgtttcccaattcggtaatagtatagtacattgttcctgggttagtttttgcgctgatgccccatgcctcctcggttaaattgtcgaacgaggtgctttggtatacaactgttttgttcggggtgttgaaacctttatacatcagttcataaagagcgttgatataccaagtggctttggtttccgtatctagtctgtcgtaaacaccgtcttgcgccatgtcgaggaaagagtcgctacatccaactgtggagaatcctaaggccaggagtgctatataaaatatatttttctttttcatgataaattacgattaaacaaatttgttaaaatgatacgttgatgccgaacgaccaagtacgcaggctaggatagtcggtagctccgtcgttatacatgtttcgataatgattagggtaagggttatacaagtcgaacaggttgtttcctgtcaggttgagccttacagactgcatttttagtggggccacccatgccttgggtagcgaataggcgatggtaaggttacgtatatagcaacggaatgtatttagtttccaaaagtcggagttttcgaatacagatccgcctaatttagtttctacgccatagttgggatagatgccatccgggttagtttccgggtcgaacatgtctttccaaaaagcatcgggtgaccaaacaagagtagcgtcgcttttcacatccatctttttgcggtctatcatccgtacgccaccccatgaagtgcttaaattggcattgactgtaaggtctttccaacggattccaagtttggtagagaattcgtggtcgtcatgtttaccacataattgagcccagtcttgttccttgttgatttgtccgttaggcccttgctgtacattatctttcatttcgccgcccaagtcctggtatgccaacgctcctaaaggaatttcttcttttgtgctttttcccaagtatttggggatggtacccgctgcagtggccaaatcagtaagataattccaataagcatcgcggtcagcttcggtacgaatgattccgtcaccttttgaggtgcctttccatgtgaggaatccccatgtggctcggtaagtggaacctccttcttcaaggtcggaggtgttggaaggatacttgtttttgttcagtcccggtatccatttcctcactttgttgccatctaaaccgaaattcatacctatgctgtaacttacttcgcctattttatcgcgccaatggagcgaaagttcggttccataattatctatacggccgaaattttgctgggcgtagctacctccagcatatacggggataccaggttgctcagctaatttggcattaataatatcatcattgatatcataatacatatcccacgttgcacttaaacgtcctcgtaagaaagtcatgtcgaaaccaaggttcatcttatgactcttgctccattttaggttacggttcggagatgcgactcctggtagtagacccgaactggagatacctccgttcggaccgaattgcgaaccaggattgttttgggtagtgtatgtttgtttccactgccagttaccttttacgtcatcgcgtccggtaagtccccacgatacgcgtacctttaagaattcgaaccaagggagtttttccttgaaccaattttcttcggatgttacccatcctgctgatacgcttgggaaaaatccccaatagttttcgggagcaaattttacggaagcatctgtgcggaagagaaactgtaacatgtagcggtcggcgtaactatatgatatacgtcccaaataagagagggctcccgaacggttttttgctttgttggccatgtctttagctaaaaaatctttcatcgatccatcacgagagtccccagtaaagatatcgtgaaagtcatctgggatgttgtcgcggtaggttagtacgtgacttttgcttttcgcttcactacgttcaatagaaaacatggctgctatatgatgttgaccgaagtcgcgatcataatttacataaaagtttatttggcggttttgcgacaaagaaccctgaaaatttacctgtgcgtcatctttaaatattttggtcgaatagttttctagtgggatattgtttggtaagtgctgtcccactactggttgtttgttgatataagcgatttcgtatggaaaagcgaattgttgcgaatcgattgaattgtgtgacgtactgtaatttgcacgcaatgatagtcctttgatgaaaggtacttcgtaagtaagagaaatattggccgtccaaccgtcttgttcgtcagtggtatatgagtcgttttctgtcagcccgaagtagttccatgaagatactgacgatttcttaggatttgcaatcttgctgtatggggcagtataaggacctagccatacttcctcttcctcgccattctcgttttttaatgttatgctccatggtatatagtctggcatatgatgtaatacgttatagtcggctgtgggcgaagaactgcttcctccatacattttgaagcgagctcctttggtccaaatggtgtttttcttactttcgttgcccgagatggaagcgcttagtttcacgtcggaagttagtttgatatcgagtcctgcgcggtaagtcatgcgacgataatcttgtttactcaagttggcgctttgatcgaagtaactaactcctgcgtagtaagtagcccgttcagtaccgccgctcacatttagcgtgtgggtttgttggaaggcggctttccaattagctttgtcgagccagtcataatgcaagtcgtccatagcaatgatttcttcctcgctgaaaaatttatctatttcttcagctttcacttttccggcattgcgtactactgaattataaaaacgcccatagtcagaaccttttagtactttggaatgacttaccgcatcattgagggcaaatttgcccgaataagtaatgcggggaacacccgattttccccgttttgttttgataaggatggctccattggcagcacgtgaaccgtaaatcgctgcactagcatcgcgcagtacggtaatactttccacttcactaggatccaacgtattcagagctgataaatcaggataccctttttcagtaagttgcattacatcatcgataattacaagggggttgttattaggggagtccttacctaatccattgagactgcgtgcctggcggatatatacttgattatcaatacctccacctgggcggggtgaacccaattcaatatgtaatccattgatttcgccttgcaaggcttctgtgatggtagccactggtaagtcttccagatctttggccgaaatagtggtgatggaaccggttacatttttctgtttcatactaccgtagcctactaccaccacttcgttcattacttggttatccggttccatagtaataacgaagtctgtttggtttgctatggaaatcttttgtgttttgtatcctacatacgagatttccagtgtcgcgttttctgcaacctttaaagaaaaatttccttcaaaatcggtgatagttccatccggagctccggccacttttacggttactccgattagaatttctcccttttcatcgaggatttttccttttacagttttgtcttgttttaccgattgaacctgcgaaaattccccccccccgtgggctctttggtgcttcggcctggagaagataaggagaagcgattaataaacttcctacaagtagtagccgtttattaatacactgccacacatcatggaaatgatgtgtcctgaattgaatagttttcatttgtaatagatattagggttaataaaaaacgccgtaaagatataggcaggaagatttaataaagtggaatattcggtatattttgtgtaattttgagtattcgttgtatttttagtgtaatggagaggacctttcgctatttcttagaatagatataagtgtatgcaaagatgttacatggcttataaggatattgcatatagcattatttcgaaaatataaataatacttgatgtaaaaagagtgagtatatgcaaatgcataagcttatatgtaagcatggtgagaaaaaaacacgggtcttaaggattgtttatgttattaagacccgtgtgaaagtattaagtcagttagtcgatgttgaagggttttaggttaaagatacctggtattatttagacgagtatgcacataacatccaaaccatcttttcttgttctttcaaataatcgctcatcaaagctacagtcgcttcgtcacctgcttgggaggcgatagccaagattttgcgctcttctgtaatgaaatggctataagtttccagaatgttattcagtgcttcgtctccacaactaacgccttccacttcttcgatattagatgttttcaggtaatcgctatatttatttttgggtacgccgcccaacatcagaatgcgttccgccacttcgtcaaccttttcggctgcattgtcgtataactcctcaaatttgctgtgcaatataaagaaaccatgtcctttgatattccagtggaatccccgtaggttagcataaaatacttggtagtcagctaataattgttgcaatgaatctactacctttgctgttgctactgaatctaacttgatgtaatttaaagttctcataatgctattgttttaattggttattgttttttcgtttgtttgatgcaaagatatagtagaaagtaatacgtgtcaaactgataatttctatctttgtatagacaaaatctattaagcagagaaatgatgaatctacaacaactggaatatatacttgctgttgacgaactccgccattttgctaaagctgcggagttttgtaatgtaacccagcctaccttgagtatgatgatacaaaagttggaagaagaattgggtaccagaatattcgacaggtcttttcaacccgtacaacctactccaatagggaagaaaattatagagcaggcaaggaacactgtgcatcaggcttcgcttcttaaagatctggtaaaagaagaaagtaaatcgatgagtggggttttccgcattgccgtgctgccaacgatcgctccttatttgctcccgcgtttctttccggagctaatggaagagtattccatgttggatatccgggtaatggaaatgaagactaaagattgtctggcagctttgcaggagggaagtgtggaggcagctgtcatagccggatcggcggaaggcaaagagttcaactctgtacctctttattacgaatcgttctacggatatgtgtcacaaagagatcctttatataagaaagaaatgattcgctcttccgagattagcggagaaaaactatggttattggacgaggggcattgttttcgcgatcaattaatgcgtttttgtcagttgaagtcagcccaatcgtgtcaaatagcctataagttaggcagtatggaaacttttatgcggatggtagaaagtggtcagggaatgacgtttattcccggtttggcgctattgcagcttaatgaagaacagaagaaattagtgcgtccttttgcaataccccgacccacacggcagattcatatcgttacccgaacggattttattcgatattccgttctttctatgttgatagagaagatacgtggagctgttccggtggaaatgttgactttacagagcggacagaaagtagtttaggtatataaaatgaaagtatactgtgcatcgaatgttattcctataagttcctttctgctccttggcaaaaccttttctaggcagtgtaaagattatttctatccttaattttttatattttacgaatgtgagctatatagttttcaatagtgggctgtatagtttacattcgtaagatatatagtccacatgctagggatataagttttgtatagagtgtaataaagataaaagtttgctatataaaaagtaacggaaagccataaattgtagcggggaatcatttctttttattgaaataaatgttctcatctgaaggtttccatttttggtgaggatcactatacaaacttgccgaatgattacggacattcggatgcgttacctgtattgtgttgctggcttttcccatacttatggtgggtttctgtattatttattatctgtgtgatatatgaaaaagcccccgataaaggacgagggcaacctaagtgttttcacaacggaataatccttattgtgatttgcttcaaattagtgtggcaaagctaaaaaaataaaataatagatacaatatttttaaatattatttgtagttttgggaaaataattcaatgaatcatactatgaaaagaattttaggtcttgatttaggtacaaatagtattgggtgggctttagttgatgaggcagaaaataaggaagagcagtcgtctataattagattaggagtacgggtaaatcctttaactgtggatgagcaaaaaaattttgagcagggtaaaagcattacaacaaatgcttacaggaggcttaaaagatgtatgcgtcgtaatttgcaacgctataaattgcgtcgtaaaaatttaataaattgtttgttgtcaaatggtattatacaggaaactacttttttatgtgagagtggaaatagaacaacttttgaaacttaccggttacgagcaaaagctgttaccgatgaaatctctttggaggaattcgcacgtgtgttgttgatgataaataaaaaaagaggttataaaagcagtcgtaaagcaaagtcggcagatgaggggcaattgatagacggaatgactattgccaagcaactttatgatgaaaatattactccaggtcaatttgttttgtctcttctcaacgaagggaaaaaatacattcccgacttttaccgttcggatttacagagtgaattagataggatatggaagtaccagcgtcagttttatgctgatatattgacagatgactttaaagaacaattgaaagggaaaagtaagcagaactcaagtaaaatatttttgggaaaatatcaaatatatacggccgacaataaaggaaaagataaacgattgcaagcttatcggtggcgtgttgaagcgttaagtaaacagttgacaattgaagaagttgcatttgttatttgtgaaataaatggtctaataaataattcaagtggttacttaggctctattagtgataggagtaaagatttggtttttaataaacaaaccgtaggacaagctttgatgaatggattaattaaagatcctcattatagtttaaagaatcaagtatattatcgtcaggattatatggatgaatttgaggctatttgggaaacacaagccaaatatcattcagagcttactccagaactaaaaaaagaagtacgtgatattatcattttttatcagcgaccacttaaaagtcaaaagggcttgattggttattgtgaactggagaacagccaaatagagatagaggtagatggcaagatgaaaatgaaaacgatagggagtagggtttgtcctaaatcatctcctttatttcaagaatttaagatttggcagattcttaataatattaaggtgacagaaaagtcaaccggtgcttgcagatatttagaacaggaagaaaaggatattttgttttttgaattgagtgtcaaagataaattgtccaaattagatgttcttaaatgtctatttaaaaattataaagagttggatttgaacttcaaagaaattgaaggaaatcggactcagtctttgttgttcaaggcatatcaagatattatagccatgaccggtcataaagaatacgatttctctaaaatgtcagctcatgatgtgatcaaaatcgtgacagatatatttacgggcttaggatatcgtacagatatgttgaatttcgattcaagtatagaaggacatgactttgataagcaaccaatgtatttgttatggcacttgttatattcttatgaaggagataaatcgaatacgggaattgatagcttattggcaaaaattgaagaactgaccggcttggaaagagaatatgcaaaaagattggcaaatattacatttcagcccgattatgggaatctaagcgcaaaagcaatacggaagatattgcctttaataaaaaagggtacagaatttagctcagcatgtaagaatgtcggttataatcactccaaacgttcccaaactagagaggagctggaagataaagtttataaagatcatttagatatccttcctagaaatagcttgcggaatcctgttgtggagaaaattctaaatcagatgattaatttagttaattcggttattgatacgtatggaaaaccagatgaaatccgccttgagttggcacgtgaactgaaaaaaagtgcaaaagaacgtgaggaaatgatgaactccattaataaggcaagggccgaacatgaaaaataccgtgagatccttcaaaaagaatttggcataagcaatgtaagtcgtaatgatataattcgctataagctatatttggaattaaaggataatggttataaaacactctattctaatacttatatacctcaagaaaaattgtttagtaaggaatttgatatagagcatattattcctcaggcaagattatttaatgattcgttttcgaataaaacacttgaaagtagaagtgtaaatattgaaaaaagtaatcagactgcttatgattatgtattaaataagtacggtgtaaaggatattgaggattataagattcgcattgaaaatttatataaaactaatgcaatcagtaaaacaaagcgtaataatttactcatgagatcaacagatattcctgatgatttcattaaacgagatttacgcactactcagtacattgcgagaaaggcttgtgaaatacttgaagatgttgtaaaatttgtgcttcctactacaggattgattacagatcgtttgcgtgaagattggcagttggtagatgtgatgcaagaattaaattgggaaaagtatgataaattaggtttaacagaagtgctggaagataaagatggacgcaagctataccgcattaaagagtggaccaaacgcaacgatcatcgtcaccatgctatggatgcattaacaattgcctttacaaaggagagttttatacaatatttgaataaccttaatgcaaaaagtgataaatcaagtagtatttatggaatagagcagaaggagctctatcgagataagcatgggaagttgcgatttgtgcctcctatgccacttgatatatttagaatggaagcaaaataccatttggaaaataccttagtatctataaaagctaaaaataaagtagtaacgcagaataccaacaagataaagctcaaaaatggatttaagaaaaaggtccagttaactcctcgtggtcaactacataatgaaaccatttatggcagtatgaaacggtatgttaccaaagaagagaaaataggtgcaggatttaccgttgaacgaatagctaaagttgctaatcaaaaatatagggaagcattgttaaagcgtctttttgaatggaatggtgatcctaaaagagcctttacgggtaaaaatagtttggagaaaaatcctatttatttggatgagctacgtacctggcgggttccggtaaaagtaaagacggtggagcaagagacaatttatacggttcgtaaagctattgatcctgatctgaagatagataaaattgtagatgggagaataagacaaattttgcaagagcgtttgaaagaatttgggggggatgctaaaaaagcatttggtaatttagatgagaatcctgtctggttaaataaagagaaaggtatagttattaaacgggtaactatcacaggagcaagtagtgttacgccgcttcatgataaaaaggatcatcgaggtcaatatatgttggaatctacaggaaggaaacagccagtggattttgttaacacgggaaataatcatcacgtggcaatttatcgggacggaaagggtaatttacaagaaaaagtcgtttctttctatgaagcaacaagccgtgtagctcttggacttcctataattgataaagcgtataagagtagtgaaggatggaactttttgttttctatgaagcaaaatgaatattttgtttttcctaatgaagaaataggatttaatccgagtgaaattgatttgacggatgcggaaaactacgctcttattagccctaatttatttagagtgcagaaattaacatcaaaagattatgtatttagacatcatcttgaaacaatcgttgatgataaaaaagaattacatggaataacctggaagagattatcctctttaaataatctagataaaattgtaaaagttcgagtgaatcatatcggacaaattgtatttgtaggagagtattagtcataagattcttgaatgaatctgttttaaatctatagagaaagttctatttcttttatatataagttaattgggtgaaaactgatctttaagaatatgataaagaaaacactttattttggcaatccggtttatctttctttgaggaatgcacagttggttattaaattaccggaagtagaaaagtgcgaatctttttctgaagcatttaaaaaacaatcggaggtaacaagggctatagaggatttgggagtgattgttttagatcataaacaaataactattacttcgggagttttagaggctttgttggagaataattgtgcggtgataacatgcgatggtaaaagcatgccggtaggtttaatgctccctttatatggaaatactacccagaatgagcgctttcgccaacaattagatgcttcattgcctttgaaaaagcaactttggcagcaaactattcaggcaaaaattaataatcaagcttccgttttgaaagattgcacgggagaagaaataaagtgtatgcgtgtttgggcgaatgatgttcgaagtggagattcggataatttggaagcaagagcagcagcctattattggaaaacgttatttcgtgatatagatggctttactcgggaccgagagggaatacctcctaataatctgttaaattatggatatgcaatacttcgtgctgtggtggcgcgagggttagtaaccagtggcttattgccgacattgggtatacatcatcataacagatataatgcatattgtttagctgatgatataatggaaccttatcgtccgtatgtagatgaactcgtattctaccttgttaaaacctataaaaatattcaggaattgaataagcaattgaaaaccgaattacttggtattcctgcaatagaagttaaaattggaagaaaaaggagtcctttaatgatagcggtcagtcagaccacagcttcattatataaatgttttagtggagaatctcgtcgaattatatatcctgatagataatggatcggttaagtgaatatcgtgttatgtggatacttgtactttttgatttgcctacagaaacgaagaaagacaagaaggcttatgccgattttaggaagaatctgcaaaaggacggttttacaatgtttcaattttctatttatgttcgtcactgtgccagtagtgaaaatgcgatggtacatataaagagagttaaatcctttcttccggaatttggacaagtgggaataatatgtattacagacaagcaatttggtgcgatagaattattttatggaaagaaagtacagaatattaatacgccaggccagcaattggaattgttttagaaataataaatcccgtttgaatgcgggatttattggtggaaacagttctcatttttctattctagcatttaatgtataccattgaaaatcagtataaaatgtaaaatcagatgttcccaatggttcaaagatactaatttgaaatcagatgttcccaatggttcaaagatactaatttgaaatcagatgttcccaatggttcaaagatactaatttgaaatcagatgttcccaa

SEQ ID NO: 2388 - DNA, 15675 bp, synthetic construct
  misc_feature 1..15675: note = Synthetic
  source 1..15675: mol_type = other DNA
ctttcagtgcctccgcgttggtcgggtcgtattccagtgattttgcgatatgctgttttgctgcttctttatcgctttcctgcagtttataagcgacgaagaaatgggcgtaagccagattctttttgttggcttcaagttcttcgggcttcactgcggcgatgtatttttcgtaagaggcctgcgcgttggcttcatctttcatgttctgatatacgtacgcctggctgtaataagacggcgcccagtcgggcaggagttttgagatacgctgccaggttcccaaagcatttgtccagtcctgtgcttcctgataggcggtggccagcttgaccagtgcttcggtgtcttctggattggcttctgtctgctttttcagcgcagtgatggcgggattctgcgcagcggtttgaactgcggcttcggtctgctccaaagcttttgcagaatcagtgttctgtgcatagccgaaactcagggctccgaaaaatgctgcggctgccagcgccctggttttcatgtttactttttcctttttcataatacagtttgtttaaaaatgatatccgatctctgcagcaataataattccatgaatcatcaacttagcaaagtttaatatcctttatgaaaacttaactttaattggattttaggcctaaagtttttcgcttttaactgcaatcagttgatgcaaagtggcggtaaagaaatacctttgcacttcaaattttttttagaatgctctccagaatcatcatacacaaagtcggcaacaagatcaacaaggaacaccttttcctctcggaacatgagcttcagctcgaggaagatatgaaggaactgctgaccgattatttcctcggcgccttcaagtccgaagaacagtttcagttttacagcgattcttacctgtcgctgaatccggtttattcgtctgccgcagagatcttcgaagaccgcgacaaatttgtgtacgaatccgaaaacatcgcaaaacatctttttgaaattacccagaatacccgcgtgcagggtggcgaagtttttgtggtttattttgaaggtggacttacggaagacggaaaccaaatggattcgctgggaatctttaaaaccgaaaacaaaaagcctttcctgaagatcagccccgaagacgacaattacggtcttgaaaaagattacggaatttcactcgccaaactggacaaaggctgtttgatctacaatactgataaggagaccggttatgcggtttcggtggtcgataacaataaaaacggtgaccagtattattggttcgaggattttctgaaagtccgtcagcgcgatgatgaatactttcacacccaggaaacgctttcggtattcaaggatttcgtagccaaacagttgccgcaggaatttgaggtcagcaagccggatcaggcagatttcctgaccaaatccctgactttttttcaggaaaaggaaactttcgattttgaagagtttaccaatgaagtgctggaagataagaatgtgatcgaaagttttgtaaatttcaaaaccgattacgaacaggaaatgcaggtatcaatagcggaagaatttcccatcaacgcaacggcagtgaaaaaaaaccaacgctattttaaaagtgtgatcaagctcgacaagaattttcacatctacgtgcatggcgaccggaaaaaaattgagcagggccaggatgagaacggaaaatactaccgcctttatttcgaagaagagaaatagggaagtgccgagttataattaattatatttgtgaattatacaatctttatttgcctatgaattttgttgactgccacgaggaaaaaatacacatctccggccatattcaggattttggttatctgttggggttaaatgtaaacacgcagacaatcagccttttcagtcagaatattactgagctttttgcaatggataagggttttctgggcggcaggatcaccgatttcccggcggtttttgctgccctgctttcatccatagtgtttaaaaatttggatattgataccataaaggaagctgatgtttttctcgataagatcaatgtcgccggcgaatcctatcacttcacgatttaccgcatgggcgacaccgtgttcctggaattcgaaaagatgatcgagcattttcaccgccgaaattatatttccaaaaaatacgaatccatacaaagtgcgtcagatgctgccgcgatctggaacgaacttttatcatcggtcgccgaggccatcgattacgacagggtaatggtgtatcagttcctggaagatggcagcggaaaagtcatcgccgaaaaactgaaaaatgacgtcgagagttttctgcatcttcactatcccgaaagcgatatcccaaaacaggcacgcgaactttatttaaagaagaggaaaagaattttcagcaatgtgtattcggaacccgtcccgctcataagcaacaccgccgaaccaatagatcttacctactcgtcggtgcgggccatgtcgccaatccatgcacaataccttaaaaatacaggtgtgtcctccagtttcagcacctcaatcgtggtgaataataaattgtggggcatggttacctgccagaataccgagcctaaacacatcgaccttatcaacaggatccgctcggaagtatttactgttattgccgcaaatgcctacacctccttcaaatcccgccagatacttgccgacagcgtagctttggaccaaaaaattataggtcttaaaaacaaactgctgaaggccgaaacgctggaagaatctctgttttcaaacgtagctgaaatgcaggaatatccggaagcacatggcctcgcaatcattgtgggcgataatatgcagacttccggtgacgttcccaccgccgaaaacatccacaagatcgtgaagtgggcacgggtaaatcctctgcagaatttttatgccaccaatgatttcagcaataccgaccagggaaatttgggtgctgttgaaaacgccgcaggcgtgatgtttggttttatcgatgagaaacgcaacgaactgctcatctggttccggaaagaaatcgatgctcaggtcctgtgggccgggaaccctgctaaaatacaggaaaccaccgtcaaagatggccgggagcaaaccgtaatttcgccccgaaaatcatttgagatctacatcgaaaacatcaaagggaaatcaaaggtctgggaagacagaaacatcttcgcggcaaaaaaggtcgtcgccaccttgcttgagacgacgtatacgcagtttaaaaaagtacaggaactcaatgatgaactccggaatcttaatgaggaactcgacagtttttcctacacgatctcgcatgacctcggcacgccgctcacggtaatgaaactcaatgcgcagctgctggaacggtcaagccacgaaaatcccgaagttcagaaaagaatctccagcatcctgcaggaaattttaggtatggaaaacatgatgcgtggtgtactgcatctgagtcgggcaaaatcatctgagatcgtcgtgcaggatctttctaccgaaaaaatcattgaaaaaatctgctatgacaccaaactgactctaaatgaagatacggaatttgtgatcggtgacctgcccaatgtaattgctgatgaaaccatgctgactcaggtatttctgaatatcatcggaaatgccgtgaaatattcatcaaaaaatgaaaagtcaagagtggaaattcacggtgagataaaaggagcggcggtgatctacaaagttactgacaacggtattggaattcccgataaagcgcgcgaaaagatgttcaagatctttaaccggatggataacgcaaaatccttcgagggaaatggtgtaggcctttctatcgtgcaccgaattatgcagcgcctgggtggcgatatcacttatacaagtaaagtgggcgaaggcaccacctttattttgactttcaaaaaaccctgataataaatgatttcagcttatttaaaggaaaatacaaaacacctgcacgatcaggtggaagagaaatttcagtctgccagaattttcgacggtacttttaccttcaaggattatcagcatctgctggcctcgaactaccgtttgcttttgaattttgaaaaagaggttttcggaaatatttctgccgacaaccgcgaccttcttcatattgaaaaaagatcgaaactgccgcttatagaatcggaacttgaagccgctgaggttcagaaatccaggctgtgcgaaacgcagtccattaaaaatgaagcggaagcttttggttttctgtatgtgatggaaggttccacactcggcggaaacgtaattgccaaacaactctcaaaacatgccgactttaaagatatttcttttgaatatttccgctgttacggtgaaaacaccggctttttctggaagaattttaaacgtgtcctagacgaggagatcgtgtgcgataaatatgcagactgtatcaacggtgctaaaaaagcctacgcgttcctgctgaatctttcttaaaagtctccgtggtttcatatttgctgcgttcaaaataaaaattatgaaatcgtatctgtactataatcctgcctatgaccacctgacaccggaggaagaagcacttctggccgaagatgcagatctggtggaaaaggccgtacgcgtatctgaccagcttaacgccaaaaaaatatttacgcgaaacgcgcacgcgacttcctttggttttgtacgcggccgttttattgccgaagaaaatcttgccggcgattttgccgagctttttggtggcgaaaatctgggcgtgatcatgcggtattcccatcccaactttatagtgaataaatgcaccggcgaatatccgctgtacggttgcagtgtgaaaatctataataagaaccaaccggtgagtgcaaagtttccgctggtgaatctgcccgtttttattaccaattcagtgtccaaatttttaaagatacacatcaatgcgaaccggtttctgattgccaaaggcaagcctttttatccgtcttttttaaagattcccgccatgttactgagcggcttaagtattttcgccgacaggcagatcttccgtattcttcggaatatggttaaagcactggatattgagaaacagtttatcgcaacttacgattaccactcagtcggctgtttccgctttggtgaccgcgtgatgaagatccggctgaaacccaattacaagaagaaaatcgtgaaagactcgggcctgaatcagaccgagctgcttcagaactattttctggctgatgagcttacgctggatttccaggtgcagatgggcattaatgaaaagaaaacacccgtaaacgatctgttgaaattgtggaaggagaaagattctaaatttattaccgtcggcaaaattatattgccccaacaggatattaccagttacaaaaccatcgcgtacgaaaacctctctttcaacccttttgaaaatctggacggtttgaagcccgttggcagaatacagaagatccgccagcagatctataacaggtcggtggctacacgccaggcattaaataaaaaaaataacccattctaatgaaaacccatgcctgaaggtcctacgatattatttcagaaaaacaaactgcagcgtttcaaaggaaagatcgtttcagaagcttccggttacggcgaaatggataaatctgccctgcataacataaagctgatggatattgatgcctttggcaaatacttcctttttatttttaaggatttctttgttactgtgcaccttggattattcggcagcgttttggtcaatgaccgcaaaaaagtgaatgccagttttgcacttcactttgccgaaggtgagatcaacttctacgtgaccaaaacaaaacttattgaaggcagaccgcaggatcattttaattataaggtcgatatcttgaaacctgagttcgatgccgcttttgtgctgaatgaactgcagacgaaatatggtgatgaagcgattggcgacgcggtgattgatcagcacgttatggccggtgtcggaaacatcatccgtgtagagtcactttaccgttccaagatcgacccccgaagtctggtaaaggatattcccgaaaagaaactggtttttcttataaagacgactttaatgtatgcgcaggaatttttggcgctcaccaaaaccaaaggcgtaaaaacggaagcgctggtctacggcaaaaaaacctgcccaatagacaagaccgaactgctggttgaagtgatgggaaaagtaaaacgcaaaacctacgtttgcgaaaagtgccagaaactgtacaaataaaaaatcctgcttcgtgcaggatttcatgttattcagtataaaggttttcttcaaacagtccttctacggaccagtatctttcgccggtatcgtaattaaacgtcagtatccgtgatccttccggcatgtctgcgagtttcttgtttaccgctgccagtgaggatccggtggatattccgccaagtataccttcttcctgtgcgagtcttttggtaaagttgaaagctccatctttctcaacttcaatggtgccgtcgagcagatcgacttttaaaaccttcggtacgaaacctgcgccgattccctgaattggatgtggacccggctgtccgcccgaaatcaccggcgaggcctgcggttctaccgcaaaacttttcataccgggaaactttgctttcaaaacttcggtcacgcctgtgatgtgtccgccggttcccacacctgtgatcagataatcaaaaccttcggggaaatccgccagaatttcctgcgcggtagtttttgcatggatttcggggttggcttcgttttcgaactgttgcgggatccaggagttttcggtttcttctgccatctgcatggcttttttaatggcaccggaagtgccttcctcttttggagtcagcacaaactgcgctccgtaagagctcataagtttccgtcgctccacactcatactttccggcatcaccaacacgagtttatatccttttacggcgcagaccatcgctaaacctacgccggtatttccggaagtaggttctatgatcagcgtatctttattgatctttccctctttttccgccttttcgatcatggcaaaagcgatccggtctttaatgctcccgccgggattctgtctttcgagtttcatccacacttcgtggttggggaataagcggctcagtcttacggtgggcgtatgtccgatggcttctaatatgctgttcagtttcataaacttattttttgattttatttaatgtcgtttcttttaaatgctgaaaacgataggctcgctgccttcatttttattttttaccgtcacctgtcctttatgaaaaaccaccgagtccggcgccacgctttcggtgatccaaacgtttccaccgattacggaatttctgccgataaccgtgtcaccgcccagaatggttgcattggcataaatgacaacatgatcctcaatggtcggatgccgtttgacatgctgtaaatttttagttaccgaaagcgcgcctaaggttacgccttggtaaatcttaacttcgtttccgattacggcagtttcacctatcacaattcctgtgccgtgatcgatgaagaaatggtgcccgatccgcgctccggggttaatgtcgatgccggttttgctgtgtgcatattctgtccagatcctgggaacgaggggtattttgcttttgtaaagttcatgtgcaaaacggtaaacagcgatggcgaaaaaaccagggtaagaaaacatgacatcctccatggtgtgcgctgcaggatcattatccagaattgtttgggcgtcgtcttccaaagagttgtacacttttgggaaactttcaaaaaatttctcggcaacagcagtttctctgccatcggtcactgaaaataaaatctcattgaattcttttttaaagccatccagacgaagctggatatcggagctttttgagcagcgctgatattccagaaaaaatataaaccggaaaaaacggtctataaaatcttcgatctttcttttatcgatgtcgtattttcggctggaatatcctgtatgaaggcgctcggcaaaattcatgaggtatgtaatttaaaacaaagttacagtttaagtgatcagcgttccttgatttaggataagaaattaaaatgcggtttcctaatttcaagtgaataatgatcagcgggttcagcaagactttaaggcagacaaaaattgcgcaaaactgtaacattttgtaaatttgaattcttaactgaggcttttcgaagccgttaaaaaaaagcggaaatcacagttttccgtatcgcctttaaaaataaataacagagaggaaagcccagggttttcttatcacctataaaaaataataaaaaaaaggatatgaaagttaccgtagtaggagcaggagcagtaggcgcaagttgcgcagaatacatcgcaatgaaaaatttcgctgccgaagttgttttggtagatattaaagaaggttttgccgagggcaaggcaatggatctgatgcagaccgcttcgctgaatggattcgacacaaagattaccggaacaaccggtgattacagcaaaactgccggctccaaagtggcggtgatcacctccggaattcccagaaaaccgggaatgaccagagaagaactcatcggcatcaacgcagggatcgtgaaagaggtgactgcaaatctggtaaaacattcaccggacgtgatcatcatcgtggtttccaatcctatggatacaatggcttatctggttcacaaaacttcaggactgccgaaaaaccagatcatcggaatgggtggtgctttagattccgcacgtttcaaataccgcctggccgaagctttggaatgtccaatttccgatgttgacggaatggttatcgcggcgcacagtgatacaggaatgttgcctttaatgacaaaagccaccagaaatggcgttccggtcaccgaatttttaagcgaagagcaacaaaatcacgtagcagaagaaaccaaggttggtggtgcaacgctgaccaagttattgggaacctctgcctggtatgcgccgggtgcagcggtttctgtgatggtgcaggcgattctttgcgaccacaaaaaaatgattccatgctcactgatgcttgatggtgaatatggacagagcgatatctgcctgggtgtgccggcaattatcggtgccaacggtgttgagaaaatcgtggaaatcagcctgacagacgccgagaaagaaaaattcgctaccgctgcaaaagcagtgcgcgaagtaaatggtgatctgaaattctaaatcaatcttaattataattaaaccttccggtgttgccggaaggttttttttgtgcttctttcctaactcccgcccggaacaccgtgtccacgccaatcgtaaatcaccggaagttgcaggtttagtctgtctattgggatttagttcgcgaccgcttgagaggtctgcggacgattttaatttcgcctgaaaaatcacctttaaaaacaggttttgttgcagactcgttcggggcatgttcccaaatgtttcggaaaaaggccgtttttggaaacaactccgaaaggattcccgaaggagagtgggagaatcgacttcataaaacttaaattattcagatgataaaaaagccaaactgatgagaaatatctctatcaggttcttcaagctttagatcacaaaaaatgccccgcagataggcgaggcgctaaatgttttcacaacggaataatccttattgtgaattgcttttaaaattattaatacaaatatatcgataataatataaatcatgcaaatcttttcagtactaattggaaattttgttaatttaggaaagttaatttaaaaataacgatgatgaaaaaaaatatactaggattagatttaggaactacttcaattggctttgcgcatatattagaaggcgagactgccgaacaatcttctattcaaaaaattggtgttcgtgtaaatcccttaactactgatgatctaactaatttcgaaaaaggaagacctgtttctgtaaatgcagatagaactttaaaacgtggtgctcgaagaatgttagatcggtatcaagatagaagaaaaaatctgattgatgctttaattaaaaccaatattattaccaataaaactgttttagctgaagacggtaagaatacaacacactcaacttatttttttagagcgaaatctgcagttgaaaaaattgaaaaagaagaattggcaagagtttttttagctattaataaaaaaagaggatacaaaagtagtagaaaagccaaaaatgaagatgagggtcagctgattgacggaatggctgtcgcaaaaagattatacgaagaagatcttacccctggtcaattggcttttctattattaaaagaagggaaaaagtatttacctgatttttatcgttcagatttacaagcagaatttgataaggtttgggattttcaaaaagaatattatcccgaaattttgaccgacgaattttacaaagagttaaaaggaaaaggtcaacgcgcgacttctgccgttttttggacgaagtacggattcaatactgcggataataaagcaaaatcaagagaagaaaaaaaaatacaagcttatgaatggcgaaaaaatgcaattcatgaaaaattaacgaaagaagaagtagcttttgttattacagaaatcaacaataatctcaataattcgagcggatatttaggtgcaattagtgatcgaagcaaagagttgtactttagtaatcaaactgtaggacaatatctttatcatcaagtaaaagaaaatcctcacacaagattaaaaaatcaagtattttaccggcaagattatttggatgaatttgaaaaaatttgggaaacacaatcaaaatttcaccctgaactaactgccgaattaaaagctgaagttagggatattattattttttaccagcgaaagcttaaatcccaaaaaggtttgataagcttttgcgaatttgaaagcaaagaaatagaaatagaaaaaaacggacaggttaataaaagaactataggtttaaaagttgctcccaaatcttcccctttatttcaggaatttaaaatttggcaagttttaaataatgttttggttcgtaaaaaaggaagcaaaaaaagatccgcaaaaaaagagacacaggcaacattatttgaggaagaaaaagaagtctttattcttgatttggaaaccaagcaaaaattatttgacgagttaaatattaaaggaaatcttacatcgtctaaaatcattgagcttttaggttataaatctacagaatgggaaattaattattctgagttagagggcaacagaacgaataaactattatatgatgcttttcttaaaattctagaattagaaggttatgatgaagatttattaaaattagaaggtaaggatgatattgatgtttctgaattgaaagtgccggttaccgatattaaagatatggtaaaacgtattttcgaagtcttaggaataaataccgaaattttagaatttgatgctgagttggaagggaaagattttgaaaaacaagcttcatatcagctttggcatttgttatattcttaccaggaagataattctaaaactggaaatgatacgctattccgacttttggaagaaaaattcggtttcaaaaaagctcatggagaaattttagcaaatgttgttttttctgatgattacggaaatctaagcgccaaagcgatgcgaagagtttatacttatattaaagaacttcaatatgataaagcttgcttagaagctggttacaagcattctgcatcttcattaaccaaagaagaaatagaaggtcgaccgttgaaaaacacattggaattgctcaagaaaaatagtttgcgaaacccagttgttgaaaaaattctaaatcagttggtaaatgttattaatacaatcatagaaaataacagcaaaaaagacgaacgcggtaatattaccgaatactttaggtttgatgaaatccgtatagaattagcacgggaattgaagaaaaatgcgaaggaaagggcggaaatgaccactaatatcaatgcttcaaaaatcgataatgataaaataagagctattattaaaaaggactttccaaatgtgaaaaatccaagtaagaatgatattgtcaggtacaaattgtatcaagaattatctttcaatgctttcaaaaatttatatacggacgaaaaagtcaattatgaaaagctttacagcaaagattatgacatagaccacattattcctcagtcgaaagtttttgatgatagcttttcaaataaagtattggttcctagacaatcaaatttagataaaggaaataaaacagcttatgattatatgtctaataaagccgcagatagttttgaaaaatatatatctactgtagaaacgctgtataaagagaagaaaattaccaaagcaaaatatcaaaaattattaaaacaagaatctgaaattggaaatggttttattgacagagatttgagagacagccaatatattgccaagaaggcaagaaatatgctctacgaaatatgcagagttgttaccccaactacaggaagtataacggataaattacgtcaagactggggtttaattaacatcatgcaagagcttaattttgataaatttaaaaaattaggcttgactgaaatggtagagaaaaaagacgggggtttcaaagaacgtattgtagattggagtaagcgaaacgaccatcgccatcacgcaatggatgcattaaccgtagcttttacgaagcacagtcatatacagtttcttaattttttgaatgcaagaaaagatgacaaacacaaagaacataatgcaataataggtattgaaagcaaagaaacaacctggatttatgacgatgatggaaatagaaaacgggtgttcaatttaccaatcccaaatttcagggaacaagctaaaaaacacttggaaaatgtattggtttctaataaggcaaaaaacaaagttgttacgaaaaacaaaaacaaaacaaaatctaaaaacggagagaaaaccaagattgaactcacgccgagaggacaattacataaagaaacggtgtacggaaaataccaatattacgtcaataaagatgaaaaggtaagtgcgaaatttgataaagaaacgattgataaagtagcaaatcctatttataaaaagttattgctacaaaggctttccgagaatgaaaatgattctaaaaaagcttttgctggtaaaaatgttttaagtaaaaaccctatttatctgaatgaagaaaaaacggaaactcttccagaaacggttaaattaagttggctggaagaagattattccattagaaaagatataacgccggaaaattttaaagatttaaaaacaattgaaaaaatattagatgaaggggtaaagcgaattttgaaaaatcgattggaagcatttgggagtgatcctaaaaaagcattttcagatttagataaaaatcctatttggctcaacgaaggaaagggtatttccattaaaagagttactatttcaggcgttaaaaatgcggaatttcttcattataaaaaagatcatctagggaatgatattttagataagaatgatcaaaagattccagtagattttgtaagtacaggaaataatcaccatgttgccatttatagagataaaaaaggaaatttacaagatagagtggtatccctttttgaagcagtacaattggcaaatgcaggagaacccgttatttcaaaagattataaccaaggtttaggttggcaatttttattcacgatgaaacaaaatgaatacttcgttttcccaaataaaaataccgggtttgatcctaaaggaattgacttgcttgacattaataataagaaattgataagtcctaatttatttagagtgcagaaaatttctactaaaaattatgtttttaataaccatctagaaactaaggctattgatggggatattctgaaaaataaaaaagaattgagtggaatattgtacaattttgtacaaactccatccaatcttgaaaatattattaaagttcgtcttaaccatttaggagatatagtaaaagttggcgaatattagaacttataactatgatcacccgctccatctacatcggcaatcctgcttatctcaaactcaaagatgagcaaatgaaaattctctgtccggaaactaaaactgaaaaaggaagtgtgcccgtggaagatttgggattgctcatgctggatcatttccagatcaccatttcccaccagcttattcagaaaatgatgggaaacaacgtagtcattatcagctgcgatgcgcatcacctcccgcacggaattatgttgccactacatggccataccgaacattcccataaaatcaaagcacagctggaagccagtgagcccctgaaaaagcaactctggaaacagactgtggagtgcaaaattgtaaaccaaaaagaagtacttcgaagattaggcaattattatgaaccgatgaccggctaccagaacagtgttaaaagcggcgacagcactaacatggaaggtattgctgcacaacattactggaaatacctcatcagcctggatttcttacggcaacggtttggcgattcgccaaaccagttctttaatttcggatatgccgtgcttcgaagcattgttgcaagggcgatcgttgaagcgggactgcttcctgtgttgggcattttccacaaaaacaaatacaatccttattgcctggcagatgatttaatggaaccataccgcccaatggtagattggttggtaatggattggctgacccggtacccagaatccgaagagctgaacaaagaattcaaagcttttatgctgcaggttgcgaccagagatctaaaaatcgaagggaaaacccgtccgttgcttgtagcagtgaaatctacggcttcgtcgctgaataaatgttacacgggtgagaagcggcagatttcttatccagaatttatatgaatgcggaaaggtttaatgcataccgaatcatgtgggttttagtgttgtacgacctaccaacggacaccaaagccaatatgaaggctgcaagtctttttcggaaaagactgctggatgatggatttgcgctgtttcagttttcgatgtatatgcggcattgcccgagcagggaaaatgcggaggtacacataaaaagggtaaaatcgatattgcccaaagcgggcaaagtcgccattatgtgcattaccgataaacagtttggcgacattgagatcttttttgcgcgaaataaagaggagccgccaccgacgtatcagcaattagaactcttttaagaaaaccttttataccgcttgacaaaggatgattagaattgcaaaaaacaagcataatcaattacgtcaataattaaaaactgcttatttttaattctgtcaaaacctcgtaaacctcctgatgcaggag

SEQ ID NO: 2389 - DNA, 15652 bp, synthetic construct
  source 1..15652: mol_type = other DNA
  variation 13812..13895: note = n is a, c, g, or t
  variation 2245..2251: note = n is a, c, g, or t
  variation 9052..9144: note = n is a, c, g, or t
  misc_feature 1..15652: note = Synthetic
acttttttgcaatttttgacgtagcgttggcttaagcgaattgcaaatgtgtatggcttttagcgttggactcttttttctattaactttattatttccttaaactcctttttatccgtttcgtttagagattccataaacttttcaatccgttcttttgagtcgtaatccaaattaagtccattccataagttaacttccttttccaaactctcggtaaataattcagatttattttctttttcgatacttaataatttcgcaaatcgacaaaactgtccattatcgaattgaacatctaaaatcagattgtacttacctttagttaaggtcttttgtctgtcaattgcttcaattattccatctcctaaagtttcaagaaagactctttcgttaattttaaaattgtcattttcaatctctgaaatagatttagtactttttttgtttattattttattaaaatctgctcgactttcggaaatttcaagtaagcgaattgaaattgcatcaatataatcaaggtcttggacgtttttccattttgaaggaataattgattgaccgtgtaacgcaccaattaaaccacctgcaaatgctgcaatactgtctgtatcagttccaattgaatttacggcttgctcaattccttttaatggttctctcgaatacttacaagctaaataaatacctgcaattacagtagaagtgcctgaacctttcgtctcgtttttataacagccaagtttggataacgcatcaaaatcagatgaattattagtaagcaatttataggttgttcttaaatattcttgtgtttcatcaataatagatttaaataaaattctaaaaggttctttagcatttttattccattcagtttcccaactttttagttttggattatctaaaaagtcaatcgaaaatttttgatgaatgtcttttcctaattcggtaagaaagtttttgaaatcaaaattttcgggattaaaccttaacattgtgtcaatggaatatccgtaaagcatagctcctaaaatagctcttggatgtccgtgagtaattatactattacaaaagatttcttctttgattttatcttcctctccgaaatttgctaatgcaattggcagtattctcattgctgcaccatttgcaccactttctctatagtcgattgtagttttacctgctttaaatgtgaaaaagttattattccatttagcagattttctttctatttttcgagctgcattttttattgttcttcctgcacctcttgaataaagtaaccaatctggtagttctttttttgcaaagtattgttggtcgacaaaaccatctttgttgattgaacgagcaactgaaagtaaaagttgagtatcatcagaatatgaacctgaattaagtttatcaacataaccgtaaaatctacctccaacatttttttcccaatcgtgaaaagaattgatgtaatcagttccaaactttttctttaaagaacttatacttttttcaaattcagtcatccaacctaaagcgtctccaattgctgcaagttttaaactgcctttatattttgtttctgctttcatattgtacgatttggtgaaaatatttctttgtcaactacaaatttacttgtatcaaaagaatacattgctcctttagctgctgccaagttttcttcattttcaaaacaaactgataaaatactgtcggatgaaataatatctcggactaatatttctgcttgaacatttgttggatatttgttagcaatattcgctcttgttccatacggaataggtatgttttgagcaaacaacattttaaacttctctatatctcctgtgattccaatattttttgctgctcgagaagctgcattagttactgaaaacaatgttttatcatcatagatatgttttggatttatttttaaaacacaccaatttattgtaaaatcgtctttagttttttgcctaaactttgaaaacaaaaaggtgtttgggccagaaatagaaagatttatataatttttgtcatcataacggacatcatcagtaaattgcacataatctaatatgtcgaattgttcaatatccaaattttctaatttggctctactcatcaacttgttattttctaatatgctgaataaatttcgcgttggtgtaaaatgaattaaacagtcaatctgtcttttgtcaatttcttcttgaaactcggtataattaggttnnnnnnnaattcattgaaaatttttaaaaaggtaagtcatcatcatacgtatttcttgaagaatttttaggacttatatcttctaataaacttgccttgatttcttttaaatatcgcgatggatttgctttatcacttgaaaaaagataaaggttgtttctcgctcttgtcatacaagtgtatagtaatcttcgctctgtggaaatatggaattcatcatctgcatcaataaatcctgctggaaaagggataatatcgtcattaaggtcaagtataattacattgttaaattcaagtccttttactgatgacattgtgcaaattttaatgctatcacttccataatttacaggaagattagattttactaattccgttgaaaacctgttagcatctaaaaattctttaatttgttttacaccatttgttgacctatgaagaactaccgtacttttaagatttttgttgttttttaaaagtgtaagttggtcatcaagatgatttaattgttcatcaaaatctgaatagtaagctacttttggtttattcgttccttttcttgctgcttttactgtcgtaaattcagacttgtcattctccttatctaaaagcgacagagctgcattggcaatcggtattgtattacgatagttatttttaaattctatggttctaccacctcttacgttaataccaacttcactccaaacaaaaccacttttgaaaatgcgttgtgcggcatcagcaattattgataaactatttgtttcatcacttactaattttgaaatggttagaatctgtgctttattcaaatcttgtgcttcatcaattattatgtgtgtatatggtggaataaagtttgggtcattttgaattttttttagtgcaaggattgcataatcatcaaaatcgactttacctctggtttttaatacttgattgtatttttcataaacaacccaaataacttctttatcagtttttgtaacacggtcggaagttcctctacctgttctcgcagcttcaagatactctgttttatttttaaaaattttacctttcatccaagatatttcttcttgaaaaaactccgcacttttatctaaaatgtttgaagtacttgaagataatccgcttattatgtcctcaatgatttcaatttgagtccattgcattatagtttggttatattcaattcctgcgaaacggtaagcccaactgtgaaaatttattatttgaacattaagtccatctgctgttttaggcttgatttcgtcactatctttttgataacctccattgataaaaggtttgatagcttttatgtaagctgcaagagttttattatacgtaaatattacaatttttgtttccctgaaaagattggcttgtgtctcaagcaaatgtttcgctctataaagtgcaactgtggtttttccacttcctgcaacaccttttatctgaattgggtttgttggtggtaagaatagtacttttttttgttctcctttcagagtaatttttttcagcattttaattcagtttggtattgagcgttgacaaaaaacagctcttttattttcatagcgttggcttttcgtgctggcaaaaaaataaatgtgctgtatgtgcggcaggcttttttagttcatatgttctttttttagcacgattttcgcattatgcacaacgtgtttgtatatgacaagtagcgtgcaagttagcgagtatttttccgccacacaacaagccaaatcttttgtattttgtttttatcttttcttttcaaaaagccaaatcaaaagatttggcgacttaccaaatataccaaaattttcgttttagaaaattcgtagctatttgttatatacggtgttagcagctggttttttctccgttttcttaagtaagtaaaagttttcgtttaagatcaattctttactttgattaatattatttccatatttttttgaaagactaaagtaatcttgatgatcgattaacttataattttcctttgatttataatactgattttcgatagtttgataatcactttcagttgtttttgagacttttttattgaaaaaatccagtaaattttgaaatgctttggtatcttttattgtttcctgaaatgatgcgctaccaatataatcatcacttgtttgaatggtatcgaaaaaattaaacaaatcgtttgtttcttctctagttaaaaaaaacagaacaccttcgataagaataaatgttgatttattaccttttatggactgaattttagaaaataatccttgtttatagtttttactgaaatcaacaccgataaaatgaatatttctttccggaagtacatttttctcttgccactcttttattttagtttttttataattaataatttccggtttatcaatttcaatatgaacaattttttcctctactagaaatggatacatactaaatccacttccaaaatttattaccgcttcaatttgttgattttgaattaaatctttaattgtatctaagaagtatcggtttctaagacagtgggtaaatgtttcttctgatgaaacttggttaagatattctttaatccaattttctgtagtggaattctgccataatttagcaaaattatccttacttaaattttcgtcaaaagctctaaaagttgatgttacaaatgccgtttcgtgtatttttatattttcttctttactcatatttttattcaacttgctgctaactcgttatatcaatactaaatatatacatatcccctcaaaatttacgggatatcaacacttttaagttgtgtttataaatctagtcttttcttttagaagtactttacgtaattccttaatctcatatgagtgtattacaatttcaggattaagaaagcataatgtatagctatgctcgaactaagagctacgtttaaaatactgaagattcccacggcaatagtataccatcccctaggcaaaggctaggcatcccctaggatagagtatgaagagtgtatgaaaacgcctctggaaacgtagaaaattaagattttcttaacttttaactccccacaccagaaaaagtaatgctttggaaagatataactattgactaatgctaagtattagaattcatcgctttaagatgtcaaaatcaaaaaatcgatagcttttacagatagttagacaggaaaatagagtgagcttttaaggcttaagatccgggtatttttcttcaacacgtttaaaaaaatccgatagttttatttgacgcgcatcacaaatctttttaagtgtctctacgggaatacgatattccttctcgtcaagaattcttcttacaattttctcatcaatgtcatgattaagtccgaaatctcggtttgatttggcgtctttaatccattcggaaatggcattacttatgagaaaattgatgttcatacataacaaaggaaaaatatcaatcaaaatttaatgcggaagattttccgcattaaataaaagaatactatatttgactcataattatatatttgcgaaacttcttagcataacatattagaagcattcgctttgaatctcgaatcaaaaactggtaatttttagcaacgagaggataagcagggatgctcacgacccgggcgtgggctctcgcttattgttgcgcggtataccagtaccttgattcaataagttgagacctgcgcctttttgtattaggcccactacttcacgttcagagcctttgtattcttctttatcaagcttcgcatccttttccccctacatcatataggctatagtggccggtaacttgtatgagttgtagtcaactaacagcaaaagcactactacctatgcacaaagctcgtgtttacgggtacacgtaatcatccgctaagtcacccgtgggttatgggttgcttccctacgaagtaacctgtagttgggtgggaaacgccactgtaacagcggcctgggcttataccgggtaggtttaagcacaccggtgaattagccataaaaaagtgccgcagcccctagggtctgagaaaaagagaagctgttaagctcaaaaaccttcccggttgtacttggagtccggcgggaaggcttgagcttaactaaaaacacccttgaaacaatagaatgtaaacgaaatacagaacacttagcttatgaaacgatttcaacttgacacctactacaatgccttcaaaaaaggttgtccacacgcatttgaagcgatttacacgcagtattaccatagtgtctactggatgggcaggagcatacttaaggatgtctatgcagttgaaaatattcttcaggatacctttctcatcttatgggaaaaaagggatcgcatacaatccccagaacatctaaatgcgttcgtacactttgtcatgaaaagcgagtgcatttaccagtatagcaagccccggaatgcgtttcaacgcaacctaagcagattagactatttagagaattatcaggattatttaggtagctatgacgaggatgaagaagctgcacacctacgaagacaggaagcagatcagaaggctttagaccagattcaaagggtacttcccttactaagcagtgaaagaaagcttcttgtggaactgtgcttaaaatacggctttcagtataaagctattgctcaggcaatgggaaccagcactgctaaaaccagtatcggagtaaaaggcgctattaaagatattaagaatatcattactaatggaagtacaccggaagctaaaaccacaccgatccgggcgttaaaggctcaggataatatgacccgcaaacagaaaaaagtcttgcagcttcgtacagaaaagcagtattcctttgcagccatttccaaggagctaaacctttctatacaggaagtacatcagcaatttatggctgcctataaactgttacagcttaaacatgatcaacaacaatccgcttagtcatgggaaaagaaacggtaaaactcacccgaaagatccagctacaggtggatgcgcctaccaaagaggaaaagaagttggtctacgacacgctctaccgctggcagaacagaagcttcagagcggccaatctcattatttcccatctgtacatacaggaacgggtcaaagaattcttttacttatcagaaggaatacgctataagttagcggatgaaaaaaaagtggaaaacggcatgctcaataggtcaaaaatgaactgcacctaccgggtggtatccgatcgttttaaaggggaaatccctactaacattttagccaacctgaacaataccataatcaataactttcgtaacaacctgtcggaatatagtaaaggagaacgcgcgcttgccaattttaagaggaatatcgcttttccttttgggccggtagccattcatggattatcttataaagaagaccaaaaagcattttgttttcgtttgttttccattcccttaaaaacctatttagggaaggatcataccgataaacgaaaattgctggaacagttagtcgccggaaaaatcaaactatgtacttctagaatccaactcaagaagcaaaaaatttattggttagccacctttgaattcgaaaaagaaatacataacctgaaaccggaagtaattgcggaagcttctttatcccttgaatatcctatcactgtgaaatccggaaaagctacacttcgtattggcaacagagaggaatttctatacagaaggctagccctacaggctgctcaaaaaagagcccaaagcggagccacctattgcagacctggaaaaggctttaaacgcaaaactaaagcagtagaaaaattttacgaaatggaaaaaaactacgtaagtaaccgcttgcatgtgtacagccgaaagctcattgatttttgtatcaaacaacaagccggcaccttaattctgctcaatcaggaagctaagatcgaggccgcacagcaagaacgttttgtgcttagaaactggaattattatgaattgactaagaaaatagaatacaaagccaaaaaagcaggtattgaattacttatcgattgatacgaaaataaataattggcccttagggtctgagggtgcttgtacacccgtaaggtgaggtattttaatagcactcactaaatgcaagcagcatatacaacccttcccttaaagattaaataaacagggattgttatgaacagataaacgacataaaatgcaaaaacttatacaatagatgtgagcgaactatccatttaaatagttgaattataaacgtagaacaaacttgttcatctacctaaatttccgctcaacaaacttgggttgttcttcttcctgttgattaaaaagtcgatccaatagtgctttggtcggtttggtttgttccgtttctattcttcgtaatatagcttctaccccatccatgcgtttattaattagtgtttccaagcgctgtttagaatcatcaaagggctcaaacggactgatggaattccgctcaaaaaagtctaaaagagcctctaaggtttcggtataattcgcatcatgtgctagggcatactttttaaagcgctccacggtttcggtgtgaaaatttattcgggaaaatcgtttaggcatcactagatttttaaagattaggataatcaatcgccccctttataagggtttagaagcgtttcacggaaaatcgctacaaagcagttgctttcaatactttacaaatttgaaataacttactataaaacagttgattacaaataaaaannnnnnnnnnnnnnnnnnnnnnnnnnnnnnnnnnnnnnnnnnnnnnnnnnnnnnnnnnnnnnnnnnnnnnnnnnnnnnnnnnnnnnnnnnnnncgcgcagcgggttatcctcttgcttctcatttttgtccgcttcgctactcaaaatgataacttttacatcctaagttatcaattaaaatcctcattaattttgatgtcaaatgctttcaaattttatggaagatcaaaaccatttacttggtatatctggagcgcttttcttgaagtttgatagaaaaacaaaagctccacattagatagatttcaatatacacccaaacgaaaaatagttgcttctaaacatccatttactttccatagcgccatcgcgtttccttttcgataccctccatttaaaatttagtattgaggaaagcttttataaaaagagcgacaacggagcctgattatgcaaagcggctcaaactaaattttagttctttcgagaaaaggaaaggagcgtttgaaaaaagtgtgttggccgtattttgagtttgactcagcctctttttgagcactcgttttatagtgcacttgaatcaagcgaacctaatcctcccgaagtttcgagatcgggattgggttcaagatttttgaatgaaccgcttttaccgtcccgaaatttcgggtgaagcttttttgcggaatggagggaaatggggtttattccccttacattttaaatcaatttataagatattggaatgtaaatgaaaaactattgaatgaaaaaagcgacccgtaaaggccgctttgaatgttttcacaacggaataatccttattgtgaattgctttcagactgctaatataagtaattgattttaaaagcaaaatgaggaaaagcgtaattatataattaatatataatttatattgtggttactaattctataaatccaactaaggtgaaaaaaatattaggacttgatctaggaactaactcaataggatgggcattagttaatgaggctgaaaatgagaatgaagaatcttcaataataaaacttggtgttcgtgtcaatccgctaagcgttgatgaaaagacaaactttgaaaaagggcgccccctatctacaaatgccgacagaaccctaaaaagaggaatgcggcgtaatctgcaacgatataaacaacgcagagaaagccttattgagattttaattgaatatggtattatacaaaaagacactcctctaactgaagcaggaaaaaatactacacacgagaccctttccctaagagcaaaggctgcaaaggaaaggattggactagaggattttgccaaggtcttacttgccataaataaaaaacgaggctataaaagcagccgaaaagcaaataatgaagaggaagggcaagcaatagacgggatggctgttgctaaaaaattatacgacaataacattactcctggtcaatatgttctggaattactattcaaggataaaaaatacattcctgacttttatcgctcagatttaaaggatgaattcaagcgaatttgggaaacgcaaaagcaatattatccagatgtactcaccactgagctttataaagaattagacgggaaaaacaaatctcaaacttgggctatctgtcaaaaaccatttcagattgtaggaataaaaagaactacaaaaggaaaagaaaaaaatattgaaacgtatcaatggcgtgctgaaggtctgacagaaaaattagaactagagcatcttgccattgtacttcaggaaataaataacagcataaatcagtctagtggctatctaggagccatatctgacagaagtaaaaagctttatttaaaccaacagaccgttggcgaaaatctgtatgcgcaacttgtaaagaatcctcatacttcccttaaaaatcaggttttttatcggcaagactacctggacgaatttgaaaccatttgggaaacccaatccaaatttcatttacaactcacagaagacctaaaaaaagaaattggtgatgtcattattttttatcagcgaaaattaaaatctcaaaaagcattaataagcttttgtcaatttgaaagttgggagcaagaatataaagaagaagagagcggaaaaataaaaaaaagaaccgtgggacggcgagttattccaaaatcttcccacctctttcaagaatttaagatttggcaaaatttaaaccatctggtatttaaaaatcaagaaaccaatcaaaacatcaaggttaaagatctggaacaggacttacgccaagggctatttgatgaactcaatatgcgaggtgatctgaaccccaatgatttgcttaaaatcttaaaatctgaatttaagattggaaagctgagtgattggaaatgcaactttgaaaaaatagaaggtaacagaaccaacgctgcactgtataatatatatcaaaaaatttctgattttgaagggtatggagttgattggaaaaagaaagatgctcgtgcaatcaaagaagaacttgcttcaacttttcctgaaatgggaatcgaagctacaatcttaaactttgatgcagaagctgatgattttactaatcaagccagctaccaactttggcacttattatattctgcagaggaggatgataaagtttctgaagaggataaattaatctacggaaataccagcgtgtccctcaagaaaaaattagatcaaaaatttggctttaagccagaatacgcaacaatgctggctaacatgtctctggtttccgattatggcaacctttcggcgaaagcaatccgaaagattttaccttacctaaaagacggacacctttattcggaatcttgtggtttagcgggctacaaccactcaaatagtttaacggcagaagagttatctaagagagcattaaagcctacactagagcttttaaaaaagaatagccttcgtaatcctgtagttgagaaaattcttaatcaaatggtgaacgtggtcaatcaggtaatcgaaacatatggcaagccagatgccatccgtatagaattagcaagagaattgaaaaaatcggcaaaggaacgtgcaaaaatgactaagggaattgctgatgccactaggagaaatgaagaaataaaaaagattattacacagcgatttggcataccaaacccaacaaagaccgatgttgtacgctatcgtctttggcaagaactggaaccaagagggcataaagatttgtttactgatacttatattccgccagaaaagattttttctagtgaaatagatatcgagcacattatcccaaaagcgcttttatttgatgactctttttcaaacaagacactttcctataaagacatcaacctcaaaaaggcaaatagaactgcaatagattttatcaaacaagattttcaatctgaagtagaggcatatacagcacgtgttgagacaatgcttaaaggtggtcatataagtaaaggaaaacgcaataaactgctaatggctttaacggatattcctgatggttttattgaaagggatttacgtaatagtcaatatatcgcccgtaaagccaagcagatgctttttgaagtattccctgaagttatggcaaccacaggaagcattacagacaaattacgcgaagactgggacttgattaatgtgatgaaagaattgaacctacccaaatatcgtgcactcggattaacggagtttgaagagcgactagataaaggaactgaaactttatttaaacacgaggttataaaagagtggaccaagcgaaatgaccatagacaccacgctatggatgcattaaccgttgcatttaccacgcacaaccacattcagtatataaacaacttaaatgctaggagagataccacacaggataatcaccctattataaaaaatatcgccaatcaaattaccgaggttaactctaaaagtaagcgtgtttttaaagcgcctatgagcagctttcgcgaaagcgctaaggagcatatagaagctatccttgtaagttttaaaaacaagaataaagttgttacaaaaaatataaatgttacaaaaactaaaaaaggagaaaacaagaaaatacaactaactccacgaggtcaattgcacaaagaaacaatttatggcaagtctaagcgaccaatggacaaacccgttaaaataaacagtaggtttagtattgcacaagcttctttgataatcaatcaaaaagaaaaagaagccattttaaaccatctaaaaaaatatgataacaatgctgataaagcatttactaccaaaacgcttaaagatgatccggttattctgaatgacgagccattaaaagaagttagagtgtttgaggagattttcacaattagaaaggacctgaatcctgagaattttaaaacacttaagcatattgataaggttgtcgatgaaggtgtgaaagaagctatgaaaaaacgtctcgcggagcataaaggagattttaaaacagccttttcagatttagaaaagcatcctatttggttaaatgaagctaaaggaatctccataaagcgggcaaccataacaggggtgagtaatgcagagcctttgcattatgccaaaaaccatctgggaaatcttatatatgatgaccttggaaaggaaatcccggtagattttgccagtacagggaataaccatcatgtagccatttaccaaagtgaaagtggagaattagacgatgaagttgtttctttttacgaagnnnnnnnnnnnnnnnnnnnnnnnnnnnnnnnnnnnnnnnnnnnnnnnnnnnnnnnnnnnnnnnnnnnnnnnnnnnnnnnnnnnnagccaattgtaaaaagtcaaagtaaacaaggatggccactaaagttcaccttaaagcaaaatgaaatgtttgtctttccatctgaaggttttgacccaaatgaaattgacttaatggatgaaaacaatcaatcacaaatttcaaatcatctgtatcgtgtgcaaaaattatctaaagtagaatatggtaaatcagcggtaagagattttgtttttagacatcatttagaaaccgaggtagtcgacataaaagaaatgaaagatatttcttggaaagctattaaaagtctaggtcatttacaagatatcataaaggtaagaaccaaccatttaggccaaatcgttcaaataggagaatattaatatgattaaacgcaccctcttttttggaaaccctgcttatttaagtacccgtaacgagcaactggtggtcacctttcccgaggaagataaaaaagaagcgagcatccctatcgaagacttaggctatgtggtgcttgaagatccacaaattaccatcaccaatggactaatgatgaagttagttcaaaacaaaacagccataatcacgtgtgataagcagcatttgccctgctctttaatgcaacctttagtaggacataccgagcaaaccgaacgtatgcggcatcagctcaatgccagtcttcctcttaaaaaaaacctatggcagcaaaccgtaagtgcaaaaatttataatcaagcattacatttagaatccagaggaaaaaatgccaagaaactcaaacgctggagtaccgatgtcaaaagtggtgataccggaaacctggaggccgttgctgcggcgcactattttcaaaatctatttagtgaggtattcggctttagtcggaatcaaaaaggaatagcccctaacaatctactcaactacggttatgccattttacgagcagtggtcgcaagagcactggtgagtagtgggatgttaccctccattggaatctttcaccgaaataaatataatgcgttctgtctcgctgacgatattatggaaccgtatcgtatttatgtagatgccttggtttacgaaatcgtagaaaccggctgtaatattgaagaactctccaaaacacttaaagcagagcttttaagtattccggcaatggatgtctatattgatggtaaatggagccctttgatgaatgcggtaagccgtacaacgagtagcctgtatgattgctttttaggaactaatcgtaagatactctatcctgaatatacagtgaacagatcgcttgaatgatgcaggaaaacaatttttcaagacttaaccaataccgttctatgtgggtacttgtattttttgatttaccaacagaaacgcgcaccgaacgtaaagtcgcagcacggtttaggaaaaacttactcgatgatgggtttgcgatgttccagttcagtatttatatgcgtttttgcgcaagccgtgaaaatgccagtgtacacataaagcgtaccaaaaacaacttaccaaaaaaaggaaaagtctgtgtgatgcagatcaccgataaacaatttggtatgatggaactttttcacggtcaaaaagaagttgaaccggaagctcccagccaacaactcgaacttttttaagaaagaaaatgtcaggtcgagcgcagtcgagacctattgaaaaggtctgtttttttatttctaaaaaacaccataaaaaacaggataccagatgtttatgtcgggtatcctgtgaatcctcactaaaat

SEQ ID NO: 2390 - DNA, 15618 bp, synthetic construct
  source 1..15618: mol_type = other DNA
  misc_feature 1..15618: note = Synthetic
ccggggagagtaccaggcatatcgattggaaactgtatgccaagaccgacaagctttacaccaaaaggtatgaggaggagaccaatttgcgctgccatatgatcttggacaattcggcttcgatgcactaccccgatgttgggcctttgtccattttgaacctaaacaaaataggctatggggtattggccattgccgcccttatgaacgtattgaagcggcagcgcgatgccgtcggcctaagtgtgttttcggatgggtacaagtattatgccccggagaaggggagcgagcgccatcatcaaatgttgctggccaagttggccgaattggccacggaggcccaaccgccccaaagtacggaaacctatacctatcttcacctaattgccgaaaaaataaaacggcgcagtcttatttttctgtttaccgatatgtttcagaccgagaccgacgacgaaaaactgttcgacgccctgcgccatttgaaatacaacaagcacgaagtggtcctttttcatttattggacaaggcgacggaatgcgattttaattttgaaaacgtgcccaagcgctttgtcgatgtggagaccggggagcatatcgatctttacagcgatacggtaagggaaagttatggtaagaacataagggcttattttgagacacttaagctcaggtgtgccaaataccgcatcaaatatgtcgaggtcgatgtgaaggccgatttctcaaaagtattgaacacgtatttggtggagcgaagaaaatttttgtaagaagggcttatttttaataaaaatagtttgtgcaattgaataagcgatgtatatttgcactcgctaaacgccacggtctggtagttcagttggttagaatacctgcctgtcacgcagggggtcgcgggttcgagtcccgtccagaccgcaaaaagccttcaacgcaagttgggggcttttttgtttttgcccctgtcgtccaagttgccccgaaaagggcctgtatgggagcgattttggaattaggtgacctcctccccactattttctatttacacgctttatgagatggtgctatgataactgataaagtcctttatttgtccataattagtgcttcctgtccaaaaggttactaatgactcacttaattgacatctaaaattccttttttgatttggtataagattctttgaactccttgtaaagatttatccatttttaaggccaaggtagtttcggtaatatctgctttcggcttttcaaggattgcatcgtctataatatgtatgatggtcttgtaaagtttttcattcgcttctaatataggtttcatctttctacctataattctagcggccgcagtagtcgtttgaaaagaatcatcaaataaatccaagtgtttttcataggcttcctgttcatagaattcccatcccgagttcaataataatgagatatcttctatgtctttggttctatctaggttatcgctccacgagaccagtttaagaattataagtcctaccataggtgtagtaggcaatgtaaaccccgcttctttaatatatactttttctagttgctcgcccacttctttgaagcctaaaacagatagttctatattcctttggtcaaaattaactgtatgattttgttcaatttcgccatagggaaggaggtctaatacagtattggttttttcatatgccaatcgataaatttcatttgttttttgaaatcccttactacataattcttcaatcagggattgatatttagtaaagtcgggtaccataacagcaaaatctatatcagccgtaatacgtgtgggcttgattcctgcacgataaagttgaacatccctggcattggcacctattaaatagtaggtaatgttgttggctacgaagacctcctctaaaatatgatatacctccctgtgattggcaaaggagtaatccttataggttaggtttgacatattggtcaaagatgattttggcggtttctaaatttctctcgtttccactatgaacaagttcggcatagatcaatattgggtgggccacattttttcccaaggcaagatttgtgatagactcaatggcacttttgtctcgccaaaacttaaggtaaacggatatagggccatcggggtctggaaccagcctgaacttagtaatgatatctcttttttcttccgtggtgtaaagggaaaaaagttctggagttagatggtttgtgagcagtgacgcagcgggttctcctccccactttaaacttggataaagtaatttgtttcgccaatcattttcattaaaggccgagaatgtgaattgacctattttgtagttaggcaatactttttcattaaaaacaggaatccacctttcgagtagctcttctcggttaacaagttgatattttttttcatcattccacttaattataaaaccttcttcttgtagctggttaagtattttactggtgctgcctattgatacctcactttgatgtgccaaatatctaaccgttttgttaatggtttccgggtgttttaataattgaaagattagttggcagccagcttgcgtaaaaatttttgtgtttgtgttgtaaatgggtttgccgttatttttttcaatatataactttaacccttcaaggtttagaaaggcatttccataactctctatataattgatgccttgagcttttaaaacttctttagctgtgggggtaatatattttgaggcaactaagaccggaagttttttacttcttttttttataaaatgatatacgttttgaggtcttacttcatttttaaattcaacgaatacaggctccccgttaatttcgtatattttttcagcacgttctttattatgtgataaatagcgtacttccgtttcgaaatctagcgcgtcaaaccactcgtttaagtatatggtactcaacatttgttcattttttaatattgttcatgtaacatgaacatccaaatatattgaaataaaatgtctattcgaaaaaaatgtattataaaggcaagacttgaattaattgatttgggaccaaccattgagtaaattagcaaaaattaagaaatgtagcttcaacgattaaaagcgatttgtgtcgaagataacataccattaccaggtagaggatacgggtaaaaaattagatttaataaaaatgtaaataaaatggtattatcaccaagagaaaaatcaggactcggaaatatatttaaaagttagaaacagattatgacaggtgtgcctataaattagaacatcgaatggatttaaaggttgaagtgctcagtagcgtctcgacatttcattcgctcgaacgaactattaagaagttactttaaaattgagaaaatagtaaggatataattaaactttataagctttctcaagagaatcacttcttgcctaatcctagagatgcgaaacttaagcctagagcattttggtttatggatacccttatccgattggttgaaggtatgggatgtaaaattaaattttattgcaatcgtgcccatgttgagatatttgattaattgactgagataaacttagggcaaaaagtctatagaaaaaggaaagaagacccaactggttcaagtcggagcctgtcccgacccgtcgggatccagaccgcaaaaagccttcaacgcaagttgggggcttttttgttttctacttcttcccacggcgaatcttggcgcttccctgtccttttctgggggttcaacggacggttaaccctgccttgcccataaaaaaatagtcttcctcctgtttttatcgcttgtctttttgtaatttgaaagggaaaaataaaatccgacggtgggttacgattgggtacttgggcttatttaagtgcgcagtcgcatcgtatcgttcaggatttggttaccgagctataattttatgttgtagtattcgttagtaaaggaattgattaataaacagaattcaaatcatgggtaaattcgaaattaaaaaagacaagtctgaccagttcaggtttaatttgaaggcctcgaacgggcaggttattttaagtagtgaagcatacaaaaccaaggcttcttgcgacaatgggatcgaatcggtacgcaaaaattcgcaggacgatgccaaatacgacagaaagacggcgaaagacggcagcccttactttaatttaaaggcctccaatggccaggtaatcggtgcgagccaaatgtattccaatgcctcggccatggaaaacggcattgcctcggtcaagaaaaatgcacccgacgcggtggtcgaagaggtatagtagctataactagtttggggaatttccctaaatcttaaagtataaggcaggccccaaggcctgccttacgtgttgtgtaggcacgcaattgggcatataaatggtaaggattcttaaatttttcttttgaacggtatccgaatgatttggtcaagtcctttgccaattgctttgtcttaataagtcaaaataagattgggttctctcgatcaaggcctatggcaccgttccgttataaggagcttcgatgctacatcgaacatccgcttgcccttttgattccccctttgcttataaaaaaaccactagggccctaccgtttttttactcgtgcccattggccgccctacgatgttttcgagccatttcgaggggcctaaattgcatctgcaggtcgttatgcttgtcaatttcttgatcggaaccctcttttcataaaaatacaatggctttcatatgtaccggtacgattgatcgtgtcgacaaaatgcactttcgttgccggtttttatatacaaaaaataaggcttcccatacaaaacgcccttaacagacaacaataaatggtttaggtctttcttcgatactatatttgataaactataaatatcgtttacctgtagtttggggtaacctttatacactagccattgttttatgaagttctcacttaggcctgggcttgccgcccttggccggataaaaaagtaagaccgtttgcttatcgccaaatatcttgcaaataggtaaaaataggttcagtaaagaatttaagtaacaggcggcgattcaagtttgtcgtcctcgaataaattgtagtaagtagtcaggggaaagggggagaagccatgcttctccctttttttgttttataacgtacctgagtttctttctcaccaactagcccatacccggtactacgcatcttgataggatccagggtttgaattggttaataagacaattatcaattagcaatgaacaatgaacaattaacagttagcagttggcagtttgcagttggcaggttacaatgaacaattagcaattagcaattagcaatgaacagttagcaatgaacagttaacagttaacagttagcagttagcagttagcagttggcagttagcagttagcagttggcagttggcagttggcagtttgcagttggcggttggcggtgattcttgtggtgcttactccttacttcatactgagtactgcacactgcgtacttcactaactagtaactattaactaaaaactaaaaactacgaactactgaacactgaacactgaacactgcgcactgagtactgctactgaacactgcctaccccatacggttcaagatccacggtaacggacctctgttcttttttttcagaaatggtaggcgtatatggtattgcgcttaaaacaggaaagagccccgaatcgaggctcttttgtactattgatggtcttcctttgtctattgttccaggccaaaatagtcggcgacggcattatagtccgaagtgtcgactccggcagcttttagctctgtcattggatttcctccgttctttgccgtattggacagtttcatggccaccatgaccaaatgggtatattcccctccaggaatctccacgggagtatcgttcttatcataaaaaaagacatacaatcttccaacttgaaaatcaggatagatccttgcatagctattgtttccgtacaagcttcccggaatgggatacctcaggcccgatttatgatcaatataaaagagataggcatagtcttcaagatcatcttcgatatagcccgtcatactgaggttgaaattggtgtagtcgaggaatacatcaaggttatatttgtacaattttacattggcgttgccatcggccccatcttggccatcctcaccgtccataccctgacagtccaaggcatccacaacaccatccaaattgatgtcttcattggcatcatcttcggtaatgtccccaattccatttccgttgaggtcccaacagcttataccatcggcaccatcgagtccgtcagcaccggcaactccttggggcccctcggggccttcggggcctatgtccccgtcttcaccggaacaggaaacgaagcctatggccaaaagcaacatggttgtcatgagcaacgggctttttgaccgcttaaaactaagggagtcaaatctttggctctttaagcccaataggggcaatgtaatgctcgatggcattctaaatgagaaaaaacttgttttcatgtttttgtttttatattttgaggggcgaaattaatggcatccgtaccacacttgaccaagcttggtgatgggaggtcgaatcggtttcgccaacgcttcctttttttgtatagcttgcccgtaagggtcttttttagcggaaattgcagacggtacgctatttatgcaagccatacacctattgataccaagtatcatgatgtagcggcatggcgggcgatcaatttttaattttgggaaaatagcatatgccatgagagccattattgtagatgatgaggttgcggccataaacagtttatcctgggaattgcggaaacataccgacttcatttccgttattgaaacctttacctctcccaaagaggccatctccgggataaattacctgaaaccggattgcgtttttttggatatagaaatgccggaaatgagtggcttttcccttttggacaaattggaataccgcaactttgccgtggtgataaccacggcctataaccaatacgccataaaggccataaaggaaagcgccgtagattacctattgaagcctgtggacgaggacgatatagcctgcgtgattgaaaaattgaaaaggataaacggggcgcagaattttcaacatcagtttgaacagacctttgaggccctctcgaaagccagttccccgcaggtggtgccgatacccgtaagtggaaaggtcttgttcctccgggtggaggaaattttatattgcgagtccgatggcaattactccaaagtggttttggaatcgggagagcggctactggtgtcaaaaaaactaaaggaactggaagagctcttgcccaagaggttctttttcagggtgcataattcttacattgtacacctgctgaaggtaaacgagtatttgcggtccgagggctatcttgttctgtccgataaaaataagattccgatttccagaaacaaaagggaggcattcttaaacagtatgggccactagaccttattacggagctactatggattttttaaaggaaagcaaccaaaacgggttcgggtttttcgtggtgtcggtgctcttctacctctttgtattctttttgatccagttctttcagcacaaaaaacgcttctatctcttttacagcctttatgccctggtcaacggggtaaacctgctcaagtacattgatggcgtctttttctccgattttttcgattcgcttgtaggaaggaatctcacctactggatgcattatcccgcgcaattgacggcatctatgctattctgcttctttattatggatatcatgcgattaaaaagggaatatccgactattgtcaaaggcattttatggacgtatgcggtcgtatcgccggtttacctgtcgttatgggcagtgcaattgatcggctatcaaccttattggatcggttatttccacggctttttcttccttcccttgaacgtggtcttgttcgtagtggtgctttatatggtgatggggcgagagcgaatgatcaaatggtatattctgagcggtatgtcggccctttttatttcctacgtgaccattaccctgttttcgttggaaaaatctggggttgaagaagaaacgctttatattttctatctgggggttttgatcgaaagtctattgtttgccttggctattgggctcgaacaaaaaatggcgtataaaaagaaggccattgtacagaaaaagtacattgcccaattggaagagaaccaggccatcaaggagagtatcaaccgcacattgtcggatgaattgatacagacaaagaccgagatggaggggctcaccacagaggcgcaaaaagaacgtaccgaaaagcttaccatgaaaatggagaacaggtttgcccaacttcgcctcgatgccctccgtggtcaaatgaacccccattttatcttcaatgcgctgggctcgatcaagtcgtacttgatcgagaacaatcaagagaaggccatttattacttgggaaggttttcgaaattgatacgtggcaccttggagagttcccgcgaagaccttattaccttggaaaaggaaatgaataccattcgcatgtatgtggaaatagaaagcgaccgctttaagaacaacattacctatacctatcacgtcgatgaaagcctgaaaccagaccaggtgcttattccttctttactgcttcaaccctttgtcgaaaattcgatttggcacggtcttaccaccaaaaaaggggacaaactattgaagatcgaaatcaaggccgaaggtcccgaccgactacggataaccgttgaggataacggaatcggtcgcgaagcatcccaaaagcgaaacctccacgcccagttcaaggacaaatcactgggcctctccattttacaagaccgcttggattttttctcgaaaaagttcaaggaggagttcaaggtaagggtaattgacctcaaggaagaaaaaacagggaagcccatgggtacaaaagtggttttgtctttgccgatacttactgtgggaactatgtaatccccctttggaataaggcaataatctggtgaatacccctaggtttatctagtatttataggtttttaacgatagcgcttttattgaagggaagatgggttacggggcggttggcagtgagcagtggacaatgaacaattagcaattaacaattaacaattagcagtgaacagttggcaggttacaatgaacaattagcaattagcaattagcaatgaacagttagcaatgaacagttaacagttagcagttagcagttggcggttggcggtgattcttgtggtgcttactccttacttcatactgagtactgcacactgcgtacttcactaactattaactattaactaaaaactattaactaaaaactacgaactactgaacactgcatactgcgtactgcacactgagtactgaacacagaacactgcctactgaacactgcctactgtatacattggttcgatttgggtttttatcagtcttccattattttagggttgggcaaaccttttccttaccgccaggtagaaaagaagggaagtagcgtatagatagcgtttacggtagggtgcttccatagaaaaacgagggtgttgtcaactatttcactgcgaaatagcttatgaatgcaaaagtactaataaagacatttaaagataataaacagaaagcgacactggaatcaaccaatgccgccttaaatgttttcacaacggaataatccttattgtgaattgctttcagatatgcaaatataaaaaaagtcgtagaagtcttcaatacgcttttctgtaaggaacttaaaaaataactcagtattttaccctttttagaaaaaaccaaacaacatgaaacgaattttaggattggacctaggaaccaactctattggatgggcgttggtggatgaagctgaaaataccagtgaaaaatcggaaattgtaaagcttggtgttcgagtaattcaatatgataatttcagtaaggttgataaatctggtaaagtctcggagtcaaaaaatcctattgccgattttataggaggaaaagggctctctccaaatgcttccagaacacaaaaaagaggagcaagacgtaatttgcaacgctacaaattaagaagggaaaaccttatttcaattttaaaagataataatatcattaatgatgatactcctctaaccgaaataggaaaaaacaccactcacgaaactctaagattaagagctttggcagcgaaagagcaaattgatttaactgattttgcaaaagttcttttggccatcaacaagaaaagaggatataagagtagtagaaaagctaccagtgaagaggaaggacaggctatagatggtatggcgattgccaaaaccttatatgaggaaggtttaactccaggacagtatgtgctgaggttattaaaagaaaacaaaaagtatatccctgatttttatcgttccgatttaaaaaatgagtttaagaacgtttgggaatctcaaaaaaaatattaccctgatattcttacggatgatttatttaaagccttggaagggaaaaacaaaagccaaacttgggctatttgtcagaagccttttgagattgttggaatcaaacaaaaaggtacggctgctgaaaaacgtttgcagcgttatcaatggcgcgtagaagctttgacacagaagcttgaattggaacatttagcgatagtgcttcaagacatcaataatgatttaaacaagtctagcgggtatttaggagcaatctccgatagaagcaaggccttatattttaatggagaaacagttggagaatatttatataaacaggtattaaaaaacccgcatactaccttaaaaaaccaagtgttttatcgccaagattatcttgatgagtttgaaaccttatgggaaacacagagtaaatatcatccagaacttacagatgacttaaagaaagagattagagatgtggttattttctaccagcgtaagttaaaatcccaaaaaggattgataagtttttgtcagtttgaaagttgggagcaaacttatgttgaaaaagaaacaggaaaacataaggccagaaccataggcagaaaggtaattccaaaatcgtccccactttttcaagagtttaaaatatggcagaacctaaataacctagaatttcggaataccgaagagaataagataattgaatttcaaaaattggataaggaaacaaaagaagccatttttgaagaattaaacctacgaggtgatttaaaaccaaatgacatattaaaaattctgaacaagtacattttagagataaaaaagctctcggattggaagtgcaattttgaaaaaatagaagggaatagaaccaacaaagcgctttatgatgtctatcaaatcatagccgaaaacgaagggtatggttttgattgggcaaaaaaatccgctaaagctataaagagcgaacttaaatccattttcccagaaataggtatcgatgcagctattcttgattttgatgcggataaagatgactttgataaacaagcaagctatcaattgtggcatttgttatattctgccgaagaagacgataaaataacagaagaagacaagctcgtttatggaaactcgagtgtggctctaaaaaagaaactaaatcttaagtatggttttaaaccacaatatgtggcaatgttggccaatatggcactacagcccgattatggcaatctgtcctcaaaagcaattagaaagattttaccttacctaaaagagggacatgtctattcggaagcatgtgatttggcaggctataaccattccaatagtttaaccgcagaagaacaagcgaacagggtactgaaaccgtcattggaattgcttaagaaaaacagtttacgtaaccctgttgtagagaaaatattaaatcaaatggttaaccttgttaaccaggttattgaaacgtatggcaaacctgacgaagtacgaattgaattggccagagagcttaaaaagtcggccaaggaacgtgccgatatgaccaaaagtatcgcagatgctaccaagcgtaatgaagatataagaaagaccattaccaaagaatttggtatccctaatcctactaaaaacgatgtggtccgataccgtttgtggaaggaattagaaacaaggggttttaaagatatttttaccaacacccaaatcaaacacgaggatttatttagcaaaaaaatagatattgaacatattatccccaaggccatgttgtttgatgattcttattcaaacaagaccttggctttcaagaaagacaacttaaaaaaggccgatcgtacagcctacgattttattgcccaagattatcagtcagatttagagaattatgagctacgtgtagaggagttgttcaaaggggggtatatatcgaaagccaagcgcaataagctgttaatgacaaaaagcaagttgcccgatggatttattgagcgcgatttacgtaatagccaatacatagccaagaaagccaaacaaatgctttatgaagtgtttaggaatgtagtgtccacttcaggtagtattacagataagttacgtgaagattgggatttaataaacgtaatgaaggaactcaatttacctaaataccgtgctttgggcttaacagaaatggaagagcggaaaaatggtaaaaaaattgaggttattaaagattggaccaaaagaaatgaccatagacaccatgccatggatgctttaaccgttgcttttaccacacataatcatatacagtacctaaataacctaaacacttatcatagtttaaaggatggcggtattgatttggaaaatagcccactttatgccttgaaaaacacgattaccaaagtgtataaagacaaaaatggtaatagtaaacgaaagtttattcctccaatgcccaattttaggtcaaaagccaaagagcatatagaatccattttaatttcctttaaaaccaaaaacaaagtcgtaacccagaacattaataaaacaaagaaaggtggtggtaagtataatgccaaggttcaattaacgcctagaggacaattacataaagaaaccgtttacggcaaaataaaacaaccacaagctaaggcaaccaaactcaataagcgctttacgatagaacaggcaaaattaattatagacaaagcacaaagagaattggtgttatctcatttggcacagtttaacaataatggagaacaggcctttgatgccaaaacaataaagaaacaacctttattctataaaggagaatctttaaaagaggtcatgtgttttgaagaggtttatacgataagaaaggaaattgggcccgaactaaaaatcgaaaaggttattgatgaaaaaataaaagctgtacttaaagaacgattgaacgaatacggaaacaatgcaaaagaagcattttccaacttagacaaacaccctatttggttaaataaagaaaagggtatttctataaaacgggttaccattaaaggtgttaacaatgccgaacctcttcatacggccaaagatcatttaggaaatgaaattttagatgacaacgggcaagcgatacctgttgactatgtgagcactggaaataatcaccatgtagccatttatgaggataaagatggaaagctgcaagaaaaagtcgtttcgttttatgaggctgttgccagagtaaacgaaggcttacctgttgtagacaaagattataatgtaaacttaggatggaaatttaagtttacaatgaagcagaatgaaatgtttgtttttccttcggaaaattttgagccaaaggaaattgatttgatggatgggaaaaatgcagccttgattagcccaaatttgtttcgggttcagaaaatctcaacaaaaaattatatgttttctcatcatctggaaactcaggcgacaacaggggatgatttaaaaaaacttaagatgttgtctggaaagaaataccaattccttcaaacacctgaaaagttagatggaataattaaggtgagattgaattatctgggagaaatcgttcaagtaggggaatattaacaaaaagccatgatcaaacgcaccctgttttttggcaaccctgcctatttaagcacccgtaacgagcagttggtggtccgctatcccgaggaagaccgaccggaaaaaacggtagctatcgaagacctgggctatgtggtgctcgaagatccgcagatcaccctgaccaacgggctgctgatgaaactggtacagaacaagacggccgtgatcacctgcgaccggcagcacctgccctgtagctttctccagcccttggtaggccataccgaacagaccgagcggatgcgccaccaactcaacgccagcctgcccctaaaaaagcagctctggcaacagacggtcatggccaagatcgagaaccaggcccggcatttgttggcccgccaaaagagggccctaaagctaaggcgctgggcccgggaggtaaagagcggcgatgccgaaaaccacgaggccattgccgccgcctattactttcagcatttgttcgacctcgaaggctttagccgcaaccaaaagggcctgccgcccaataacctgcttaattacggctatgccattttacgggcggtgacggcccgggccctgtgctccagtggcctgctgccctcggtgggcatttttcaccgcaacaagtacaatgctttttgcttggccgatgacatcatggagccctatcggccctatgtcgatgccttggtctacgagattgtggaaacgggctgcgcgatcgaggaactgaacaagaacctaaaggccgaactcttgcggatcccggccatggacgtggtcatagacggcaagcaaagccccttgatgaacgccatgagccgcaccaccaacagcctgtacgaatgctttttgggcagtagccggaagctcatgtaccccgaatttgaatagttaagaaggcttctggcaaagaccgggcatgtatggaccaaaaccgatttgaacgactcaaccaataccgaagcatgtgggtacttgttttttttgacctgccgaccgacaccctgaccgatagaaagtatgcggccaagttcaggaaggacttgctgaacgacggctttgccatgttccagttcagtatctatatgcgcttttgcgccagtagggaaaatgccgccgtacacattaagcgggtcaaaagggccctgcccaagaagggaaaggtggcgatcatgcagattaccgacaaacagtttggcatgattgaactgttccacgggcaaaaggagctggagcccgaaccgcctagccaacagttggagctgttttagaaaacaaattccttgatgggccaaggggtgtgccctatttttgatatttgtttttttattctatgacaggggctaaaaacaagaataccagcc

SEQ ID NO: 2391 - DNA, 15583 bp, synthetic construct
  source 1..15583: mol_type = other DNA
  misc_feature 1..15583: note = Synthetic
gccgcgcgccttgacccattcgccgtcaacgtaggcttcgatcgggtcggtctcgaagttgtggggactgtcgctgagtttctgtggaaccatgtccatgtgggcttgcagggtgacggttttgcggttttccatgcccggggtggcagctttgcgcatcactacgttgccggccttgtcaaggaaagcctctacgccggtttcgcgggcaaagtcaagaagaaattgttgcactttctccacatgccctgaggggcggggcacgcgtgtcagggcgtagaaatgacgccaaatggaggagggttgaaggtctttgatctcggtcatagtagtaagatttatgaatgtctcagttttttcggatagtcagcggttcgcggaaagtgtactcctgcgtctgataagtggcaggtcgacgagcgcatagacgccaagcacgacgacgagcatcgtctgcaatgtgtggactacgagggcaaaatccgctgctgccacgccgtctacgccgtagagcacaagcatcgtcttgacggcaaagtgccacgggccggctccgttgggcgtcgggacgagcacggcgaacgaccctacgcaaaagatggccaaggcagctcccggccctatgccggaggtgaagtcgaagcagaagaaggcgaggtagaagtggaggaaataggctacccatatgcccaccgaataggctatgtagagcggcaggttcctgaccccgcgcagcgacacgatgccggcccaaaggctgaggaagacgccgcgtgcccggctgaacgcttcgaggcgggtcatgagcgcgtagagacccgctccgagcgccacgatgcagatggcagtcacaatgtagcccgtccctgtgaagcgccctaaggcagcgccgacgtcggtgcctgtctgttcgaggaaacgggccagtgtaggcagctggaggaggaacgcgagccccgtgaaggcgagcagcacggccgaatcgacagcgcgctcagtcaccacagtgcccaatgagcctgcgaacgacgtgccctcgcgttctttcagcgtgccgcaccgcgtcacctcgcccacgcgggggatgacaaggctggcggcataggacaggtatacggcgtcgatacacgtccgccggcgcggacgttcgcccaagggggcgagcgattgccgccacctcagggcgcggaacacctgcgccgccacgcccggcaccatcgaggccgccatccattcccagcgcattgagcgcaccgtttgccagaggcgcggccattcggcgtcgcggtacatccaccaaaggatgcccagccccaacacaaagggaagggcaagttttaacaggcttttcagcaggcgtgcacctgctgtattcttctcgtcttgtttttcgtccatagaaaaagtaaaatcgctgctaccggcgtgccgggcatgcgaacggcagcaaatgtagtgaaaaagcgccacactcgggccacgcgctccacgaaaaaacgtcctgcgtcctgtcaggcgcctgtcgggtgcggaaaaaacgctaactttgtgcccaaaatgtccgtcgccggcaaaaaaagagaatccatgatgagaaacgtccgccccaagaagtcgctcggccagcacttcctgaccgaccagccaaccgcccgtgccatcgccgacaccgtcgacgcctgccccggccttcccctgctcgaagtggggccgggcatgggcgtgctcacgcagtacctggctgcgaaggggcgtgtgctgaaagtggtcgaagtggaccgcgagagcgtggcctacctgcgcgagcactttcctgagctcgacggctccattgtcgagggcgatttcctccgccttcccctgtctgaagttttcgccgggagtgccttcgtcctgacgggtaactatccctacaacatcagtagccagatattcttcaagctccttgccaaccgtgagctcatcccctgctgcacgggcatggtacaacgcgaagtggccctgcggctggcctcgccgccgggcagccggacttatggcgtgctgagcgtctttgtgcaggcgtggtacgacgtccactacctctttaccgtcgagcccggagtgttcaaccctccccccaaggtgcgcagcgccgtcgtgcggcttgaccgcaacgggcggcgggagcttgggtgcgacgaggcactgtttgcccgtgtggtgaagggtgtgttccagcaacggcgcaagatgctgcgcaaccccctgcgtgcgctgctcgcccagctcgacggtcccggccctgcgcgcggccacgatgcttttctcgcccgccccgacctgacgcggcgccccgagcagctcagtgtcgacgagttcgtcgccctgacgaacgatgtccagcgcgaactgggacgctgattccccgggaaacggcgccctggcggaggagaaaggagatgagaaaagcgacccttccaccgccttgggcaggagcgccgctttgaatgttttcacaacggaataatccttattgtgatttgcttcgtggcaaaggtagcgttttttcttgattcaccctttgcctgagaaaaaaattatatttgagcccttattggggagatttcgtgccgtgttccaaaagaaaaaagtaattttggagcaaataaccttttatagactatgaaaagaatcctgggaatagatctgggcacgaccagcataggatgggcttatgtgctggaagccgaagcagcgaacgaacagtcggaaattgttcgtttaggagtcagggtcgtgccgctcagcgtagacgaagaaacgaaatttgaaaagggacagagcatcacaacgaatgccgacagggcggcgcggaaaagcatgaggcgcaacatcgaccgttatcagatgcggcgtgatgaactggtagccgtgatgagagaagaaggctggatcaccgaagagacgacgttgtccgaacatgggacgcggtcgacctttgaaagcctcagacttagggccgaggccgtagagaaagaggtgaccctcgcccaattggcccgtattttgcttcaaatcaataagaaacgcggttacaagagcaaccgtaaggcggacagccaagaggaggggccggttatagacggtatggatgtgtccaaacaactttgcgagcggagtatgacgccggggcagtgggtgtatgagcggatgcaaagaggaaaaatgacggttcctgctttcttccgttccgatttgcagcaagaacttgatcatatctggacgttgcaacacgcttgtcattcagcgtggatgaccgatgaattgcgtgtagccttgacgcaggctgacagccggagagcacagcagctgatggatgcgcatggcgtaattccggaaacggtaaaggggaaggaacgtcgtcagatcctttatggctggcgttctgctgcggctatgggtggtttgccagcggcacagctggctgcggtcttgattcaaatcgtgagagacataaacgcttcgagcggctacctggggcagatcggagacaggagcaaggaactctatttccggcatgaaacagtgggtcagtatatgtggagacacatacaggccaatccccatgagagtttgaaaacccttgtcttttatcggaaggattaccagaatgaattcgacgcgttgtgggcgagccaggctcggttccatcctgaactgacggagaggttgaggaaacgtttgcggcacattctctttttccaacgcccgttgaagagcaagaaaggcttggtgaaccgttgtgaactggttcattattctattccggaaaacgcggcggacggcagaggaagacggcgtgatgtcggaccgaaagtgtgtccgaagtcgtctccgctatttcaggaattcagaatgtggcaggtgttgaacaatttaatgcttattcacgtcccgacacaagaagtccgtcccttggctgacgaggagaaggaaatgcttgcggccgaactgtgctatcgtgtcaggatgaagaagaacgacgtcttgaaattgctgtgcgaccattggcgcgaatgggacctgaattataaggaacttgaaggcaaccggacgctggcggctttttataaagtgtatgagcaggtcatcgcgcagacaggacatggcgaatacgattttgaaaaaatgcgtgcggctaaggtgcgcgaacttgtcgggggagtgtttggtggcctcggctttgaagtgggacttctgtcttttgatgcggaactggatggtcttgcatatgaacagcagccgctctatcgtctttggcatcttttgtattcgtatgagggcgacagttcggcaaccggggacaaatgtctgcttaaacgcctctgcgcactgacgaaaatggatgaagatgtggccaggttattcctgactgtacattttgaggatgattacgggagcctgagcaccaaggcaatgcgccgaatccttccttttctgaaaaaaggatatatgtatgacgtggcctgtgagcaagccggttattgccattctgtacgttcccgcacgcgtgaagaacttgacaagagaacatataaggaccggttggatctcctgccgtcgaagagccttcataatcccgttgtcgagaaaattcttaatcagatgatacacgtagtgaacggcgtgacttctgcatacggtaagccggacgaaatccgtattgagatggcgcgtgagttgaagagttgtgccgctgaacgtgagagaagaacggcctccatagcgaaggcaacgaaagaaaacgcggagatagaaaagatactccgacaggaattcggcctgtcgtatgtcagccggaatgatatcgtgcgctataagctctatgaggaattaaaggaaaatgattataaaacgctctactcaaacacagatataccaaaagaagaattgtttagcaaagcatttgatatagagcatatcattccgcaggcccgtctgtttgacgactctttttccaataaaacgcttgaagcgcggcaagtgaacattgagaaaaaagaccgtacggcttgggatttcgtaaacgattgttatggttccgaaggggccgctctctaccggtgcagagtagatgagttgttcaataaaggcatcatatcgaaggacaagcataaatatctgttgatgccgggcgataaaattcccgaggatttcatcaatcgagacctccgtaacacccagtatatagtccgtaaggctttggaactgttcgaggattttgtgcctggcgtattggccacctctggggccatcaccagcaggttgcgtgaagactggggactcgtcaacgtgatgaaagaaatgaacctgcctaagtatgagcgacaaggagtagttgaggcttgttcggatcgtgaaggccatgtgtttaagcgaattcagaattggaccaaacgcaacgatcatcgtcatcacgccatggacgcgctgacgatcgctttcaccaagcgggcttatattcaatatctgaatcatctcaatgcgcggaaagacgaccagtcaagcctatgccatacagcaaaaagaaatggagtgtgacggagaccaccgttggcggttcaaatgtccgttcggtgatagatctagattccggcgggaggccatgagacaactcgaccaaatactcgtgtcgataaaatcgaagaacaaggtgcttacgccgtcattgaaccgctcgaagaaacggggaggatataacaggaaaatagaatggacacctcgtggcccgttgcataaagaaactgtatatggacgaatccgtcgttacgtgacgaagaacgtccgagtgggctcttcgtttacgcaggcggagattgagaaagttgcaaacacatgtttccgtagagcgttgttggctcgtcttgcagagttcggcggtgatccgaagaaggctttcacaggaaaaaatagtttagagaaaaatccgctttattgcgatgaggcacatacgcagaccgtgccgctcctggtgaagcttgtggagcttgaagaggtaggtacgatacggaaagaaattactcccaaattgaacgtggaaaaagtggtcgatcgccgtatccgtactttgcttgaagaacgtctcgccctgtatggtcaggatgccaagaaagcattttccaatttaggtgaaaatccgatatggctgaaccaagagaagggcatatcggtcaaacgcgtgacgattatcgacaaaagcgacgttgtatccattcacgagaaacgtgatgttgacggtcgcctgatgcacgatgaacatggacgaacgattccgtgcgactacgtccagacgcagaataatcaccatgtggcgatcttctgcgatgcagagggaaacttgcaggaacatattgagacgttttttgacgtggttgaacgtgtccggcagcaacgcattgagtgtcggaccgtggaagtaattgacaagaactacaagcgtgatgagggttggcagttcctcttctcaatgaaaataaatgagtattttgttttcccggatgagaagaccggtttcgaccctcggtctgtcgatttgacggatcccgctaattatgcgttggtcagtccacatttgttccgtgtacagaaactatcgtcgaaagattattatttccggcatcatttggagacgaccgttgaggacaccaaggccttgaaggacgtgacatggaagcgggtgcggactttggaaaaattgaagaatatagttaaagtgcgggtgaatcacatcggacaaattgtggccgtaggtgagtattgacttcatggaacagaaatatgataaagaagacactctattttggccatccggctcgtttgtcgttgagcgaaggtcagcttgttattgagaggcccggtgcagagaaagtgcgccgggccacggaagtgtggttttcggaggacaaagtcacacgtcctattgatgatataggcgtgatgatactcgataatcctcagttgacgctgacctcgcagttgatggaggctttgttggaaaacaattgtgccctcatcacgtgcgacgggcggcatctacccgtcggactgctgctcccgctttatggaaacactacgcagaacgaacgcttccgtcaacaaatagatgcctcagtgcctctccgtaaacaattatggcaacaaacgatacgggctaaaatactcaatcaggcggctgtcctccgcgaagtcggcgtcgaaaccggttgcttggaagcctgggctcgtgaggtgcgcagtggtgaccctgacaatttggaggcccgggcggcagcctattattggaagtgggtgtttcgtccccgtcaaggcttcgtacgcgaccgcgaaggggattatcctaacgccctgctgaattatggctatgctattcttcgtgcagtgatagcccgcagtctcgtcgcaagcggcttgctcccaacattgggtattcatcatcacaaccggtacaatgcatattgtctggccgacgacgtgatggagccttatcgtcctttcgtggataaggtcgtggcaggcatggcgctccatgacgaaggccatgaactcacgccggatgtcaagcggcaattgctttccatcccgacgcttgacgttgtgctggacggacgccggagtcccttgatggtggcagccgggctgaccgcctcatcgttgaacaagtgtttctctggcgagttgcgccatgtcctttatcccgaatggccgtgaacaggattagtcagtatcgtgtgatgtggattcttgtcttctttgatttgccgaccgagacgataaaagagaagaaagcttatgcactcttccggaaaaatctgcaacgtgatggtttcactatgttccagttttccatttacgtgcgccattgcgccagctatgagaacgcagacgtacatctacgtcgtgtaaaatctattcttcctccgtatggaaagataggtctgctttgcatcacggacaagcagttcggcaatatggaacttttctttggccgtgcgccgcatgatgtttgtgcgcctggccagcagttggaattgttctgaagcaaaaaaaactccggtttgttaaacaggagtttttttactgcggccattttttctttcctcgttttgtgctctaatgatctcttattcagctgtttgtggtgttcgagctgtcgcagatactgcaaaggtaagaatttgaaagcaaatcacaacgttgaagttgatttctgtcttcgcctccgcgctgtcgcagatactgcaaaggtaagaatttgaaagcaaatcacaacagttcactctatcaagaataaattttattcgctgtcgcagatactgcaaaggtaagaatttgaaagcaaatcacaacgcattaataattctgtgttgaagtcgttggggttactgtggcggggccaaaccatgtgcgtcgaaaaaacgaggctttgtccgatgctggccgtttctgatgggccggaatgatgtcgtagccgtagtcgccccggtgtggagtgataagcttggccggcacgaggctctcgccttgctggatatgagagagtggatgtggacagcacgctgttttgccctatgtccgaactgcacggcctctttatcgcaggcccacaagcattccggcgtccatgtccggtggttgtttcgtttagggttggcggggtgggggactgttgtcggcgtgggcgtctttttgagtctttcgtcggtgagtcgggggtcgtcgtgtgtcgtcgtgtgtgggtgcgtaggagtcgtcctcggagcaggcgaaccgtgtgcctgctgcgggcggcgagctgcccaatgaggcatgcaggcgcgcgtgggctggcaggggttacaactttttaactgacagtgcttgtctataagcatagaaatgccgacctttgcgccggtttttgaacagctggaatgtagggctggcttccgtcccatctcgccgcctctttcggcaagtccgccatcgggcggggcttttcgggacaatggggccgacacgcttcgcccctcaccccctttcctcgcagccgcgacacgctcacaaggtctgtcttttttgtgtcgcgcgattccggcgtaaaagaagaagcatgaaaataacgaaactgatttttttcctaatgacaatggtggcgtccgtcctcgctgcggatgctcagcaggtcggcgacgctacctattattccaaccggcttcacgggcgatacacgagcgacggctcccgctatcatcgcgacagcctcacctgcgcccacaagacgtatcccctcggcacgtatctgaaagtgcgtaacgcccgcaacggtcaggaggtaatagtcaaggtgacggaccgcggcccctaccgccggggggctatcgtggatctttcctatgccgccgccaaggagatcggcatgatcgcagccggggtcgtcccggtcgaggtggagcgggtggaatcgccagccggttacttggccgctcctgagggcgagacgctcaggctgccggagctccgcgtgcgtgacgccgcaacgggcgagtattacaccgtgtcggaatgggctcgccggaatgaggaggagaaggcgcgggctcgcgaggcggaagccgcgcgccagcgtgcacgctacacggccaaggctcagaaggagaagcggtggcgcgttctggctgacaaggtgacggcccagaacgccttgaagggttcggcttcgacggggttgttccgccgcagcgcagcacccgtgcagtgatgtcgggagtgcggagcggcgggacgcgccccgccgcgtagggccacaccttgtgggcgacaattccggagaggctatacgccgcggggttgtcgccccgcatgatttttccggcagatagtattgttatttcacccatatgcaaattttcaagatatgagcaagaagatgaaacccgccacactttgtgtgcaggccggctggacgccgaaaaacggcgaaccacgcgtgctgcccatttaccagagcacaacgttcaaatacgatagtacggaacagatggctcgtctgttcgatctcgaagagtcgggctatttctacacgcgcctgcaaaatccgacgaacgacgctgtcgcctcgaagatcgcacagctcgagggcggcgtggctgccatgctgacgtcaagcggtcaggctgccaatttttatgccgtcttcaacctctgtgaggctggcgaccattttatcgcttcgagtacgatttacggcggcacattcaacctcttcggcgtgacgatgaagaagatgggcatcgcctgtacgttcatcgacccagactggaccgacgaggagatcgaaaaggccttccgcccgaacaccaagtgctttttcggcgagaccatctcgaatcccggcggccatgtgttcgacatcgagcgttttgcccgtatcgctcacaagcacggcgtcccactcatcgtggacaacacgttcgccacgcctgttcactgccgtcccttcgagtggggggccgacatcgtgacccactcgacgaccaagtacatggacggtcacgccacggctgtgggcggcgccattgtggacagcggccacttcgactggatggcccatgccgacaagttccccgggctctgcctgcccgacgagagttatcatggcctgacttatgccgaggccttcggcaagggcgcgtatatcacgaaggctactgcccagctcatgcgcgaccttggatccatccagagccccgagaacgccttcctgctcaacctcgggctcgaaacgcttcatctgcgcatgaaacgccactgcgagaacgcacagcgggtggccgaattcctgcaagccgatccgcgtgtggcatgggtcagctatgccggtctgccgggtgacaagtattatgagctgggccggaaatatctgcccgagggaggatgtggcgtcattgccttcgggctgaaaggttcgcgtgaggataccgtccggttcatggaccacttgaagctcatctgtatcgtgacgcacgtggccgatgcccgcacctgtgtgctccaccccgccagccacacacaccgccagctcagcgacgaacagctcgtcgaggctggtgtgcgtcccgacctcatccgtctttcggtgggcattgaggacgtcgacgacatccttgccgatttgagccaggcgcttgacgaactggcctgatcgtcatctgatacatccagggacaaagcacccgtttccacaagagggagacacaagtcctcctgcgtgcggaaacgggtgctttgccgtttttgacggacagccgtccgctttttcctctcagcaggccggcgcctgctcttcggcccagcgggctttattctctgagagccagggacgcagcgtccgcctgccgttcccaatcgagcagaaagcgcttggctgcgagaccgcctccgaagcccgtcaggctgtggtcgctgccgatgaccctgtggcagggagcgaagatcgaaatggcattggcgccgctggcgtttgccacagcgcgtacggccgtggcgaggccgaggcgccgggccagttcgctgtaagaaaccgtgtggccatagggaattttgagcagctctgcccagacttccttttggaacggcgtgcccacgaagagcagggggatgtcgaacgtatggcgctgtcgggcaaagtattcgtcaagttgatgcgcagcctcgcgggtgacgtcgctgccgcccgtggtgtattccgcagcgagcgcccgttgcagccggcgggcgattcgtccaggatgtttctcgacaatccaattgcaaaggcagagactcccgtcgtacgacccgagtaacaggtcgccgcaaggcgaacagtagggttggatggatatcgtttttttcatctctttgtctgtgtctgaggaggtccggctgctttttcttccgggtgtacggaaggttgccgggggaatgcgatgttacggtagcaaagatacgcaaaggaaagagccggggaaagaaaaagcccgctttttcgcagacctgtcagggccgcctccccgcttcgtgcggaaagtaggtgattgccaataagggaaagggccgaaaggcgcataaaaaccgtagtcatggcgcatggcggtgaaacggttcagtcctgagtgattttgtattacttaatcaaactttcccttttttcttacggaggaaagtcctaattttgcccaccataaccataaaagttaaacggggaagttgtgtccaagtcaggccgtcacgagcagtagataagctcggtcttgccttttggacgctcttttcaaatatagtttaaccttattcttagagatattacggtccttcaataaaaagcatgacagcatatatgacaagcgatacgatttgtgcgaccgccacagcatcgggcggcgcgttgtgcgtagtccgtgtggcgggtccggaagccatcactgtggccgacagggtctttacgccccggcatggggaagccctgcgcgggcgggcaggttacacgctggtttttggtgatgtgcgaaggtccgacggcagcctggtcgatgaagtcgtggtcagtgtctttcgtgcgccgcattcctatactggcgaggacagcgtggagatttcgtgccatggatcggcctacatcgtgagtgagcttatgacacggttggttgaagcaggctgtcgcatggcccgtccgggtgaattcaccgagcgggctttcctgaacgggaaaatggacctcagccaggccgaagcggtggccgacgtgatagcctcgacatcgcgcgcggcgcaccaagtggccatgagccagatgcgcggtggattcagcagggagttgactgcattgcgcgaccgactgttgcactttgcctcgctgatggagctggaacttgacttttcagaccatgaggatttggagttcgcagacagaagcgaactgttggcgctcgccgaagagattgaaggggtcatagggaagctggccagttcgtaccgggccggcaacgtgattaagaacggagtgccggtggccattgttggagagacaaacgcaggaaagtccacattgttgaacgccttgttgggtgaggaaagggccatcgtgagcgagatgcatggcacgacgcgcgacgtcatcgaggacacggtgacgctcgacggcgtgatgttccgcttcattgacacggcagggctcaggcagaccacagacgtggtggagaacatgggcattggccgtacgtacgaaaaaatggagcaagccgctgtgctgctgtgggtggtggacgccacggacgtcacggccgccacacgcttgcagtccgaaatcctcgcgagagcaggggacactccccttctcgtcttgttcaataagtgcgacaaactcagcctgccagagcgccaggacgtggccgcacgtttcgagagcataggagccgcccggttattcatctccgcccgcgaaggaacacatatcgacgaattgcgccgaatgttggtggaggtagctgctttgcccgacctgtcgcaggacgcggtcgtcgtcaccaacgcacgacaccatgaggcgcttttgtgtgcgtatgacgccatccaccgagcccacgaaggcatcgtacgtggcctttcgggcgacttcgtcagtcaggacatccgtgagtgcatacatcacctcagcgacatcgccggcgacgtgacatcagagagcatacttcaaaacatattcagtcgtttttgcgtaggcaagtaagatatacttacaaacgattagtatcaatcatcattgattagtaaggcgttcattttgagcgccttttatttttgctcatccagcgatattcatcgttgaggggcctttttcagctcatttttgtaccgtatttgtaactcgtttgttactctccgatttctggtcggaaaggtcgtggacacattgatacgtcatggtacgctgtggtacgcgatgaaacatttttggcgaatttaaaggatatataaaatgagcagtcgaattgaaattcagaaaagatgtaaatggtgcggtaatctattcaccgctcataagacaacaatcgagtattgttctcatcgttgcgcaaacctcgcttataaagataagataaggaaacagcgcatcgaaagttataatcaagaaattggcaaatctatcagattgccgtcaagacccgacaaagaatatcttaccccaactgaagtaagcattctattaggagttggaagaacttccatataccgatatataaagacaggaaaaataaaagtcattcggttcaatcgtaagactcttatcaaaagaactaacattgaaaacatgtcagattacattgacatgaacgaagcaacggagggaattaaagataagtcccccatcaccgacttctacaccacagccgaagtcaaagagatataccatgtcaatgaatcgtggatattcgccattgccaagaagcacggcatcccacgaactttcaatcgcggcaagacctattggagcaagaaacatatcgatgcctactttgccaagaaagccccagacccggacatctctgaatggtacagcacgcaagacatgcaggagaagttcggcatgaccctgtcggccatctacacctttgcccataagaacgccatccccaagaagaaagaggacattatggtgtattactcgaaaaaacatgtggacattgccaaagggattgccaagccggaagaaaccatgtattataccgtagcggaagcgatggagaagttcaacctcacgcgagaccagctttaccattatgtgaaatggcaccacatatctaagataaagaaaggcaaatacaccttcatcagccgggctgaattggacaagttacttgctccacccaagattgaataacgattttccggttatcgtccggtgatgttggtcgccattatatcacccgatttctttgtgcccaaaacaaatgtaaaactctaaatatcatcagttatgaatcacacctgtacaaaagtgaccgttcgccaaagagcgattcgcaatgaccgtatttctttgtatttggattattatccggcagtacgcaaccccgaaacgatgcagatgagccgcagggaataccttggcatctacctctatgcccatcccaaaaacgaaatggaacgggcattcaacaatgagatgctaaacaaagcggaagccattcgatgtatccgtgtgcaatccctcatcaacgaagagtttggcttcttggacaaaaccaagcaaaaagctgactttcttgcctatttcaaaaagatgtgtcgcaccaaagatgagaagtggactttcgtgtaccagcacttttacaacttcgtcaagggcaaatgtactttcggtgaagtgaacgtagatttgtgcaagcggttcagagaatatttattgaacgccaagcaactcaaacactccgaccgtcccatttcgctcaattccgcttccggctactactccacattccgaggattgctgaaaattgcttaccgtgacaaatggattcgtgag

SEQ ID NO: 2392 - DNA, 15553 bp, synthetic construct
  source 1..15553: mol_type = other DNA
  misc_feature 1..15553: note = Synthetic
ttatttccattgaaatgaacttcaggatacacctctaaaagacgctttttacaatactctttaagacttgaaatatgcgctttttcttcttctaataaatcataagccatttctaaagctttagccatacctactacttgatgtactccttctgtacctgcacgcattcccttttcttgctctccaccaaaaataacgggtcttaatacattttttttacgaataaaagcaaatccaatacctttaggtccatggaatttatgggcacttgctacaataaaatcaattggcaattctgataaatcaattctagttttacctattgactgtacagtatcacaatggaataaagtatcgtgttctgcacataaagtagctactctttttaaatctaattctgttcccacctcattattgacatgcattaagctgacaagcgtcaattttccttcttcctttaatagactttctaactgagcataatctatttcacttgttggttttatatctaaaaatactacttcgatgccgtattcttctctcagttgttttactgtatttaatactgcgtgatgctctaattttgttgtaataattctcttcactcccaaatcgcgtactgcagagcgcaatatccagttgttagcctcagttccacatgaagtaaaaataatctctgaagagctagcattaaactgtttggcgattacctttctcgcattttcaattaacgctttagcatgccttccaacggcgtaagtagatgaaggatttccataatcatttgtcaaaacttttaccatttcttcaactacttctggtcgaacagaagttgtagcggcattatcaagatatacgtatttcattttttgttggtttattttctaattctttcaaattgaaagtactcaattattatgtctttttatttattgttgcacaaatgtaataaatatcaaaataaaataaagattcaacaccaaagaattacctattgatttaatgatgataactataacaacaatatgttaaagtaatttaatttaaagcagacatttattggctgtttctttttttaacctcaggttttatacaaaatagctacctaaactatcacctattatataaaacgatatttttaatctttttaatttaacactaaaaaagtaacttttaagaattaaatatcatgctctccttcttatcaagctcattaataagactatattttaaaatattctatttttaaaaaccttaataatttctagagctatcaagctatttttgttattatacattacataaaattgcctattattttaaaaatatatcaagagaaacaaactcaaaataattaagtttaattgttttgtttgaataaagttcttttaattaatctatttgatcaatagctatattttgctttttcaatactttcttagccataaaaccaaacaataataggtaaacaaaacacaatgcacttactatataagagtggtgaatacctattatatcggctactttaccttggataggtggtatgatacctcctcctaaaatcatcataattaaaaatgatgatccctgtgcggtgtattttcccaatcccattatagcaatattaaaaatagcaggccaaagcacactacaagcaagacctcccgctaaaaaagcataaatagcaatcatccctgaactagttaaccctactatcatagctactaatccaaatgcactaaataccatcatcgtacgagctgatttattattgctatagaaagaaaaagctatttgaatcaaaacgcaaattccgtaataataaaggtgatcaatggcattacctgctaattggttagcaataagcacaatggcaaaagctagcaatggcacaataataagtgctaatgttctttttagtttgcttagtttaaatacgctcactgcaccggcccaacgcccaatcattaaactcccccaatacatcgaaatataaggtgctatttctgaagactgcaaagctccaaactcttgcaacttcagcaattctcctaaattacttcctattccaacctcaacacctacgtatgaaaagatagcgaacatacctaaaagtaattgaggatattgcatggctccccatccttctttattttttctactattaaaataggcataagctatacaaccacttattacaaggagcgctcctgcaagtaaagcaatacgcttattttctaatggttcttttttacttataatttgagcatctatttcttgtattgtttgttctaataccagtgtttgaccactttgttgactcatttgcaattcaattgccgcacgctcagtttgtagctgttctatttctttactatcttgactattatatgtaccaaaaacaggaatgaaaattagtactaataaaacagtcattgtcaagagcatcttaatggacttgcctgctggttcaatttcttcttttgtaattccagcaggtactttcttagagaagaaaaacattgctgcagctagtacaaacaatccaccaatagcagcatataaaaacaccattttatctaaactaagatgctgtatttgatcatcagttagagctttagtagtaccaaataaagcaaatgccatcaataatggccctattgtagtacctagagaattaactgctccacctaaacttacccggctagtacctgttttgggatctcctaatgaaattactaagggattagcagcaatttgttgcaatgaaaaacctaatgcaacaataaacagtcctatcaaaagtgccatatacacactaacctctactgcccatatcatagccatagcaccaattgctgaaaaaagcaaaccataaacgatagaacatttaaatccccaactagttactaggtcacgtcgtttatatgagctcaccaaaaacaatcctaaggctcccaaataataagctgtataaaaagaaaagtcaatcaattgtgattgaaattgatccaaatgaaaaaaggctttacaaaaaggtataaaaatactattaccagcggcaaagaatccccaaaagaaaaatacagtaactaatgtatataatgcaggataatttgtttttacagtagaatggctcatataaataaattagattctcaaagataaatataatctatcacgttcttaaaagcagcatatttttttatatagttactttacaattatttaaaaagagaggaatcaagagggaaattgaaaaagaattacttacaattataaacctatctcttaatttgaatttaaaaatatggttttatacaaagaataaactatttttgcctttatagaataatgattcacagaatgaaaaaggttaataccctacttagcattatagcagctacaatacttacatcttgtaatgatggagatatagtctataaagatattgattttgataaagttaccaacgttagtagatgttctaatccaggagcagaaaaaatctttcacaaaatacaaaaagatgaagcacttatcttagttatagatgctgacaatttaatgcgtgatgaatctgttcctactgtttctgctgaaattgatggaactaatacttctttagaatacagaaagtataatgaccctgtaagtgctgcttctatatgtgatgcgccagcacctgctttcccgacagtgatacaaagtatcccagcctcagcgggtggaactattatcatcaatagaaatattgcaatgaaaaataataacgaggagacaaatagtactgtgtctcttacctatcagtatgctttctatatgagaaacatcagttttaaagatggtgatactaatattaaatacgacaatatgttatttggtacaaataactatgatagtcgtatcttaacttttaaatttaccaataatgatggttcattgaaagaactaaatcaatgtaatgaacagttcattaccttatctgataaagaagctttgcttgttaatttaaaactagaagatttccctacagatgcaacctctactgctaaactaattaatttaactgctgaacgtcaagctacttttagacaatataaaagaacgggtattaatattagacaagtttgtgataataacggagatattcctggtacatcagaaggtaacattaataacttagtagaactttggacttcacaagatggaacaataagcattacttctcgttggacaaacccagtagagggtgaaccaaaattagtacatacagttaatcttgaaaatacagtatttacaaaggatcaatacaaaaatcaatactttactaaaactaaaattatcttaggagagtttactatccaataataaagtgataccgtataaatatacaaagagcgctggtcagaattgactagcgctctttgtatatagcttttattgtatctaattcaaacatctctttcaactgtttgctttttaaaaagtctggaagtaatcgaaatgacatattcctcagcacgactaacacaggattagtaaactgcgccatttgacctaatagccaactatttctaacaattccctttactcttttaaatcgaatgtaaggaaacttctccaatgcctcttctagagaataatgctttaatagttgactaatgacatacacatcttcaatagcttgacaagccccctgccccaaatttggagtagtagcgtgagcggcatctccaattagacacaccttatctttataccatatataattagtaggttttaaatcaaatattttatcaatatgaatagattctcttggtgtttgcgtaatcatttgttttacaataggagcactatcatctaaatgactaaataagtcattatttttaaggtacatattctcattaaccaagaaataccaatatacttgtttatcatctaatttaacaaagcctaatcttttgcctttgccccaaccttcaattgctaaatgttcatatgcttttgatagcgtaaaatctagcacaccacgccaacatatttgatgcgcatctcgcaatggcactgggccaaaaacttcttttcgaacaacagaacgaataccatcagcacctatgacgcattggtgtatagctttgcttccatcttcaaataatagttcatagttaccttttttatctctattaagttctttaagccgtttatcaagtaagacatctccttgctctaattcacctaacaaaacattatgaagttcacttctgtgaatggctacattaaccaacctatatttttcttcataaggacgtaaatctgttgtatttaaaacctctaagttcatatttgtaagtgctactttagagatacgcacccctttaagagtaatcttatcagcaatacctaaatagtgatacacctgcattgcattgttagcaatagctataccagctcctactggcttaatttttttactagcttcatagactacaaacggtatattagctcgttttaaggcaatagccattgtcagacctccaattccacctcctactatagctacttttatatctgtcactttttttagattttaactattactctccttaatcgtaaagctactttaaatttatgtgttatataactcttcatttaatatttaacaaagctccaaaaaaaaacagtagccgattattaactactgtttttcatatatcttttctattaataccctactgctttgtcatcacctctaggatcagctcctgcttgataactaccatttggattgactaatattccttctactttaccgtagacttcgcgctgttttaaatgatagccttttgcttccaatgcttttcttactttaaattctatagctttaggctcataatctatttgatcaggtagccattgatgatgaaaacgtggtgccgctacagcctgctgcattgtcattccaaactctaccacatttaaaattgcctggaatacagaggtaataatcgttgatccacctggtgtgcctataaccatatataagtcaccatttttctctaaaatagtaggagtcattgagctcaacattcttttacctggtgcaatggcattagcctctcccccaactagttcatacatattgggaactcctggctttactgagaaatcatccatttgattgtttaataagaaacctgctcctccaactacaactttagatccataagctccatttaaagttgttgttgcagagatagcattaccccatctatctactacacaataatgcgttgtttcagtactttcgtgtccctttaaatcgccagcttgaatagcagtactcaatgtagccttgtcaaaagacatcgattccattctgccaacattatatgacttatctaataattgctcttgaggtacctcataaaaatcgggatctcccaaatgagcagcgcgatctgcatatacgcgacgctcagcctcaaccattacctgtatagctttctctgactgaaaaccccatttctttaatggatatttctctatagattgaaacagtgcaattaaagctaatcctccactacttggaggaggcatagaaataacttttaatcctttgtattcaccagaaacaggagtacgccataccgcttcatagtttgttaaatcctcagcagtaatcattccatttcctcttctcatttctgccaaaagtaattcagctgtctttccctcatagaatcctttgcgtttttctttttgaatacgaagcaaggtctctgctaaatctttctgcactaataaatctccttcactccactgtgatttctctataaagacattttctttggtattatatttcacaaacttgtcatgaaaagtattcaaatcttttgccaacttagctgtaatagcaaagccattagcagctaagtctattgaaggttgtattacctcttcccaagaaagcacaccatacttctcatgcactttcaccattccatctaccgtaccaggaactcctgctgacagggctccataagtacttaactctgcaataggggtaccatcagcaccccaatacatattttctcttgcttgactcggtgctttctctcgataatctaaagctgtggtatttcctttatgatctctataaatcataaaacctccaccaccaacatttccagcccaaggaaaaacaactgataacgcaaattctacagcaactgctgcatctactgcattaccacctttttttaatatatctactcccacctcacttgctaaaggatgtgcagagactactactccatttttatacgtttctggttgttgagcccatacctgcaaaacgctagcgcaaagtataaaagcggaaagaattatttttttcattaaatcttacttttgtatatcgcaatattaataaaatagttcttttaatcacttttatattgataaaaagttactttataaggaaataatataacttttcatttagaagcttctctctttagttctcttctttatctgtttctatttgttgaatatctttttgcaaaacaaattcacttctgtaaatcttaattaaccaaaagaataaagaaaatagtataggaccaaatattatacctataaaaccaaatagattaactcctacgataactccaaaaatagttatcagaggatgaacatctgccattttcttttgcaataaaaaccgtactaaattatcagaaagcccaacaagtataagactatataaaaacagaccgaccgcagcaccagtttgtccttgtgctataagcattaccactaatggaagataaattaaggctgctcccacaacaggcaccatagcagcaaaaacagttaaaacaaaatatacaaaagcgtcttctacaccaaaaattaaatacccaatatatgccacaatagcctgacaaaaagcagtcaaagggacccctatagtattggatataactaggcgtttcatatcaacttgaatactttcaatattattcttgcttattggtagatacttattaaaccactgttccaatgctttatattgcgacagcataaaataaagtaatagatacgcaactcctatttcgattaacgcattaaccgaagtatttacaattgactgtaaagctttactgcctagctcggtcgccttttctaagttattctggttaaaaagatcaaaattatatcttgcctgtactgtattgacagctttatcaatccctgcttttatagcatccttatcgtctagcattactaaaacctttttagttaaggtttgtactagaatatataaaggacctaaaataacaatagcacttcccaatatcaagagtaatattgcacctaattttcgacattttaaatgctctgttagccaaacatagggcttaattagtattacaaacaaacatactgcacctagaagcccaggtaaaaaaacaacgagattttgtactaatacaaaaaatacaaaaacaataacaaacaaaaaagctacctgtattacaatactattcggcagtaaggattttaattgattattcatagcaatcgagtttcaaaacaattaacatttttgaagtaaaaatacttttttataagataaaaaatcaattttttttataaaactttataataatcacagatatcatatagcactagcattttttgtaaagtaattcctttttataagattaaaatattattttcgctgagttaaaacgttaattaacataaatataattaacaataaaaacaaaatatagtatatattaaaaattattaacacttattaagcttgcaaaacaattaattaacaaaaacttaactatagacaaagtagctagtatgacggattttataaaacaaaccataatggcatttacagctattgtatcactgtttcccgcaatctttcactttataactaaaaatgaaaaatatagcaaagatcaaatcaaaaatgtcgagaatcctaaacgagatcgtgaagaatttgaagatgacttaggtagaaaatattttaaacaagtcattgctccattatcaagagaagttgatttttataatagaactggtatcgctattagtgatgaagacataccgaaaatgagacttctagcaaaaaaattacaactcaagaatcctaaattattagctatagtatcaaaccgcatttcctttgatcaaaaaggtatgcattttaattttcctccatcagaaagatggcaattatatatcagttattccatagtagttttactttattcctttactggttatataatctacaaaatcaataaattaccgctagatacaattagtgtgacacagattgtattattagcagtaggattgatactgcctattttagtaattatttttatattttataccactagagatcaagaagctgcaagaaaattccgaaatctcttagaaaaagcaggcttaacagaccaagattatttagaaataaatagtgctaaattaaaaaataagagtaaaaaaggaaaacaaaaacaagctataaattctatttgtcaaaactaaagataagaaaaacttaattgcgttgcaattgagtttttttattgtattattctggttttattcttcattttgggagagatatattattttcaaattggctatttaaagatttctactccataaaaaatatcaaatgagtaatacttttttagaacagtagataaaatatattattacaaattcctttacaaacaaaaaaagccttaacagagtcaaggctttatcccccgagatagtcgaggtctagatgttttcacaacggaataatccttattgtgaattgctttcattattgtagttcaaatatacaaattttattacacaaaacttaaaaattaaaatattttattgtaatattatatacaaaacaacgtaattactaataatatactgacaaaaaattacaataatgaaaagaatattaggtttagacttagggactacttcaataggatgggcttatgtacatgaagctgaaaatgtaaatgaaacatcatctatccaaaaagtaggagttcgtgttaatccattaacaacagaagagcaaacaaatttcgagaaaggaaaaccaattacaactaatgctagtcgaacccttgctcgttcagcaagacgtaacctacaacgctataaacttagacgtgacaatttaatccaaatattaaaagagaataattggataaataatactacttcgctaacagaaactggaaatcattcgacttttgaaacatacgaattacgcaataaagcagcatctgaaaaattaaccttagatcaattatctagagttttgctaatgcttaataaaaaacgtggctacaaaagcagccgcaaagtaaacagtaaagaagaaggacagttaatcgatggaatggaagtagcaaaaaaactatatcatgaacaattaacaccagggcaattatctctacaattaatgaatcaaggagttaagaaactccctgattattatcgttctgatttaaatcaagaacttgaatcaatctggaactttcagcaacagttctatccaaatatcttaacagataaatttaaagaagaaataaatggaaaaggattaacctctacttcctctgcgttttggaatatctataattttaataccgctgaaaataaaggaagtagagatgaaaagaaaaagcaagctttacaatggcgttctgaagctttatctaaacaacttagcaaagaaattgtagcttatataattgcagatttaaacggacaaatatataattcctctggctacttaggcgcaattagcgaccgtagtaaagaactatactttaataacttaaccgtaggacaatacttatttaaacaacttaaaagcaatccgcatactagtttaaaaaatcaggttttttatagacaggattatcttaatgaatttgaaaaaatatgggaaactcagtctaaattttatcctaaagaattaactgctgcacttaagagagaaattagagatgttatcatattttatcaacgtaaactaaaatcccaaaaaggtttaattagcttttgcgaatttgaacaaaagcaaaaaacaattaatggtaaaacaaaaacaataggtcacagagtaattccgaaatcatctcctttatttcaagagtttaaaatttggcaacaattacacaatgtagttttaagaaacaaaaagacaaatgaaattgtttcactagccgatgagcagaaagtacatttatttgaagaactaaacttaaagggcaaattaaaaagtaatcaagtacttaaacttatagaaaataaacctaaagattgggagttaaactatactgaattagaaggaaacaataccaataaagcattatacaatgcttatttagatattctggatattgaaggatatgacgtccgtaatgaattaaaagtaaaactcaacaaagatgatattgagctgagtgatctagatgtaaatgcttctgaaattaaagaaatgatattctctgttttcaagcatttaggtattaatacagaaatcttagaatttgatgctacattagaggataaagtttttgaaaaacaggcttcttatcagctatggcatttattgtattcttatgaagaagataactctccaactggacttgatagattgtataacttattacacaagaaatttggtttcaaacttaatcatgcaaagctaattggaaatgttttattccaagacgattatggaagcctatcatcaaaagctattaaaaacatatttccttatatcacagagaacaattattatactgcttgcgaattagcagggtataaacattctaaacactctcttacaaaagaagaaaacgaaacaagagaattaaaaaatcgccttacaatcttaccgaaaaatagtttaagaaatcctgttgtcgaaaagataataaaccaaatgattaatgtggtgaacacattaattgatgaagaaaataatatattaatagcccaaggtaaagaaccgaattttcaatttgatgaaatccgtattgaattggctcgcgaacttaaaaaaaatgcaaaagagcgtgaagaactaaccaaatcaatcaataaaagcaaaactgaccatgagaaaataataaaaatattacagaaagaggacggaattaaaaaccctactcgtaatgatatagtaagattcaaattatatagcgaacttaaaaacaatggatacaaagatttatatactaatgagtatattgaaagaaaagacatctttactaaagaatatgatatagaacatattatacctcaatcaaaattatttgacgatagcttctcaaataaaacattagtacgtcgcaatgtaaatcttaaaaaaggtaatcaaacggcttatgactttattctttgtgagtatggtcaagaaaaagctaatgaatttgagactcgaattaccaacctttataacttaggtaaagatgaaggcatttctaaaagcaagtttaaaaagcttttaatgcaagaaagtgaaatcggcaacggatttatagaaagagatttacgagaaacacaatatattgctaaaaaagcaaaatcacttttactagaaatcactcgtaatgttatctctacttctggtagtatcacagatcgattaagagaagactggggacttatcaatgtcatgaaggaacttaatctacaaaaatatagagatgcaggtcttacagaatttgtaaaaatgaaagatggtaacaaaaaagaagtaattatagactggacaaaacgtaatgatcatagacaccatgcgatggacgccttgactattgcctttacaaaacacaatcatatacaatatttaaatcatctcaatgctagaaaaaatgttaataatgaactacataacaacataatagcaatagaaaaattagaaacaacacttgttagcgatgaacgaggaaataaaaaaagaatatttaaagaaccaattgctaattttagaacaattgctaagtcacatttagaagcaattttagtttctcataaagcaaaaaacaaagttgtaactaaaaatataaataaaataagtggtaaaaaaataagtcaacaaactttgacgcctagaggacaattacacaaggaaactatttatggtaaaatacgtcaatacgtttcaaaacaagaaaaagtaggaccaaaattcactattgaagttattgaacaagtaagtaatcctacctatcgcaacttactgctaaaacgtttagaagaaaacaataatgatcctaaaaaagcatttggtggtaaaaatagtttaaataaaaatcctatttacatcaaccttgaaaaaaatataaaagtccctgaagtactaaaactagtttggttagaagataactataccattcgtaaagaaatatctccagatctaaaaatagataaagtaattgatcaaggtgtaaaacaaattttacaaaatcgattagctcaatataagggagattctaaattagcattttccaatcttgatgcgaatccaatttggctaaatgaagataaaggtatagctataaaaagagtgactatttcaggtattgcaactgctcaaccacttcatagaaaaaaagaccacttaggtcaacctattttagatcacaatggacaagaaatacctgttgatttcatcagtacagggaataatcatcatgtagccatctacgaagatgaaaatggaaaattacaagaaagtgttgtttcacattttgaagcagtagagcgtgttaaccaaaaattgccaattatcgacaaaacatttaatcaacatcttggatggaaatttttgtttacaatgaagcaaaatgaattattcctatttccttctgatgattttaatcctaatgaaattgatctatttgataaacaaaactatactgtgataagtaaacatctctttagaatacaaaaattatccaccaaagattatagttttagacaccatttagaaacaaatgttgaagaaatcaaagatttaaaaacaatcacatggagacgtgaaggtttaaatggcattcaaaatataattaaagtaagaacaaaccatcttggagaaataatacatataggcgagtattaattaatatataactttatgctcaagcgcactatctacattggcagtccctcctatttaaaactatcacatcgtcaattaaagattgacgatgttatctctggagagacaaaaggaagtatacctattgaagatttgggatttttagtcttagaccatccacaaattacaatatcacatcccgttattcagtttctacaacaacacaatgtcgctattattagttgtaatgaatctcacataccagttggactaatgttaccgattagtggtcatattgagcattctgaacgcttaaaacatcagataaatatttcagagcccctacgaaaacaactttggaaacaaacagtcgaagctaaaatctatcaacaaaaagaattacttgtcaaacaaggacttccagacaaaccaatgattaaatacctcaatgaggtaaaatcaggcgatagtactaatatggaaggtattgcagcacaatattattggaatcaactttttgaagatttcactcgttcaagacaaggagactctcctaataactttctgaacttcggctatgcaatcctaagaagtatggtcgctagagccattgtatgtagtggtcttcatcctacactcggtatttttcatcgaaataaatacaatgcctattgcttagcagatgatttaatggaaccatatcgcccatatgtagatgaactggtaattgaatggattaacaatcctattaatccagatgaaataacaaaagaagcaaaagcacatttgctaaaaatagctacaaaagacgtttacattaatggtttagtaaggccattaatgactgctttaagcattactacaagttctttgtataaatgttttttaggagaaagtagaataattcactatcctatgtttcgatgagtttcagtcgttataatgcctaccgaattatgtggatattggtcttttttgatttaccaacggatacaaagcgacagcgtagtgtggcttctaagtttcgaaaaaacttaatagacaatgggtttaatatgtttcagttttcaatctatattaggcattgtcctagtagagaaaacgctgatgtacatatcaaacgagtaaaaaaacaactccctgcagaaggaaaaatcggaatactctgcattacagataaacaatttgggcaaatggaactcttctttgctaaaaaagagaaagaattacctatcatgccacaacagttagaacttttttaatagaaacaaaaaactgctatattcattagatttaatagcagttttttttgtttttttctaatcttacaatcacctataagttattgttttacaagacttttaaagt

SEQ ID NO: 2393 - DNA, 15535 bp, synthetic construct
  misc_feature 1..15535: note = Synthetic
  source 1..15535: mol_type = other DNA
ttgggcttaaaagttttatttcaccaccaataaaacgaagtccgggggatcggccattacacaaacaagtttccaaagatcgtaaacctaaagaggtaagtaagaaagaacaagcctcccaaaaaactaagcctcgctcagaccagcctcggtatattcgagtaaatatacctgctgttatcattataggtttattagtcgctttttccatttttagattcaccacgcttaaagaatattacaataattattcatccctaattccatttttctattcaaacccaaatcaatatcttattgataattacgaagaattaaaggtggataaactttttggcataagtgataaattaaacctgagtaatgaaataaatccaacttcagaagataagtctactaacctcgctgatgattatccggttgaagaaccagaagtaaaaacatcaacagaatcagctttgaattcaactaaaaaaccccttgaggcctccgaaatagtgctgactaacccggtaataattgaatcagataaacctatagtaatgaacgaagttaccagcagtcctaaatattatattattgccggctcatttaaaacgatagctaatgccgacagactcgttcttcaattaaaacaaaaagggtataatgcagatgtagttggtaaaaacaaatttgataattatagagtatattttaatagttatacctcattggccaaaactaacgagcaactggctatcgtacgacgagatgaaattgccgatgcctggatattaaaaaaatagttcttccgcctgtttgcaattttgtaatacattgttaatttgccacttatactttaaccattcccgtgcgtgttttaacaaagaacatgagaatttcatttcttattttttacgaaatttgttgcatcaaacttcttataaatgccaaaaaataaattaaagaaatatggagagataaatagtttccaaaatttatttcaatatggttttcacgacttagaaaaaaataactttcctttaaaaggaaagtggaatcaggattttttcaagaataagtcacctatcgttctggaactgggatgtggaaaaggagaatatacaaacgggctggctgaaaataatttggatagaaattatattggtgtagatataaaaggcgcgagattatggaggggtgctaaaatttcgagtgaaaaagaacttacgaataccgcctttataagaaccatgattgaatttatcgatcaattcttcgttgctgacgaggttagtgaaatttggattgcttttcctgatccgcaaccaaaatctgttcatgaacataaaaggttaatttctccaaaatttttaaccctttataaaaaatttctcaccaccagcggcattattcaccttaaaactgacaatactgatttgtatgaatattgcttgaaggtgattaaagaatgtaatcacgaaatacttcttagcacatccgatctttataattccggaattgatgatgaggtgatttctgttcaaactcattatgaaacttcttatttagaacagggaaagaaaattaattatctaaaattcaggcttcatgactgataattattcgtttttcgaacaagtatttcttgtagcacagctcattcctaaagggcggtttaccacctacggggctattgcaaattatcttggatctaaaggatcagcccgaatggtaggatgggcaatgaatggttcgcatagtgacactaatcccgtaccagcacaccgagtagttaacagaaatggtgtgcttacaggaaaacatcattttgggagtcccgggataatgcaacaacttttagaaaatgaaggcattaaagttgaaaatgatcaaatagtcgaattcgataaatatttctgggatcccgcaaaagaattgtaataattctaatctatctcgccattatttcttaattttaccaaatctaaataaaaataacaaattacgattatacgatgcaaaaagaggcaattttagagctcttaaaacaggttatttatttccctaaaagagataatattatcaatttaaaaatgattgaaaatattgaaattagtgaagaggagattagttttaatttagtatttccggatgttaatgatcctggaattaaaacaattattgaaaactgtcaaaatattttaacaacggaatttggtacatctacaaaagttaacatcaatccgatagctcaaaaagatagtggagaaggctccttatcgggcgttaaaaacattatagcaattgcttcaggtaagggaggagttggtaaatcaaccattgcatcaaatttggcaatttcattggcgaagctcggaaacaaagtggctttgctagatgcagatatttacgggccatcaatgcccatcatgtttggtttggaaaatgaaaagccaactgcaacagatttgaatggaaaaacaaaagtgaatcccatagaaaaatatggaattaaagttctttcaattggtttctttgttgatcctgagcaagctttaatttggagagggccgatggcttcaagtgcgttaaatcagctcttcaatgatgctatttggggtgacattgattatatgttggtggatctgccaccgggaacgggcgatatccatctaacacttacacaaacatatcctgtaacagctgccattattgtaaccaccccacaacacgtagcgattgctgacgtaaaaaaagcagtcactatgtttaagcaggaaaaaattgatgttccggttttaggaatgattgaaaatatggcatacttcactccggcagaactcccggaaagtaaatattatattttcgggaaggggaatgcggaagaatacgcaaaacaatttgaaatcccttttttaggaaaaatcccaatggtgcaagaagttgctgaatcaggagatgcaggaaaacccatcgctttagaagatggaaatccggttcaatcagcctatgaagaattggcaaaaggaataatgaaacaaattaaatttctcaattagaaatcagaaatagtttagtagcagatttttatacatttgcattttaattcaaagacgaatataatgagtgaaaccagtaaagcagaattaagggaaaaagtagaaaatattattgatcaggttcgaccatatttacaacaagacggaggtgatattaaatttattgagattactgatgataatgtagtaaacgttgaactgatgggtgcatgtggtgcttgtccttatagtacaatgacactgaaaaacggagttgaatctgcagtaaaaaaagccttacctgaaatcaaatcagttgaagctataaatttatagctaaagttaagacaagtatttcgcgactatcggcattcttctccccattccaaatgctttttccgacaccctcaatattggtggtgcttgataacgtttgtattcagtagtattcactaatttcaagatacgtttcaccaatgcctcttcgaatcccattttcactaattctttggggctttttctcaattcaatatattgataaagaatttgatccaaaatatcataattcggcagtgaatcagaatctttttgatctggtctgagctctgcagatggtgattttatgatcgtattttcgggaatgattttcttctcccgattaatgtatttagccaactcgaaaacttctgttttataaacatcgcccaatactgaaaggcctccgttcatatccccgtaaagcgtcccatagccaacagcagcctcacttttattcgaagtgtttaatagtatcatcccaaatttattggataatgccatcaaaaaaacgccccgaattcgtgcttgcatattttcttcagttacatcaaatactaaatctttaaaccattcaattaaactatctttagtactggtataagtatcatttatggaaataatatctgattcgcatttcaagttttcagccaacagttgcgcgtcttttatagaatggtctgatgaaaactcagaaggcataagtatcccactaatatttttcgcgcctaatgcatctgctgctataactgcagttaccgctgaatcaattcctccagataatcctaaaatggcttttctaaaaccaagtttatcaaaataatctcttactcccataactaaggcatcataaattaagctgatctttgatggctcatttgattgaatcactttttccttaaaaccaattacattatccaactcgattactttcagatcttcttcaaaatattttaactcgcttaccaatcctccatctgaattataaactaaagaaccaccatcaaataaaagttcagtttgtgcgcctacatggttcacatatattaatggaagtttatatttattcacatttttaagtaaggtgtttttgcgtgatgtagcttgattatagtgaaatggtgaagcagcaatattgatgatgcaatcaggttttctcttaaataattcatccattggattaatcgtatacaatggattatcccctatattccacaaatcttcgcaaatggtgagtgcaatcttattgtttttatagttaatgatattgaactcatttccaggttcaaaatatctatattcatcaaaaacatcataggttggaagcaggcctttattatgaactgaaacaatttcctgattatgaatgaaaactgctgaattatataatctctttccctttacgttttgattcctggttggcacgccaataattacagcaatatcttttgtttttttcgctatcgcttttatagttagccagcatttatcaatataatcatcaaattccagaaaatcacgtggcggatatcctgaaacagccaattcagcaaatacaaccaattcggcacctaatgacttggattgattaattgattgataaactttttttaagttttgatcaaaattgccaatatgataatttatctgagccagtgctattttcacgttcggaaactgttaattaaaataacatacttaaatacaattcgatataattaatcttcgcgatttgccggatggtagggtctattttattttgatctttcaaaatatcattgatcccattattaaaattaataccactaatgagtacattggagccacccaattgatattcgattcccgctccaaaaatcattgaatattttgtgaattttatttcgtcatatatattgttttcctcatttatctggccagcatcttgcgaattaaacttatccttccccatcgcggaaagcaaaaaattcaactgtgctccaatctgcccaaaaaactttctcttggtaaattcgttggttttcattctgaatactaatgggattccaaggtattttaaattatacgccctgtggaggttgccgggtatttgctcggattcaatggtttttaaatctggataagttaacgtacttcttaatgtcgaaacattaatccctgaatgaaagtcataattttccattaagtgaaactgagtgattactccccagctgaacccagttttaactccatcattatcatagccttccgagccagaattcatccagccaatattcggggcaactttaatcccgaataaaaatggtttatcctgagcgattatatcatttccaaaaaagaaggctagaaaaataagacaaaagatatcttttttcataattcaattctatagtagcaaaagtacagaattcaacataaactagactgataataatttataaatatcaacgtttaattgtaaataaaaatgattcttatttttgagttatcttttaaaatataaagttcttatatttgttaacgaagaataaactcagttaattaaaacattatatgcgtttattgaaaattgaaattaattactaccaatcataaagaaatcctcaacaatgaaaaaaatcattctacttgtgactgttacttttctgacaactactgcattcactcaaatttcatttggaccaaaagttggttattatgcatcaaaactatcagttgataaaagcgacattaaatctgatattaaaagtagttttcaattcggtgcttttctccgcttaggcactaaaatatatgtgcagcccgaaataatttgggctactgaaggtgctgtttttaaagatgaagggattggattcgaggatgacatcgagctgaaaaccattcaatttccgttactggttggagttaaagtatttgatcttaaagtagccaatttaagaatccatggtggacctactgcttctatcgtaaccaataaaacaattaataaagttgatgaccttgaaggtggacttgatgatgcagattttgaagatctcatctggagttttcaggtcggagcaggtatcgacgtattaatgcttacattggatgtaagatacaatattgggattagtaaagttattggagaagtagatggtatcgcttacgattcaaaaacaaatggatttaatgtatctcttggatggaaaattctataagcctttagatctataagacattttaaaatgccagatctgttgatttggcattttttaatatcatattatgaagtatcatttctttaaaataattgtctttatatttttaataagctcatgttcttcagatcatggtcggaaacttaacattgatgtatcttcgattgatatcggggattttgatatcattcgctatgaacaagatttgtttgccataaaccctgataatatcgaagccggacttaaatctatacaatccaagtattggttttttttaggtaacgatttggataatattgagaatttaaatcagcttaaagattacatttctgatcctgatttaattaatttattcagagctactgaagctgcttaccctgacctcaatgatattaagcttgaattgaaacaagcttttcaatatttcagatattacttcccgaataaaaacactccaaatgtttacacctatatctccggattacaatatgaatatccggttcagcttgcagaacacacaatgatcatcggactggatttatacctgggcagcttatttgacgattatcgaaaaatcggaattcctgaatataaaattgccagaatgactcaatctaatttaacggtagattgtatgaccgaactcgcgtactcagtacgtaaggagccgttaaagaatagaacctttttagatgagatcattcaattaggaaagattcaatattttttggatgctacacttcctgaaaaaactgagtatttaagaattggatatactgagaaacaacttatgtggtgtgaaaaaaatgaaggaaatatctgggcctttattattgataatcaaatcttatacaccgccgattatcaaattacccgaaaatttattaccgacggaccctttaccctggatttttcaaaagactctcctgcaagaataggtcaatggattgggtggcaaattgtacgttcttatatgaataccaataaagatattagcctggctgaattattcgatattactgattctcaagaaattttatcaaaatcaaagtacaaacctaccagataatctcaataatccgaaaatagtttgcgacattttgacaattatggtataaagcagtacaccatcattctcgaaataacctagatgctcgtaaaaacctttggaagtgccattaccggaattgaagctttgaccataaccattgaagtcgatattggacgaggaattcaattcttcctggtaggattgcctgatagtgcagtaaaagaaagccaacaccgtattgaagccgcattatctcatgtcggctataaatatcccgggaaaaagatagtcatcaacatggctcctgcagacatccgaaaggaagggtcggcctatgatttaccaatcgctattggaattcttgctgcctctgaacaaataaaagataagcatttgaatgattacataatcatgggtgagctttcgttagatggtggcttaaatccgataagaggtgccttgccaatcgcgatctcagccagggaaaatggatttaaaggaatcatactccctaaagccaacgtaatggaagctgccatagtaagtgatttagaagtgcttggcgcagaaaacatactggaagttattcaacatctcgatgataaagaatcgatattaccaacaaccattgatacgcgaaaagaattttattctcacttaaatttatatgagtttgatttttctgatgtaaaaggacaggaaaatattaaaagagcgttggagatctcagcagctggtggccataatgtggtactgataggacccccaggttccggtaaaacaatgttggcaaaaagaatgccctcaattttaccgccattaaatttgaatgaagctttggaaacaaccaaaattcattctgttgccggaaaaatgggtagcaataaagggctcattaccattcggccctttcgggcacctcaccacactatcagcgacgcaggcttggtcggtggaggaacttttccgcaaccgggtgaaattaccctagcccaaaacggagtgctgtttcttgatgaacttccggaatttaaaaggtcggtgttggaggtaatgaggcaacctatggaagatcgggtggtaacaatttcgagggcaaaaattaccgtcgaatttccggctaacttcatgcttattgctgccatgaacccgtgcccatgcggatattacaatcatcctgatcaggattgtgtatgcgcacctggactggtacagaaatacttaaatcgaatctcgggaccattgctggatcgcattgacatccacgtggaagtagttcccgtacccataaaatcattatcagacgatcatcaatcagaaaaaagcgaagaaataagaaaacgtgtgattgaagccagaaacacccagtttaatcgctttagcgaaagtaaaaacatacactgtaatgcacaaatgacgagtaagcagttaagaggaatttgtagaattgatccaaaaggactggatttattaaaaactgccatcgaaaagttaaacctttctgcacgagcgtacgaccgcatcataaaagtatcacgaaccatagctgatcttgagggagatgaagatataaaaagcgaccatctggccgaggccattcattaccgtagccttgatagagagaattggggaaattaagtagttaatcctgaaaaagctcattatttctcaattcaaaattaagcaaagttgaaacttggaaaatagtattgatcggaaaaccaaaaaataattttgaaatataattatactaggtcactcactaagcaatagttgtcttttaaccttaattattgttggtttgctcttccctgttgtttccaaagtcttatttaagctcatttttgatactaccggggagaaactaaaaacttacctcatccgttatgtttagatattatttcaatcccacagattactacccgatgtctaacccactaactaacttttgtccctcgtgggtggttggtacttacccctttgttggataccagtatcatatataaatatggatttctaaaaaaagagttcaataaatagaagaaagatgtaagaaaagtgaaattattttaatttgcaggagagaaaaatttctaatcttgatataagaaccacttatatggagcataagtgattttgtttttcgtcagtaacgtgaaaccttgtatgttttgtatatttatagattgttttaaaaaaacgaacataaaaaagtacaattgttgatatgaatcaattttttgaactaaaattaagcagagcaatatgaagattaaaaaattgtactaataatagaaaaagcgacccattggaccgctttaaatgttttcacaacggaataatccttattgtgaattgcttcaaattgtaaaccaaagataattatattttcaacaaaatcaagaacaatgaaaaaaatattgggattagatcttgggacaacctctattggatgggcttttgttaatgaggcagaaactgaatctgaaaaatcatcaatccaaaggcttggagtaagagtaattcctttaactaccgatgaagaaaatgattttcaaaaaggaaaagctacctcaattaatgcagacaggacacttaaaagaggtgctagaagaaatctagatagatatcaacaacgtagagataacttgattgatgtgcttgtgaataataagtttcttaccaaagacacaatcttgagtgaagaagggaaaaacacaactttcagaacataccaagaaagggctaaagcagctgaagaagaaatctgtaaagaaagttttgcaaaagttcttctaatgataaataaaaaaagaggatataaaagcagccgaaaagttcagagtgatgaagagggtgttattatagatgggatggaagttgctaagtttatttatgaaaaacaaataaccccaggacagtatgttttccaacttctaaaaaacaataaaaaacacatcccagatttctatcgttctgatttggaaaatgagttagcgaaaatttgggaaacgcaaaaagaattttatccagatatgttaacggatgaattcaaagaagcgattaaagacaaaggtaagctggcaacctccaaaatgtttcttcgtaagtataatgttttcactgctgaaaataaaggaaaaagagatggtgtgaaacttagagcttataaatggagaagtgaagcaattgacagaaaactaagtattgaagagatcgcttatgttattgttgaaataaacaacaatattaatggctctagtggttatcttggtgctataagcgacaggagtaaagaactttattttaaaaaactaacagttggtcaatatctgtatagtcaactagaatcagatccgcactcaaaacttaaaaatcaagtcttttaccgacaagattatcttgatgaatttaatacaatctggacaaagcaaagtgagttttaccctgagttaacagacgagttaaaatcagaaattagggacataataatcttttatcaaagaagactaaagtcacaaaaacacttaattagtaattgtgaatttgaaaaacaccacaagaccattcctaaatcatcacccctatttcaagaatttaaaatttggcaagaacttaacaatattgaaatcaaagacctatccacacacgaaaaatttgttttagatgaaaccgcaaaacaatttctatttgatgagttgaatattaaagataaattatcaagtggtgaaattcttaaattactcggtaaaaataagtcagcctatgaattaaattacaaagaaattgatgggaacaggacaaatgctgccttttataaagcataccaaaatattctaaggcttgatggtgaagagcatgatttttcaaaattacattcaagtgaaattaatgaaattgttagcacaaagtttttagacgttggaattaacactgaattggtgttttttgactcttccaaaaaagaaaacgagttggataaacaactattctttcagttgtggcatttagtttattcttatgaaggagacaactcaaatacagggatcgagaagctaatagataaacttcaaaataaatatggttttgcaaaagagcatgctaaacttattgcaaatattgaacttcaaccagattacgggagtctaagtagtcgagcaataagaaaaatacttccctcattaaaactaggaaacacatatgatattgcatgcaatgatgcagggtataatcactcaaactcattaacaaaagaagagcgggcaaacagagaattgaaagataaattacacttactaccaaaaaacagtcttagaaacccagttgttgaaaaaatattaaaccaaatggtaaatgtcattaacgccataattgatgacaatgaacttgggaaacctgatgaaataagaattgaactcgctcgcgaactcaaaaagagtgctaaagaaaggtctgaaatgacccagggcataaataaagcaacagcagagcatgaaaagataagaactctgttaagaaatgattttggcattaagaaagttactaggaatgatattattagatataaactatatgaagaattgaagagtaatggatataaaacgatctacacgggagaatatattccaagagaagagctattttccaagaatttcgatattgaacacataattccaaaagctaagctttttgacgattcctattcaaataaaactttagcagtcagacaggttaatctagataagagtaatgatacagcatatgattttttatcagacagattgaatcttaatgattttgaacagtatctcaaaagaattgagaaattattgaaaagcaaagctattagcaaggctaaatacaataagctgttaatgaaaaattctcagattcctgatggattcattgatcgtgatttaagaaatagccaatacattgctaagaaagcaaaacaaatgctcgaggatgtagtgagaaaagtgaacacaactactggaagcataactaatcgactaagaaatgattggcaattagttaatgttttaaaagaaattacattaccaaaatatgagaaactagatttagttgagtcaattgtagggaaaaatgggcaagaagaaaaacaaattaaagattggagtaaacgaaatgatcatcgtcatcacgctatggatgcattagcagttgcattcacttcacacagtcatgtgcaatatttaaataacatgagtgccagagggaatgaaggacataaaaattttcatgaagtatctggaatagaaaataaatatttataccgagataagaataataagctattatttaaaccacctattccaattcatgaatttagaaaagaagccaaagagcatcttgataaggttctcgtttcatttaaggcaaaaaataaagtagtaacaagaaaccaaaacaaaacaaaagttaaagaaaaaggtcaatttaggaataagactgaactaactcctcgaggtcaactacacaaagaaacagtatacggtgaatctcaattctatgaatccaaacttgaaaagataggaccaaagttcgatttaaacaagataaatcaagttgcaagaaaattgtacagggaggcacttttaaaaagacttaatgagtttggtggagatccagatattgcttttggagggaaaaacaaacttacaaagaatcctatttacattgatgaagaaaacaaactactacttcctgaaaaggtaaaacttgttttaaaaaatagtagatatacaatccgtaaagatatcacccacgatttaaaaattgataaagtagtcgatattggaattaaacgaatattaaatgtccgtttgaaaaaatttgatggtgatgcaaagttagcattttctaatcttgaagaaaatcccatttggcttaataaaaaaaagaatataagcataaagcgtgttacaataactggtgtaagcaacgcagaagcacttcatttcaagaaagaccataatggtgaatttattactgatgctgatggaaataaaaaagatactgattttgtaagcactggaaacaaccatcatgtggcaatctatcgggacgaaaaggaaaatttaaaggaaaatgtcatctcattttttgaggcagcagaaagagcgagacaaggtttgccaattatcaacaaatcttataatcaagaattgggctgggagtttttatttacacttaaacaaaatgaatacttcgtttttcctggtgagaattttgatccaaacgaggttgatctgttaaactgcaatattacagacttaataagccccaatttatttagggtgcaaaaaatctcatcaaaaaactatgtgtttagtcatcattcgcaaacaaaatcagttgataacatgatgctaaaaaacatgaaaaaactttcaggcacaacatatcattttattcacactccggtgaatctaaaacaaatagtaaaagtaagaataaatcatctaggtgaaatagtcaagattggtgaatactaacattaaacacaaagccaaccatagaagatgattaaaagaactttgtattttgggaatccatgctatttgcataaaagaactgatcagcttcaattgaaatatagtgtttcaaaaaaagctgacttaagtattccaattgaagatatagggttgattgtgctagataattcacaaataactatcacacaaggattattatctgctttatcagagtgtaatgtagcaatccttaactgcaatcaaaaacatttgccaactgcacttatgttacctatgtcgggacaccacacctttactgaaaatctgcgaagtcagctaaaggcttctataccactaaaaaagcaattgtggaaacagaccataattgcaaaaattagaaaccaagctgccttagttaaaattaggaatggtaatgcaaaacagctcgactatctagcaactcaagttaaaagtggtgatagtgagaatgcagaagccagagctgccgctaagtattggaaattattatttgaagaaacggatacttttaaaagagaacgatttggagatgcccctaataatttattaaattatggttacgctattttaagagctgtagttgctcgttcaattacagctagtggcatgcttaatgcaatgggcattcatcatcgaaataagtacaatccatattgtttggctgatgatattatggaaccctatcgaccatatgtagacaaaattgtgatgaaaatggcatgggagtacaatgatttagatacattaaccaagcaatttaagattgaacttttaagcataccaactattgatattaatattgacggaaataaaagtccattgatggttggtatgcaacgaacaactgcttctttgatgcaatgttttaaaggagaacgaaaaagcatactttaccctgacttacataaattgaatgaccaataatcatcgtctaaaccaatatcgtgttttgtggatatttgtattttttgatttaccagcgacaactaaaaaagatagaaaacaacatgcccgttttcgtaaaaatttacagcaagatggttttagtatgttgcaattctctatttacattaggcattcaagtagcagggaaaatgccaaagtccatattaggagggttaaaagatttttgcctcccaaaggagaggttatattgtttactcttacagataagcaatttgggatgatggaactttttaatggggtaaacgaagcagatttgccccctacacctcaacaattagaactgttttagggataaaaaaaatcgtcccgtttttaagaaagacgatttttgattttgttttttcgaccctgactataattcatatcactgaaacacaacactatacaacaccaatactgtgtcaaagatcgtaaaatcacaatttgaaagcaattcacaac

SEQ ID NO: 2394 - DNA, 15528 bp, synthetic construct
  source 1..15528: mol_type = other DNA
  misc_feature 1..15528: note = Synthetic
gacgggaatacacgctgggaaataaaaactgagagcggtatgacttatgtttttggtacaagagatgatgggcatgttgcaatagaacaaacatttgttgaaagtatttttgatgggaacgaaaacattatgccagcctatgaatcaagttggtatctagttgaaattatagcgccttttgaaactgatcgaattaaatttacttatgcacctactaacattttatatgacgtagaaaaaactgaacgtaagtatgttgcatttgctactggaaaccttgaagagtgcataggaactcacacaaaatatggtgcagtgtcagtttctgtatcaagtaaaaggctttcacaaattgaaacatctaaaacaattgtcaattttaatattcatgaaggcagggaagatacaaaaggaggttcagggtgctacttaacatctgtggaggtgctggaaaaagaaagtgaagaactaattcgacaatttgatttaagttacagctattttgaaagtacaggaggtgtttgcggaggcgaatctgcctatttatgtaaaaggttacgcttagacagtgttactgaaagttttgatttgtgtaatcgcaaacctccctatgtttttgtctatgatgaaaatgagtcattaccaccaagattttcatttgcgcaggatcattggggatattataatggacacaatgaaaatacaagtcttgttccttccacggttgttggtgacgatttaattcttgtcaatggtgctaatagagaccctgatgtaacaccagaacaaaattatttgaaagctggtagtttaattgaagtaatttacccaacaggcggttcaggaaattatacctatgaaagtcatgattacacttatgctgattcagagatcgaaataagaaaagtaaattataccgaaaactcaactggaacggattgtaatatcgcttttattgaaattggaaccttcaccatacctaattcgcaaaatgttcatttttattctaaagtaatgccaatggtcgggtttgatgctgaagcggaaataattattaaaaatagtgatgatgaaatagtgccttacggtgagttcatttgctcagaaacttatgatcattatactattcctttggatgcgggaacttatagcattcagacgctatcaaatcatgaagacgcgataattaacctgaaaactgtttggactgcaatggaagaggtgttgcctgctgagattatcgagcataccaatacggtttcaagagatttctgcactgaatgtccttttgctgaaaccgaatcgtttacaatagatcacacacagtttattgatttgtacataacagtgaataatgatgatttacctgaatgtaattcagaaattaaaattaaagatgcctatggagttactgttccctttggaggttttagttgtaatagtagtggagaccatagaattattttggaagaaggtacctatacaatttcagcagagacttatactcctggagaccatgcagctgtgcgtatggattggaaatcattaggagagcctgcatatgtctcaaaggcaggaggtttaaggattaaagcaactgcactttatgatggggtttctcatgataatgacattattcgaaaatatgaatacacgttgcaagaagagccagaaagatcaagcggttttttaaatgaccaaaagttacctatttatactaccgttaatttaagagaggtgttaacacctgtcataatagggacattaacaacgctttgtgcatattctgaaacgagttcaaatgctttttcagctggaaactatcttggaggcggcaatgttgggtatgcggaggttgtggaaatacatggagcagatggagaaaacggaaaaataatatataattacacaacctcacgcgaatttccagatattggagagcaatcatttccttttgctccattgataaacaatgattggaaaagaggcttaccgcttaaaacttctgtttacaattctgaagactttttgttgagtgagacgattaatgaatttgaatattttgaaacaacggacgatccttatttcaaaataataccagcattaaaaacagcttatgggataaatcctgtatcctttgatttaagttgggaaaactttaaaaaggtagccgtattttcaccttatcaaattgttgttggaagattagaaccatcaaggatgacgaaaaacagttatagcatttataatgacgaggttgttacttcattgacagactattattatgaaagtgataaccatatacgattaacgagaagtgtttcaaccgagagtaacggaaggaaacttattgagaaagtaaagtatgttgatgattatgctttaggtacagcgaatgagaccgctacagcatttactcatttaaaaactgaatatggaattaaaaatatacctattctgaatgaaatatggattcaaaatgatggtgaagaagagaaattgcttaatgcacggtttaatgtttacaaggaacaatttgatgagctaattttaccttatcaggtatataatattgagccaatcgcaccaatgacctctgctgaatatgtaggaacttttatcaatgaagttggagaattggtatatgatgacaatttcgaattaaaagttacttacgatcaatttgatgcaaagggaaatattttgcaagctacacctaaagacggtttaccaatcgcttttaaatgggcatatgattcatctctaccaattgcgaaaatattaaatgcggaaacaaatagcagtaattttaatacttcagcaggttatacaggatttgaatcggggagcgaagaacttaataattcaaatgaagattattggcaatttgatgcgacgaacgaacatagttttgatgctcacactggaaagtatagtagaaaagtaggaagtggaacggaaacggataggtggtttttaccttcagaccaattaaatacttatttattttcgtgctggatcaaaacggaagatgggtttggtgatgacatggggattcttcatattaacacaacaacaaatgatggggaatctataattgtttaccccgtaatttcagaagcctctcaagagcttagttttggacatacaggtggtaattggaaattggtagaggttgaatttgatttaaatgaaattagagatttatctggtttaggtgaagatgcagaagaccttggaatttatttagaaattcgaaacaatgacccaagtcattatttgttagtagatgatgtccgctttcatactcaagatgcttggatggaaacttatacctacaatcaaaaatcaggaatgtcatctgcccaaggagtaaccagtgttcccacatattttgagtatgatccacttggtcgtttggagttaataaaagatcgacaagaaaacattgttgagttgtatcgttataattatgctaactatcataaaaacacagattactcctatgcccctacaccagtttatgttgcagaatctgttgcttttacagggcttatggactgtatggcagagggagatgctacttatacttggagttttggtgatgatgttattataactgattcagacccatatatcaatcatacatacaattcagaaggaaccttcacagcaaatttaactgcagttgattcagaagggtacacaggaatcgtctcaaaagaaattccagttacttatcgtccgctaatagtgaattttggtttaagctatactgggatgggagatgtttcccccgatctaatcacgtttgaagtgccaactggaactaatgtgaattttttagctgatattattagtagttaccctgattatgaatttagttggaaactagatgatggagcatggatagcagaacctgacaccgaaacttcctattattttattaatgaatcaatggttcctatggtagctcatcacatgtatttaaaggtcgtggatgaattttctggtcaaatagccgagttccattatatcatttgggtacataacgaggatggaccagagtaaaagattaacacagcaaattaaacaacatctaacctgtttcccaattttaaattttagacagatgaaaacattatttataaaatattctattttgttcctgttaataatcggaataaattcaccttcattctcacaaacagttgatgagaattttgttcgaagtcaacatattaaagttcctgtaaaaacgaaagtcgcaataactgatttgccagaagataattcggctatttctattggttattctgatgggctaggaagaaatattcaattggtaagcgttgggtctagtccaggcaaaaaagatttagtccaaccaataatttatgatgtttttgggagaaattcgaaacagtatttgccttatactattcatagagaagagcaaggtgattttgattataacgcttttattaatcaaagcaatttttatgaagatgcggccagaattgagcatacaaatttcccatattcagaagttatttatgatgggtctcctcaaaaccaagtgctagaatcctctgctccaggagaatcttggcaaattgaaagcattaacactgtaaaaagtattgtcagagcaaatactttgttggatgaagttcgagtttggaaaacagttggggaagagtgtatttcttctaatatatatatagctggagatatgattgtaaatgaagttattgatgaaaatggtgctaagcgttttacttattctgataaaatgggtaaattaattttgactcgttccgaagttagtacgggtatttatacagaaatgtataatgtttatgatgattttggaaacctaacttttgttttgcccccaaatgcaatgaaaaaaatgaatgaaacgggggtgtattcctcagcctcaatcactgaagatttgatatttcagtatatatataataatcgtgggttgccaatagctagtaaaacaccaggggcagaatggagtcattttatttatgataaacagaatcgattgattttatctcaaaatggaaatttggcagctggtaacaagtggaaatatttcaaatttgacattacaggtcgacctataattcaaggaatttatactgtagttgaaccatctgaagaattaattatttctgacgccttaataactggcatcttagacattgattatcctctgtttgaaagacggacagaatcagattttgggtatacaaataatgcatttcctaattcaactattgaaaatcaattatattattactacgataattatgactttaatggagatggaacaaatgaccatacatatataactccaccattaaagttaactagtgaagaagcttatggagatgaatctgggtattcaaaaggtggtcttgttggtgttgtttcggtttggaatcaattagctgagcgaaatcggggcaaattaactggaatgaaaacaatggttttggatgtagatggaccagaacagtggttaaccacagcaaatttttatagcaaatatgatcgtatgatccaaattcaaagcgataatcatttaggaggacaagacatttttgactctttctatgattttgatggagttttattaaaatctcttttaaaacatgaaataacaggggaagatcctatttcgatttttaatcaatttgaatacgaccatgcaggacgtttagtgaaagttattcaacaaaacaactctgaaacacctgtcgttcttaatcaaaacaattacaatgaactaagtcaactaattgagaaaaatcaacatggatcgattggaggagacgattatttacaatcgattgattactcttataatattcgtggatttttaacacatataaataacttagaattagaaagcgatagagatgcaggtggtttagtcggcggatattcggaggagctcgaagctgtagaattggatagaattacaatcggagttgctgttgagcaggatcgatttggaaatagattggccaatattactctagtagctgcatctaaattaatctatgaacaacaagcaggaggagcttccagagaaattaatgaccagtcttccaatagcaagatcgttcaagaatcaagtcaaaatcaaaatacatttttagccctacaatcattaagtacacctttaattatcgaattttcagatttagcgatatccgaatcacacattttagattcagtactaatattgaccgaagatagagtcattacatcactggcaggaatgggtataacggatgatgatgcaattggaactttagttagtttagctcgtgatcatgttctaagaattggaggtaaacattatcataatgatgataataatgatctttttggtttagaaattaaataccaaaatccaattgataacggaatgagtccaacggcactgttcaatggaaatatctctcaagttttatggcaatccgctacagatgaagttaaaagaagttattcatatgagtatgataggttaaatcgattaattgatgcgaactatacagcttatgatgaggtaatgggaaattggacaaaaaatactgatagatacacagtttctaacattgattatgaccataatggtaatattttgggtttgaaccgaaatgggttcaatgagtcagaagcttatagctctattgaccagttgacttatacctatgatggcaatcgattaaaagctgtgcaagatattgttgaaacaggagcatataatgatttttcagatggagtttcagatttagaaacggaatatacatatgatgctaatggaaatatgattagtgatttaaacaagggaatttcaatagagtataatcaatgggacttgcctcaaacaattactttcgattctggaaaaaaaattgactatatttatacttcaacaggcctaaaactgaaagcaatttttcaaaatattgatttgacaactataacaagagattatagcggagctttcgtgtacaatgagggagaattggatttcttttcctcgacagagggaagggttgttccaaatggtagtgaatttaattatgaatatcactataaggatcatttaggtaatttgcgattagcgtattcagaccttaatggtgatggtgaaattgatgtcgcctccgaagttcttcaagagagtcattactatccttatggaatggaactaaaagggcttggagatgttcaaattggacctgaacaccaatataagtttaatggtaaggaagtttatgaacaatttgatttgaattggatggattttggattacgtttttatgacgcttctattggtagatggagtgcaattgatcctgtgattaaacataatgaaggacagtatgtcgggtttgctgataatccaatttggtttgttgatccgaatggagctgacacaaatgttgtctctgcaattggagggactttgactttgccagacggagtctatcatatttcaaacttttatcatggacagaatgaacatgcttttgttggaggagtaagaggttttgttattgatgggactgtttatattgcgaaatttaatgaaaaagatggcagtttcttaggatatagggatgatgagaacaatgtgtatacaggtgaagatattgcagaagatttaccattttattttaatagcagaacactaacggaagaagatagaagtttaaagtggcaagtcttttatggagaaccgcgtgactcttattctgaatggtacagacatgaagaagcctctcgagtgacccaggctcttataggtctaggagtatcacgacttcagaaactaataaaaaaaggattgaaaagaatggatgatcctgttttagccaaaagaattagtgctggattaacactttcgggagctactcaattttctgtatatgctcaaaatagccaacaagtgattgatactagggattggtacggtgtttattatttttctaattttacttcagatggatatgccgtatcaacaggaacaagtgctttatatgaaagcccagtaggagaggctaaaacatattttcagttgtatttccaaggtcaacctacaggcattatgcttgaacgagcaattttatttggagggcctgatataattgatgcactttacacacccatgtatattgagatgccacctatgtatttaaatgatcactaaaattttatgaaattcaaatttttatatcttattattggctctgtatttttagctttcgtttttcagtctatttacctagaaataatacgtgatgcagagctaattattacaaaaattagtgatcatagatatacgaattgggtcaatttttcaacaatgtttatagcaagtgtcataacttttaagtggagaatttttggacttaaaaatattgtaggtgtatttatttttatagtagcaatttatttaggttcctattttattcatgacccagcctacatgttagattttgctataaagaataatgcattcgcacttgtttcagttgggatgttaattgttgtttcagaagttattcgtcattacaaaaacagaattgatgatgctgaaattttggatgagtaattaaaggggggggatacttaatttaagatcatgaatttacaaaattactatgaaatatatgtgccaaacgaagaggaaatagcgggcgaagagttgatgcaaattagatttatagatacagaagaccggaaagactcttatcgattaataacagggcaagctttgttagataatcctcctgcgctcatagctgaatttgcggaggacgcaaaaattactaatgttgttaaacctccaaacgaaacactaggatttatagtagacaacaaagtgaaatacattctagatgattttaaattttcgaatcaaacagcattttatcaaataaaaatagtagataggagacaaaaccattttattaattaccattttttacattacgtaggtaatttgaatagatcaatagattacgaaagatctaaattttacgttaaaaatatactttcaaatgataagagggagatcaagttcacatcagatgaagaacggaaaacattttgttccaacaatattatagataaagtttttccagaaattatttatttgtcaaatgaccatgaatcacgagatctatttaaaattaatataggaagaacgtcttttattgtaagtgaatcgttaaaactatctttagaaaaaagtggtgtaactggagttgcgtttcgtgatgtagactatctgaccacttaaaatagaatgattttgttatgatagggtttttcttatattggttctacccaaaacaaacccacatgaaccgaatagaagaatttctatcaattactagaaaagataaagaatggcttgctaggtcgttgcacgttgagttagaattagtagaaaaatggtgttcaaataaagaacaaccttctattaatcagctattcgaaatttcatatgcattagaagttagcgcaggtgatatttgggtaggtaggtgttgattttttaatcgttcactttaaatcaatgctgggtaaagctctataatagcaatgttttctttggatctcagaatgatttttctttgaaaatctggctgttttttctttataaaaaaaggttatttaggaataattaaacaatatctcagctgactaatctttttaaaattatgataagtccatttctcagatgttttatgtcattgaaaaataaaaagcgacacataaatgtgccgctttaaatgttttcacaacggaataatccttattgtgaattgctttcagtattgtagcgacaatgtaagaaaaaattattaaacttaagcttgtaattaaacccaaaacgaatcgcttatgtattttacaccacattaagattccatttttgcctataaaaatctttaaaatgagcagtaaaacaatattaggattagatttaggaaccacttcaattgggtgggcgcttgtaagagaagatcaaaacaatcggaaaaaatctgagataattaaactaggagttcgagttaatcccctgactactgatgaaaagtctgattttgaaaaaggaaaagccctttcatcaaatacggacagaacattgaaaaggggagcacgtaggaatttacagcgttataaacagagacgctcaaatttggtgaagattttagttaataatgggctaataaattcagaaactattttagctgaaactgttaaaaattcaactttcgaaaccttaagattaagagccaaggctgctaaaagtaaaattgaaaatgatgaatttgcaagagttctattgaacattaataaaaaaagaggttataaaagcagtaggaaggcaaaaaatgaagaggaagatacacttattgacgggatggaagtagctaaaaagctttatgatgataatttgactcctggacaatttgtattttcattattgaatgatggtaaaaattatatcccagatttttatcgttctgatttgcaaaatgaatttgacagtatttggaattttcagcgacactattatcctgaagttttgacagataaaatgtatcttaaattgcaaggtcaaggaaaattgaatagcattaagttatttttggctaatcaccaaattaatacggcagaaaataaaggaaaggaagctcgtttgagacattataagtggcgaagtgaggcactatcctcacagcttactattgaggaggttgcttatgtgcttgtagaaattaataataacctgaataaatcaagtggctatttaggtgctatcggtgatagaagtaaagcgctttatttcaataaagaaactgtaggagaatatttatgtaaaaaagtaaatgagaatcaacattccaaattaagaaatcaagttttctatcgacaagattacttagatgaatttgaaaaaatttgggagacacaggcgagatttaatccgattttaacaccgaaactaaaagcagaggttcgagacataaccattttctatcaacgaaaactaaaatctcagaaacatttaattgctgaatgcgaatttgaaaaacaacataaagctatccctagatcatctccgttgttccaagaatttagagtttggcagatgattaataatttggagttttcaaatggagacaataaagaaatgccaagtttaaatgtgaaaaaagcattatttgaagatttgagtttaagggatggtctaagtgcaaacggtattctcaaattttgtggttacaataaaaaagaatggaaaacaaattttaaagaaggaatagagggtaacagaacaaatgaagcattatttaatgtttatcaaaaaatagccgaagcagaagggtatgggcatgattggtccaaaaaaacagcaaaagaaattttagaagaacttagagctgttttcacagaaattggaattgattcaagtattttagaatttgattcaaccttggggggggatcgttttgataaacaattatcttatcagttatggcatctgctatattctgttgaggatgaccaaaagattaatcccttggatgccataatttatggtaattcgaatgtagcactaaagaaaaaattacatttgaaatatggatttaaaccagtctacagtaattggcttgcaaatatcagtttaaatcaagattacggcagtttaagtgctaaagccattaaaaaaattcttccctttttgaaggatggacacacttattcagatgcagcagagcttgcgggctataatcattcaagtagcattagtaaagaagagcaggaaaaaaggattttgaaagatcatttagatttattgaaaaaaaatagtctgcgaaatccagttgtggaaaaaatattaaatcaaatggtgaacctcgttaaccaattgatcagagattatggaaaaccagatgaaattagaattgaattggcacgagaactaaaaaaatctgcaaaagaacgagaggatgccactaaaggaataaatcaagcgaaaaaaaggcacgaagcgtaccgcaaaattttacaaaacgattttcaaattaaaaaccctacacgaaatgatatcattaagtataaactttatttagaattaaaagacaacggttttaaaacaatctatacgaatcgatatattccgaaagataaattattttcaaaagaaatagatattgaacatatcgtacctaagtctaaactttttgatgattccttttcaaacaaaactttatcattcagagaatttaatcaggaaaaatcaaactctacagccattgattttatcgaagtaaaatatcctgaagatgtagttgattatacaaaacgggtaaatgatttgtttaagaataaaagtattggtaaagctaaagcaactaaacttttaatgacggagagtgatattcctgcaggatttattgatagagacttaagggatagtcaatatattgctaaaaaagcaaaagaaatgctatgtgaggtgataagatctgtcaatactacaacaggagtcataactaataggttaagggaagattgggatttaatgaatatcctgcaagaattaacgctttctaaatttaaagcaatagaccccaatctaattgagcaaatagaaaagaaagatggaacttttaaaacgcgaatcaagggttggtccaaaaggaatgatcaccgacaccatgcaatggatgcactaacagttgcatttacaaagcatagtcacgttcaatatttaaataatttaaatgctaaatcggataaaaaaggagcaatttttggcattcttgaaaaagaaacaactttggacaaaagggggagacgaaagtttatcgcacccatgcctaattttagagaggaagctaaaaaacatcttgagaatgttttggtttctttcaaaaacaaaaataaggtcattacaaaaaataagaacagaattaaaataaatggaaaagatagtttcaagaccgttacacagcttactccgagagggcaactgcataaagagactgtttatggaaagatgaaaactggtgttgttaaattggagaaaatatcggggaaatttgataagacgaaaattcttcaggtaacaaaaacaaactatcgagaggctttgttaaaaagacttgaagaaaataacaatgatccgaaaaaagctttcactggtaaaaatggtttaagtaaaaacccgattttcttgaatgtacagaatacaaaacttgttcctggaattgtcaaaactcaattttatgaagaaatttatacaattagaaaagatgttgatgcagacttgaaaatagagaaagtagttgatcagggtatccgtgttattttaaagaaacgtttggaaaagtacaataacgatccaaagctggcctttactaatcttactaaaaatccgatttggttaaataaagaaaaaggaatagctataaagagtgtaaagataactggtgtgaaaaatgctgaggctttgcatgataaaaaagatattttaggcaagttgattctaaatgaaaagggaaatacccaaccaacagatttcgtgagtttagggaataaccaccacatagctatttatagggatgaaaagggtaggttacaagaagatgtggtctctttttataaagcagtggcacgtgccacggctggagattcgattgttaacaaaggatataatattgaaaagggatggcaatttttattcaccctaaaacaaaatgaaatgtttgtttttccaaaaggagattttgatcctaacaaaattgatttaatggatgaaaataattatgcattaataagttcaaatttatatcgggttcaaaaaatcgcatcaaaagattactatttcagacatcatctggaaaccaaggttgatgaaattaaagccttaagggatgtgacttttatccgaaaacagagtctagcaggaatggattcgattataaaagtacgcataaaccatttaggtcaaattgtacaggttggtgaatactaattctttaactgtaactaatacagttgcttatgcgtaaacaattataatccaaaacttaaaattatgattaaacgcaccctgcattttggaaatcccgtctacttaagcttaaaaaatgagcaattatgtgttgattatcctgatcaaaaggaagagtccattcctcttgctcaacgtttaaagattgcatcaaattctattcaaaaaaaagtttcaattgaggatttaggagtggtcattctcgaaaacagtcgtgttaccgtcactactgccttattggaaaaacttacatcatataatgtcgcggttattacttgcgatagtcggcacatgccgacaggattactcttgcctctagagggacatagcgagcaaagtgagcggtttaaaattcaaatgaaagtttcgcttcccttgaaaaaaaacttatggcgacaaactgtccaagccaaaattaaaaatcaggctttattgctcaaagaaagaggaaccgtaactgctgacaatatgttgcaatgggtcaaggaggttaattcgggtgatacaagaaatttggaagcaagagctgcggcatattattggaaacatatttttgatttgaacgatttcacccgttctcaaaatggaattcctcccaataatttattgaattatggctacgctatattaagagctattactgcaagagctattgtgagtactggtttatttccaactttaggtatccatcacagaaataagtacaatgcttattgtttagcagatgacataatggaaccttaccgaccttatgtcgatctaattgtttctcatttggtggataacatggatgatttggaagaattgactattgatttaaaaaaacaattactggaattaccagccttagatgtcttgattgaaggaaaaaaaagccctcttttagtagccatgagccggacgacaaactcactctatgaatgctatgcaggtgtaagtcgaaaaattttatatcctgtatatgcatgaggataattatttttctcgcctcaatcaatatcgaagtatgtgggttttagtattgttcgatttaccaactgaaacaaaaaaagatcgcagaattgcttcccaattcagaaaaaaactgctgaaggatggattcaccatgtttcaattttcgatttatatgcgccattgccctagtcgggaaaatgcaaatgttcatattaaaagaactaaaattaatttgcccgagcatggtaaagtaggaattttgcatattacagataaacaatttggaatgatggagcttttttttggacaaaaaccagtggaaacggaaaaaccaagtcaacaactggaactcttctaaaagtgatacttgtttttttattctaatatttatagttgactcaccgtaaacactggttttgagtcaaagtctactgtgaatc

SEQ ID NO: 2395 - DNA, 15522 bp, synthetic construct
  source 1..15522: mol_type = other DNA
  misc_feature 1..15522: note = Synthetic
gctgatatcgctgtaatccatatagcttgctccgaaaccgcaattatcatcgcttacccatttgctgttgcggttgaagttgtattgggctcctatatagctgatatctttaccataaggaatacccaatgaggcgggcacaaaacctgcaatggaatcaaatgcaaaactctcaggggcacaaatgcgggtgaaaccattgacgataagaatgcttcccttgcttgcagacgagattcccgcactgagtgtctcggatggcatggagatgccgcctttgttgccggcaactacacggaaatcatagtgaatatctttgtcggggtggaagatgtattcctttttctgtaccattgtaccgttgtcccaatcactacccgccttcctaatatagactatataataaccgggtttggctgttttctccagagcatcatttgtttcttcccatgtgagtcgcagtgcatcttctccatgaaaattgacggcgaaatttcttatgggcaatggctgaacaatatagtccgtaccatattgttcatgcagatatttgagcatacctttgtaaatggctcttgaagcattgaatttgaagcgggggtcatgcccatagcgcatatctgccaaattctgatgagacaagagctctaagataatcatcggaatctccgggttgcgtgactcgctataagaggcattcttcaactctcgacgtttccactcgggggcatacagtttctgcacatcattcacaatctgtgtttgtatgtagtcggcgtagctccttgctgacagacggctcacttcattgggataggtattttttttctcattgttcttgtcagtatagatggtaagtgtgccaatgatgctgtcattgccggtgttccccgcatcagagtgaaaagccaaaccagcgtgaatggggatattcagaccgtctttatcagggttggccgcacttccgccgctgagccagttcacccacttgcctctcgcagagaggtcatccaaatagtcgtttttgctttttgagtaattatacactgtatcaggtatgccggcatattgcagccagtagcgtgcaccttccatatagcgtggatagccgctgatgagggcaaccggtgcgctttcatcggaattatcctccggagtcttgtatcttgccacactacccatgcctccgccgaaacggatagcatcagaagtgattatctcgcctttctttccgtaattgctcaccagcacacggttacgttctttgtcgttagcggtaaaatgaaaagttcccaaatatatccatgtgcctcctcccattttttggttgacaacgaaagtggtgtgcagaccactatgtatcacttcgtattcagcttgctgtgcactgttgtttaagcttttgtaggagacatacacagcataatccccttctttctgtatctgcggctcatataccaactgcttggcattatcatgcgacagttgtgcctccgatttggcatatcctccaaatgtaaacggatttttgccttctgtcagtggttgctcactgtgcccccaaccgttggcattcattgttttccatcctcctgtgagtgtcacatccacgtcatctacaatccattcttctgtttgtgtatctcgttcgcgtggttgcaaaacaatggcgcctgcgttttcaagcatcggcactaaaaaaggcatggtgaaactgcttgtgtaaaggtcttccaccgtcgtcagcaattttgcccgttgaaatatccatcgttcggtaggttgattgaagtaaagaccatgactgccatatagtgcgatatgtatgccatccaatcctttacctgccttccatattctgtttttctccaccaccagcgggtgtttcaccggtggtaaggtaaaatgcagggcttcagcgttgtcctcgtgaaaacgttgtggtatcagttctgataattcatatccgtccgagaaaaccaaaactttgccgtcttcgtgtcccaatacaaattgactaacaattcgtcttatcttttctgcctgcttaggtgtcatagggagcatcgagagtgttcgcagttttttgtcatcataagcagttacttcattgttgcgaacctgcacgcgtgagatgttcacttttccgacttttgcctgctcgttggcataatgtgtcagtgtgtccgacaaaactcgtttgtcaaatgcaaaaacagcttgacttatgcctgacaatagtaagaacaataatatgtatgtaacttttctcattcgttaaagttgttcccgaaatattcttctaaaattctgttggcggcaacgaatgaactcacttcattgcgaagaactttatcttcagcctccttgagtttctctgctatcttttcgttttgataaaaatgtcctaatagtgcattgttgatactctcttgcatccaatagcgtgattgctgagttcgtttgtaatcgaaatatcccgttttgcgagtatattccacatagtcaagcaccatattccacacatcccagatacctgttttttcttcagcagagcaggttgtgacatccggaacccaccctgattctgatggaggaaatagcatgagagcatttttgaactgcgcttttgctacacgtgctttgtcgcggttggtcccgtcgcatttgttgatggcgatgccgtcagccatctccatgatgcctcgtttgatgccttgcaactcatctcctgttccggttacttgcaatagcaagaagaaatctaccatagagtgagccgccgtctccgattgtcctacccctacggtctcaatgaagatagtgtcataaccggctgcctcgcatagcacaatcgtctctcttgttttccttgccacaccgcctaatgatccggctgagggtgaagggcggataaaggcattttttgcggatgacaactcttgcatacgggttttgtcacctaaaatacttcctttgctacgttccgaactggggtcaatagccaagacagcaagtttttttcctgcgttggcgagttctgtgcctaaagcctcgatgaaagtggacttgcctgcacccggcacacctgtaatgcctaatctaatggaattgccggagtaggggaggcatgcttctatgacttgctgagcaatcttttggtcttgtggcaggctgctctccaccaaggtgacggcttgtccgagaattgacacatcgccttcacggatgccccgaacatagtcttccactgacaatactctttttttgcgatgaaaagtagcataagggttgacggttggaacattctcaacgccggcatttacagttaggcctttatagcgcttgtcgttttcaggatgttgcataacagagtttggaaatatgtggagtaattactttactatagttttaataacccgttggcggaatgaaatacggcgcatacataatttttccaatcggtttgttgttagtacccttccgctgttgacgaatgcatggaatttaattcatccgtcaggagatgatggtgagtggattatcggttgaggaaaaattgaacatttttcatttggagttttagtcggtacagagtaaaaaatgaccatttttacgctgataatatacatataataagagcgttataccacaaagtatgcacgatgtccgctatatgtccgctacatgtccgctaaaaaggtgcacttttttatcaaaaaaacgcgtgacttttctgaggaaaaattgaacattttttgcctgcattctgtcaaccgataatcattttcttcgttttaattccgacaacgggtaactttattaaaatacggctaatgcataacgcatgaagaagatggttcattgcgttatgcatcaatcgttactatcaatattagtcgccgtttattctacggtccatacaatacgcagtgtgcgcttgggagatttatagtcattggtgagtacatcaacctgacgatgatatacaccgggttcttgattggcagtgtttacactgatgttcagttctccgctcttgccggctttaaccaagtttttcttagccacagcacgtaccaaatcaggattgttgttttgtattttgcgaatttccaaagcgttggtgccaacgttctttatttccactttctgcgatgcgacactgcctgcttttacggtaccaaggttcacttctgataacatctctgcgataggactctcttgtttttgaacagctgtccatttggagaagtcttcttcgatgtcagcagttaatgccagacggaattcatcggttaactcgcgtttcccgttcaccatgaaataaatcttgcggtttactacaccccattctttacatttgtcggcatcccagttgatattgagagttcccacttctcccggtttcagttcggtgaaactcaggttagagataaggaagttatctttgtcattgaccagaatatcaacggttatattatggtcagtttgattggcatattccaaactgcgtgtaacgttattgcctttgtagatagttccgaattccaagtgatttactttcaaactgagttcgcccatctttacagaatagcggtcaatcggtttggcttgtttggggataacttcacctctaatgaacacctgggttgtaggattgctggcattggaggtaatagttatagttttcttgaatgtgccggggcgcccgttgggattgtaggttacggttatacttcctgtttcgccgggttctatgggagttttggtccaagtaggcgtagtgcaaccgcagctggcttttacattggtcagcacaagcggctccataccttcgtttttgaactcgaaaattgtacttacccgtccatcaccttcgtaaatctgaccgaaatcatgctctgtggtgctgaatgagatgaccggctgttgtgccataactactgtgcttagtagcaacagactcatcaaaaatgtctttttcatatttaattatttagatggttattgtattctgctttgttcgtttcaattattgtgccaaattgggtggagaaatcgtttcctgcgttagtccaactcggcaatgtcttcaatcccttccatttgcgtgatacgttgtaccagctctatgtccttgattttccgaatagacttacataagtcctgcacttcagtcgtgtcataaacatagagttgcagtttgccgttgaaaataccattctcggctgtgatatgcatatcatgcaggttgatatggtactcttccgatatcacattgagaacgcgaatcagtacacccatgcggtctatgccgcgcaattcaatggtttcaatgtaagttttatggcgatgtgtactccattctgcagtgtagatgcgtttgccgtaacttgatttgagtttggtggcaacagggcagtttcgcttatgtattgtgatatgtccgtcctcatcgcaatatcccaacacttcatcaccgggaataggacggcagcaaggtgcaatgccatattgttcaccgaaattctcttccgtcagaatcagttgtcttccccgtttgggaggagtgacaatggcggacgggtcgggagagttgccggccggagtcgcatcggttttccctccggaagaaatgaaaggaataaagcgtttccaaccgctgagtccttgtggctgattgattttttgtagattgtccaaatcaatatcgcccttgcctatgcgaagcagcaatagattgggctgttggagggcataatagttgattaaacgccggatgacgctctctttttgctcttgcaacccgagctcttccagtttctgattcagaagttgctctcctttttgtatatatttgcgttcttctttgcggaaataggctctcaaacgtgactgggcttttgcagtagtaacaaactgaagccactcttcttgaggtttctgactgggagaggatagtatctccacttgatcgccagccctcaatacataactcaatggttgcaacaagtgattgacgcgtgcacctacacaatgatgtcctaattcggtatgcagcatataggcgaagtccagagcggtggagccttgaggcatacgtttgatttctcccgaaggtgtgaacacaaaaacctcagaagcaaacagattcaacttgaaggtgtccaaaaactccatggcattgggctccgggttttgcaaaatgtctttcacgttgcgcaaccacttgtccaactccgtctcatcggcctcaccggtcttgtatttccagtgcgcggccaaccctttctccgcaatctcatgcatacggcgcgtacgaatctgtacttccacccactgaccattctggcccatcacggtcacatgcagcgcttcatatccatttgtcttgggcgtactgatccaatcacgaatacgctccggatgaggcttgtagatggctgtaagagccgaataaatcatccagcattggtctttctcgctcaagtcgggcttcggatcgaagatgatgcgaacggcaagcaagtcgtacacgtcttcaaaaggtatattcttcgcttgcatcttgttgtagatggaatataccgatttgatgcgcgcctgaaggtcaaaactatagtccatgctggtcagacggcggcgtattggcgctgaaaaatcttcaaaaaatgccatctgagcatccttgttggctgctaacttttctgatatctccttgtaggtgtcgggatgctcatatttgaaactcaggttctccaattctgttttgatggtgaacaaacccaagcgatgggctaatggagcataaatatattgagtctcgccggcaatcttatactgtttctcgagcggctgaaactccaacgtacgcatattatgcaggcggtcggcaatcttgatgagaataacgcgtatgtcctccgacatggtaagtagcagtttgcggaagttttccgcctgttcggaggcttgagcgccgaatactcctcccgaaatcttggtcagcccatccactatggaggctatcttgtcgccgaaaagattccggatatcttcaatagtgtaatccgtatcttccactacatcatgaagcaacgcagaacatatagaggtgcttcctaaccctatttctttcaccacaatgcgggcaactgccaatggatgcataatataaggctctccgctgcgtctgcgcacacctttatgcgcttgcttggcaaaacgaaaagccttggtgataatctctactttctgacgatgaaccgtatgactatagtcactcaaaagggcttgaaactcttcttcaatacggttttcttcttcgggagtaatgtcagttgtagtaatatgttctgattgcaatgaagacattcgcttgaaaaattttggtggagacgcagattctttacggcaatgttgcctgaaaatacgctactctctaaaaaccgcgcaaagttacatgttttcttttagaaaaacaaatattgattacatttttctttttttattcttgtcggctacccgttgggcgggtaggtgcgttttacgaaaggttacgaaataaagataattctatttgtttgataaataaatagatgaggcatattattttcttgtaaaaataaagaaatcagaaaaagatttatttgtatcttgcccaatgggaatcaattaaaatacttcttgtatctttgcagcgattaaaaaataatgattatgaaaagaatcatgtttatatggatagtggtctgcgttgcatgtcttgatgtctttgcacaaaaaagcccgactatcctcttcaatggtgacacactgttactcagtaaggaattcactcgcaaacaatgcggaactgtcaaaaaatcaatgggattacctgaggtatctggcatcgcctgttcgcgggtcactcccggatatatctggatggagagtgatgattaccgcgttgtggtggctacaaaacaagatggggaacagagttatctccgtatttccttctccgggctccccggcagatacgattgggaagatatgtgcggaggcgtttttgaaggaaaaaactatctctttgttggcgcttttggggacaatgaggagaccaccggaaactactatatcgtttattttgaagagcctgaaatcccgtccgagccggggggaactctcaaaataaaggcggacaccatccatttcgagtatcccgacaaaaatcataatgccgaagccatcatgtacgacaatatctcgcagacgttatatgtgataacaaaggtgtattacgacgtgtgttccgtctatagtctccccatgcggcttgactatgaaggcatacagacacttaccaaagtctgtgacctcggtcttaaatccgacctcggagccgatggcaaacaaggcttccatcttgttacaggagccgatatctcaccggatggaagcagagtgctgataaagaatcataacaataacattcccaaactgtcagtaacactcatttgggaaagggaaggagatgaagatatagcagaaactcttaaacggcaacctctggagatagatgcatacaaacctgagtggcagggagaagctatatgctggttagactccaccattttctataccaccagcgacgacgatggcgaacccccgatttataaatataccagcaagtatgccacccccgtagagaatatttctgttgctgcttcacaaacggcttcagtcgtgttctataatggccaactctgcatccgaagcaaagagcaactctatacgctttgggggcaaaaaataaaagactgagattttctgaaataaggttgataaagattgtgttttttcgtttgggcgagctcttgtgcttgccctttcgtgtgttcataacggtttcactaacggtagcgactgtaattgagcagatttatgagggttctctcctaattaatgaagttcttaatccgttggcggaacgcaagtaaataaagttaacctgttggcggaacgcaagtaaataaagttaacctgttggcggaacacaactaaataaagttcactcgttagcgaaacgcatgtaaataatgttcacccgttggcgaaatgcaagtaaataatgttcacccgttggcgaaatgcaagtaaaaaatttggcaatttttccacgtaaattcactcctgtttttcgaaggaaaagtgcaccttctgagcacctatcgtgcggacagcgtgcggacatcgtgcatactttgtggtataatgttcttattatatgcatgttatgggcaaaaaaatggccatttttttactctttttctgcaaaaaaaacaccaaaaaaatttggcaatttttccacaacggatattttcctcgtagttgttttgtgtgtatttccctaaaaaagttaactgataaaagtcaatatgttaaaaaatattcaaaaaaatgtatcgctgacgtgttgtgtcagttttagtgcctaattttgccgcgcgaaaaagatattaatccagacaacttctccgtttttgatgtttaaaaatatgttgtatatttgcagacggaaaactatgtagataaaatttatatgtttaacctgattatattacttgagacaatgaaaaaagtatttatttctttattattggcattttcaacaatgacctatgcccaatctcacttgaaatttaaaggtgtagagattgatggaacaactaaaaaataaagaagcaaacgacgatatatacttatgtgcaaaaccatcatatacaaggttaaaaagaaagaacgagacttgcgtcccgctcttgatgttttcacaacggaataatccttattgtgaattgcttcaaattagtgctgcaaagatatagcattaattttaattacgcaaattttttttttgagttttttcaaaaaaatgattttattgaatttcatggcaattcgagcttgtggcttgaataattgtaaatgattaatataaaaacaaatagatatgaaaacaaagaaaattttaggtttagaccttggtactaccagtattggatgggctcttgttaatgaagccatagatccgcaagaaaaatcggaaatagtaaagattggcgttagagtcaatcctttaactaccgatgaaaaagataatttttctaaaggtgcagacattactaccaattctgatagaactttgaaacgatctatgcgacgtaatttacagcgatataaactgcgtcgtgaagaattagtacgcttattaaaagaacatggttggataacggatgatactatattggcagaacatagtaatcgctctacttttgagacgtggaggttgagggcaaaagctgttagtgaagaaatatctttagaagaattatcaagggtgcttttgatgataaacaaaaaaagagggtataaaagtagcagaaaagccaaaggaggagaggaaggcgtattgattgatggaatggctgtggcaaaagaattatatgaaaaaaatcttacccccggtgagtattcttatcatttgttgcaggaaggtaaaaaacatttgccagatttctatcgatcggacttgatggatgaatttaataaagtgtggaatgtgcagaaacaatattattcaaatatacttaccgatgaattatataatgcacttaaaggaaaaaacgagaaacaaacctgggctattgtcgctgaaccttttggaatagtgggaataaaactggaggccaaaggagcagaactaaaaaaagaatattttcgcctgcgtgctgaagccgttaagaaacaagtggatttagagcgattggcgatagtccttcaaaagattaatagccaaatgaatgcatcaagtggttatttgggcgatattagtgatagaagtaaagagttatacttcaaccatcaaacagtaggtgaatatcaatgggatgaattacagaaaaatccgaatcatagtctgaaaaatgaagtattctaccgagctgattatatggatgagtttgaacgtatttgggatacacagtcaaaatatcataatgagttaacgcccgaattgaaacgacaattacgagatgttgttatattttatcaacgtccattgcgtagtcaaaaagggttggttagtttctgcgaatttgagaaaaaacagattgaagtgattgtcgatggtaagaagaaaattaaaacaacgggctgtagagtggctccgaagtcctctccattatatcaggagttcaaaatatggcaaattctcaacaatatcattctatcaggtaaggataaagatggaaatgtagttcaaagagaattggatgaagacgaaaaacaattgttgtttgaacaacttaccatatgcaataaactaaataaaaaacaggctcttattcttttatatggaaagaaaggaaataactatgatttaaacttcaaagacttagaaggaaatagaacaatagcagcattgtatgaggcatatcttgctattgtcaatctaaatatagaagaaggaaaagaatataaagaggttgataagaaggtaataagagatttctttgagcagaatggcatcagtacggcaattcttgactttaattctaatgtaacagcagaggaattagaaaaagaagaattgtataaattatggcatctgctttactcctatgaaggggataaatcaaatacaggtattgcggttttgattgataaattgtgctcaaaatatggtttcactgaagaacaagctaaaatagtagcagatgtgaagctgcaagatgattatggaagcttgagtacaaaagcaatacgtaatatcttgccttatatgcgtgaaggaaagaaatacgatgaagcatgtatgtatgcaggctatcgtcactcggcacaatcgttaacacgcgaggagattgacaatagagtgttgaaagaacatttgcaaatcttacctaaaaatagtctgcgcaatcctgtagttgagaaaatcctgaatcaaatgattaatgtggtgaacgcggtcattgatacttatggcaaacctgatgaaatacgtatagagatggctcgtgacttgaaaaagaacgcagatgagcgaaaaaaaatgacagactctctaaatgccgaaacacgcaagcaagaagaatatcgtaaacttttgcaacaagagtttggcttgcaacatgtcagtcgaaacgatataattcgctacaaattgtatcttgaactgaaaaatagaggctacaaaactttatataccaatacctacatcccgaaagatgagttgttctccaagaagtttgatattgagcatatcattccgcagtctcgcttgtttgatgactcgttttctaacaaaacacttgagatgcgtgatgccaatattgaaaaaggtaaccaaacagcacgggattatgtcaaagataaatatggcgatgagggttatgctgaatatgaggcgagagtaaaagcattagaggcagatggttctatttctcatgtgaaggcaaacaatttgctgatgaaagagcatgatattccatccgacttcctaaatcgtgatttgagcgactcggcatacatagctaagaaagcacgtgaattgctcttggaaacagtgagggaagtgcatactacttccggttccgtcacaagccgcttgcgtgaagattggcaattggtaaatgtgatgcaggaactcaattatgcaaaattcgccgctatcggtcaaattgaggaatatcaagaccatgatgggcgcactatacgtagaataaaagattggacaaaacgtaacgaccatcgtcaccatgcaatggatgcattgacaattgctttcacaagaccggaatatgtgaattatcttagcaatctaagtgctcgttccgacaaatcgggtattatatatgcagtagaacaaaagtatctcaaaagagataaaaacggtaagatgattttcttgcctcctatgccgttggacgaattcagagcagaagcattgaaacagttgagtaatatactggtatcaataaaagctaaaaataaggtggttacaaaaaatgtaaacaaaagcaaggttaaatccggttatcgcagaacagaacaactcactcctcgcggacaattgcataatgagaccatttacggcagtcatctcgagtatgtcacaaaaatggaaaaagtgggcggctcgtttgatatggagaagattctaacggtggcaaataagcaagatagggagatgttgctgaaacgtttgcaggaaaacggaggtgatcccaaaaaagttttcacgggtaaaaaaagattggataaacaagttaaaacggtgagcatgcagacggtttacaccatccgtaaggctgtaagtccggatttgaaaattgaaaaggttattgacccacatattcgcgcaatcctccaagcaagatatgatgaatacggtaaagatgcccgtaaggccttcagcaatttagataagaatcctatctatttgaataaagaaaaaggcattactatcaagcgagttactatcacaggtatcagcaaagctacagccttacattataagaaggataaccgaggcaagttgatttatgataatgaaggtcattgcatcctgaccgacttcgtctctactgccagcaatcatcatgtggctatttataaagatgagaatggtgacttgcaagaaaaaatggtatctttctatgaagctactatgcgggcaaaccaagatttgcctgtcgtggacaaagaataccgaaaaaatgacggatggcagttcttgtttacaatgaagcaaaatgaatatttcgtctttcccaacgaacagacaggattcaatccgttggatatagacttgctgaatcaggaaaacaaagcgttaataagtcctaatctatatagagtacagaaaattggtagtcatgattattggtttagacatcatttggaaactcgagtagatgatgtggaaaacgcacataaggaaatgatttggaaacgtatcacaagtgtttcaaaattatccggcataatcaaagtaagagttaaccatttgggagagattgtggcagtaggtgaatattaagaatcctgaaaccatgataaaacgcacactttgtttttccaatccggcttatctgtcgtttcggcaagggcagttggtatatcgtttccccgaggtggtgaaccagccttccgtgccgcagaatctaaaggatgaagctcagcagaccatacctgtcgaagatatcggtgtggtgttacttgacaataaacagataactgtcacgcaagggctgatgacggctctcttggaaaataattgtgccgtcatcacttgtaatgaccaacatctgccggtcgggttacatttgccactaaccggaaatagtattcaaaatgagcgattccgctttcagttggaggcgtctgcccctctgcggaaacaactatggcagcagacggtgcaacagaaaatacagaatcaggctgctatacttcgttatgtgggagctgaacaacgcaatatgttgagatgggtaaaagaagtaaagagcggtgatgctgataaccttgaaggtagagccgcagcgtactattggaaaaatgtgtttccatcgctgccagagtttataagaggtcaagaagcggatccgcctaacaacctgctaaattacggctatgccattgttagggctgttgtggcaagagcattggtagctgcaggcatgcttcctacattaggtatccatcatcataatcgttataatgcctattgcctggcagatgatattatggagccctatcgaccttatgtggataaagaagtggtagagattgttaattctaatgtcgactattctcaagttacaacagagttaaagagacgtttgttaggtattccggtaattgaggtgttgattgggggaaatcgtagtccgctcatggtggcagcacagaccaccgcaaattcactcgtgaaatgttttatgggtgagacgcgcaagttgatgtatcctgatttagatggacaggtttagtgaatatcgtgttatgtgggtattagtacttttcgatttgcctactgagacgaagaaggagaggaaggcgtatgcgcagtttcgaaaaaaactaattcaagatggtttcactatgtttcaattctcaatatatcttcgtcattgcagtagtgccgagaatgcggatgttcatattaagcgtgtaaagggaatgttgcctgagtttggcaaggtgggagttcttcgaattacagataagcaattcggtgaaatggagatttttgaatgtagaaaacctgcgaaagtaaatcagccaatacagcaattagagttgttttaattcagaaactgctttacctgaaaagaaaaatgcccttttttgagggcatttttcttttctgttgtcgtctgtactccgttaaataacaattaattacatagattctgttgtttaacggcgacaaagatactaattttgaaagcaattcacaactat

SEQ ID NO: 2396 - DNA, 15511 bp, synthetic construct
  source 1..15511: mol_type = other DNA
  misc_feature 1..15511: note = Synthetic
ttccaggagcaatagatattgatacacttgaattagagtcaccaaaaacatggaacagccgatcgccaaaggagttaaaagaggctcttgagtgccatggtatatgcgctaatacaacagtaattctgtatggtaagtttatgtaccctgacaataacgacagctttccgggtagtgctgccggacatattggtgcaataagatgtgctattattatgatgtatgcaggcgtaaaagatgttagagttcttaatggaggtttccaatcatggaaagacagaggcttcagaatagatacagacgatgtgcaaaagataccgattaaagactttggcgcaagaataccttcgcaccctgagtttatagttgatacagataaagcacgtgagatgattgcagatgaacgttctgatcttgtttgtgtacgtagctggccagaatatattggagaggttagcggctacaactacataaagaaaaaaggtagaataccgggagtaatattcggtaattgcggatcagatgcttaccatatggagaactacagaaatcctgatcatacaataagagaatatcacgaggtagaagatatatggcgtaaacaaggtattacaccagataaacatcttgccttttattgtggtacaggatggcggggtagcgaagcattctacaacgcctggttaatgggttggccatatatatcggtatatgatggcgggtggtttgaatggagtaataatcctgaaaatccttatgaaacaggtataccaattgatattaaactagagatttaaaaaaataaatttagacatatgaaacgagcatgagaaatagttttcacacacacgagaatgattattatgcgaagttccatatgaccattgaaaagaaaaataaacagatgaaagcaatatggaataatactgtaattgcagagagcaacgaaacaattataatagagtttaatcactacttccctgccgattcagtaaacatggagtatcttaaaaagagtagttttcagacaacctgcccatggaagggtgttgcctcatattacgacatagttgttgacggcagagagaatcacgaggcggcatggtactatccggagcctaaactaaaagcacacagaataaaaggttacatagcattctggaaaggtgtagagataattgaatagtaacatctgcaaaaaacgttatatggagatagacaatatagtagtaaaaaacagaggaataactataatcaacagattaaaagatattagtaataagactattattaatgagatatataatggcttaaacagtaaacgtcgttatatatcgccaaaattcttttacgataaacgcggttcagagctgtttgaaaagattacagaactcgacgaatactacccaacaagaaccgagaagagcataataagctcaattggtaataagatatgcaacaactatagtggcataaatattattgaactgggtagtggcgatcacacaaaaatagaactccttataaaacagatatcacctgaacaattacgtaaggttgaatatactgctgttgatataagcgagtctgcaataaaaaaatctgtaagcacactaaaaaaagtcttctcgcaactaaaggtaacaggcataattgcagactttataaatcagcccgatataataactaataataaacagaagattatatgcttctttggcagtacaattggtaactttacagaacgcgaacgcataagatttatgaataacctctcatcgcaaatgagaaaaggagataaactactacttgggttcgatatgattaaagagcacaacattatagagaaagcatataatgacgacaagatggttacagctgagttcagcagaaatgttctgaatgtggtaaacaatataaccggatcaaactttaatccgaaggagtttgagcataacgcattctacaatgctaaaaaggagcgcatagagatgcacctgaaagccagaaaagatatgcttatagatattgagtctgttaaagagtctatctacattaaaaaagatgagacaatacataccgagaactcgcataaattcaattcagaacacataaagagtatcgggcatcaggctggtctgagcactacagatatatttaccgataaaaaaggctggtttagcattgctctatataaaaaacatacatagttctgtaacctataattgtgacaactaatagttaattaagatatttaagttaaacagattaatatctatttttaattaaacaaatactaaatatcatgactacagaaacagttacaaaagagagaattgaagagctgagagagtatgtaagagatgctcttgccaaagacacagctccgattacagaagatgttaacaatcctcaggaaccaattacagagatcacaagagcaggagtatctacacttgtaagattagttgatgagacaaacaactatgtaacagtacaacatgccagctgctatcatcagggacacaaaacaatggttccgtggagcaacattctacaaattaaatgggacagaaagtgtaatggatacactctgcactttattgttaccagaaccccaatctactaattaatacctgtataggtaaaacaaagcagaggtgattaacagttacagatcagctctgcttttatacagaacagacaaataacccatagaaactacccaaatattttcagcgactatgcaatattaatatttaattgcattgtaccgttatatttatttttttactaaattgccagtcacataaaaactgctatacctccggattcatttaaaaaacttctctcaggttggtacaaccattattaaccaaaaattaaattatgaaactggagcgaatacttgacaaagtaaattctcttgagaaaaactcatttctgaaaataatagacaatataatcacctcgtcgccaaaaaactcaaaagaggtagataagatattgtcagaaaataacaacgacctcaagagtgcagacaacattaatatcagcagggtattcaaccttgtaactgctgagttttcagaggtaataaaatcagagtttctcaacatcacatcgcaaattgatatccttattgatataataagcagagatggcaatgtaattataaagcgcgattggtttgcatatctgtatgagaaagagctggcatctattacccgaaaaacaaagcaattggcaaaagagatagagtctgacagatcgcaaatagaaaaagagagaataagagactataatatatatatggcgtgtgtaaaaacagcatacacaaacgatattgagaataatcgcgatgagaagattacagacgatgagttatcaatattactaacacttgctgcaaaattagagctatcgcaagaggaggtaaagcttataaattacctgataattccgccacacaaactaaacatagataatataataaatatgttgcgtaatatcggagttatattcttctcgcgaaaaaacaacgagctatatatacccgacgagatagtacgcctgttaagatctgttagagataaagatattgccgataaatattaccgaagaatactaaaatcgttcagagaaccacagttaaaccagatatgccgcaaacacaacataaatatcaaagagcttaactacgagggcaaaataaaacggataataaacgatggcatatcaatatacaatctgttgagttacgatatacataaagagggtacatcgcaatcagataaaaaacgatacctgaacgatatatgggagaataaccttaagatagatatagcattaaaaggtgctacacttaccgataaggttaagaatatgattaaatattttgataccattgaacaggaagataaagtgggcatatctgtagatggttacgataagatgttacgtgaactctacgatacaatccctgatatgagaaaacgcatccaatcgcaatttgagatgcaggacgacaaattgttggatagtcagagcctgttagactataacataaagccacgtgatatattagaccttataccatctgatgcacttaaacgatttattaccgcaaaagagataaaatcaagaggcgatctgatactaaatacacttgatgcatataaggatgccgataatctatacatagagaattacgaatttattggatacagagatatcaccggattaaagagcaacggattacacattaaagagagcgaacttgggcttaagtttgaggatataacaagaacaatattcgcaaaactcggatttaatgtagatgagaagctaaaaaaggagataaacaccagtaaaaacagaatagatctgctgctaaatctgggcaataagaacctgataattgtagagtgcaaaacatctaaagatagcggatacaacaagtttagttctgtatcgagacagataaaggcatatacagatattgccaaagacagaggatacaatgttgttaagtcgttactcattgcaccagattttagcgacgattttgtatacgattgtgaacttgaatttgagattaatatctccctaatatccgcatcatcgttaataaagattcttgaaggatttaagaactcaaaacataatcagttaccatatcagctattaatgaaagatgttcttattaaagaggatcgaatactaaaggctatcacaaaatagaccaccaattacagctggctctgttgtttaaccacacagagccactgtgttaatcatatgttatgaataaaacaaaagcactgcatctggtagagaaaggtaaaaacggatcgcagttaaacctgatatttgactatattataatggggttaattctgttgaatatagttgcaattgtaattgaaactattccgggtataggcaacatctggaaagagcaaatagagtattttgagatagtatcagttataatatttactgttgaatatctgatacgcatatatatttcagatattacccaccctgcaaaatcaagagccaaatcaattataaagttcatatgttcgccatacggaattatagatattcttgcaattgccccattctatatgccatttatatttgttactgacctgagattcctcagactattaaggcttatgaggtttctgaggatattaaagataaacagatacaacagatcgctctatcttatctgggatgttataaaagagaagagatcagaactacttacaacggtattcataacctcactgatgcttcttatgtcatcgttccttattcactattttgagtcagaggcacaaccagagcaattctcaaatatactaaactgtttttggtggtcggttgcaacactaacaactgttggttatggcgatatataccccgtaacaggagcaggtaaatttattggcggaacaatagccttaatgggtattggacttgttgctctgccaacaggtataataagttcaggttttatagataaactatcgtcaaaaaataaaagtgtatgcccacactgtggtaaagagatatagatataacacacaaatacagagtcccggatatagtcaggactctgataaattacacaacgaaagttacacaatatgccattggcaataaatataagctaaacccctactgtatataataggtgctctgtactaaatatgcagacatttatataaacagtagcgtaattttgcaatcaccaaagtgcatacaatacttgataaacaactatgtagcaaataccttacgggtagactccgtaaagccatcatcctttatatactctgcctttatatccagactaagatccggaagctgattagagttgtcagattcaagaataaacaactctctgtcaacatcccatactatatctgtaacataatatacatatgaggttatcttatcagcaaatctcataccctgtccaataaacggaacataaggcaacctgatctgcttggttaacattacagcctcctccctatccgatgaatatatccatacattcatcactgtattatagtcattcataactctatgtattttgttaatatgctttttccaatctatacatattgttacgcaataatcttaataatgttccatttaaattaattacataaaaaacagtgtaatagcaaaatatatacaatacatcaattactctatctctacatacagagctaatcaattgactatctgacaaaatcacaaagcatatttacaggcagagaccgaccgaccatttgttataaatattacaaatgacatctttttaatagttataaatacttaattagcagatattacaactatatacctttgaaaaaatggttcaaaacactattttcgtatgttaatcataataaatagttatggatacccgactactacgcttctttacagctgtatacgaacagcgaaatctgaccagagctgccgaacaatgctttgtatcgcaaccaaacatatcaaatggtattaaacagttagaagacgaaattgggaaaaatctgtttaccagaacaaaacgaggtgttgagattaaagaggaggcacactacctataccctattgcaaaaagaatattgggcgaactatcatctataccagatatatttaaaaagagtctgttcagaaacaaaatatgcattggcgtagcacaggatctgccaataaatcttaagagcagattgtttaaactaataactgaatcggttgacaatattgaacttgatataagaccaataagtcgcgaatgtgatataaatctgcttataagagagtggaaatttgaggagcacctgtttatgccaattgcaaaagagaactatgtactctgtatacctgataatcataaactatctgagaaggatataattgatcttgacgatcttaaagaggagccatttatacactgccctccgtgtgaagcacatcagcaatgcttatcaatactaagttcaaaaggagacagatggaacaccatagcaaactgtgctacaaaatctgaagttcttactatgcttattgccggattaggcataacctttttgccagaacatcttgcaaacccatggaacggattctcaattaaaagctataacggaccaaaatattacagagaaataggtctctcctactcaaaagagattcttgagaacagtaacatcaaaaaaattatcgatataatatctaaaaataatttctccctagatacactataaacgcccgttattagtgtaattggttactgtttatctctttactacaaaaacaatttgcatatattttcaggttaatcgccgacaatatgttaattaattatatatttaccgcccaaatttaacaacatacaaaacagactctatatacccggactcatattataaacctatataaaataacttaactaatgaagagacaattaattattactctgctgctaatgctgtctgcaaatatatttgcacagatacagttcgagaatggatattatatctcaaacagcaaccaaaaaatcacaggattaataaaaaatatcgattggaagagcaatccaacagagtttgagttcaaaaaaaatatcgaatcagccccagaaataatagatataaagtctgctaaagagtttggactatcggatgcaagatatatacgttttactgtaaaaattgacagatcaaccgacgatattgcaagacttaaaaaaggtagtgctccggtatttaaaaaggaaactctgttcctgaaagagatagtatctggtaaggcatgtttatatctgtatgtagatagtaatacaaagagattcttctacacaacagagaagatgaatataacgtcacttatatataagagatatcttaaccataacagagatatgcttacaaatgatacctataaacaacagcttttaacatcattaatatcagataatgtaagcaaaacagacataaaaaagcttaaatacaatataaacaagctatcgtcactattctataaacacaacaatcagactcctccgggcaaagagaaagagcaaaagaagagcggtaacatacctgaatcgtggtttcatctgaatatcagacctggtatagattactcatcgttatcaatatcacacggtaccgacaacgctgataatattgatatggatagtgagattagctttagaattggtgccgaggcagaatttgttttaccattcaacaaaaacaaatggtcggttattgttgagcctgtatatcagctgtacaaaacagagaaaccatttaagaaccaaagtgtaaatgtagattataaatcgatagagttatcggtaggtgccagatacagaatgttcctttctgataaatcggcattatcattaagtatgtcgttattaaaagattgggatctggattctgaaattaaatatgagcgttacacaccttacgatataacaaccagagttaatttcggatttggtattggatatatatacaacaacagatatagccttgaagtaaaataccacaccaacagagaggtactatctgactatatatttaaaaataccgactacaaaaaactatcattcgtaattggttacaggctattctgattctgataataaaaaacagcaatgtcagacaattctccggcattgctgttttaataaactatataactttatttaaagtactctatctctcttacatttatatatttaggaacatcctcaacataaactaccctttttgtccagtttccgtaatcgtcaaactcatacttaaagctatactcgttaattacacgttcattagcaccatatatttttaacaatttcatatccccattatcgttaacaaaaactaacctcttaataagcttattattatcataaaattcaatctcctcaatagcattatctccgtctctgtttatgataaatttctctctgtcatctctaaaaaactcatgaacaacaccatcatatgagcagtttatcttaagaatatatttaccatcaccattcttaaatgattgtactaatgaattccggttaaattcatattcaaccctatatctaagcttattatctgcatcataagtagcaacttccttaattttgttatcctcaataatatactccgatctgtatatcatatcaccactcttatctctggttgtatctgcaacataattaccatctgtatcagtagtataagttgtaatatgttcaagatttgcccccgacaacatctttatcagattattattctcatcatatacattatctatctttgatgtatattgcattgtaaaatgattcaacgattttagttctccctgctttgtcagttcaatataaaaatctcctcttattaaatacaattgtgccaatgtattatcaacatattcagacaaaaagctattaatctgcaaacccttctcaataccacttgatttaagctctgcattatacaatttagagttaacagacttaacatcacccttaaggttatttatcaacctgtaatcaatgacaaactccttatctgaacaagataaaaacaggataatcgatagcaataacagggttactttaacacatttaagtttcatagtatatttattttcaaacagtttacaaacaaacagacaaaaatcaatattcaccaaagatcaattcttatctctgcataaaattaatacaaaataaggcattaatcctaaaaactaaaactgcactatgttttgttgatttattgttatgtaaatagtatctttaaccgttactaaaaacatttaaagcgactaactctctattaatatagaaaagcgccgctttaaatgttctcacaacggaataaatccttattgtgatttgctttcaatttgtagtacaaatataatgttaaaacgttaaacacaaaatatatttatgaaaaagatacttgggttagatcttggtacaacatcaattggttggtcttatgtaaaggaggcagataagagtgaagagaaatctgaaattgtaagattaggcgtaagagtaaatcctctaacaacagatgaacagaataattttactcttggtagatcacaatcagtaaatgctgaccgaacatctgcccgtagtgccagaagaaacttacaacgatataaactacgaagagacaatcttattgaggtattaaaaaagattggttttataaacgatgattctatactgaccgaaagtggtaaaaactccactcacgaaacattaagtttaagagcaaaagcaacaactgagagagttgagaaagatgagtttgcccgtatactactatctataaataaaaaacgtggctataaaagtagccgaaaggcaaaaaacgatgaagaaggtgctcttattgatggtatgggcgtggcaagaagattatatgaggataatcttacacccggacaatttgtttatagtctactgaatgacaataagaactatatacctgacttctacagatcagatcttaaaaacgagtttgatcttatctggaataatcacaaaaatgcatttccagaaatagtgaatgacaaagtatatgcagaactcaataacattggtaaacaggctactgcaaaaaaattcagagaggagtttgatatatacacaactgatattaaaggaacagcaaaagagaaaaagattaaggcttatgagttaagatcaaaagctgtaacagagcagttgtcaaaagactctttagcatatgttttggcagaggtaaacaacaatatctataactctagtggttatcttggtgcaataagcgaccgaagcaaagaacttgtttttaacaaaaccacagttggtgagtatctctactcaaagattaaaaataatcctgcatgtagccttaagaatatggtattctacagacaagattaccttaatgaatttgaaacgatatgggagacccaggcaacattttaccctgaactaacacgtgagttaaagagcgaaataagggatatagtaatattctatcagcgatctcttaaatcgcagaaacaccttgtaagttattgcgaatttgagaaatgggaagaggagtattttgataaaacaaaaaacagaacacagaagagagttgtaggtcacaaggttatccctaaatcgtcattactatttcaggagttcaaaatatggcatataattaataatatagaacttgagaatagagagacagcacagatatatacattagatgaagaacagaaagatattctttataacgaattaaatataaaaggcaaacagaaaggaaatgatgtattaaagctattgatgaaaaaacccaaagagtggaacattaattatgatgagattgaaggcaataatacaaccagtgctctatataaagcctacaaaacaatattatactgggaaggttatgatcttgatttaagtaaaccacctgaaacaattaaagagattgtaaaaagcatttttgacagcttaggaataaaatcagagatacttgaatttaacagcgaactatcaggcgatagtttcgataaacaattatcatacaggttatggcacactctctactccgttgaatcagagaaagaggttgtaaaaacactaattaaagtattcggatttaaagagaatcatgcaaaactattatcaggtgtaccactacaacaagatcatggtagtcttagttcacgcgcaatacgtaaaattactccattcctgaaaggaggaaataactactatgaggcttgtgctttagcaggctataatcactcatcatcattaacaaccgaagagaataatagcagagaacttaaggataaacttgacctgttaaaaaagaacagcttaagaaacccagttgtagagaagatcattaaccaaatgataaatattgtaaatgctgttattgaagatgacgaaatggggcgtccggatgttattagagttgagatggcacgcgaactaaaaaacagtgccggacaacgacaaaagatgacagaaggaataggtaaagccaaaagaaaccatgatagaataagagctattctggataaggaatttgatataaaaaacccaacacgtaacgatattataagatataaactgtatgaggagttaaaaagcaacggatacaaaacaatatactctaacagatatattagccaggagagtttgttctcaaaagagattgatattgaacacataatacctaaagcaagattctttgacgactctttctcaaacaaaactctggagttcagatcagaaaatatagagaaaggaaatgcaactgcaatagattttgttgagaacaagtatggctcagagtatctggatgagtataagtcgcgtgtaaaacgtatgcttacaaccaaaggagatggatcaataacaaaagctaagtataataaactgttaatgaacaaagagaatatccctgacgatttccttaacagggatattggaaatacacaatatattgcaaagaaagcaaaagagatactctctcagattaccagagtggttgaaacaaccacaggaacagttactgaccgcctaagaagcgactggggaattatagatgttatgaaggagttaaacatgcctaaatacaggaatctgggcttggttgaaacagttgagggacgtgacaaaaaaaacaaagagagaattaaagattggacaaaacgtaacgaccacagacaccacgctatggatgcacttactgtggcttttacaaaacactcatacatacaataccttaacaatcttaatgcacgagataaagcctctggcagtgttatagccattgagaagaaagaactctacagaaacagtaacggaaaactactgtttaaagaaccttttgtaaacttcagaactgttgcaaaagagcatatagagtctatacttatctcgcataaggcaaaaaacaaagtatttacacgtaatattaacaaaattaaaacaggagacagaggaaaatatattgagaaaatacagttaacaccacgcggacaactgcataaagagacagtatacggagctattaaacaacctgttgtaaaggatattaaaattgacggtaaactaaacgcagatatagctatgtctattacaaaacctgcatacagagatgctgttataaccagattagagcagtacaataacgaccctaaaaaggcattcacaggcaaaaactcattagcaaagaaccctgtttatattgatactgagaataaaatctgtttacctgaaaaggtaaaagcaaaggtgtatgaggaggcatatactataaggaaaccaatagaaccgggtctggctgttgataaggtaattgacgaaggaattaagagaaaacttaaggaaagattagcagaacatgatggtaacgataaaaaagcattctctgatcttgacaaaaatcctatatggttgaataaagataagggtgttgctcttaaaagggtaaagatatccggaattaaaaatgcagtatcgttacatgaaaagagagataacagaggcataaagataaccgacgataatggcaaacatattaagagtgactttgttagtacaggaaacaaccatcatatagcaatatataaagacaacaaaggtaaattacaagagaaggttgtatcgctatttgaggcaataactgctgtaaacaacgggctgtctgttattgacaaaaactataactcagagataggctggcaatttatgtttacattaaagagtaatgagatgtttctgttcccgtcagatgagtttgacccggaagagatagatatatatgatgttaaaaactataacatattaagtaaacatctatacagggttcagaagatagctagtaaagattacttcttcagacaccatttagagacacaacttaatgataataaagagctgctcgggcttatatataaaagattgagaaatcctgaagcattaaaagatttagtaaaagtaagaattaaccatctgggtaagatagttcaggtgggcgaatattaatatattattatggtaaagaggactctatattttggtaatccggcatatctgagttacaaaaacagacagctaattatagataagcccgatagtgatgatacaaaaagtattcctgttgaggatattggtgttatggtactagataactatcagataacaattactcacaaacttattcaggcactgcaagataaccttacagtaattataagctgtaataacagccatatgccggcatcaataatgttaccaataaatggtcatcatgtaatgacagagcgtatgcgaaaacagatagatacctctttacctttaaaaaaacagttatggaaacagaccattgaagctaaaattggtaatcaggcaaacctgcttaaacgtctggaaaaggactatacaagattagagtggctaaaggagcgtattgatccgggagatccgaaaaatacagagggcagagccgccgcatactactggaaagagctgtttggcgaagattttttaagagttcctgaaggagagtcgccaaacaatatactaaactactcctatgcaatagtaagagctattgttgcaagaggattagtcagttcaggtatgcatccatcgttcggaatatttcactcaaacagatacaacatgtactgtttagccgatgatattatggagccatacagacctattgttgatgagttggcatatgagatacatttaacaggcagggttaatgaagatcttacccctgaaataaaacgtgatattctgcaactaataacaaaagatgttattattgatggtgtccgtagcccgcttatggttgctgtaagcagaacaacaaactctctgtttgaatgttacgaaggtataagacgtaagataatatatcctgaattttatgagtcatgatgcacttaatagctatagagttatgtgggtaatggtattttttgatctgccaacagatactaaaaaacagcgtaaagcagcctctcgttttcgtaaagagttaatagaggatggatttagcatgttccagttctctatatatttaaggcactgcccatcaagagagaatgctgaggttcatataaaaagggtaaagagagcattaccggagtacggacatataggaatacttaaagttacagacaaacagtttggagcaatggaactatttcaggcccagctagaaaaagataaacctccgcttgttcaacaactggagatgttctgatattacaaccataaaaacatcacaatacctgtttaccaacgctatttatttaagagttttattaatcctaatcttttatataatactctaaaaaacaaacctttactgcgggaaggctgtgcttaccagcagtaaagatacaaattgaaagcaaatcacaa

SEQ ID NO: 2397 - DNA, 15497 bp, synthetic construct
  misc_feature 1..15497: note = Synthetic
  source 1..15497: mol_type = other DNA
acaataaagcaataataaaggatatctacctctcatttttctatggtgccaaaatcggtatcattggtctcaacggttccggtaaatccacggtcttgaaaattattgccggtgtcgagaccccaactcagggtgaagtggtattcgctccgggatatagtgtcggctatcttgagcaggagcctcagcttgatgactctaaaacggtaattgaagtggtgcaagagggagtaaaggaggtaatggatcttctcaaagagtatgaagaggttaacctcaaatttatggagccgatggatgatgatcagatgaatgccctcatcgagcgtcagggggagcttacagataggattgaacaggtgagcggatgggatatcgattctaagctggaaagagctatggatgcgcttcagtgtccggaaccggatgcctccattgctaccctcagcggtggggagagacgcagggttgcgctttgccgtcttttgctccaggagccggatgttctgttgcttgatgagccgaccaaccacctcgatacggagagcatacagtggcttgaagcgcacctccagcaatacaagggtacagttatcgcggtgacccacgacagatattttttggataatgtggccggttggatactggaactcgacaggggagagggtattccatggaagggaaattatacttcctggcttgagcagaagagcattcgcctggctatggaggagaaacaggagagcaagcgtcgtaagactcttgagcgtgagctcgaatgggttaggatggctccaaaagcgcggcacgctaagtccaaggcccgtttgggtgcttacgaaaagctcctgaatgaggatgtgcgccaaaaggacgagaggctcgaaatttttattcccaatggaccgcgtctgggtgataaagttattgagtgtcacaatgtgagcaagtcttatggagacaggattctttttgaggatctgacctttaaactgcctccggccggtatagtgggagtcattggccctaatggttccggtaagactactcttttcaggctgattatggggtatgagcagcccgatacgggtacttttgaggtgggcgagacagttaagatagcctatgtggaccagcagcacaagcagatagaccccaatcttactgtctatgagactattgcggataattccgagtttgtaaaacttggcaaccgtgaagtaaatgcacgcgcttatgtgtcgcgtttcaatttcagcggagctgatcaggagaaactttgcggagtgctgtcgggtggtgagcgcaatcgtcttcaccttgcgctgacgcttaaggaaaatgccaacgtactgcttctcgacgagcctaccaacgatgtggatgtcaacactatccgtgctcttgaggagggtttggaaaattttgccggttgcgcagtggtaatttctcacgacagatggttcctcgaccgtattgctacccatatccttgcattcgaaggcgattcaaaggtctatttctttgaaggaacctattcggagtatgaggagaataagaaacgccgtctgggcaacgtagagcccaaacgtttcaaatacaaaaaacttataggttaaaacaggagagtggttttgcttgctttaggcaaggtcaatgccatgtttctgacacaccaaccgcatctcttccggccagatgctgctttgaatttcccctatatgggcttttctgagcagaaacatacagagacgtgattgtcctattccccctcctatacagagaggcagttcccctgagagcagtttgcggtggaaatagagttccgatttccactcttctccacgcagagccagttgatgacgaagtgcttccccatctaccctgatacccatagaggagatctcaaaggcactctcaagtaccggattccagagcaatatatccccattaagaccttgataaccatctgaattgggtgtactccagtcatcatagtccgatgctcgggagtcgtggggttctccattggaaagctctcctccgataccaatgatgaatacagcctttttctccttacagattgcattttctctctccttggggcacaaatcgggatagcgttgcagcaattcttccgaatgaatgaaaaagatctcttccggcagtataggacggatctttgggaagtccacatagatcttgttttcggtcacttttatcgcctcgtagatacgccgtactattttcttgaggaaatccagatttctttcagagctatcgatgactctttcccaatcccattggtccacatatattgagtggatattgtccaattcttcgtcagggcggagcgcattcatatcggtatagataccgcttccgacaggagtccggagggttgcaagtttcagacgtttccattttgcaagagagtgcactacctcggcgggactatccctgagatcttttatgggaaatgaaaccgggcgttcaactccattgaggtcgtcgttgatgcccgttcctttcaataccaccatcggtgccgtgacgcgcagcagcgagagttgtgctgagaggttaagttgaaacatatctttgactaccttgatggccttttcagttctgattaccgtaccaagtatgttgctgtatccggaaggaatataaagtgacattgtttgttgtgatttttttagacatcaaatctatgccaacttgtgcaattgaccaaatatttaacaactttggctatctttgtccgctgttgtaaaccccgtttccacaaagtatgaagaaattaatgaaaatattcaagaggattcgcgagaatcatattgagacgctcggcaacctctatgactatgcaaccacggtttatcgcgataagacacaatcgcaggtaatcgacggggagctctcctatacctatgctacatttaaagaaacttgcgattcgatttctaaaaaactaagtcaatatggcattgggtttggagataaggtggcaatccttgccaacaacactcccaactggacagtagcattctttgcctgtgtaacattcagtcgtgtcgttgttccaattctcacagattcttcggaatatgaggtaaccaacatactgcaacactccgagagcaaggcgctttttgtttccaaaaaacttctctacaaactctctgaggaggctctttccgggatgcgtctggttgtggatattgatacttttgagactattaaagcggatgaggaggcatttacctgtgatggtagggtagcagtaccgaggcctgatgatatggcagcaattatatatacctccggcactaccggcaatgccaaaggcgtgatgctgagccaccgcaatttcacctccaatgtaatctcttgttatcactctcacaaatgtgatgatagggatagttgtatctcaatcctacctatggcccatacctacgaactcactctcggagtactctatcccatctattgcggagcaaccgtctattatctctctaccccaccggtgccatcactgctactggctgctatgaagaaaattcgtcctacggctctcctcaccgtaccgctgattattgagaaaatctatcgcaatagcgttattccaactattaaaaagagcaaaaccctctcttggttgaataagcatcataataaactgatgtgccgtattataggatggaagctcaaaaagagtttcggcggcaagatgaatttttttggtattggtggcgcaaagttggatactacggttgaagagttcttatggaaggcacgctttccctatgctatcggctacggactcacggaggcttctcctttgcttactcatgccgttggtaaacagagatacccgggctccataggatatccggtttatggggtggaaatgcgtctggataatgtcaatcctgagacaggtgagggggaaattgtggccaggggtgacaatgtgatgctcggctattacaaagatccaaagcgcaccaaagaggcttttacagaggatggttggttgaagaccaaagatgtggcttctatggaccgcaagggacgctattatattaagggacgtcttggaaatatgattgtaggcccttctggcgaaaatatctatcccgaagagattgagagcgtaatcaatgatatcgaaggtgtaaatgagtcgatcatcattcaacggaaaggcaaattggtggcgcttgttcagtttaatgagaatatcatcgactgggacacggagggcgaggcggagttttatgaaaagcttgaagctactaaggctacggtgatgaatatagtcaacatgaaggtaagcaagacctcaaaaatcaatgaagtcgaggtgatgaaagaaccttttgaaaagaccgctaccaggaaaatccgcagatttatgtataatgaagagtagttgatgcaaccttttggctttttttgcatctaatatatagatagttctttgacatctgctgatgtcacatatggggatgactggttttgacagcatatgatgacggatggcaagcatgccgagcttcgtgacctggctcgttaatctcagatctcaagcctataaatggcaataacaactatgcactcgctgcgtaatctagactaagtcagattccttaatcgagccggccaggccggtatcgacgagtatcccgccgaactttaagcggtctatgttcggcattcggggtatcattcaagcccgctgcacgcgactactcctctacatcgcgttaagataccgaggataaggtggtggtggcaggcctgcaagcagtcacctcccgacaatcaacagcaggataagcatgtagaaacccttctggcgctatgtttggacggcggttcgactccgcccatctccacaataattgttttaggtgaaaaaaatacgcagaactttacgcttaacagcgtgggttctgcgttttttgttgcgtgttgcgtgttgcgagttaagggttgcgggttgcaagttacgggttacgtgtttcgggttacgtgtttcgggttgcgtgttgcaaggtgtgtggtgtggggcgcttatgatttacggcgggttttgaaggataggatgtggatggtgacgccgatggcgatggcaatgaagaggatgcggagccagaggaggtccgtgacaaatattgcgcaatagaggagggttatccagaggagcgatactgagataatttttatccgaagagggatggctttgtgcaccataaagtccgagatatatttgcccagtctggggtgggagaggagccaatcgtagaggcgttgcgagcttttcagccaacaggcggcagaaagcagcagaaatggggttgtaggcaacaccggcaggaatattcctattatcccaagcgcaagagagatactaccggcaactattaacagatatcttttcatcctctaaagaaaaaacagtgatactcccgcgatacttataaaggcgccaacaacctctataactttcactttttgcttaaaaatcaggtaagatggcagaataatgagaaccggtgtcagtgccataatggtcgaagcgatgccggcgttggtatattgcaccgccatcagcgagagagacacaccgataaagggtccggtaatggttacaagggtggcataaagcatcccacggcggtctttgagcgaattaatcattattggcacctcttttctgaccagaaggatcaaaataaaccccacagcacctattgccgctcttatgaaggttgaggcgaagggaaccattgtacttaccgtagtagcaccctcggggattgcagcatgataatggcccatgcccactttgctcagcaccagccccacaccttgaccaactcctgcacctattcccagcaaaactccttttataggaagtttgacagccattttgtgcccctgacccctactgaggatggacatggcaatacccgaaagagttacaaccatacccagcaaacctttccaggaaatagtctctccgagtaaagcccagcccgttatagctgccaccggaggagccagagtcataaagagttgcccgaaacgcgcaccaattaccagataggagttgaagagacaccagtcgccaaaaacataccctatcagccccgaaagaagcaaccagaaccatgttttaccatcagcaaagctaggccagggcactccggtcacaatccagagagttacaccgagcatcagcagcgacaacaccattctgatgatattgagctgcagcgaacctatacgctttgtgccgatctcggcaaaaagagcagtcgccgtccagctaattgccaccaccagtgatatgagttctccggtatatcccataataagcggcaaagatagtaaaaattaggtttgagtaggagttgggaattaagagttggtacaacaacaaaggaccgtggtgccgtcttatgcttgtttgcaaggtgtggctactcgtccgatgcgtataaatatagtttacaaactggacttatttgtagtaatttgtaccctactttgccaaatctataaattctgctatgattgaataaccctcttcacttgagtcaattgtgatggtgttatagtcattgttaagtggctttagagtgatgctgttatgactccaagaaccgtcatcgtggtaacttttcttgctatggtactcctttattgtgtatgagccatgggtatcgggatcgaatctatcataaagttgtacaagtactatcttgccttcgcggctaccaggagggttagcgcggaatatgcataagtccccatcttttatgcgtggttccattgaattacctattgcacgaactacaaacatcaatttgttgagctttttgttttctaccctaacccaaccgtcaatttcaacatcttcaccttctccaaagtaaccacaagctgctttcagagaataaagtgggagaaaatccttatattttgcactatcatttatatcgggctcaattcgaattgcagagtattctctctgttccgtttctgtatccttataacgctttgtttgttctattttgtgtggatcaacaagacatgcacggaaatgttctgcaagatttttgtctgtacagaaaatatagcaccccttcattccacgtgtcatcagagttctgtaggtgttcttaataatctcatctgcttgttgaagtgcagtattacgatctgtctttagcatctttttgaatcccttaacagattgatcggaaggtgcgcgttttgtaacatctgtaattattcgtccatctttaaaggaaatatcatctccaagtataactccaacgtaatcaagctcaagaccctggcatgtatgaatgcatcctatctgctcaaatgattccggatcaattagccacggtatgtttctgttgttgaggttccattgtttgctaaaatcaggtaagcatatatccatagcatcaggattccttttgctctcccaattccagcaataacctgcaacaactcttgatttgttgttctcgttctttgccctgactgcttcgtacatggcgttaggcgagtcaaaaacacggaaatcataatcttcaggtgaaagacgtatatttgcactctccctcacctgcaaagtgttatcaatccagctaagatagccgtcagaaccattacacctaaactgggacttcaaatctgttacatagacttcagctcccatcatttcagcaattttcttaatcaaacctttgcttccaatatccttaatgtggattctttgatgatcatctataaagaaaactgaaaagcgagcagcatttataatctcttttatttggttttcacctttgttggagaatagaccgctcttctcgttaaggcggtgtgcctcgtctactacaagagccccaagcacgtctgtctctgcatccacaaaagagccacttcctacaaataggttatttatatatgaccgtctaaacgaaccagagagttttacttcatagacagctctcggtgcactattcttggttacatattgcgttgcaattccttcattgatgaagcgaacaagtaactgtattgcaagaacgctttttcctgtaccggggcctccttctactattagcacacgtttgcgtttcttaggatcatttttactcttcactgcaaggtcaacagcagtttcatataccactttctggtcgtcaatcatcacaaactcagggttgccttggagcatggaggacatcgtgtcagcaagttgttttgatggtgcaatacgtccgttttcgattttccagagaatatcctcatcagacgtatatttgatatgatctgagataaattttctgagatttgttaagtcatgttttgagaagagtggagcaagtttgatatatttactgtaattatgatggtcaataattccgtcaaaagtatagttgtgaaggaaggcacacggatttagagagatgttctcttctcttacggcctcgcaaaagttctcaagcataaaggcgtatgaccaggcttgataagaggggtgagtggtttcagcgataccatgagcaaaccgtgtctttataatcgcaggtttgtctgtggcaatggcactatcccactgcttaagttcaactattacaacattctgttccttttcctcgttaagtcctgctattataaaatccacacgcttggatgtaagaggcacctgatactctatagcaacgcttacactatccggaatatcaggagtgtctacaacatctttcatatatctgagcgagttttcccaggaacgaatttcactttctgcagttgttcgacctaaatgatacatgaaagcagcttcaaccttatcagaaataacgccatctaaaacatcagaaatgaactgtcctttggtttccttgtagagtatcatagttcagtatattttttggcattaccttttgctttttctactggatacttggcggcattctttgccagcttctcaagcatgatttttttgatatcgaggttgtatttgtctgctaactgaaaacaatatatcagcacgtcagccagttcatccttaatcgcttcggcagatacatcttctgcctgtttccataaaaatttttcattcaactccgctgcctcaagcatcagagccagtgacaagtctttgccattgtgaaattgcccccattcgcgctcattgacgaacgagatgatcgtttccattaattctttcatatgtcgcttcgcttacttgggcctaaagttagcaacttttggcgagtcattaacaaattagtagatatttcttatttcaatcgcgaatgagaggagtttgtaaaatcacagaaatggggaaataaaaaatcccccgttaaaggacgagggaacctaatgttttcacaacggaataatccttattgtgaattgtctactttgtatcttcagtcacaaaggtaattataatttattaaacctgcaataatgctttctttttgttacttttgttacaatttaaatacaacgatatgaagaagataattggattggatttaggaaccaccagtattggctgggctgtagtaaatgaagctgagaatgattcggagaaatcgtcgattgttaggttaggagtaagggttaatcctctgactgtagacgaaaaaaataatttcgaaaaaggaagacctattaccacaaattcagatagaactcaaaaaagatcaatgcgaagaaatttgcatagatataaaatgagaagggataaccttatagaagttctgaaaagagaaggttttataacggatcagaccattctggctgaacatggtaataatacaacttttgagacatatcgtttgagggcaaaggctgtgtcggaagaggtatctcttgaacaatttgccagaatactattgatgataaacaaaaagaggggatacaaaagcagcagaaaagcaaagaacgaagaagaaggttccctgattgacggtatgtcaatcgccaaggagttgtatgaaaaagatatgactccaggacaatattcactctcattattggagtcaggtaaaaaaacgcttccggattattatcgttctgatctgcaatcggagttcgataagatatggtcagtacaaaagacttactatcctaatcaattatctgatgaattgaaagactctttaattggtaaaaattcaagacagacctgggcgattattgctgacaaaacagtttggcctcaagaggtaaaacaatggaatgagacacttgccaaaacagagcattttgttagagagtataagttgaaggggataaaaagagaagggaaacgagatgagcaaaaactagagaactataagtggagagtatctgctctaaagaataaattggaacccgaacagcttgcaatagtgtttcaggagatcaatacacaaataaattcctccagtggctatctgggtgcaataagtgatagaagtaaagaactctacttcaataagcagacagttggacaatattttatgcagttgttggatgaagaccctaataccagtcttacaaatcgtgtcttttataggcaagattatatggacgaatttgagacgatatgggaaaaacagtccgaattccatcctgagttaacacagaatctaaagagagaaataagagatataattatattttatcaacggaggttgaaaagccagaaaggacttattagttattgcgaacttgagagttgggagatcgatgttgtcagaaacggcaaggttgaaaagaaaactataggacaaagagttataccgcgttcctcaccgctgttccaggaatttaaaatctggcagatgctaaacgatgtcgaagtatttgttaaagatgcccgaactaaaaaacgcagacaagtcaaaaacccctcactctttgaagagtcaaacccttctgaaatacttcaaattcatggcaggaggaggttgaccgaggatgagatgattcttgttgcctcagaactctcaattcgttccgagatgaaaaaagaggatgtcctcaaattactatttgatgattggaggagcctggatttgaattttaaaaaattggatggcaataagaccggtaatgcactattcgaggcttatagtaagataattgagatgtcaggacattttattgattggaaacagagtgctgatgatattattgccgacgcgaaaaaggttttcgatgctttaggttggaattccaatatactctcctttgattcttcgaaggatttgcagtctcaagattattatatgctttggcatattttatattcatatgaaagtgacaatagtaataccggaaacgaatccttaataaacaaactcgtttcgttttgtggttttgaaaaggaatatgcagtagttttgtctaatgtctcttttcttgatgattacggtagtttgtccgctaaagctattggtaagatattgccacaccttaaagatggtaatgattattatttagcttgtgagctcgcaggctacaaacactctaagtcctcaattacaaaggaggaaaatgaagcgaggattcttaaagattcacttgatttattgccaaaaaatagtttaaggaaccctgttgtagaaaagattcttaatcagatggtcaatgtagttaatgcgttgatggatgagtatggaagacctgatgaattccgtgttgaattggctagagaactaaagaaaaatcagcgggagagggaagagatgacaagagcaataaatgaaagtaccagggttaataaggaaatcagagaagttcttatgatggagtttggtttaccaaatgtgaccagaaacgatatcgttaggtataaattatatcaggaattgaaagagaatggctatcatacactatattccaacacctacatatcaaaagaaaaactttttagcaaggattttgacatcgagcatatcataccccgatcaagattgtttgacgattcttactccaacaagactctggagcttcgaagtataaatgaagaaaaaggtaatcagactgcttacgattttgttctgtcaaaatatggagagaccggacttgaagagtacattaatcgttgtcaagcactttttccaaaagactcagctaaattaaaaaaattgttgatgcaagaggctgatatacctgagggttttgttgagcgtgacttgagaaacactcagtacattgcaaaaaaagcattatctatgttgaagaatgtatgtagaaatgtagttgcaacaaccggtagtatcacagatgagttgcgtagtgactggcagcttatagatgtgatgaaggagcttaactgggataaatatgaagagcagggacttgtagattattataaggataaggatggtcgatcaattggtaggattaaggattggagcaaaagaaatgatcaccgtcatcatgcgatggatgccttgacagtatcttttacgaatcctgccttgatacaatactataataatatgaatgccagttccgataagacaggagctatttatcaaataaaaaataagtacttcaaggaggggcgtgcaataagtccgataccattaaatgagtttagggcggaggctaaaaggcatttggagaatattcttgtttctattaaagcaaagaacaaagttgttaccaaaaacataaacgttacaaaaaccggaaaaggtggtaccaacaaaaagattcaattgactcctcgtgggcagttgcacaatgataccatttacggaagtcataagagggtattttatgttgaggaaaaagtgggatcatcatttgataaagagaagatatccagggtttccaatgcaaaatatcgtcatgctttgatggaaaggctcgaagcaaatgcaatgaatcctaaaaaagcgtttaccggtgcaaatgctttgtctaagaagccaatatggattgatcaagaaagaggattacaacttcctgaaagagtaaaagtcagaaatgaagaggttgtttataccacaagaaaactggtagatgagaatttgaatgttggtaaagtcatagatccgaaggttcgggccattcttgaaaacaggttgaaagaatacgggacagcaaagaaggctttttcaaatcttgatgagaacccaatctatttgaataaagaaaagggaataacaatcaaaagagttacaatatccggtataaataatgcttatgccctacgtgaaaaagatggtaaaaacggagaaaaagcacctaaagatttcgtgagtactagtaacaatcatcacgttgctctattcaaaagggctataatagacaaagatggtgtggaaggatatgagttctgtgaggtggttgtaccctttatagaagcggtagccagggttaattttggagatcccattataaattttgattatggaaagaatgagggatgggagtttatgtttaccatgaaacagaatgaatatttcgttttccctaatgcgaaaacaggatttgatccgcatgcaatagacctattggatcctaaaaactatgctttgataagtcctaatctcttcagggtacaaaagttctcaacaaagtactatgtgtttagacatcaccttgagactagtgtaaaagatgttgaagaactgagagacattacttggaaaagaatccaatctcttgatagcagattattgggaatggtaaaagtcagaatcgaccatattggcaggattgtatcagtaggggagtattaggtgtttctacttctggggttatactcaccaatagatacactttatgattaagaaaactctttattttggaaatcctgtgtatctcacactaagagatgcccagttggtaattaaattcccacaagttgaaaacaacgatgacctgcctgacctgttcaagaaaaaaaatgtcatcacaaaacccgtagaagatatcggagtggttattttagaccacaaacagataactattacaacaggtgctcttgaggcattgctggagaataaagtggcagtgattacttgcaattcccagagaatgcccacaggtcttatgctgcctttatatggcaataccactcagaatgagcgtttcagagagcaactctcctcctcagtgcctttgcgaaagcaactttggcagcagacagtcaaggcgaagattgaaaatcaggctgccttacttcaaagaaatctttcatctgatgtaaggtgtatgaagatatgggcggacaaggtcaaaagtggagattcagacaatcttgaggcacgcgcagctgcctattactggccaagagtttttcccggaattaaaggttttgtaaggggaagggatggatttcctcccaacaatcttttgaattatggctatgccattctaagggctgttgttgccaggggtttggtctcaagtggactccttccgaccctcggcatacatcatcataacagatacaatgcatattgcctggcagatgatattatggagccatatcgtccctttgttgatgcgttggtgggcgatattgtaaagtcagggacggattatcaggatctgactaaggatataaaatcaaaattacttacaattccaactctcgatgtgcagattggtgaattaacacgtccgcttatggtcgctgttactcaaacgacaacatctttgtacaaatgcttttcgggagagttgcgccgaattgcatacccatcatttaaatgagtagtataagcgagtaccgcgttatgtgggtattggttttatttgatttgccgactgaaacaaagagaaacagaaaagacgcagctcagtttagaaaaaatcttataaaagatggttttacgatgtttcagttctctatatatattcgtcattgtgcaagttatgagaatgctcaggtccacgtaaagagagtaaagtccatactgccggagtatggccatgtagggataatttgcattactgataaacaatttggcaacatagaacttttctatggtaagcaaatgtatgaagtaagtgctccgggacagcaattggagttattctaagtggtatgaaatgaaaaatcccgtcttgtcaacgggattttattaaaaagtcgcaaacaattttaattctaataatcgctataagtcgctaaaatacagtcagatacacggggtctactgtttgcgatatatcaaagatacaaagatgtagtcaattcacaacgctcctcgatttgctgtctcccctcataaactgtttgcgatatatcaaagatacaaagatgtagtcaattcacaaccctcttctagtacaattagaaataatatagactgtttgcgatatatcaaagatacaaagatgtagtcaattcacaacagctgcctggctctcattcatcaccctgttactgtttgcgatatatcaaagatacaaagatgtagtcaattcac

SEQ ID NO: 2398 - DNA, 15486 bp, synthetic construct
  source 1..15486: mol_type = other DNA
  misc_feature 1..15486: note = Synthetic
gcctcggtcgttacgtaggcaaaatcgccatacacgcttggatcacgccatatcgattcggtacctggataccaaaacacttctaccggattgctaggatccgtaacattgacgatcgaagttcctttggaagtacccacaattgcatattcattccccaactcatcttcatacccccatacgtcgtttagattcgcaccatgtaattgctgataggatatatgcgaaagcgaatccacattcatttgccccgcaacacttgcacttaaaaaaacccaaaaaaaccaggaaaaatatttcatagaatcaagattgctgcgacgatgaaaattaagatgatgaccaaatattgccatacatcaggaaaataggtagcgatcgttttcctccacgacatgccttattgtttgatgaatttcttggtataaacttgttcacctgtaacaatacgcgccatgtaggtaccggatggtaagtgccccagcgaaacgtgcgattccgcgaagtgtgacgaggactgcatgcgctctccaagccatttacgccccataacgtcgtaaatttccaacgtagcttgagaacccacatatcccgaaagttcaaaggtagtttctcctgaagtaggattggggaaaactgctatttcgtgatccaacttcgcctcgtccaaaccaacaccaaatcctaccgagaaatcataacggtgatagcgaccaaaatctccagggaaaatttcaatgtaactgccgccaacataccttaaacgcatttgtccattcgtttctccttctacttgagaggaataccaaaaagacaatccgtcgtgatcggtgtcttctatgatgatgctgtaacatcccggagccaaattaaaggtgtctttgtattgcgtttgattggttaattgatcgcgctgaaaaacgacattaccggcggcatcgatgagtctgtaggaattttcaaccgctttgttattggtagttaaccatacaaagaagggtccgttgatgacctctggcgcatcaaacttaacttgtttcacgctgttttgaagatattcatcgttcccaaaagttccgtttacattgcttacgtatgccgtaaaggtttcctttgaatctaaatccatccaaaaccctaaatcgtttacggggatctccacgacttcctcttccaagaaaccaaggttacccgtccaattcagctgaatttcattgccgtaggtaatccaacaacgaataaagcaagaggtcaaaggggttgaacccgtatttttaagcaccacgcgaggattggaacaggtaggattaaacttactgtagtattcccaattgtttggattcaaaacgtctacaatggctgcatcgttcgagaaattgggtgccgagtaggaaatcaaatcaaaggacccaatgtaattaccacccgcttgtcctggatcgccgggtggaaccggatttacgctgtaatcaatttctacggtatcgcctggggagacatagggcgttagttcgaaatcataatcttttacgcgatcgccagggcaccaaccctctctcgcataaggccatgtacccccttgtcctatgtttggattatcgccacattccgtgggttgccatatgttccaattatagcgcgggaccccgtcgacggatatacggtgatcgtttggaacccattcacaacaagcataattcccgacttgaccgtgacctgacattctcgttttaattttgaacatttgggaggagtcggaaagcacaaccggcttgttttgtaaaaccacatcgttggacatttgtccgaagttgtaggaacgccaatcggcccaaatgggttcgcgtttgtgaacgtctcgaggaggaacccctttaataaaagcaaattttaaatccaaaagttcttgggtattgtgggcggctaaatcaaccaatccgtttaggtactgttggtaatcggtaacatcataaatccaacaaaaaccatttggccctaggtcaaagtttattccgtagggagtgatgtaccttgcgatttctacgtcatgaattatttcataaggttgttcatagtaaaataccgtatcgtttaggagaagaatatccgaggccacaggaccgttcgacgtggcaactccctgaggactgaacgtgtaggataacccttggggaacaccacgaaagctatttaccagttcaaagtgacggttcactggggcttgttcaaacacaacaataggctcaatcggtttgttttgcgctaccaaaatggtttgcgttgggcccgtaacggaaccctgaccgaatgccatttttggacgttcttgaagggactgaacccctgaaacgggaacggcactttttatcatactgcccgtagaagggtcaaatccatcggatagcatcaatttaaaatcgttgggagaacgatcgtccgcataatttacatcgtcaaaatcgtaataggtcatcaaggccccataattcggatgagaaacatcaattttctggttgtagtttgcaagaatcgtggccgagtctaatgccgctttaaagacacgaaattcatccatttgtcctttccatttcaacccataatctcgattggctcccaacacaaaccggtgtatgtagcctacggttcggtttaaattggacccagcgtgccaggtatgaccgtttttgtatatgaacatttgacctgtactctgttttttgacaaaagcccagtggttccaattgttgtcaatttcacttgcgctcatcgtcttgttgattcggtcgtaacccgtttggtttcctgcatcccaatagatattgttattactccaaggcatgtgaatgttcaaaattcgattatttaacgtatcataggcttctaaaatcgaggtatttgtaccattgtttgcatttcctttcgcccaaaattcaatggtaacgtctccattaattaaggtatcagacaattctaaaaggctgtaattggttccatcaaactcaatgacaccgttccggccttcaaagtattggcttaccgcgccgtttcccgtttcggtttcaaaagcatactgcgcttgggttgtgatctcagaatcaaaagtcaactgaaccacaaggttctgcatgccgtcccaagaaaacggttgataaaataaaaagcgattcgcgcccaactgcatggacccaggatttatgttatggttgtatacttcaacaaatggacccgaaaccaattgcgataaaacggtaagattggttcccagaatccgaatggttggaaaggaaatcccttcattttgagccaaattagctacgtacaacgaaagagaatggaggtcacccgcttgtacccctgcagcccctaattcagccgcagtaaccaaaaactgatacgttccgcccttgttttgggtatgaaaaggtagcgaggaagaagaattacccagatttacaacaaaatcctgtaagctttcaccgcttcgaaaggattggttatactggtaaatgttggaataggaagcacccgccaacgcgctattgaaatttatggctggtggcgtttgacaattcgataaatagtgaaaaccctcccttttcaccgaatcataggtccctgtatgatcgaaaaccctagtataggtaagataatcccattccccacaatcgtactggtcccacgtagttagaggactgcacttcagcttgtagtacatcaggactttttcaaagcgcatggtatccagtgacgctggaaattgaaattgatcgtgtcggttcgtaatggagtcaaaggtaaacgtttgaacccaagtagtatcttgagaaaaaccggtttgagcaagcaagaaaaacaagggtaataatttcaaaaatcgcatggtgttttttttgccctaaatgtaacaatattccaagcattttacgatttttcggacataatttccgatttttgtcggtggcacaccaattgaaaaatgtgggtggcacgttatgggtggaacaactatctacgtattccgttagcttttatgccaaaatgtcaaaaccatggatgaacaactatttcctttgcccctcttttctactatcgatgccgattctgatttcattccacttattactgcagaggaagaggaacatgtgaacagccaacaatttcccgatgaactgcctattttgccgttgcgcaacaatgtcctttttccaggggtggtgattccgattacggtgggtcgagacaaatcgattaaattaattcaggactccaacaaaggaaataaaatcattggggtggtttctcaaaaaaaccaggatcaagaatcaccctctttcaatgacctgaataccatcggtacggtagcccaaatcattcggctcttgaaaatgccagatggaagctcaaccgtaatcattcaagggaaacggcggtttgaaatagaaacaccgcttcaaacggaaccctacatgcgggccaaagtccgtgtgtttaacgaacccgttatcgcaaaaaaagacaaagaaatgacggtaatgatcaatacgatcaaagaccttgcattacaaatcatccgagaaagcccaaacattccgtcagaggcacaatttgcaatcggaaacatagatagtcctacgtttttagtcaatttcatctcatcgaatatgaacgcagacgtttccaaaaaacaggaaatgttagaggaaatggacgttcgcaagcgggttaccatggtgatggaacacttgacgatggaagttcaggtgttggaaatgcgcaatgaaatccaaaataaagtcaaacgcgatttagaccgacagcaaagggagtatttcttgcatcaacagatgcgaaccattcaagacgaattaggcgataacccacaagaccaggacgttgctgaatttcgcgaacgagccacggccaagaaatggaacgaaacggtggaaaaagccttttacaaggaactggataagttacaacgaatgaatcctcaaggagcagaatacacggtacaaatgaattatttagacgtgttattggatctcccatggaatgaatacaccaaagacaacctcgatttaaagcgtgcaaaaaaaatcctagaacgagaccatgcaggtttggaaaaggttaaagaacgtattttagaatacctcgcagtattgaaaattcgaggcaatatgaaatcgcctattttgtgtttttatggtcctccaggggtgggaaaaacgtcgcttgggaaatccattgctgaagcattaggaagaaaatacgttcgaatgtcactgggaggattacacgatgaggctgaggtcagagggcaccgaaaaacctacattggtgctatgcccggtagagtgattcaaagcttaaaaaaggccgcttctgcaaaccctgttttcgttttagacgaaatcgacaaaatcggaagaggcattcatggagacccctcctccgccctgcttgaggtacttgacccagagcaaaatgccgccttttacgacaattatgtagagaatgaattcgatttatcgaaagtactgtttatcgccacggcgaatagcctaggagacattcaaggccccttgcgcgatcgaatggaaattattgaagtcaatggctataccgtggaagaaaaaatggaaattggcaaaaagcatctattaccaaagcagttgaaggaacacggacttactgctaaacaaatagacattgaaaaagcggcccttgaacaagtcattctttcctacaccaatgagtctggggtacgcggattggataaacaaattgccaaattggttcgttcgagagctaagcaaatagccaatgacgaagcgtacgaaacaaccattaaatccgaagatttatttcagtttttaggcgcgggaagaaaccaatcgaaaagcatttccaatgacgttgcgggagtggtcacgggtttggcatggactgcggtaggtggtgatattttattcatagaatcatctatttctcaaggtaccggtaaacttaccctaaccggaaaccttggggatgtaatgaaagaaagtgccgtgatcgccttggcctttttaaaagcacacagcgattggttaaagcttccgcaacgtgttttcaatgaatatgacgttcatttgcacgtgcctgaaggtgccacgcctaaggacggtccgagtgctggaattacgatgttgacatcgttggcctctttgtttactcaacgaaaggttaaaaaagacctcgccatgacgggtgaaattaccttgcgcggtgaggtacttccagtgggtggtatcaaagaaaagttattagccgcaaaacgctccggaatcaaggaaatcatcatgtgtatcaagaacaagcaggatgtcgatgaaattgaggcccgctatttaaagggtttaaaaattcattatgttgacaccatgaaagccgtattggaccttgctttaaccaaggaaaaagtaaaagatcctattagcattgcggcgaaatagcgccaacaatttactcccagttttcggcgtcattatctttcaataattttagccaattctcgtctgggtctaattggttgcgaagaatttcggaatattcgtgtgcttctaacgcgtacctttctacttccgtccctgtatatcgttcgatggcatctagcaagggcaactccgaagtactgcagaatcccaaagcttgtccccgccgatttcccctacccgttctaccacagcgatggacgtaattttctggattttctggtaaatcgtagttaatcacataatcaacttcgggaatatcaatgcctcgacaagaaagatccgtggttatgagcaccttgttttccccagaacgaaaccgttccaaacttttaaaccgctctgcttgttccttgccaccgtgtaagatttcaacaggaatgcctatgcgttccatcgccttctgcacccgttctgcacgaacctttgtccgaacaaagaccatgaatcgctcctccggatattctaaaagaatattctctaaaaagaaacgcttatcgtccatttcaaccatgagaacttgatgatccacgtttttcgaaacgggatttcctttggtaatttgaatacgaatggcatctttgaccacgtcgtaagcgagggatttaattttcttgttgatggtcgctgtaaaaaacagggtttgcaagcgtttcggtaatttacgtttggcgtccacaatatcgcgcgcaaagccaagatctaacatcaaatccgcttcatccagaacccaagtctggacggttgaaatatccaaaaatccttgggcaatcaaatcaaacatgcgccctggggtggtaattaacacgtgggtacgttcctgaagctttttaatttgatggtcttgctctaccccaccgattagggataaaattcgaatgggtaggtgcttggctaatcccataaagacctgttcaatttgtcttgctaattctcgggtagggaccattaccaaggcctgaaccccttttttatgggtattgacagtaattttgtgaagaataggaatagcaaatgcggcggtcttacccgttccggttggtgctacagccataacatcttcaccgttcaagatgtgtgaaatgactttaaattgaatgtcggtaggtcgggtataacccaattcatcgatggctttcaatagggaaacgtgaatggggtaatccttgaacttcatagttcaaaggtacggaaaccgattaatgttgattaaaaagcttttcaacggtctcgaaacgataggaaaaaatagtctcaagttttttcctaacgaacaaagaatgcatgattctacccaaaaaacccaggggaagttgataactaacgatatcggtcatctcaaccgcattccctaagtccttaaaatggtgttcatggtgccagagggtgtagggcccaacgcgttgttcgtccacaaaaaactgctgatcttgtaccgtttttatttccgttacccatcgcaagggaataccgaaaaggggttttaccgtgtaggctatcatgaggccttcatacatcttttccggaatttccgtacgaaccacaaaacccatgctgggtggcgttattttggaaaggttatgaggggaggaaaaaaaatcccaacaggtagccatgtccgtttttacgatttgggttcgtttcagttgatgcatgggaacttaacaaattggataggaaaatgttgcagcaacagttaaggggactcgcatattcgattggatagcattattacaattcgttgaattgaaatttgcaccgtttacttgtaagccttcaaataactttctaaatggatccgtaatgaattattctttagttgattctctctaattttcttgaattgctttaaggaacttaataccattaaagcgtataaaattccgccaaggataaataaaaagtacgcgccagactttgccaaacggaaggcttgagcttgccctacttgtgcattttgaatatacttttcagggtgatttaaaaattgaattccaaaatataaacaaagcgtcacaatcattatcgtcactaaaaataagacagatttagctaccttttctcctagaaccaagggggaaattcccaaacaagaacagacgatagcgaaaagcttagaattttttctatctccctgaagctgtcggttttgattatttatcagggaagtaataaaattgatatgttcctcttttttggctcgaaaattcacctcgttttttttatccagggcttctattcgtgggtttgcgatagaggcgtattcttcacgacaaaattcaatcttattgtctaattcgataaagatttcttcccaatcgaaattatttacctccgtattttcggccctttcaaccaaattactcaggtttcgcaaggtagtttcgaccgatgatgtgagttcaaattgctcaatttcctcaagaatttcttgattggtgaatgccggtagcaccggatccactacggctgcgaatttctttttaccggaccggtatacatcccttgcagcctctcttcctatttgattaatgaaagcctgtactaaacccatgtgtagaatttggcagccaaagtactgattttttcaaccgcattttggtgttttgataaaaaacaattgggaggtgttattctaaggtatcggcaaccactaccgttcctgatattggacaataattcatagcatgtttcaaggtgtcatcgttcagtaagatggtagcgcccaccccttgtggtgtgccagcggtgttcatggcacaaaccaagaccatactatccttcattccatcaaaggaggttgtccaattggaattaacatgctgcacgtttttttgcactccattttcctcccataccacataacaatctgtgcattgaattttataggttacttttcgtggggtttgattcgttttcttcttgcagccaagcgacagaaggcatagcaacgaaccacaaaaaactaagcatttcataggctaaggatttagattttttttactatgtaatgcataaatatacggaaatcggaaccatttgaaagcatatcacccaagctccctgtaccgtacatcatccatccaacgaaaggtatacaatttccaacttctaggaggatggacaaaaattcacctgacaatccaggtcaattaattggtattaatgattaatttactgttctttgttttttcagtgtagaatcacttattaataataatttaccaagaaaacgaatgcttgattttaaacaatcaccaagtattgtatttccattctcagtgcgcgaggatacctgttgggaaattaagctaagtaaattctacagcataaaaaaagcgaggttagtaccccgctttgaatgttttcacaacggaataatccttattgtgattcgcttcaatttgtgatgtaaatttagaataaaaagagtaaaaaacaataattttaaaaaaaataataaaatggcttcaaaaacaattttaggactcgatttaggaacaacctctattggttgggctttggttcgtgaaggagataatgcagatattttaaagacaggtgtgcgggtgattcctttaacaacagatgaaatccaaaatttcgataaaggaaaatcaattaccactaacgcagacagaacattaaaacgatcaatgcgcagaaatcttcaacggtacaaacaaagaagagaaaatctgatagaaattcttattgaaaaccgtttaatcacgaataccactattttgaccgaagtaggaaatgcttctacttttgaaacctataaactccgggcacaagcggttaatgatcgtgttgaactggatcagtttgctcgtattctattaatgattaacaaaaagaggggctataaaagcagtcgaaaggccaagggagaggatgaagggtctgccattgatgggatgggaattgctaaagacctttatgagagaaatttaacccctggtcaattaattaatgagagactgcaaaaaggcattaaaagcattccagatttctaccgttccgacttacaatctgaatttgatatcatttggaaccatcaaaaacaatattatcctgatatattaaacgaggaattatatcaggaaatacttggaaaatctaaaaccattactgcttccattttacgaaaaaaagggtatgatgggttggaattaaagggcaatttaagcgagaaaaaagtggctcgatattcattacgcgcgaaggctgttaattccaaatgttcattagaagaaatatctgaaattctaccggaaataaataacaacataaatcagtcaagtggttatttaggcgcgatcagcgaccgaagtaaatggctattttttaatcagttaaccgttggacagttcctttatcaacaaattgaatctaacccccatgccattttgaagaatcaagtgttttatcgtcaagattatttagatgaattcaaccgtatttgggaaaaacaacttgaattttatcctgaaattctaacccaagaattgaagcaagagattagggatgtaattattttttatcaacgtaaactaaaatcacaaaaatctctgttgagtttatgtgaattggaaggaaaggttattgaaattgtcgacaatggcatcaaaaagaaaagaaaagttggacctaaagtttgccctaaatcctctccgatttttcaagagttcaaaatttggtcacaattaaacaacattacatacaataacgaaggttcacgaaagtctcaaggaatttctttggaattagaacaaatgcagtttctctatcaagagttgaattggaaagaaaaattaacggcaaatgaagtgatacgtttacttaatctaaaaggctaccaacttaattttaatgagattgaaggaaatcggaccaatgcatcctttatcaaagctttgaatgatttttttgtgaaagaaggacatgatgaattggttttatctaaaatgaattcagccgaattaattgatacgttaaaaaagttatttccaatctatgggattgatgtttctcttttaaatttcgatagcaatttaggcggacagaatattgaaaatcaagccttttataatttttggcatctactgtattcttttgaaggagacaattccaaaagcggaatcgacaagttgaaaactgcccttgaaactaaatttggatttccgttcgaatctaataccccgattacaaatataaaactttcagatgattatgggaacctctccgttcgcgctatgcgtaaaatcctaccttttctaaaggaaggcaatcgctatgatctagcttgtacacttgccggctacaaccattcgcattctgaaactaaagaggatttgtctactaaagttctattggatagacttgaaatcttacctaaaaatgaattaagaaacccggtggttgaaaagattttaaatcaaatgatcaatgtaataaataccattttcgaaacgtatggcaaacctgacgagatacgcattgagatggctcgtgagttgaaaaaaagcgctaaggaacgagaaaatgctaccaaggccatcagacaaattacagatgaacacataaaattaaaacgagaattacaggctgaatttggtttacccaacgtaagccggaatgacttaattcgttacaaattgtatcttgaattaaaagataatggattcaaaacgctttattcaaaccaaccaattgaccgttcgaaattgttcagttcggaatacgacattgagcacatcattccgcaatccaagttgttcgatgattctttttccaataaaacgattgaattacgctcagttaatctaaagaaaggcaatgatactgcgtttgactttattaataaagagtatggtgaagaaggacttaaacagtatgaggcaagagttaaagcacttttcggaaatcaacttggtaaaaaatcaaagtaccgcaagttactcatgagcgaaaccgaaattccgaaggattttatagaaagggaattgagagacactcaatacatagcaaaaaaagcaaaagatattctttctacggtggttcggaatgtttcaactactactgggtccattactgaaaaattaagggatgattggcaattagtggatattctcaaagaattgaattggaacaaatatgataaactaggcatgacggaaactaaagaaaatcgtcatggtcaaaaagtgaatcgtatcgtagactggaccaaaagaaacgaccatcggcaccatgctatggatgccattacggtcgcttttacgaaacgggaatacgtaaagtatttcaataatttgaatgcgaagagcgagaaagatggagaaatttataaaatactgaaaaccgaaacctattttgataaggatcaaaaaaggcgttttaaccccccgatgccattaacccaatttcgatcaagagcgaaggaacatttggaaaacacactcatttcctttaaagccaagaacaaagtttctactaaaaataagaatgcaattaaaacggcgaaaggtaaaataacgactattcaggatacacctaggggacaattacaccttgaaacggtatatgggtcatcgcaatattattcgtcaaaaattgagaaaattggggcaaatttcgatttagaaaaaattaataaagtagcaaactccaagtatcgcaaactattactaaaaagattggaagaaaatgggaatgaccccaagaaagcctttacaggagccaatagtttaagtaaaagacctatattcttaaatgcgttggaaacttacacactgccagaatcggtaaaattagttgagtttgatacccgttatacgataagaaaaccaattacaccggatataaaaattgataaagttatcgacaaaggaattcaactcattttacaagaacgcctcaatcaacacgatggagatgctaaaaaagcattctccaatctcgaggaaaatcccatttacttgaacaaagaaaaaggacttattttaaaacgggttactattcaaggggtcaacaatgccgttgcactacataataaaaaagatcattttggaaaagaagtgcgggatgcaaaaggcaatccaattcctgtagattttgtaaatacaggaaacaaccatcatgtggcgatttataaagatgaaaaaggtaatttacaggaagaggttgtctctttgtttgaggcaattaccagaaaaaatcaaggagtagaaatcatcaaaaaacaacacgaactaggttgggagtttttattcactatgaagcaaaacgagttttttgttttcccaaatgaagaaacgggtttcgatccgtcagaaattgacttattggacccttccaattttgctaaaattagcccaaacttatttagagtacaaaaaattggcaaaggtgattattggttccgtcatcatttggaaacagaacttattgatcgtattgaattgaacggttcatcatacaaaaggattagaaatccaaagtcaatgaatatttcaaaaaaaataagcctaaatcacataggtcgaattgtcaatgtcggtgaattctaaatggtcaaacgcacgcttcattttagcaatcctgcgcatttgtcgtttcaaaatgctcagctgttgattgaactcaaagacgaacttcgcacgtgtaaaaccattcctatcgaggacatcggtgttgttattttagaacatccgcaaatcacgctttccatgaaagttctggatgccttaatcaaagcgaatgtggctattgtgagttgcgatgaccattacatgccgtctggtatatttttaccccttgagggacaccacacccaaaccgaacgcatacgcaaccaattgaatgccagcgaacccttgaaaaaacagttgtggcagcaaaccattaaaatcaaaatcgcaaaccaagccaaggtcttggataaaatcgggttgaacggagcacgattaatggagcattcgcaaaaagtaaaaagtggcgatagcgggaatttagaagcccaagcggccgccttttactggaatcaactgtatggcagtgatttttttcgttcaagaaatcgaagcagtcccaatgcccaattgaactatggctattcgattcttcgttccttggtagcacgcgctttgagcgcctccggtatgtacccatcggtggggattcatcaccgcaataaatacaatgccttttgtttggccgacgatatgatggaaccctaccgccctttcgttgactggatggttttaaatctcaattacccggaggaagaggccggcttaacaaaagaccaaaaaatggaattactgaccattcctcaaatggacgtgcaaataactgacttaaaacgaccgctgtttcatgcggtgagcttaacaacagccagcttgtacaagtgttttgcaggggagattagaaaagtatcgtttccgaattttgaatgaatcacgaacgttttaatgcttatcgcaacatgtgggtcatggtgttatttgatttgccaacggaaactaaaaaagagcgacgcattgcccaacaatttcgtaaaggattacaacaagatggtttcatcatgtttcagttctccatctacatccgattttgccagagtgctgaaaatgcaacggtccacacgaaccgggtaaaagccttgcttccggaaaaagggaaggtgggaattttctccattaccgataaacaatttggccgcatggaaatctttcacggtgtaaaaaaagcgccaagccaaccggtaccccaacagttggaattattttaaggtattttaagccctggtcacccttgtttctgcggtcattttttaatgctaaaaaacggctaaaaccctttaatttattaggccataagcgacgcggttgtcgcttatcgacctaaaagtacaaattgaaagcgaatcacaaccaat
